United States Patent Application Publication US 2015/0052636 A1 - sequence listing, part 31

SEQ ID NO: 108813 - DNA, 529 bp, Aquilegia coerulea
  Intron number 1 from transcript AcoGoldSmith_v1.010916m (l ocus AcoGoldSmith_v1.010916m.g) derived from phytozome v7. 0 (chr-ID scaffold_27; pos 1763530 to 1764058 reverse stra nd)
gcactaaaggccatcacgtctctttgttttttaaggttctttcttttttgtttgtttcatgtaatttgattatgttgtgtttttaatttgcttagttgatttaaggtttcaaatccattagatttaattgttattgtttagtaaggttggttttcagttggaatcttattgtttgagcaagtaaatgtgttgtttttatattttttttttttaatttttttataactaatatggatatttgaaagagtatttgggattttaggtagcacattgcaaattacaaatgttgttcttgattataggacatgaatactttgaacattatgtgactgtcttcttttcttttcgcgtatgctttggtttccagtgttattaatttaggggtttttctttgcaaatgttatctacatgaaggcattagattatttgtgcatcatattgtaacatacatgatacaggtctcatgggttgtatggttttgtgtaggtagtttgaaatttaggagttgttgaactaagattgttttggt

SEQ ID NO: 108814 - DNA, 1004 bp, Aquilegia coerulea
  Intron number 2 from transcript AcoGoldSmith_v1.008831m (l ocus AcoGoldSmith_v1.008831m.g) derived from phytozome v7. 0 (chr-ID scaffold_9; pos 161884 to 162887)
gctgcgccaaagtcacatatcagaacccaaaggtaaatatgaatttacctacttctcattcctctgacttgtaactttctctgtttcaactgaaaatgttgtagttatatgatatatcattaagtttaaggaagtatttgtgatgggtttgcttaaggaagagtaaaatgtaggatgacattattattaccctaaaaatccattccaagcttcaaatttgtttcaggccatcattttaaccacactaaaagtattaattagctggaccgacgcctggacaacacctgctgatgtagattgaaatattcatttagtgtattccatcgctatgctgtaggagctacctttgtatagtagtatttttgcgaggatgatttcttgacttctaatatgtagaaacttatttgtatgtaagattatgatcatacgaaaatggaataatattgtaagtgttgatgatgatctcgaatggtttaagcaaataatctgtttggatatcaaataattgcttgggaagtttcagaattgcttgataatcattatgattaacatgctgatcattgtggcctctgttcgattctgttataagtaacagatagggtctcctatattagcacccaagaggagtacagtatatgttgtttagattggccccctttagaaccatcatgccagtctgacagaatattggtaggaaaatttctttgaacaaattcacaaagtttaaaaattctattgtcatttgggtaaaataaaaagcacgacatggtttatttatcacatagacaaattacaaacgatttatatccgaggaaaaaaatttcttttgcaccaccttgttggattatgcaatctcagacaacttgcgaagaatttttcctcaagtactggatttgtttgtatgtaaaatcattagctgtgcattttattctctttatgaagagtttatttcagttgtcttcatttgggttcactcctccaggttactggttgcctggttgagc

SEQ ID NO: 108815 - DNA, 681 bp, Aquilegia coerulea
  Intron number 1 from transcript AcoGoldSmith_v1.017178m (l ocus AcoGoldSmith_v1.017178m.g) derived from phytozome v7. 0 (chr-ID scaffold_18; pos 3633408 to 3634088 reverse stra nd)
gttacctcacattcatctttggacacaaaaatgtaacccacttatcttcttcttcttcttgttcttcttactacatggttacaaactaatcttagaaaagaactcagaaatatgcatgcatcaattcatattatgtgcttatgtatttgaaacctatgtttgatgtttgaataagctggctggatcaatctgaaaatgtaagtagcttgctgtttggaaatcaagttaatcttgtttcctattagtcaaagtatatcactggtatatatgatcatatcgaatgtgtcgtacgtcattcaattgatttcaaatgagcttgaagttattattttatggcatttgaatgattcaaaaacgactagtctaaaacgtatatgctacgcagaagggacgagccattataaattttaaaatcatgcaaataaaagaaaaaaagtctttggatttaatttacaagtgaaggtggcagtgtgtggcatacataattttgtcaaactatcaaattcattaattcataagaccaaaattcaattaaattgattgtgacttgcattaattaattagaataaaaataaatatattcattaattgttgatgatcagttaagaaataaggtcgtcgttgaattgaatgtgatcatatacaggaagagtgttcttgtactggtttggtccatcgcca

SEQ ID NO: 108816 - DNA, 325 bp, Aquilegia coerulea
  Intron number 1 from transcript AcoGoldSmith_v1.014571m (l ocus AcoGoldSmith_v1.014571m.g) derived from phytozome v7. 0 (chr-ID scaffold_37; pos 203135 to 203459)
aacccttctgggtggtgccagactgcaaaccacaggtaatttgttccccagtttcagttcttaattatttcctctgttatagtactaaatatcatttgtgtgtgtgtgtgagtggaggtgggtgggtggtggtggttgtatttgattgatttgggtttgtactttctttgatcttcttatttactgtaatgagtatactcggcatggctgcatctatgaattggtttttagaactaaataggataaggtgtgatagaatgcttaaaaagatattgttctaattgtgctttttcatttaaattttcaggtgaaaaaagaagtgaca

SEQ ID NO: 108817 - DNA, 599 bp, Aquilegia coerulea
  Intron number 1 from transcript AcoGoldSmith_v1.008484m (l ocus AcoGoldSmith_v1.008484m.g) derived from phytozome v7. 0 (chr-ID scaffold_21; pos 3755336 to 3755934)
aaagaagacccattacagtgtgccctcttttgaattgagttattttagtcaagtaaatcttaatttttacattagatcaggggctactaggtagcatgacggatttcatgtaagccgattgttttattgccaattatgaggccttactggaggaccttaaggaaagtggaagaagggtctcacccctgcaccgtggagaaatttacttctggtgtttttttttattagttcttattggtgttcattttaatgattggtgctgttgggcttattcataattggtgtgaggaccctccataacctcaaatttataccaatatacatgttgttttcgtaacaaccctgtgtggctgtgtagttgtatacttgtatgcttctttattttttctttcttttcttttattgttttagtttttatatattaatttgattgtggttcattcccttgatcgcattatttgtatgtctgatgctggaatatgataagtgaaatagattaaaaacaaaatgtttctcttcatgtcagaatattgtagttcagtttatggacataattttttccagcagatcctcagcactcgtgcgcgtaaaggcgtgaa

SEQ ID NO: 108818 - DNA, 587 bp, Aquilegia coerulea
  Intron number 1 from transcript AcoGoldSmith_v1.000076m (l ocus AcoGoldSmith_v1.000076m.g) derived from phytozome v7. 0 (chr-ID scaffold_9; pos 6095953 to 6096539)
tctgaggtacgcttaccacattttcttactcaagtggacacatatcacacacacacacatcatagattgtaacagacatgggcacaagtcatggaacttaaatatttaggcatagaagttagcagagctggttttttcttcttcaatcatccacataagagaatatactgggtctaaggctgacttgattccttaatcttaaacactattatcttttattatggcccttgatcttcaatcatcatcatctaaaaaacccctcttaattgtcttgtgtaacttttgttgtatgtcaagacaacttttggtatgctggtggagcaagtatgcatgtacatgacgtttttttatccccataaagtcattagaagtgttgtttcccctccagacatggtttacctttctatttatcaacatttgatgtcattaatagagtagaagaaacaaattgctgtttgttataatatttatgtacaactatgttatgagatgtgtgtatctgcgtatatgtgacgtatgtattgttataattggctaaaattaacatggttatgtcattggcaggcgcctcgattggaacttacttg

SEQ ID NO: 108819 - DNA, 764 bp, Aquilegia coerulea
  Intron number 3 from transcript AcoGoldSmith_v1.007026m (l ocus AcoGoldSmith_v1.007026m.g) derived from phytozome v7. 0 (chr-ID scaffold_37; pos 2370197 to 2370960)
agttaaaagtaaaggaggagtacaacagttacagagtatgccttttccttgtgcctttcttcttttcccattttcagatttatacaggattttctactgccttccatttttttactatacatatatttctatttcaattttcatgcttttaaaacttcatgttgcatagttgatatcccatacccttttttctttatgatgaaattttttggcactcatgcattttatacttcatatataataatggatcaaatttaaactgtacgaccttaaaaatacaaccacagaaaacatttcgtagctgtcaccaatatattttagctaaactagtttggttttaagaaggtgtcaatggtagctgtacaacttgttttccttatagccttctctctctgcaatttctcgctgaattttttttttttatagaaacaacaacctagaagccaataattgtgatgcagacctcccatcttctaagggtagcagcttagatatgaaaaagaaaaattatttcactaagatggtcgtgtttgagatcacatgtcactgtcagataaaccaaatttttatgctcttttgaaattgtactaagaatctaatatgtgagtgtttgaggattgggtttctttaggaggcttgaagtttttttgtttttttataatattcacatcttgtaaggttctctcgttgaaactaaatatattgacgtataatatcacctcttaacaggatagaacagcgtttctgtttcttcttttcccatc

SEQ ID NO: 108820 - DNA, 294 bp, Aquilegia coerulea
  Intron number 1 from transcript AcoGoldSmith_v1.002911m (l ocus AcoGoldSmith_v1.002911m.g) derived from phytozome v7. 0 (chr-ID scaffold_15; pos 2347449 to 2347742 reverse stra nd)
actaaggattactatcaacatttcgttttcagcttgtaagatgacttcttactctgtttcttcttgattttttttttcttttataattattgatcttgttgtttgaaatgttcttcacattagaatctaatctgttaatctgttaatgctttgtttttcaattttctacattttgattcaagattgattaagatcaatttgtttgaaaccctagacattgtgatattgattaagattcttttattatatttttgatcagatttgattgaagagagatagagatagagagagaga

SEQ ID NO: 108821 - DNA, 684 bp, Aquilegia coerulea
  Intron number 1 from transcript AcoGoldSmith_v1.007717m (l ocus AcoGoldSmith_v1.007717m.g) derived from phytozome v7. 0 (chr-ID scaffold_7; pos 369587 to 370270 reverse strand)
attcaatagtagatcatatcattacttataattacaatccaagacattttcaagatataccttttttaattctctttcttttattcattctctctactttttcttttggcatttttgcaattgtccatcataatcctaatgcttctaatgtttcttcttttgtttatcattataatacctcttcttgtgttcaaatccaatcccaaaatgttcatcaatttgatttaatttctttagtggcatctgcatctgcatctttgtcgtcgtcgtggtggaattatgttcttaaggatcttatttggactcttgtaattactttgttactcagtggaccttttgtgttgggacttctttggttacttaggcattataccaaacaaattgtctacggtttgctacccttttttattttgatcccagcttttattaatgtgtattggtttgttgcttgtactcttagctccaattgtagtgatgtttttcctttggtttatcgaattattgttctcgtattcgtgtttttgattattggagtgattgtgtggatactagtggcaaattggaataggattgagttgactgtgaggataattggggttgcttccaatgcacttactagcaacttaggcttgtttgttgtgctcccgagtttgacactgctcttttggtttactttgtacctat

SEQ ID NO: 108822 - DNA, 541 bp, Aquilegia coerulea
  Intron number 1 from transcript AcoGoldSmith_v1.000157m (l ocus AcoGoldSmith_v1.000157m.g) derived from phytozome v7. 0 (chr-ID scaffold_9; pos 3511805 to 3512345)
tcgttacaaaggaactaaacttagttgcggagaaggtcaattctatgattctatctctctcactctcactctactgaacatttttttatttttaagatttgggtaattgaattttcactctaatcctgagtttgtttttttttttactaatttgtgcacaaagatggaatttgtattggtttttattagaaaatttcactctaatcctgaggttttctattgcgggctttttcaaattcttctttatatattgtttccataatcttcattgactttctgaaaaatcaataaatgtttctctgcattgtaaaatttatgaatactgttacttgtattcattagagtagtttctcataaatgcctttttaagtattttattttagtttgaatacttctctttgaaataccctttgtttgatctctttgtaagtattttgaaaatgattttattatttctttgactacttgataaattttgtattcaaaacctttaattatgaatgcaggtggttgtggagcttgtgtcgttcttctgtcgaag

SEQ ID NO: 108823 - DNA, 620 bp, Aquilegia coerulea
  Intron number 3 from transcript AcoGoldSmith_v1.022043m (l ocus AcoGoldSmith_v1.022043m.g) derived from phytozome v7. 0 (chr-ID scaffold_63; pos 292730 to 293349)
acttgtatggacattggttgtgtttatctacatgatctttttaataaacaagtggaaaaagagggcgccttagtaaataggaaactgaagaagcggaaattgaggtacaaaactccatcttgttattttgaatctgtgtcctacctagtgattgtacttcaattggtcaagctacttttctcgaagatttgaactctgatctcattaagtattttgtatgcaggaccagggtgggtttgatcttgctagtttgcttgaacatgaaaaaagtctcccaatataccacatgaatgtataattcaggtaagaagtttgtacatgttcatatacattggcttgtggaaacgtttctaagtattacatctgttacacttaatgtaaactagtacttatgtcgagtcacaccggaatatttcaggtaagtacttatgctggtctgttcatatttaaaagttgatttttattgatatactttaccatatgatatatacattgttcttagagaaagattattcagattttagttgtataatcttgtttgatgccatactgaatttctttattctagtttttgaactcttgcagtttttcttcactttaattatctttcatttttgcag

SEQ ID NO: 108824 - DNA, 523 bp, Aquilegia coerulea
  Intron number 2 from transcript AcoGoldSmith_v1.007274m (l ocus AcoGoldSmith_v1.007274m.g) derived from phytozome v7. 0 (chr-ID scaffold_12; pos 3290361 to 3290883 reverse stra nd)
aaaagtatgattctaattcattcacattttttggtacttttagattggaatttttatcttaatttatgaaacaatgagtactcatttgcttttgaaagcagaatttctatttgaatgtgttaggttgcaatttggtctcctttgcaagacacaatggacccactgatttcacaatgtttggtcccaacttggtacttttgcactaaaatttttttattcagattggtgatttttgatcattaaagtcgaaaaatgttttggggtagacttataaatctagcctatacaaagccagtggatgttaatttgagtactaaaatagtaccccttagggtacatttgtgtatcgtttagtttcctcgaagaacaaaaccaaatagcacatgagtctgaattttgttgcaacccaactcttggcagtctgtactatgtatgtagtacttgttacacagaaaaaaaaatgtatgaaagaaaattttattaagtattatgaggtactatttttgctgtttgtggagtgcag

SEQ ID NO: 108825 - DNA, 958 bp, Aquilegia coerulea
  Intron number 1 from transcript AcoGoldSmith_v1.003482m (l ocus AcoGoldSmith_v1.003482m.g) derived from phytozome v7. 0 (chr-ID scaffold_10; pos 1997476 to 1998433)
cttcttgttcctgttgcctttgcttttcttggttggtaagtttttcttactcttcctctatgtatttctctgttccattgttcatgtttatctttctggggatatggattagggtttaagctttttattttagtgattcaatccaatggtggagaaagcaaaactatggtttaaacattgaaatattcaaagatgctcatagtgctttcttgggaatggagttgaaacattgaaatattcaaagtttcttcctttaatggaaatgggtcttctttcccttttttaatatattgaatttgaacttttttatttagcaatctagtgttactgttactgttattatgctaatttgtttgtaaaaaattcttctgtcgtattttgaaatgcttagataaaaaaaatactaatgcttaggttgaaagtggggttgtttgtataatgtaatgacaatgtctagctgttgatagaaagtgaatgattcacgggtatccgatgaatacaggtcccccacaacttgaatgttctggagatacatttgtatcattgtatgtgatgaattcattttattttaatagcactgtactttgggtactatgtgaaataagtgctcttggaacgaaaaggaaaattttagaatgcttttcattagaatcccatgtgaacaactactgtactttgggccaaaccacataaaagtcgaaaccttgtttaaagtttaatcggaaagctggttatttctttgtaagtaatacattcagaaacacattacatttcccatgaactttagacataggcaaaagtgattagatgaagcatcagggaagaacttgttttagtttagggagtggtgcaagcatttaccagaattgtagacatatgtatgttactatgttgtaacactagacatctgtgaataaatgcaggagctgggggataatttccttgaccatagcctact

SEQ ID NO: 108826 - DNA, 954 bp, Aquilegia coerulea
  Intron number 1 from transcript AcoGoldSmith_v1.025862m (l ocus AcoGoldSmith_v1.025862m.g) derived from phytozome v7. 0 (chr-ID scaffold_54; pos 497544 to 498497)
gattgtatgtattatttgtataattgactttagctatagatactgaaaataaaaataaaattaaacacaaaaaaacttgaatttcaattttttctttgttgaaaaagagagaaaaaacaaagtgttcattgatgaaaatatgagagtagagaggtgatagaagtttgatgataagctagaactgattgataacagagagagacgtatgagacagatagagttgtatgatagaatctatactctctattaaagttaggcatgcccttaagcaaatattctctctctaaattatagaaaaattgatgctctaattgaagagaatttgattaaaatttagaattgaaagtttagaacttttacgtaatagttactccaaattaaatatttaaaattaaccaatataaaataaacactaatttgtaaacatcaaaagttgatccatatgaaaaaactgatgctttaattgaagagaattttgttaaaccaagattaaaagattatttattaaaatcatataactaaaatttgtccaaaatatgttcaaaactcaaaaagaagtaaacactataacggctaaatcaatatgtttacaaaccaaatcaattgaacatcttatcgaaaatattgatattttgtcaaaagttaaaattaaatcttttattaaaaaaaataaaaatatagtaacataaacaaaataatgtcaagaatttaattctactttcaatcaatttcaatagcaaaaatcaaaatcaaattataacatgtaaaataacacccgtgtattgcatgggttaaataacctaatctctataatctcattaaaacccaatctctatactctcgtgtgcagatcttgacccttgtttttctttttacaagttttataagcgctggttatgatatagatcgtacactttatatttgatgcaggttcttcaccggtggttttcttgc

SEQ ID NO: 108827 - DNA, 868 bp, Aquilegia coerulea
  Intron number 1 from transcript AcoGoldSmith_v1.014980m (l ocus AcoGoldSmith_v1.014980m.g) derived from phytozome v7. 0 (chr-ID scaffold_28; pos 94066 to 94933)
tgcttatattggtatcatcatcttgccctttataggtaaaaaattttcttctcttttctcttttttttttctgtaaaaattttgtattttttttttttgtactgatttagtgatttttatgatgggtttttgttcaagtttggatttttgttgtgtttgaaaaattcccatttagataaagttttgttttttttttttcaataaaatttctcattttttccaattttgaactggttttagtgatttttatggtgaatttttgttcaagtttggaacttttttgtgtttgagaatttcccattttgagccgctttgttctttgtatttgtagcaacatcttgccctttataggtaaatgttttcgctttttttccataaaatttgacctttttaatcaattttgaactgtttttattgattgttttggtgggatttcgttgaagtttggatttttttgttttgtgtttgagaatttcccaaattgagctggtttttgttatttttttttattttgaaaattttcccagttttgagtttttttttttttttttttgtgtgtgatgactttgaggctagtttatgtttttttctttttttatcaataaaattttattgataagctcaacgaattacacaaaagtagaggacaaacgcgctacaaactgcgcggcaagtcctttttttatcaattttgagttttttttttggaatttttgttttcattgatgatttcaatggtataagttgttcaagtttggaacttttgtaggtaaaatttggtttaaactttatcttcggaacaaatttgatatgatgtttatgtgttattgcagttttgatccctctgtcctgctattatcaaagacat

SEQ ID NO: 108828 - DNA, 884 bp, Aquilegia coerulea
  Intron number 1 from transcript AcoGoldSmith_v1.015432m (l ocus AcoGoldSmith_v1.015432m.g) derived from phytozome v7. 0 (chr-ID scaffold_9; pos 1289396 to 1290279)
actagagtagatactacacttcatccaacacaatcgtaagtcttccctacattttcaatttgaagaaagaaaatatgttttgtattctgtaaaactttgctgagatgtgtatagtattttactttactttttacaacacctgaaaatagtatgctccaaattttagtatgcgtgttttctaatatttcggtgcaattgtggcattatcagagcttaaattttggtccaatttaatgtacatttttgtagtataaatatgaatctcttctactcttttttccccctcacaactaactcatctatgtgtatcactctcattttctttggtttgtttcatatccttaattatgccttggtccaggagtctagccgacacctttccctctcaccatgtaatccaaataatagtagaaagtttggagttggaggtggatgtaaaacataaactctctccaaggttccaccgtgttttacactggatggactggtgaattagttaaattgtgtacattgggtaacaattggaaatcagtacaatacccgtttggagaatattattcaagttccactatcgcattgcattacacacattatttcctttcgaaaagaataaaaataataaaatacaaacacacacacacacacacacacacatgttgcgaatactggcaacacgtttttttgtttttaaaagccagttgaagaggtattttcgcaaatagatgtgcaaactgcgtttgcatagcttatgggagatgctcttaaaactacttaataatcaaactgctactggatgcatagcatatttttgtttgttgcataatatcacttctgtttttgttttgtctgagatattattggtttctaggtatattcataaaggg

SEQ ID NO: 108829 - DNA, 1021 bp, Aquilegia coerulea
  Intron number 1 from transcript AcoGoldSmith_v1.010920m (l ocus AcoGoldSmith_v1.010920m.g) derived from phytozome v7. 0 (chr-ID scaffold_102; pos 109071 to 110091 reverse stran d)
agtgtgtttatcttcttcttcatccatccaatcaggtaattttattttattttatttaagttgtgtgtttaatattcattttagtggagttttttttttaaaaaaatttatttattaatatattgtattaaaataggtttgtttttttttttttaatttcttgtgtggaacaaatatttggaaaattaattttgatatgggtaaaaatgaacataatatttatttagttgtttgttggagaaagactaaagcatgacaatgattatgactagaatccttctgcgggaaggctttgcgctgacagttgtataaaggatatggaatatgttccttgattagaattcatttgtagatatttatgtagtatacgtatatgaaagcaatctgaagttctgaacacaaatttgttggcatagtgacatgaagtagcccatttgttggtagttttacagtctaaagtaaggttatatgatgcagaagtcagaagagtgacttccaaggtggtggtctttttttcgaactgttgatgtttaactattgacaacattgattttgaaagggaagctcattacaaacaattgaataagaactgtagaacatgtatatattagatggttgggcatttcgttcctcttgatgtggaatacttcttctgttattattttgagttctgacagaaaataaatagccgtggaattacaatccccactttcaaccttgtgaggacactttcaggaaaaaactgtgtcattagattggctaagcatttacatcaaagcttcaatatggtcgtgagtgttttgtggttatagattttatatgatgtagtatttcactgagaggttgttgtatctcgctaaattagcaggattttattcctggaaaaggctttttttttttttgtttccttgtatcctttctctctttctgttgtccaaagttgaatgttttggaatgccttttctgatacaaaatgtgttatgtaggtgttggaggctagtgctcattgcagcagacattt

SEQ ID NO: 108830 - DNA, 902 bp, Aquilegia coerulea
  Intron number 1 from transcript AcoGoldSmith_v1.012861m (l ocus AcoGoldSmith_v1.012861m.g) derived from phytozome v7. 0 (chr-ID scaffold_1; pos 8699128 to 8700029)
atctggtaaatcctttttgtctttttaattcttagtttctatttctttgatcttttgtttggtcgaaacgtatgcttaagctcaagtaacacctctgttgtgatttatgtttaacaacgacaattacattaaatgactctgctgttctcttgcattatttattaagcactcatgcctgatgcctttgacatttctgtaaaaacgtccaaacatatgctgtagcaccccaatgttttaccttcaacacactcaattcatgcttttcatgtttttttcactaattattttcacacaaaagtatcaaactggtgttatacatagtctttagtgggagtgtccaactatacccatttctctcgattcgagctcatggatcgaaagtgacatattggatatataatggaaaaaaaagaggctctaccacatctgcaacaatcttagaaaatagaaactcactttttggggacactcgataaaaactccaatgttaattataaaatgaattgcaacttcacatctagcgtgcaacgattgatttcatcacttatcttctctaggaaaatccatcttagtatattttgcttaatgcacaactacacatgcatcttttaaagaaaagggtttttgcttcacactcgaaggcacaggctaggcgctgacgcgagccttagatttagggtgcctagccgccccaaggagagtacctaggtgctgcctctatagccgtgttaagctttctcacttatgttcatttcatccccatagcactcttcttcttcttctctgcaaatgacatcatttactggcttgttgaaaaatattttctacatatgtgtaattcataattcatattcaattgtgcattagcatactttaagatgagactcctatcaattctcagg

SEQ ID NO: 108831 - DNA, 713 bp, Aquilegia coerulea
  Intron number 1 from transcript AcoGoldSmith_v1.014555m (l ocus AcoGoldSmith_v1.014555m.g) derived from phytozome v7. 0 (chr-ID scaffold_10; pos 2193328 to 2194040 reverse stra nd)
gtggtcatgaactagagtgatagagtctaaaagcagagaagatatgtgggctttattcaagtccacccattgtgtgggttattatttacccaagcccaatttgtaaaagtccataatgaagaaccagtcaaaacgtgtgaaatcactatcacaactcgtgtctttgagaaagaaagtcttaaaagtctttcaatctgacgtgtcaaccaagacaaacagaacttcaaaacagtcaacactgtctttatttcaaacaactttcttctttacccgcggaaagagaagagaaaaaaaaagtcaaaaacctgatcaacacttcccttttctttacagtttgaaactgaaagcaacttcttcttcttcttcttcttcttcctcttatctggtaagtcagtcatcttccttctctttttatttctaattgttgttaaaaaaaaaaaaaaaaacagagttagttcatcttactatagtttttttttgttcagaaataagttttaatggtttgggtacttttgtaatgaagaaaacaagctatttagtagagctagagttacttttctttgagtgaaaaacacaaggttttctttcttttgattttagggatttttgcaaggagaatagagatattaaggttttacgtaaaatgttgcggggtggggatttgattagtaagaatgaagatgaaattgagtactcatttgcaagtgagtata

SEQ ID NO: 108832 - DNA, 714 bp, Aquilegia coerulea
  Intron number 1 from transcript AcoGoldSmith_v1.017707m (l ocus AcoGoldSmith_v1.017707m.g) derived from phytozome v7. 0 (chr-ID scaffold_54; pos 215254 to 215967 reverse strand )
ggaaaggtttttctcgcaaagacctcagtcatcaggtgtgttcttaactccggtttctcattagatgtactaatatccaaattccattaataatcttacacttctaagcggttttttgctgtgtatatatgtctgttttcccatgtctaatatctttaggttactttcagtctgctaaaagtgcttaaagttttaggcatgacatgtgggtactgttagctttcttctttgtattgtatgctatttgaatttgttataaagtattcagttatactgaaagaataacattacaaacatcacgcaagacgtcctattaatcactctcagaaagctttctcaagttctccaatcttcaggtgcgatagcatagatagcccgagtaagaacgaagaggcggtggcccaaagagcccaagacagaagtcggatagagagctttcatgttctcgaaactggattttgttgcatattatgtatatcagtatacagttttttcaatgaaagtttctcatccagtgttattatagcaggaatcatataatgaaggattgttttttttaaagtatgaatgtagttcagtttttagatctcagcatgaccgcacctgaatatctgggcgattaattaacaatatgtctgaaaataactatagaactcagtttctgatgcatatttgtgtttaaatttcagctaggtggccgaattttctttgtgt

SEQ ID NO: 108833 - DNA, 564 bp, Aquilegia coerulea
  Intron number 1 from transcript AcoGoldSmith_v1.005684m (l ocus AcoGoldSmith_v1.005684m.g) derived from phytozome v7. 0 (chr-ID scaffold_10; pos 3644684 to 3645247 reverse stra nd)
cataacaactcatcttggaaccaaaacaccctcttgtaagttatactactaattagctcacttcaagaaagaaaattaaatcctctttcttactctatctttctctcttcccttgtacttgtagatatggaaacttgcatattctctattttatgagtgaatttggattctacttactgttttctagttcttttaattaagttttgacaaaatttatgttgtttggcaatttagtgaaccatcaagaagctaagattcttgcaatttggaatctctaattctctttgtctaattatatacaattttgattttgtttcttgctacttcaaaatgctctctatttggattttacttgttggtttcatagtgaccagggaggtggagacctacatataggattaactactacttaattttatggtcagtcttagagtaatctatgcattcacaccaaagattaatgacattttctatagggtttttacttgttattatccattataatggtctgaatattgttaactgattatacatgcaggaatagtgctggtaacttgaatctaa

SEQ ID NO: 108834 - DNA, 1009 bp, Aquilegia coerulea
  Intron number 1 from transcript AcoGoldSmith_v1.024803m (l ocus AcoGoldSmith_v1.024803m.g) derived from phytozome v7. 0 (chr-ID scaffold_9; pos 1328687 to 1329695)
tgcgcggaagtaagtttaactctctacttattagcatattcaacattgaaataaagaaggctatttattaggccttgcttggttcgcttcattacagtgcatgtatcaaacatatgcaaatgcatttagttgcaagatagttcattaatacttgtttggctagatgcttccaaaatcttagacagtttttttctcaggcttcgtagatttcttctgaatcagcttttgtttacagtttattccattggatggacttatgggtttttttttgtgttttttttttttttcaaatcagagaagttggtgtcgatgtagttttaagttatattggtgcattttttcttcgtttgatatttgccaaattaactgaaatagttcacatttctgtgggaaaacacttttctgaaatatgcttattgtttgagttcagtatataggctggatggaagagtcaaatggaattttgttgatatagcctgttcatctttttcttaggctagaggtcttttaggtattaagtgattatggtcctgaaacagaaaatcacttcacttattctcaatagaagaaaaagattgccatttatttatagctctttacaaaatagaagataggaaattaatctgtttgtcaggacttatttacaagaggagacgggtgaaaagaagcaaaatttccctttggagcctaattagagtcatagagacggacaagggtgttttgtttcaaacatgtaacactgtttgttgctggttggtgttacataacctatatatgccgtgtaggtggttgtttctgtttgcatctgattgtattatgcatcttggaaccattctcttagacatattcatcagaaaatagattgcttcctaatgtagcaaaccaagcattgtgagtacgcacagtcgcacatgacacttttgttgtttagtagaaaaatttggacgatatttttatcatgattcctttgcatatctgttgcagattattgagcagtttcagaagtgtc

SEQ ID NO: 108835 - DNA, 587 bp, Aquilegia coerulea
  Intron number 1 from transcript AcoGoldSmith_v1.011284m (l ocus AcoGoldSmith_v1.011284m.g) derived from phytozome v7. 0 (chr-ID scaffold_15; pos 1273742 to 1274328)
tcaatcaagctttcaacaaacaaacaaataataaggtgattcgatttgttattctttttctttaaaccctaatttggttctttagtaatgtcagtaattgttatgtgttgttgttgttgcgtttctttcacttttgaattaatgagaaaaatggttgaaatcaatttcatttctaattaacatgtgtttgctaactcttaagtcacaattgaagttctgatgtcaagttgagaaacttcagaattaagtaatttctttttcatttatatattattatacatacacttgattgatcttcactaatgtttaacagaacctacatatatacaaataagctgagtattattagtaatatcatatttgcatttacagattaatcttaggtatacaaagtggattgagctatatactttgcccatcatttgtttcttttccagttttcccaagcaatcagtggagttatagcaagaaatgttgtttcttacctagttaagtattgaaatttctcttacaaaaagaggtttgtgaaacattttttttttttttttgaagaaattgcaaaagcctgtataattctagacattgca

SEQ ID NO: 108836 - DNA, 810 bp, Aquilegia coerulea
  Intron number 1 from transcript AcoGoldSmith_v1.010839m (l ocus AcoGoldSmith_v1.010839m.g) derived from phytozome v7. 0 (chr-ID scaffold_27; pos 3016108 to 3016917 reverse stra nd)
ctctttgctatcttgcttgcttccctccttgatctgtaagtctaatggtttctgtttctcatttacatatgttacgctttattatgtacttgatttgatgagattttgttggtaggctttagatttggtgttattgatatgtttctgtgttgtgttggttgatctactgagatttggggtaattttcttagttatattgggatatgtttttttatttttcagatcgaattaagattgcaattgttttgaattatttttaatgagatcagcttgtaaatctgtaaaatttgtgcttatgatgttttgcatcataattgtttgatgcaatgggtctgtgagttaagttaattattttacacatgagcaatgtagtgaagtaccgaagttgggtgatggttagatttgagaaatatgtaaagcattgtaatgttgtttgttgagtgtattttactaaaatgattgttttgaaagaatctttagaaactttgtcctagactaatgttttatttgtagaattacattcatttttgagtttacttgattagggaagaaaaccccattagtggaatagtggttcgttggtttgccatagcagatgaatgcaggatttttttttttttagaaattttgaagttcttaatgtgtagtgtctattgtgggtttcacttagattagtagaatgcactttttccgtgttgatgaggatagtagtcttcttatttttggatctcagtttctttttaaatgacgcgacgatgatttattattttttttttttgaggggtcagtggttgccaaacaaataaatat

SEQ ID NO: 108837 - DNA, 1005 bp, Aquilegia coerulea
  Intron number 2 from transcript AcoGoldSmith_v1.011155m (l ocus AcoGoldSmith_v1.011155m.g) derived from phytozome v7. 0 (chr-ID scaffold_37; pos 1269732 to 1270736 reverse stra nd)
gggttcattcttttactggattgaattggtaaggactctcttcagattcttcagtagaatacttcagcgagtgcatatttcttctgatgtttcctagcagtatctttaggtggtacatattgacagccaccttggtcttgttgggtaattttacccatttgaagtgcttgatgcattgttggagtgaacctgtctttttaaacttcttgttttttccttatcatcagagttattcatagatctgcgatagggactaattacactgccaaataatgtattcagtattgatcactgaaacttctataacgggtgacttgcatatacatgacaacttaatgcaagtagtttaggttccaacttccaaatttattaatttgtaaatggcacgaagtatttgagaatgtaactggttcattttttatttattaacgaaacggagtaaggacctctgcaacaaccctccttgccaaccgggaatttttttttttttaatttgtattgttaggaatcatacattggaagtagtttatgatattgtttaacaaatgatatctacttgtggtatttttctatctaactcatactatgcgagatgaacggaaatcatctcttttgatctagttgatccattgacatagtcgtggacttgttattttaagcactctcttatgtgattgcttgttttagttggactcgtgaaccaagttatatttgatccttgcgcaagttggtgaatagttgtggccacttgattggcatcataatgattttgttaaacagttaaaatttgtctaaattaagatctttagtgccatcacaagttcacaactcattggcggcgatacagtggctacaaatttgtatgaccatcaccatacaaacagctagtgattcacaactttttaagtttctgatcagctagtgttttttatccttttttattagttttaacacaatttctcttttccaggtgggcatcaatagttttaaccaccatcttgattc

SEQ ID NO: 108838 - DNA, 435 bp, Aquilegia coerulea
  Intron number 1 from transcript AcoGoldSmith_v1.011155m (l ocus AcoGoldSmith_v1.011155m.g) derived from phytozome v7. 0 (chr-ID scaffold_37; pos 1271173 to 1271607 reverse stra nd)
ctctctggtggagaataggaaggaagaaagtaaaggtaatctctctctctctctctctctctctctctctctctctctctctctctataaatctaaacttttttttttttttgtgtttttttcatttctagttgaaatcaatcgtattaactatataaactcagtatttagggtttaagttggtaattatttattgcatttctatgtttaattcttcattttgtgaataaaaagcaatttaatattgttgaaactgtttagttaatagagtagtagttaggtaacgttcaatgatattatgatttatttaaagaaatggattgggagagaataaatttgtttaaagtttcaatttttacaattggatattgaaattgttatgattttgattaatttttatggtttattacatgtttgagcagatactatagtgag

SEQ ID NO: 108839 - DNA, 812 bp, Aquilegia coerulea
  Intron number 4 from transcript AcoGoldSmith_v1.007941m (l ocus AcoGoldSmith_v1.007941m.g) derived from phytozome v7. 0 (chr-ID scaffold_10; pos 3776043 to 3776854)
gtactctcattgctcttctatacaagggaaaaccggtatgcttacttatataagatttacatccaaatgaatagcatgaaattagaaaacttctttgtattcacatattatgctgatttatggaaatgttatctctacttgtgattccctcaagcatcttgtgaacccttaaaaacaaaactgtaaaaggtgttttttactttacaggttttctatctatatcctctcttgctatagttttagattcagcaaaagtttaaatgttttcatagaagcaatggttgttttgagagttctggttcccacttccaacctacacaagtttgcttaggtttggcgtccattgaaaatacgataaaggacccttcgaagctatatgagtggatgctcttgtgatgcatcgatatcaatgtcaacttttatccaacctagagttgagttaaattgtgacgttattaggaaactagcatgacttttgatgagttggaatgcctatgatcccattattccccttttttcctatttcttgttgtcgtttctgcaattcttgatcaatgatttctatgatgatcatcagttagtgtagatttgttgagtgtggttgttagtcataatatgtttcacttgtagtggaaaggatcgagtcttcacatgactaagtgtaatctgcacagaattttgattagtacattatgttctgtgatgtttttgggagaactttctgctaacaatggttaagactgaagcaccgtcataatagagtccatctcttatcagatcgttggcatcattgatcaacctgttttaaggga

SEQ ID NO: 108840 - DNA, 696 bp, Aquilegia coerulea
  Intron number 1 from transcript AcoGoldSmith_v1.026298m (l ocus AcoGoldSmith_v1.026298m.g) derived from phytozome v7. 0 (chr-ID scaffold_51; pos 1422613 to 1423308 reverse stra nd)
aacttagtgatccagatatcaaatctttgctaaaggtatgtaacactgttcttgcatcactttcacttagcttattcatcacctgccaaagttgtctgcttgtttatttgcttagatattttttgagtctatataatatctatgtttagtcgaaaattataaaagttgaatttggtcacttatttatctattttcacacagctcgtgaataataaatagatttattcatagttgaaaatgacgattttatgcggatatacgatttccgaaaaaacaggtatatctaaaattttgaagcacactatattccgatattcgatttctaaagaaaaaggatattttttttttttttggtaaatctaaaaaaaggatatatacatcgaatattcacgaatatttgggagttttttcacctatggatttattatcaaacaattttttcctggagaagtgtaaaattcaacaaataaatgacaagcttaataacttcatatatatatatatttatatatatatatatatatatatatatatatatatatatatatatttaccaaaatacttcatatctcaacgtttgatgtgaggggtgtttaaagaagaccaaaggctagaatcatatcctgttgataatgactaattaatattggttcatgactaggacatatttgctgcgggtactgatactacatcaag

SEQ ID NO: 108841 - DNA, 829 bp, Aquilegia coerulea
  Intron number 1 from transcript AcoGoldSmith_v1.004309m (l ocus AcoGoldSmith_v1.004309m.g) derived from phytozome v7. 0 (chr-ID scaffold_9; pos 4703347 to 4704175 reverse stran d)
taatttggcttcgcggaacttcattcacgtaccacgtaagtgaagaacacaaacaaaagattcatcaaatagtttcactattttcttttacaattctttgtaccaaatatatatttattacattatatacgtatttgtttttatttttctcgatttagttcagattgttcagattcttatgatttcgattacgtgtttaattattatatgttgaattttgtgtcaaactttgtattgatgtgttagggttagggtttattcaaatttagtatcttcaatgtatccaattctgattctatattgaagaaagctcaacatttttttttttttttttttttgccattggcgttcattagttagttactatataaccaaaaaccatgaatttgctttaaaactgtaacacttcttgtgatattatttttgcctcaaaatttactcttccttcagtgcaccattccattatgggtgtgttaatgcttaacacaattcacgaaaaaggttgtgaagacttgcaatataggggttagagataagtttactgtagtatataaatgatcaagtttttgaaattggctaatacagtaaaacctcgataaatgaatacccttgggaccggaaagatatattatctaagcgaggttatttatttatcgaacactaatttagtacaaaaacttgaattgggaccgggaaaaattattacttaagcgaggttattcacttatcgaacattcatttatcgaggtttaactgtgtatgcttgtactttcttttctttctttttttatcagaacaaaaaagggagaataggagtgagaaagaacaa

SEQ ID NO: 108842 - DNA, 990 bp, Aquilegia coerulea
  Intron number 1 from transcript AcoGoldSmith_v1.022115m (l ocus AcoGoldSmith_v1.022115m.g) derived from phytozome v7. 0 (chr-ID scaffold_18; pos 1442048 to 1443037)
aggatattccttctggaagaaactcaggattcaaggtgagtttgttatcgaaagatcttgaattatagaatggcattcaacatattttgtgccaagttaaaattttgtaacttgtagtccgtttttcatatccatttttcaacattcaccttcctttaatttgtttccatgtcatggaattttaaatttaagaagagagtgtataagactataagggctatagaataagacatccttgaaaatgaatataggcacagaaatgtgtttatgtattgtccactgcgtctttttttttttcctttttttctgaaaatacacccaagaagagggtggtgggtttggcagcagcccttgcagttcttaaaagaaataagtacatgggggcatttagctctacacctttacctatagcccaactggtagatcttgcaacacatggttgtatactgatataaccaatttgtttcatatgaatttgtaatgaaccattcacctgtgtaatgctgaagtcggtctactgcagatatcgcggacacgtgaaaaatgtttaccacggaaacttacgttaatatctaatctattagcgaaataaaaaggaagattaaaggtcaagaaaacgcaagaaaatgcaatcgtttgtgaggataattttggaacttattcacttctgttagctgtctaaatcagcatggccttgaagtctcttatagatataagctagtgtggcaaggctacaaggttttttgtttggcttgtaacagttgtttagtcactacggagaactaggatcaatactgatgtagaacaggctgcctaagtccatagtactccggatttacttaattttagtttacaattattatgttgtagttatctgattggcaaattttttttggaaaacaagtatttagctttgaggctatttgactatttgtaacactgttaagtattagtgactgcaggttgtacgatatcattcccttgttatag

SEQ ID NO: 108843 - DNA, 720 bp, Aquilegia coerulea
  Intron number 1 from transcript AcoGoldSmith_v1.016669m (l ocus AcoGoldSmith_v1.016669m.g) derived from phytozome v7. 0 (chr-ID scaffold_37; pos 1713682 to 1714401 reverse stra nd)
agagcaggtaaatatctgtggtggggtttgtttgtaacatggaacttagggcaggtgaagaaggggggaaatgggggtggggagatatcttgttgtctaagtatatataatttctagctaagtagagctttgaataggtctataaaaataaatcagaatgatatcataaaaggttcaaattactttcttgtgattttgctttgttatggctgcctgggtttgttagtcgcaacatacacaaatcaaggagttacctcagtccagcaatctacaatagtaatgcaagcctgcagaattgctcataaagctagggtcatcttgactctggaatctggattatatacatgcatgatattgcaattctagtaagaaaaaattgaaatatgcatcgaattaaaaagaaatttgcgaagaaaagaaaatcataaaagaaaaaaagggaagacgtgccttaagcttccccacattggtcacacaaagaaggggaataatcacatttccaacaccttattatcacgaatccatgttatagaatcatgaaatctgacaaacattaaaacaactggacaaactaaccctttctttttcttcataacatcacctcagttccattacataaaaatgctcaataacctttttaaaaggcactcctcaacttccactcttctaagcttcttcttatactacacacattttcttcactcagtcagttcaccaaaa

SEQ ID NO: 108844 - DNA, 916 bp, Aquilegia coerulea
  Intron number 1 from transcript AcoGoldSmith_v1.006753m (l ocus AcoGoldSmith_v1.006753m.g) derived from phytozome v7. 0 (chr-ID scaffold_1; pos 9559589 to 9560504 reverse stran d)
gcaaggtcagtcatgagtgtgtcattatctttaaacttgttaataattgtactttttttttttttttttagtcaaaatcaagtttggatttttactgtagcttcaaaatatctatgggtttattcaagttttatgtaaaaatgttttttttttttttgtttatagagtaattttattgtggtggtgtagctcagtgtgattggtatccttataaatttgcaattttgtatttggattagaatagtggtgattgtgattcaggggtttttggtaggtggctcaatcactaaaattttacttagaaatatttagataagaattgaatttgcattttcttaattctatatgggtttaagggtttaccttcttaataagtatatataaagtataagaaaaaagtttatcatatgttttgctctggagcaatacgggtgcatgttcagtttgtagaactacaagcaattgccttaggaaacttttttatctctatcagcactaaaaagtatgtataagtttccttttttcaaccaagaaaaggtaatggaattcaaaacatcaccactcaaagtacaaaatagtgactttactaaagtaagaactagtaactaactctatccaaaaatgttgttagacacttaatagccgtttgcaatcgaagttcaaaaattggaaactagttgctgcctatatggaatttaagataactagagacttgatatttggatgtcttcttcttgcttttcagttttctcaaactcatttatttaggctatagccttgtttacaattggatttagatgtcatacaccaacattattgtgtgtatatttgttcacctagagttggcattttccttggatgtgttgaaatgtgttggaattgatttttggaatttctttggaaaagactgtgttgg

SEQ ID NO: 108845 - DNA, 758 bp, Aquilegia coerulea
  Intron number 1 from transcript AcoGoldSmith_v1.027181m (l ocus AcoGoldSmith_v1.027181m.g) derived from phytozome v7. 0 (chr-ID scaffold_6; pos 8605293 to 8606050 reverse stran d)
ttatctgcctcgtaatatttcaaaaactacggcaggtcatatgataaaaaaactgataaagaaatcagatgacatcaagatatcttttgttgtaggtgctctggtctgatgataacgatcgattaactattgccctgactccccgagttttctattgtccctcttttctttgtgttgtggtggtgactagggttcatggatactctgtaactcattctgtaaacttgagctgcagtactagaaaggtttttcttttgtcttttaatatagaatctttgagatttgctaaataattaaaaatattcagattatttaattaaagcttctatattaaaggatatcagataccatctttattatttttgaagggagcaaggctaggaatagtaaacacaatatgtggcagtatctgattggctaaaaaaataaaaataaaattaattatttggttcaactgcggtacagccaaccaaattttgacacgttatctttaatctgtatattataggctgtgcgtgcatgttcacatagtattaataactaaaggataaaatgaaccagacaagcaagttgataccattaagaagatcgaaaacttcctcctcaggaaccaaataaacactgatatctcaaagtgtagttttggggaagatctaccatggcggctatgcgcaagcaaccacacattttagttgttccactcccagcacaaggtcatgttatgcctttcatgaagttctcacatcagttagttgatc

SEQ ID NO: 108846 - DNA, 928 bp, Aquilegia coerulea
  Intron number 1 from transcript AcoGoldSmith_v1.003488m (l ocus AcoGoldSmith_v1.003488m.g) derived from phytozome v7. 0 (chr-ID scaffold_30; pos 2917581 to 2918508)
atcaggcaagtaactttattttattaattgtagcagattgttataatgagtttacaaaattgagcatcttatattcttattgattgtcagatcttctgtgatttaggatctaactgcctcattatgtaccaatattttgggacataataacttcatgttggcatgcatgtctatatgtatattttttttaataccgagtacttaaaattaacagatctgtttcattcaatttaaatatgtgttttgggaagttccatgttatctttgttccattctataagttgtaccaatagtgtgaagagcttatttctgaatgggaggggagattcatgcatgtcgctattgaattttgaaaccaaataccctgcagtggtttatgttgcagccattttcgtaccatcttgaagagtttgcaattattgttggatctggtgatcattttaattgtcattcttgatcaaacacccatgtacattaggcttagtttagtccccttagttttctagatgaagttttaccacttcagtacggttacattctttcataataaatatatgtagcatacaactatgaattttagcttagagaaacatccttatgaatcttacatccgctgagatgcattacacatttaattgtacgcttcaaagcatcttctgttttgtgtatactgtataggtacttatttgtttactggttacatagtgactaaatcgtgccatatttatcggtttgggtcattagattgtttattgaagttggaaaagaaacgtttgagctttagctttaaagcacataaatacaatttatagctttttaaaatattatttttctttcctaatattaattgacaagacaaaaacgcatcatcaaattttgttatatatctcattcttaatccaacttcaatgattatgacagcttgttc

SEQ ID NO: 108847 - DNA, 638 bp, Aquilegia coerulea
  Intron number 1 from transcript AcoGoldSmith_v1.006037m (l ocus AcoGoldSmith_v1.006037m.g) derived from phytozome v7. 0 (chr-ID scaffold_49; pos 578101 to 578738)
gaagctcgagatcttaccagatcggagaagaaattgtaagaattctttcacatttttcttcattttgatgttttagttttgatttatgttgattgttgttgttgataatgctttgaatgtgattcaatcggcttaaagatgtgagtttgagatttctgtttgaagatctgtgtttgagtttgtgatttggttaaatttgctacatttctatgatttttgttcaaatcgatttgagaaatgaggatctttgcacattgtttgatgttttgctgttctgttggttgtagcttgcaaaattattttgatctgttgattgaagagtgttttccctcttctgtttttttatatgttgaggacttaggaagatgttttgcatgtgttttgttttaatcaattgctgttagttgacgagcaaaatctgcagataaaatccttgatttgcaagcaataagaaaattattctaataaactgtttttgttattttttttttttttgttcgggaatctatgtagcttttgcttagaactaagatttttaaaatggaaagctaggagaagttcatccaaagttccaaacaattaaaaacatggagaatatatgcattgtatgacttttgtgaattctcttttgcagttct

SEQ ID NO: 108848 - DNA, 720 bp, Aquilegia coerulea
  Intron number 2 from transcript AcoGoldSmith_v1.005291m (l ocus AcoGoldSmith_v1.005291m.g) derived from phytozome v7. 0 (chr-ID scaffold_30; pos 33916 to 34635)
atctcaaagcagtaagttttatttaaaattcatgggttattttctgtgttgaattcctcaatatttgattctgtttagtatttagatgtaaatatagatgtattgaacatttgggaatttttttttttcctgttctggatcaagaaacacttgatgaaagggaatgcatagctgtcggtcagggtattgctagttaaaatacttgatgtagttaaggaaagagcaagggctacttatcttgttgttatatatgaactatttgatgaatttgtttgtagagaaacttatgtagttgaagtagttgatgaaacgacatatgccgctctcggggtattgcaaggtgtatgccttctgggagacaactgtctccttccatgtccattattaagcttctatccaacaactcaggcttttgtgtgaagcaattcgatataaggaggaaaggggcttaatcattttgtttcaagtcattaaaaggatctccaattaataatcttactattgtcaacttttgaacaatacaggttggaactatacatacaatgtagattacttcctgttaatttatgtgcaccttgttccaaatgcgctcttcatatagttggaacttggaataacacctgacctgttcttgaataccatatatataatatatagctgttataaagagtgcctttgtttgcaggcagaggagaccaaatcttggaagagcttaattaa

SEQ ID NO: 108849 - DNA, 602 bp, Aquilegia coerulea
  Intron number 1 from transcript AcoGoldSmith_v1.000168m (l ocus AcoGoldSmith_v1.000168m.g) derived from phytozome v7. 0 (chr-ID scaffold_1; pos 6771814 to 6772415 reverse stran d)
ctgttaggtcatttttttcgcggcaaaatgttattcaccgttagattataatccaacggttagataaaaaagacggttgaggagatttttttaattcgaataattttttatttttatttttctaaatttttcaattttttctgattctaaaccctaagtctcgtgaaaccgaagaaaccctagttcttcgtctcgttttttggggaaaaaaagtggatcgagaattcgttcgatttcatgtactagatctctaattaacactaattattcacggatcggggtcttcaattcgtgttcttaaagtgattttgatccaggtatgtgtttttttgtctgttttgatgatgaattcgttttgattttggggaaaactatcgattagagttgaaaatggttagaagtcgatttgattgcgttttgaggtttgattgttgtttttttcttgtgcaatttgatcacagatctgaaattagggtttgaatttgggaaataatgtatgatgtgagatagaaattggggttttttgtttctgcctatgtggattgaggatttgtagatggaaaatagtgtaagaagctctgaaatccttgaaagtcctaaga

SEQ ID NO: 108850 - DNA, 399 bp, Aquilegia coerulea
  Intron number 1 from transcript AcoGoldSmith_v1.004860m (l ocus AcoGoldSmith_v1.004860m.g) derived from phytozome v7. 0 (chr-ID scaffold_9; pos 2504945 to 2505343)
ggcaacaagacctgttgttccacagcaaacaagaggtaacaataacgttgttcattctaaaaccccatctttctttctgattctttcattatatttctgcaattgatcgaaatttgattattaatttgatcaatttggaaaaaaaaaatcggatctttaagcaatcttaggatctcgatctcgttttgctttaatctatttatgatttctgatgcttttttgcatttgggtgtctttgatttctgtttctggatgtttaatttgttttgggggtttctttttttttttttgttctttgatttaagattggggattgaagatttcttttgaatctgaatgaaaactttgattgtaattttatcaggtgaggcagttgtagaaggagccaagcagaaggtt

SEQ ID NO: 108851 - DNA, 646 bp, Aquilegia coerulea
  Intron number 1 from transcript AcoGoldSmith_v1.005607m (l ocus AcoGoldSmith_v1.005607m.g) derived from phytozome v7. 0 (chr-ID scaffold_1; pos 4345773 to 4346418)
gcataaaccccctcttgagaattcaggtatgtacgtatatttgcattaactacaatcttcttttcagatagagagcctaggtaataagttcgtgagcctaggtaataagttagtgtacatgatgtgttttattggcgaatttgtttttaatgcttctattttgaccttgtctagtacaaactccttgatctgataatcttagaaaattgccgtctcacatatggatcttggagttcgttgttgtgaaccacataaggagttttgaagttctagtgtcaacatgcatgtaagaaggggcatgttttcaaagatttgtttaaagcgggaactcatcaagttgtttgtgctttaaactaaatccttacatactgtacagtagtgacatggacttgtcatttcttaattaattaaagagatgataaaattctaacgcagttacgcagtagcatcaattaattgtgcatatgaccaatatggttacatcaaaagcttaaccagattatagaacttttttttttgcacaaaacaagcatctttaattaggaataaactggtgctataaatgtccagattttgaacttttgatcaaattcatcgataaatcttccctttctctgtgtttttttttacagtgtacccgtttcac

SEQ ID NO: 108852 - DNA, 752 bp, Aquilegia coerulea
  Intron number 4 from transcript AcoGoldSmith_v1.023697m (l ocus AcoGoldSmith_v1.023697m.g) derived from phytozome v7. 0 (chr-ID scaffold_1; pos 11205517 to 11206268 reverse str and)
tactcataatccccaggttttccttcactgaatctcactggattttgtacatcaattcaagacatcaaactgagcgatataggattaatcccactaatcatggaactcatcatactcatgcatcaataactgcagaatcaacatcaaaggaaagcgcaataattttaaagttaaaactatatttagtgtttctctgaagaacactaagggcacaatttatgcttagttttcaatggactataaaactgactatgtgtacaagcccagggattttatataaagcaagaatccaacttccaataggatataataactttgtcccaaggaaataaataattaaatttgaatattgtaacatgttggttacgagtataaaagttctattctttttatttgtttattgtaataagaataattagctcatccataaaaagaaaatccaaaataatctttgcaccttggcaatacatctttgttgacacactgggatataaagttaatattgattttgatttactcccaaatatagaaaatcaacacagctattattacttcttttgctaccacaacgattttcgttcatgcaatctttttcattttagtaattagtaattagacgcacgcaattaattaaggcacccatcttgtatgttgaaccatatgtgggttgagaaacttgaaaatacttgtcccatgtagcaaagcacttcatgtagtttcgtcgatttgtgcaggcaatatatttggcgaat

SEQ ID NO: 108853 - DNA, 513 bp, Aquilegia coerulea
  Intron number 4 from transcript AcoGoldSmith_v1.000489m (l ocus AcoGoldSmith_v1.000489m.g) derived from phytozome v7. 0 (chr-ID scaffold_9; pos 3083626 to 3084138 reverse stran d)
atttttctgcagaaaattcagaaccagattttgaggttacattcgaccctttgactatttatttcattcatttttcttttttcatttaaaattttcttatgtaatatgatatataatgctagtcatatacatgataatgcattcaaataatatttccacctgtctttacaaagatttaccaataaagtagtgagctttttatgtgtaatgcaagttttttgctgaggtggttaagttcttattttctgtttggaatatgaagcatcgaagttttatctagcattacttttgagtaaagaaatttcttcaaaagattgtaggtacatatgcctagtggtttgcaagatttttacgcatatttgtatattgtttcatgttcccctttttcatgcacatttaaataatctaagagctcaatgagtttttaaatgtatctctgtttctgttgtccgaactgttcattttatattctattttttgtttttgtttttgttttttttatcacaggataac

SEQ ID NO: 108854 - DNA, 879 bp, Aquilegia coerulea
  Intron number 1 from transcript AcoGoldSmith_v1.000489m (l ocus AcoGoldSmith_v1.000489m.g) derived from phytozome v7. 0 (chr-ID scaffold_9; pos 3084851 to 3085729 reverse stran d)
atactcctctgtcagtcgaccatccacgttctgaggtatggtgtggtgtctttatacggttttactcaaaaaatgagttttttttttcctaagaaaaaaacttttggctcaactttcatatttctttattttgtatgcttccttagaaccttaaaaatagacatttgagctgaacaaaggacacaattttgttcatgatataatctgttctagatgaatttagttattccctttggtgaatgtgcaatagcttacttactgactggtgcatttcaattttaaactgcttcttttgtgtgtatatctaatagatgcatgagttgttaaatttctcttatggtaaagtcataaatgaaattcatagtggttgataacctgtgggtgtagaaaaagcgaagacaatagatgcaaaagattaaatatataacacttactttaaacaccaggaattaagatatgtattgccatccagtcatgaaataattaaaatgtctgagtacccctctttatttgtttttcaatgatgtctttcactgatgaaatttcagtttacaataatataagactaagaaatttatttaaaatgtctatatttctggaagtggaagaagtggaatggctttcgagggaacaattgataaattttgacgtttgattaatcaagacaatagattattttgcaaggatttgtccaactgcattttattgttgagactataatgttgttaacttaggtcttctttagactctatgtttccttgctgggggacttttaatgggttgttttttgttttgaagtttgaaggatggatttcttatgggtgttctttatttccttgttaaggttctcaccccatctactggaaattctcggagtga

SEQ ID NO: 108855 - DNA, 936 bp, Aquilegia coerulea
  Intron number 1 from transcript AcoGoldSmith_v1.013615m (l ocus AcoGoldSmith_v1.013615m.g) derived from phytozome v7. 0 (chr-ID scaffold_11; pos 2510215 to 2511150)
gacgccgcgcctgctttgtcaaaggtgcataggtactcaagccaattaaaaaagggctatgtcaactacatgcagcaccctagacatgcatagagggccaaacgtgccttaacacccaagacaaacatagactgcaatgtcttagtacatactgtaccatgaactatccaagtatgtgtagaatagtttctgaaatgcatgactaagaatccaaaagctccatattgtgtggaagtaacacactaacacatgtagtctctgcccagactgccactctggttcattaccccatttttgtgtgcccatcactcactgcaagtctgcaacaaaaccgactgagttgcgggcatcaaggatcgatcgaagggacagtgtggatggactcagaaattcttccatgtgaagactgaggaaccaccatcgactgggtttgaatttggactgatccagcaggtcttacttcggcttgctttgatgatgggtaggcatttattgtgcttaggcttttggggatgccctaatagtttgggcatgccaatgagctcataattggtcaccgactcactgtcacagtaccggatatatgatggtttcttaatctgactcagactccgtgaagcatatatggtttccttatccatgcagaagcccaaagccccaaactctttctttgttgaggacctgagttgtatattttactctttcttaacaaagaaatcatgcttgttgatgctcttttcttttcaactatcatcctctttcttttgatcaagcagtaaatcaatggaaagaacaaaaagaaagagaagatcagaagcattcgaagaagaacgtgaagaaaaacatgcagaagagaaactgcaagaactaagaaatctaccaactgatatattactagatattttattaaggttacctttaaagtctctctctctc

SEQ ID NO: 108856 - DNA, 800 bp, Aquilegia coerulea
  Intron number 1 from transcript AcoGoldSmith_v1.019423m (l ocus AcoGoldSmith_v1.019423m.g) derived from phytozome v7. 0 (chr-ID scaffold_102; pos 406089 to 406888)
cgttacagtttagcttattaatggaacttttaattttaaccaaacatgtttctctgtctttgtagtttgtacagttgtacaatctttaatcttcccatacatatccaaccaacaaaaccaatttcagaatgatttacgttcgttcattagggaaccattttcagagtgatttacgtttgttcattagggcagtcgttgattgttttaaacataaattatgtagtaatgtagggtttatgaccaaacattcataccaatcagtcaaaaactcaaaaccaacataagcatatatacagttaacctaacttgtttatccccaaagaaaagttatgatcagagacaaccccaacagttttcggtttatgtcccgttcaaagtagttaacaatagttaaggtacactggtacagagtttgacagtttaaggcaagcaaagatatattcaacttctcaagttgcttaacacatgacatccccaaattccttttttgtgttggaagctgcaggcctaaatacatgcacctctctcttggggggtactcttattcaagtttgctttgtttaattaaaaaagataaggaggtgcttttagagcatattttcagccagctcagtatttgcttaactcacaagccttgcttggtcactctatgatctcttccatgaccctaactcttctctgatcattatatatgcagctcctcttgaacttccatacaagaatcaaattttttttttcctgtctctcctctctctcttttaagctttttgagaacacaatgagttctgtaaagagatcat

SEQ ID NO: 108857 - DNA, 782 bp, Aquilegia coerulea
  Intron number 2 from transcript AcoGoldSmith_v1.007584m (l ocus AcoGoldSmith_v1.007584m.g) derived from phytozome v7. 0 (chr-ID scaffold_9; pos 1840159 to 1840940 reverse stran d)
ttcttgatactgtatgtctttcccttctctccttaatgtatctatgtttgagagtttcagttgttgcaaaagcttttgttaataatatccaattccagtaagttttgagcttgtgttcctagaatcatttttaatttcatttgtatgaataattacgattttgggaatcttcaattgggtttattccaacccctatgaatttagatgagaaaaacatctagaattttaaatatatgccctaaaagcaatattttaaaaagaaaagttagtcaaagatgttaactttaccaatattaaagatttttcatgggtttgatgtcttttatttgaaaagataggtcttgacatttgtgcatttttatgatgttgtgagcgaagaaatgagtggaaagcgaatctttaatgaaggtcattgctatagtctaatgaaatctaaatatgaattcaactgaaatgctgaagatttaaagatgcatgactgatgaaatcttatatatttttgtggttttcaagtgattgggatggcaaataataatatcagtagagttcctacaacatgggtaattggcatgtatgtgttcctagagtcttgttcttgtaaaatgatcttttagttagtttcttgttagtttccatattagtttaggacagactcttggctggtttattataatgtttttgtccgttaaatcaccgcgtagttttttgctgcactttgtattattagtggaaagcttatttttcatccacaatgactaaatttagtattttattgcagtttt

SEQ ID NO: 108858 - DNA, 699 bp, Aquilegia coerulea
  Intron number 1 from transcript AcoGoldSmith_v1.013252m (l ocus AcoGoldSmith_v1.013252m.g) derived from phytozome v7. 0 (chr-ID scaffold_72; pos 368249 to 368947)
actgtgccacgtggctgtttttgattggttggagtatgtagtacccctacagaattgccaattaggctatctattacaagaggctaactgaatgttcgggccaactttcgcgcacctcgacactccttgtattcttattacatcgttaactgaatgtccgagccagctttcgcgcaccacaacattgaaaggttaactttgtatctaccttactttttttatttgttggaattttgagtaagatgagtttatttgttggaattttgagtaagatgagtttatttgttggaattttgagtaagatgagatatgggaagaaactaaatttaagtatagtaatgtttaatggaagattttccaatgatattcgaagatgggggtaactcacgaattgatacgatttacattggaagctgtgttttatttctttatttagttttagcatctattgtgtagtggatgttttttattttattactattattattattcgtgtaatttagtaaatttttttctctccaatataaattaaggtggatattgtattattgtttcattagtccacttcggcccaaaacaataaggcccgtaccagaaaatttaatgaagagaaaatcgcgcatggacagaaagaacaaagtaatgctttcagtgactaatggagttgtaaacaaactaaacatagacaaacaagtcatc

SEQ ID NO: 108859 - DNA, 770 bp, Aquilegia coerulea
  Intron number 4 from transcript AcoGoldSmith_v1.010490m (l ocus AcoGoldSmith_v1.010490m.g) derived from phytozome v7. 0 (chr-ID scaffold_155; pos 33925 to 34694 reverse strand)
ggcgatttattccttcaaagtgggaaaccaaaaaggtaacttcttttgtttttttttttttaagggccaacaaattaaacaacaggaagtgagctcccaaagaaatattgtcttgccatgttaaagcaacattttcaaaccaaatctcaacggtatatgtaacataatactcgcaaataaatatgtgtattggtcccctggtctgatacaattatttcatggaaatatattctgagattcaaaccgctcccctttgcatattatatcatcatcttaaacctctacttcattacagttatgctgagagacctctaaatcgcagagacggttaagccacttcgtggttcacttcactatgggataaagcacaacctgttagagttacaatctggttatctaaatttatatttgaccactcggaactgtattacctcttggcgttcctcatcctggaaattgcattttttcctattctcttcatgcaaagtattgtttggttaccattccctgtctatctaaaaaggagtatgtcatgagaaatcgggttggtctgcactgaaaaaacttctataacattaaattgccagtgtcacactcactttaattcattttcctatcatatcagttgtatgtaaagttttggctgggttcacagcagactagtagtattagatggggagatgaagtacctcataattttgatttgtcattaatagtttttatctttatatacaggttgttaagttaatcagggcaattagggagggacg

SEQ ID NO: 108860 - DNA, 858 bp, Aquilegia coerulea
  Intron number 1 from transcript AcoGoldSmith_v1.022391m (l ocus AcoGoldSmith_v1.022391m.g) derived from phytozome v7. 0 (chr-ID scaffold_51; pos 318730 to 319587)
gggaatagagaactaaagtttcaaggattgacaaatatactgccagttatcttccaatcacttttaagtgatactgtttcgtaattgttgtgtagggtattttaccagagtcgttggctttgcacatgttgcatctattctggatagatcttgtataacaaaccttcttttaatagggaataaaattgtggcgccgccaaattaaatttattggttatcttttgtcggatcttaattattgtttttattgttttttttctgaaattattttgtcgtgttttgaagatacaataaaataacattatgatataaggggcgcgaaaatttgaattccaaatctgagaccaaccttttcaaaccgaacttattaaaatcatggcaagtcccttctctttcctttttcatattttccattttggtaagtgatgtattgaaagattttagtttccaaaacaacaaaatgaagtggtaaaaagagtgcactagtaaataagatatgaatctattattgggtgcactgaataatccatatccatatcactttgctagtgggatcgtttatatatacttctactttcttctcaaactctcattctacttactctacttttcttcacaattggttttgattgttgctaactccacattctccaatctcttcgtcttttcccaaattcaagatcaacaaggtaagatctttcatattgaaaatccatcacattgtttccatgcagtatagtagagaaaatagaaaatggcatttagattttagatattctaacatttttgcatctttttgttttggatgttgaatgtatatgttaacatgatttgggcatttttttttttagatatcta

SEQ ID NO: 108861 - DNA, 671 bp, Aquilegia coerulea
  Intron number 1 from transcript AcoGoldSmith_v1.003173m (l ocus AcoGoldSmith_v1.003173m.g) derived from phytozome v7. 0 (chr-ID scaffold_27; pos 552532 to 553202 reverse strand )
ttcgttttccacctctcttacaccacactaataaggttcgtttcaataatttttttccatagatgtttttttcatcaaatttgatcaatttcaattacctgtatttataaatcgaagaaatgattgtttggaaaatgtttagggtttgatattagaaaaatcttattctagtagctcaacttcattaattctctatggtttttaattgttaattttcagtgatcctcacctcacctcacctattttagttagttagttttgttagttatttcatcgatgctagactttgaaatgggatgttaaaacgctgaaacgagacggttttatagattattgatcaattgttacttgtccttgatcattatcaactgagctacagccataatttaaaacagaagatttaactatacaataatacacaccaagtttacaattctaaacgcttttgttaacacaccttatagcatcttttgttaattagtgcaatggaaaatcgagttgacgtgttagagttttgattattaaaattttcaattaaatcatatctacaacagtcctctttcttggctttatatcatcttttgatttcttctgtaagtcgagcttcaattctttttttattttttcttattgcagttgcctaatataagtaaatcagttcgatccagggt

SEQ ID NO: 108862 - DNA, 457 bp, Aquilegia coerulea
  Intron number 2 from transcript AcoGoldSmith_v1.018033m (l ocus AcoGoldSmith_v1.018033m.g) derived from phytozome v7. 0 (chr-ID scaffold_9; pos 3694055 to 3694511)
agatcctgttccttgtgaaaagtgtgctggaagtaatttctctttaaaaattataattttccatttatttcaagtgctgtaggacagaggttttcttcaaaatgtgacttctgatttttttttcttttaaactgttttttaagaattttactatctaaacttagatttgatttgaattcatagctgactttagtttattccttaattttggacaatttttttggagatgttcaggaactaaacacgattttgtaggtcagaattgctagtgtcatctgatacatgctgtaattatttagaccagaattaatgatatacattgacttgcatcactcaaccatatgatacaatgtaatatggcactcacatgtagcttcatatttgtttcctttcttttaggaaaatgtcattttatacagttctttttttttgcatctcattcactaggtggaacgaa

SEQ ID NO: 108863 - DNA, 796 bp, Aquilegia coerulea
  Intron number 2 from transcript AcoGoldSmith_v1.002520m (l ocus AcoGoldSmith_v1.002520m.g) derived from phytozome v7. 0 (chr-ID scaffold_30; pos 2475566 to 2476361)
ctgttgaggttacattaggaccaaaaggtatttagaattatgttttctatcatgagtagtgggtggtttttttttgtttttgaggatttagtgacaattctctaaaattgatgaatgagcatgattatagattaccccccccccccctcccctgaatagaagccttagataatcttatctgatttatatgtattttggtgggaggggtcgagtggtgggaagccgggagtgcctattagattaaggaggaaatgtggaataggtgtcatgcccaaggtggaagcataagtggttactggttaatgtaggagaaggagaagaggggtagaggaagagcgaatgaaatttaataagaaatgtggatacacaatctgttttgttgaaccgcgccctaaaccttattcatcaagacagattacttctagctcaacaagcaatgactaataagctttaatactaaattactaatgaatatgttgatataggcctcacaacgtgtcttggattattttctctacgactctacctaaacataggtgactaaacttcaactgctttacctcttgaaagagacaacacaccgtcaaatgatatgaaaatgctgatgtacaggctacagtatgtacataggcacactaatggatggatgaactagaaacattcaaactagtaattttaaatgtgtgtttgcagtaactgcaggtttataaaatagaagcttggtgtttccttgtagtttatcaatgtttgcttttaagatgatgatatgactttatttcataaaatccagggcgta

SEQ ID NO: 108864 - DNA, 695 bp, Aquilegia coerulea
  Intron number 1 from transcript AcoGoldSmith_v1.012230m (l ocus AcoGoldSmith_v1.012230m.g) derived from phytozome v7. 0 (chr-ID scaffold_9; pos 2950467 to 2951161)
gaacgcgcagaaaaggcattaatatgtaagtttttctttctctcaattgttaattaagatgttctatggtacatatcacataaccaactagaatactgaaaatcaccaaaaaaaatatttcaaatttatattcccatctaagcaataaaatatatactgcttcgatgttttgatatattgctagaaattttattttctgataaaccaaaggtactacgtgatggtagagtgacagtttcctataaatcagacattaccatggtgactggtgagtttgattgaaacgaaaaactgttttttttttttttttttattgaacttgtctaaatcaaagattcactatcctcttctccccttccttgttaatgttgtttttaccaaatcccacatttccttagaaagttgcacgtagatgtgtgggaggaatgccattgccaacctagttgggaagttcttccagtagagtgatgtctacctgtggtctttattttttatttttttcgtgtattaatactctttcatattatcttgtatagcctcccaaaaatgaatttgttacccaaactttctactactactcgttgcatgataattgttggatatatataataatgcatatagtaaaaattgcatgattaaccactatcctttgtgtgctagcttgttcagcttcaccaagctccagttaaatatcg

SEQ ID NO: 108865 - DNA, 846 bp, Aquilegia coerulea
  Intron number 1 from transcript AcoGoldSmith_v1.025174m (l ocus AcoGoldSmith_v1.025174m.g) derived from phytozome v7. 0 (chr-ID scaffold_10; pos 4016254 to 4017099)
gaacggtgggtcaaacattcaacggtggttagaagttctaatggcatttgagaggggaatagagtgccatccaaaatgccatgttaattgcataagacggaacacagtgttccggttcaacactttttcggaattgtgtgtttcgtgttatacactttatctcatatggaacttgaagttccgtcttataaactaaacttttcaggaactcgaagttccgtcttatatacaaatgggctaggctgttagatatccattaaatctaaaaccggaataccgagttccgtcttataccaaataacaatggaatacagagttccgtcttatacacttacaaaaaacaacggaatacagacttccatcttatattttggtaaaattaccggaactcaaagttccgtcttataagccatttaatttttataaactgacattttcaaaatttttcattggcactacttcatagggggttttaactaccatagatagagagtgattttgaaggtggttttgcttatgtggagggcaccaatctgccctttcattgggatttctcttatggcaaaccaagcccaaatgcccaatacccagtcttgcatctaaatcaccacaccaaccacgtggtaatctctaatccactctcttccttttcagtctttcactctcatcagcctaaaacctatccacaacacactctctctctcactctctctctttcttgaaagaaatttaaaatgccctcaaacaccaatcattctaaatgtttttaacaccttaatcttctttctcttcaatggctcttcttccacagatcttattacattctccaactaaattatttttctt

SEQ ID NO: 108866 - DNA, 745 bp, Aquilegia coerulea
  Intron number 2 from transcript AcoGoldSmith_v1.019822m (l ocus AcoGoldSmith_v1.019822m.g) derived from phytozome v7. 0 (chr-ID scaffold_69; pos 1216593 to 1217337)
gtgatcgtgtgacagccagtggaaaggtaagatgttgtaccctgatatagttctgcattcttacactttgtttagatatttgaagctcaactgaaactgatatgtaatgatagccattgttttgtctggagcagtaactttgtaggctgtttatgtgggcatgtaacttccaatttggttttatagtatatatatatatgtatatatgtgtatatacatgtatatatgtgtatatacatgtatatatgtgtatatacatgtatatatatgagccctaacgtgcggaaactttctattctaacaatcagctgtgacgtgtttcgaaccgacaacctctccactttgtgagaggggtgctaccattgagccacaggctcattcacaacttggttaatttcaatttgattatagcacctgaaaaaaccttttagagccctagagcggtggattatgaaacattattcctgggattcaaacacatacttcctctcatattttgctccgttttttgttttaaccacctaacataaatgcaaagtgtcatttttgtgattactgaaaaactgttttatctgatttccctcttttgaagtgaaggaagaaaaattgaagaagaaaaatatatgaaaaggaatgggaaatatgctgtatattgttctagatttttgtttatctgtttcttaaaaatatcatactctgcatttgtgtagatccaaacagaaagtggctcaaaagttaaagctac

SEQ ID NO: 108867 - DNA, 593 bp, Aquilegia coerulea
  Intron number 1 from transcript AcoGoldSmith_v1.003068m (l ocus AcoGoldSmith_v1.003068m.g) derived from phytozome v7. 0 (chr-ID scaffold_9; pos 1774441 to 1775033 reverse stran d)
cttgcacagcattttacctcaaaatctggttccaagtaaacttcttttcttctcaaatgtttaatattcttaaaacatcgtacattgtatttgtatactttgttttgtctttctttatgcttaataatgtattcatttgcttctttatacttagaaatttggtataaattatcgtaaaaagcacacacactagaatctactgaacagccaaattccgatagctcactgttcttgttgacgatttatatttatttttattatttattaatatgacatttccatatgagactagcctcaattacaagtaaccaaggcccaaggatggcctggcctcaaggctgtaagttaacatggatatctcaggcacctcattcaaatgaggccaccacaataagaattcacacttttttaactgtatgatatagggggacctctctacaccttctgtacatatgattatattgtcatgatattaatcgttgttgggttttcggtttaaagctttatgtactttactgtgagatgattttattatattttttgtttgtgatgttactattgtgtcctgatacttgattacttttaggaagatt

SEQ ID NO: 108868 - DNA, 612 bp, Aquilegia coerulea
  Intron number 1 from transcript AcoGoldSmith_v1.008460m (l ocus AcoGoldSmith_v1.008457m.g) derived from phytozome v7. 0 (chr-ID scaffold_11; pos 2846638 to 2847249 reverse stra nd)
caacttccctacttctacttctccttcttctcaaggtttcattatcttgattcatttcctactgttaaaaaaacttgatttcatttcttctgtttattatttatcaaaatcttttagataccaacactagtcaaacttttaatttaacttaagtcaaacctcgaggggtggatgggtagtggcaaaatttcacaacttgaaactgtgatttctcacacacttgggttttatttttatataatgatgagtttgcgcaactgtaagagagagaaaaaaaatggagtatattgatctaataagaccatttgggtcttcaagaagattcttatttttttttagttagtacagtatatttcattgcatctgatacaaatttatacaagtaattaatctttagggtttaataggcatttgagtatgatgtctgactgtctgtgttgttagttgcttttcaaatgtttttcactcatacttgtcactgttttgatttttttgatttacacaattacacctgtttatgttttgtaaattcgggattagttattatttttaattcaactttattatttgtgttcagtagttgagataaactcgaattccagtctggcagag

SEQ ID NO: 108869 - DNA, 547 bp, Aquilegia coerulea
  Intron number 3 from transcript AcoGoldSmith_v1.009367m (l ocus AcoGoldSmith_v1.009367m.g) derived from phytozome v7. 0 (chr-ID scaffold_30; pos 351208 to 351754 reverse strand )
gagtcccaaagagatcatgtaagtaatagtgtgtttatttttgctcaatgtctcaaaaaaaaaaaaaaaaaatcttcatatgtgtggtcattatctcatttgtttgtttgattataattaaacattcttggcttaaaagttaggccaaatggatggaaaaatatatatgatgaaacctattcaagacaattataagtcattgacataaatgactatgtgaccccataacacttggtatagttttattgagttaggtgctcatgccacttctttagtacttttgtcgagtcgatgataatttactatgaactcacagaacttggaaactattctttttctcatccattcatctatgaggtgaaatgttttttttttctccagtgacacttaaatgccagtatgccacctacgtacctacacagtacaggaaatccccattggatcttggtgcaatcaatacttgataatcatttcataaggaaacctttattgccattaccatctaatagaagtatataattttgggttatattcagatttttcgtgg

SEQ ID NO: 108870 - DNA, 992 bp, Aquilegia coerulea
  Intron number 1 from transcript AcoGoldSmith_v1.012208m (l ocus AcoGoldSmith_v1.012208m.g) derived from phytozome v7. 0 (chr-ID scaffold_11; pos 3199976 to 3200967)
tgaatctctcatattctcagattaattatcaaaaggtttgtctttcttctttccttttttatcgattttacaattatatggttttcaatttgtgtgaaatttgtttatattgtgaatgattttggtgatcttaaaagtttatgttaagaattgaatctttttttatgttttacatgttcttagttttctgatctgattctttgtttataatcttttttaataaagtttgtggaaaatgatggttggatttttaagcacaaattttgacttgtacatggtgctataatgtctatttagcagagctgactgtttgcttacttgatcttgttaagtaccaagagcaattttagggttttcgagtgatcgggcctcattgtttaaatataggtttagattgtttagtggtttctttttaccgttttgattgaataagacaggattctgagttgtatgtataaaacaatttgaagcatcaaatctgtaacaccccaaattccatacgatatcatggacctaatgcagatagtccaaagggaagatggtgtcttgaaacagaaccataacatgtagtttcaactcgaatcatttatttaagtcatcctgaagttgaaatgacaaggggaaagagcgataactactaagtgaacaatattgagtctggcccaagcttattacaagcagtgaataattaatatctctctcccaaatattgtcatctttgaaagagttagaaacaatttcaaacaaggtggctgactgttcaataaattatttgacattgtaagatctgataaagtcattggtgggtggtggaatacttgatcaaattgctaattgctagtataattaattagatcatccttatcatttgcatcacttattattatgatcttgtcttcttctctttcttagctgaatcttagttgtgttgatggtaccattacattatgtactaactcgaaaacaattcagtttctatagcatcagttccg

SEQ ID NO: 108871 - DNA, 551 bp, Aquilegia coerulea
  Intron number 1 from transcript AcoGoldSmith_v1.004173m (l ocus AcoGoldSmith_v1.004173m.g) derived from phytozome v7. 0 (chr-ID scaffold_111; pos 339129 to 339679 reverse stran d)
cttttcgccacactcacgagactctcagatcaaaggtgattcactttctgttgattttttgaattgtgtattgattctttgattcattctttctttctatctaattcgatttgatattctaagtttttcttcacttcagttgatttgtttgaaatcaaattttaattgttcaatttattactatttcgattgctaaaatgaactatattttgattgtttcagtaacttaactgaatcaaattcataatctatagttacaaaatcttaatttcgaattgaaattggcttcgattaacatctgatatagtttataataattattgatttgctagttttattggtgtttgattgagtgaaagagttgttttaagtgttgaagtaagtatgattagttttttgatccgtttctttagcttaatttttagttcaagagtttcaacgatctgtttgaattatagattataaatgtttttgattcatgatcattttctgtacagttatctggattctaatgtttatttggttttgattttgtgtgaatagatttgaaa

SEQ ID NO: 108872 - DNA, 902 bp, Aquilegia coerulea
  Intron number 1 from transcript AcoGoldSmith_v1.001739m (l ocus AcoGoldSmith_v1.001739m.g) derived from phytozome v7. 0 (chr-ID scaffold_11; pos 4010881 to 4011782 reverse stra nd)
aggtttgaatttaataactttttataattgtgtacatctcttttggtaatgactgctatcagatatatcattgatatcatatgtgacttacaacaagtagaccatggtactatgaatacactttgcatttagaacaataactaagaatagaaagaataagtgtaatgtcattcatcccagtgacattattatcaagattaagagctaatcttttctagtatcttatggggaagactagtagaggggttttggactatattttgatttctctatttcttctttagctagtatagtggtatactttgtccctagagttaggatacttcagtcttaccttcatctaaaaacactaaataccatacttacttctatactaccccttctagaccagagcaatgtaccgacatgacattaagtatgaaatgaatcttccacaagccaaatgcatttatatctattccatgttaaagaaataattcctgatcaaaatgaaaattttgtgaacaagagaattacaactcgaaccaatcatatgtgctggatcagccatgcagacattactgtttttaggttgttgctctattgtgaccatccacatcgtttccaattttaatatgattgtcattctaataccatgtgttcttaagattgactgagacttaagaaaaaagtagaaaatttgtcgaggctcacaagaaaattcagttatgccaaataaagaagaaagaaacctaagatatgtgtcaagtttacatcaccaaaactgttcaagttgctatattttgtggttagcacaactaagtcgtaatgacatcctgctgaaaacattatgcttacctgttctcgtcttatcgataattattaatccccaaactcttattgttcattacagtgtgaccaag

SEQ ID NO: 108873 - DNA, 1006 bp, Aquilegia coerulea
  Intron number 2 from transcript AcoGoldSmith_v1.007241m (l ocus AcoGoldSmith_v1.007241m.g) derived from phytozome v7. 0 (chr-ID scaffold_6; pos 8212508 to 8213513)
ttcatactaagacaccttccaaagaatctaaaaaggtgagaaattcaggttttgaaagatcttcattttgatagtataatgtaggttatttgatatttacagaaagtaaattttgcatactgaagctttagttgaattgtgatcaatgtgcgaaaataaataacattcaacctgattagaaaagattaacactttttttttggaaatggaaaatgtttttgaggatattggagtctgagggaaatgattaatcccaaagaaccttcaaaagaagatgaggttttgagtctgaaagtatgtatataattttacaatactgtatgttggtaaattgttgagtgctgactattggtctagtaatttggcctttttatatacaaagttcacgaaattgtacaacatttgagatttagtaccaacatgcaaaattttgattttgaaggaactttcaaactgatagatataaatggtgcatttatctgaatttgaaacattggtcaaatggtgcaagttttcattgcaaatgcttagcagtcttacatgtaagaaatcagggaggtccatggaacaatgcaaatgtttggattttgaaatcaaactcgtcttttagatttagacaggtaaatcaatgattttgcctaaaatttgagcatcatatcattccttctatttataatatgtctatccatgcctggaagagtagatgagatgagttaactgaagaaatgttatataaattaaaagttaatagctctacagagtacagaccgcaatcacattgttgaatcctgagggttttggacttggttttatcgtttaaagtgttaatttctctgtaattgtaaattttataaattgttagtgaatagcatgtgtataaattttttgatagttttagtttcatcaacttgtatatgggaaaataagtctaccccaacccatggacttgattggctagtagtttgatacagggtggtgaagcaaaaggcaggaaagtagctcagtc

SEQ ID NO: 108874 - DNA, 859 bp, Aquilegia coerulea
  Intron number 1 from transcript AcoGoldSmith_v1.005775m (l ocus AcoGoldSmith_v1.005775m.g) derived from phytozome v7. 0 (chr-ID scaffold_21; pos 3631036 to 3631894 reverse stra nd)
aaatccaagctctcgtatcagacaagcttcaagtggtattaactttcatctgatttactcctacttttaattcgttttcttctgattcattttcttgagataaatattgattttttgctgttttgaatgatcgagaattaatcaaaattgattaatttattaaatttagagacgtttttagtaagatttggtcgaattcttaggtttaaaggggtttaggttatgaaataatttcataattagggttttaaaggtttagttggtttaatggagttcatcatagagatctattattctgttacctcgtggtgtgagagtatatttggatttgatgtcaagttttaacctttgtagaaaagtgtcaagtatggatctttacactttacagtgtggattttaattttaggttagaatagatattgggattaatgatacaattgtaaacagtggaaatcaggtttcaatacaattgatgtttagagatttttgttcaccattttgacgcagcaacaatgactatcctaagtgaattgaattgtcttggaggcatgtgaagtttctattataagacaccatagatggtgttatacaatcaaattgtattattaggcttggttccatgggagacctatcagttctagataggaaattattacgtaatggctgttttgtattgtgttctgtagtatcaatttttttccatgtatatggcaattatatttgagtttcactttacaaaaaaatcaacattagatcactttgcttgttttgcacttttgcataatgatctttccatagaagaattgttttgttattatctttaaaagtaacatgccttctccaatcaggtgtcctacaa

SEQ ID NO: 108875 - DNA, 665 bp, Aquilegia coerulea
  Intron number 1 from transcript AcoGoldSmith_v1.024726m (l ocus AcoGoldSmith_v1.024726m.g) derived from phytozome v7. 0 (chr-ID scaffold_9; pos 3896984 to 3897648 reverse stran d)
caacattgtgtgcttctcttactgaacgtcttcaagtatgttacctcctcattaaaaagctctaaaaactatgtgcttgctacgttgcttcactcctctccatccccccttcgaaattctacttgtacggtgcttcatattgcttcacctaatgggcctctgcacttcactgcacatgctcggccctttatttgtcgatatgcctcttatgcacttccatctgaaaagacataatccaattgttttgtaaaatattcaacacctaacatttttgaaaaaaatctcactgtctgtacgaaaacctttcaatgatatgaattttcgcttggggttttactccctcagtttttgactttactacgtattagcataaatgggatacccttcggagtccacctcatacccaaaaaactaaaagtccctctacatgtttgagaaatgttagaccctgttttggatcgattgacagtgatcagttatatttctgagtagtttgtgatgggaacccccatctgttctaagagtgggtgaggttcaacttcagtgcttcagagaggagtatgacagcacgactcttcacaattgcggatgcattgaagtataaaaatttgttgcagattcgatattaattccctcttctttcccatgtaggcatagtgattcta

SEQ ID NO: 108876 - DNA, 881 bp, Aquilegia coerulea
  Intron number 1 from transcript AcoGoldSmith_v1.024251m (l ocus AcoGoldSmith_v1.024251m.g) derived from phytozome v7. 0 (chr-ID scaffold_9; pos 1576198 to 1577078)
aattccagaaggtaactttccattgctctctcttcgttattattattattatttttattttttttcaattaaattcgttcttttgatatattatttgttattatctgtttcgattgaaaatttggctttcaattaattaacactacattgtaactttgtaagtaacatctttgatcatcgattttgtaaatttgaagctaatctagatgttttgccccggagataagtgtatacttttcaaggtattttcaaagataacatggattgagttcgtcagtgacgaaaacttaaaccggttattaatcaatttgttatgctaatttttaattcaatactttacaacgcaaaaacagttcattaatgtctggactcaatgtgttaatacttggtatatggtgtagatttatttggtttttccgaaagatggtttctaggtatacatgcataaacagatgtatcaatatgtaaagcaatcatatacgccgaggtcatttctctggtaaaaaaataaaataaaacaacatgattttagtcattttagaagtgactcttcctaccaagttatctgtatgagtgcagaatgctgcctacttccgagtatcctttggtcaggtgaatgtgaagcttgagaattgagatagttgattttagtttcataaacttaaatgcaatattaataatcaattttaatatttctaatcaatcttactaggtataccagattcattttcttttccagcctttttccgatataagtgtaattcacttggagatttctttttttttttctatctcctgtggtattttacagaaatgtttcacagaatatgagaaatttattgtatgcagggagcaccgaagcagtaggagtgctctctttg

SEQ ID NO: 108877 - DNA, 307 bp, Aquilegia coerulea
  Intron number 1 from transcript AcoGoldSmith_v1.016775m (l ocus AcoGoldSmith_v1.016775m.g) derived from phytozome v7. 0 (chr-ID scaffold_9; pos 333959 to 334265 reverse strand)
ggcatcatcatcatcatcatcatcacacaattaaggtactcaaaccgcctctactctatctttacctaatttctttcttttctttttacacataataaatattattattctacttgataaatatgtattaaagaaaagtgtatcaatcaaatcaaatcattttacatttttatttttttatttctgcttcttcccataatatatatacaaacacaacaacaacaagaggaagataatgatgatgatgttattcctcattccaacattgccaggttgcttttgcataccagcagacagccagtctcgt

SEQ ID NO: 108878 - DNA, 876 bp, Aquilegia coerulea
  Intron number 1 from transcript AcoGoldSmith_v1.002909m (l ocus AcoGoldSmith_v1.002909m.g) derived from phytozome v7. 0 (chr-ID scaffold_7; pos 7090138 to 7091013)
ttattttagaaaaagttattcatagacttggaaaggtaagattattcaatgaactacatgcctgctatgtgtgcttaattttgttcaatttgctgtttcagtttcattttgtgttgtttttatggttctttagaatgggttttgtgagaggtttaatggggtgttgacttctttgcttgtttgagtttgtagagttgagaatgatgggtttttttttttatttcaactcaattgtgatttttttcaagtttattgatttagtttgttatactgaaatactgaaagatttgattttgattcatgttctattattaatctttactttttttttttttttttttttcagtttcttgttttggtaacatctgttgaaaaacagctgggagtttctttcagtattagtttttagattttggtttatttggattgagactagtcatggagtaaaccagtagaatttttcattttttatggttggggtagtcatttaagaaggaattttatgcacattttttctttattgctcaagtttcggtttctttgactttttggtcataagaacatgaaaaaaagaacaaaaaaaagaaagaagagagattggattttaattgttatcatttttgtttaaatttaattgaatgatggattggagtctttggagagctaggaaagatttttttttttggtgcactgtaattaattatttttattatttcattcttttttgcgtaaagaggggagaggttgttcaagttgtttttggtgcactttgtagaatttactttttttttttgttatggctcatgttctctgagctaattgtgtagtgttttgacttcagtggttcacagaaaaacacaaaagcgctctctttga

SEQ ID NO: 108879 - DNA, 947 bp, Aquilegia coerulea
  Intron number 3 from transcript AcoGoldSmith_v1.008335m (l ocus AcoGoldSmith_v1.008335m.g) derived from phytozome v7. 0 (chr-ID scaffold_7; pos 5831630 to 5832576)
tgttgaagttggcaaaggaagcaaattccattgtggtatgtttaatttggactctagagaacaacaatataagtaaacttagggatgactaatagttgtatttactatttatttatgtttaacattttgttgttagagaaaaaacttaaaaaagatatgatttaaagattctgtatactttttatagggtagtcaaagagggaaactctatttcaataagtagtccatatctaaatctaaatttaagaagggaatctctatttaattaatgggatattatcataattatggagccatatcttatgttaattgggcattttagtacagtatatgaattgctaagcaaaatccacaatcacttcagtttagttccaagttcaatcatgttgcaagtaaagacaccccaaaatctggggttgtgatgttatacagtcatgaagtttcagtagcctagaagtcagaacgtgttgtttggttggaaatgaactttaaacaggtgtgggtggggtacaaacttcttaatgctttaggtgattggttcctgtttccataaaagtgcttcaaggatttttttgttgcaagtgcttcagccttcaaggttaaggtgggtttattgggtcatgattctgtgattctgacaagagttctgaacattggtccttttctatcttctgtcataccagagaatctattaaactggattcttggaccacaagagttgatagtgggccttttataagcttgacaatgctaggtccacattttttggaagtgttgagagttgtgtgcttcaatatttttgctggttgacaattaagccattaggattccatttggttttatttgttctgcaaattctgaaagtcctaatatgacatgatttttttttttttttgttgtggtgtggaacagtttgattacaggattccgatcctggaaacctgcag

SEQ ID NO: 108880 - DNA, 490 bp, Aquilegia coerulea
  Intron number 1 from transcript AcoGoldSmith_v1.003984m (l ocus AcoGoldSmith_v1.003984m.g) derived from phytozome v7. 0 (chr-ID scaffold_9; pos 3750573 to 3751062)
aaactgattccaactacagttctttgatttccaaggtaaagatttaatctttttctcgatctataactgtatcaacattcacatttgatctatattttgtcatttttttatgtaaactgtagtaatgtgaatgtgatgttgatgtttgaatcggatgttttgagtagaaaattaagttagatctctttgtttttagtaaattttgtctttttaagtgttttattgtttgatttttgaattctgtttgaaatttgtctgaaggatccctattaagaaggatgttttgattgttgattcattttatcgtctgtaaaaacatgttttttagaagaataaaaaattgttcttagttttataaatttagttgttttcatttctcttgcttagttatgtgtatataataaggttgtcaaggagatgatgatcttggatttttgtttttgtttactttgtagagttctgtctctttggtgataattgtaagttgtct

SEQ ID NO: 108881 - DNA, 884 bp, Aquilegia coerulea
  Intron number 1 from transcript AcoGoldSmith_v1.019665m (l ocus AcoGoldSmith_v1.019665m.g) derived from phytozome v7. 0 (chr-ID scaffold_28; pos 347722 to 348605 reverse strand )
aattggttcatatcaatttgaaggttaaagatcaggtttgatttttttaacaaaacccctttttttgtttggtgtttttgtagtaaagttttgatttttataagtttttatgtgttttgatgtgtattaggtaaaaaagtgattttttttttggtttaatttggtattataagttttgtgttttgaagatttgttgtttgagatgaagtattagttaaaaagtttggatttttatttgtttttagatgaacagtaactagggttttgtgattaatttttttgatgttttagataattgattcaattgtagagggtttaagattagaacaatgtatgtgaattgtgaaaggaagtttatatgataaaagttttgattttattatgtcgtgaagtagcgggaagtttgtatgatgttttgaattaaaatggtaaatctcagttaaggttatttagcaatgtgccctagatttgaatttgtgaccattgagatcttccagatctaaaatattttttagtgatacccaagtttgggaattttcccaaatctatttgtgtatatcacataactaatttaatttagatctggggagtgatgatgtttttatgacacaccaattgttgtgcactttgcatataaagcgaggcaagtttcattttggttgtccgtcgaaaaaaagatttatgttggttgtcttgtgcataaacatttagttcaaactcacccctagatataggtgtacttttgttaagggtaattatttgtcgggattctggaggctctttgaatgaacttaatcttgcggattactctttaaagtagacttgtcataacaaatctttgttgacgatgatattttgtgttttttttcttgttcagaatcaga

SEQ ID NO: 108882 - DNA, 855 bp, Aquilegia coerulea
  Intron number 2 from transcript AcoGoldSmith_v1.003458m (l ocus AcoGoldSmith_v1.003458m.g) derived from phytozome v7. 0 (chr-ID scaffold_102; pos 183187 to 184041)
aagtagctcctttcttgaagtttcctaccttttatgtaagttgtaaaattggagcttctattatgttttctttctggttcgttttcagtttattgctacaagtagtgcaatggaggtatttgatttcacgttggaatcacgaatgtaactagctatgtgttagattttctgcatataaaatgatggattgacatgccaaaggcaggatgctaataattgtgaagtgtaaatcttactcatcagaagaaaaaaaaaaaatcttacacatcagaagattaggaagcagtatctattcaagcaagtcttgacccaaaagtaccctatctccatgaaatcactttgaagagcctcagaccattatccacttctacgtaaaggaattgtagtgagatgcagtgttttgaaatggtgggaaaatgacgaggagtataagtttcctaatatcacatcttcactgtaaaataacagcaactcctttgatattggggagattatctcttcctaataaatgatagctgtatgtttcttgatatatattgagttatgcttttatgctgaggattatggctctactgagcctcattaaaataccttacacattctctggttatactctacagattatatgaattacagatgttcaaaacttagttatacgatctaaaatgtgatgttttaagcaataaatatatattacaccattgatagatcggggtccctcaaaagaattggatacagtttctggtgcgagaatggtagcatctcttttttcaccaccaagttactggcttcataggttatgatactatatttagcttgttttggatgcttaccacttcctcatttgtacagtgt

SEQ ID NO: 108883 - DNA, 964 bp, Aquilegia coerulea
  Intron number 1 from transcript AcoGoldSmith_v1.027721m (l ocus AcoGoldSmith_v1.027721m.g) derived from phytozome v7. 0 (chr-ID scaffold_9; pos 1018785 to 1019748)
tttctgttactgacatcggttatactgttggttcgtttccatttcttctgtctttgtatctcttcaatttttaattttttccccctcaattagggtttgtttgggctctcaattttttcttttgtacaaaaagttgccttttttagttagattcatgctttagaaacaattgtttgatgtggaaacgacatttttataaaaagattaagtttatttgatatatggagaagaaaaattgaatcttgacagtattcgctgaagtgtctttgttgattaaagtgttttagttaatcctcactttgattagtcacttgggctgtgttggggttgttgaaaaaaaaagccaaattgaaccaactgattttaaattgaattttttgtaacaagttgaaaatagttgaaatcccgcaattctaaccacattaagaactacttacatttttacagggaggggtttgcaggcaatagtttttagtttacatgttttagctacatataagatcatggaaactgatttgttaatattttagtattggagaaactgttattgaagacctttcaagagaggtcattgattttttctcatttgcttgaaaacctttagcatagaagaaattatttttagactgttttctttttcattttcaatagttgagttggttagtcttaagggcttaatgcggctttattctgtaatgattgtgggagaagagctgggtagaagataaaaaaatgcattttatatagagagggatattaaaaccagagattcattagtcaaactgaaattagaagttgtgtttctactttggttcataaggattgggtagttatgaaccaatactatgttcatctcagtatgttgtagttgtattcttataacggattaagacgtatttctcacaatctctactattttttgtttgaagattatattatcacgtcgcaagtgcccattgcactg

SEQ ID NO: 108884 - DNA, 521 bp, Aquilegia coerulea
  Intron number 2 from transcript AcoGoldSmith_v1.016615m (l ocus AcoGoldSmith_v1.016615m.g) derived from phytozome v7. 0 (chr-ID scaffold_10; pos 2773712 to 2774232 reverse stra nd)
ctaactcaaccacagttatccaaaacgagttaaaagtaaccatagttaagtttgcgccgttttcacttttctttcaaaaggaagagggaagccaaacacttgtaaatttgtaataaacaagccgccttgagagaccgacttctctgttaaaataataaataaatgtgtgtttagataaaaccaaactggatattctttcttttcgtcttttactttgtttagaaaaaataatttccgaaacatttccgatttatcaaatgtgttgttgagtgaccaacaagctaagcagttcacttgtttcttgatcatttctgttaatctctggaggagatctgaatgttctgattgatttcattgaagttaagtttaaaagcaagaaactgttaggtagatagatggaatgagaagaagactggtggttgaagttgagtagaagaaagaaacaagaaaaaaccctaacttaattgaaaggtttttcactttttgattttgaaaaagaacctttttttagatagagtatt

SEQ ID NO: 108885 - DNA, 895 bp, Aquilegia coerulea
  Intron number 3 from transcript AcoGoldSmith_v1.011220m (l ocus AcoGoldSmith_v1.011220m.g) derived from phytozome v7. 0 (chr-ID scaffold_70; pos 699441 to 700335 reverse strand )
gggctggtcgtggattttctcttgaagaacttaaggtgcgatgagctttgcttttttttccctatatctatttctttattcctgtttgtaacacttgaattgatattgtcgtttgttatttgatctttgatatacgatagcaattgttttgtggtgcttaattttgatgtgtgttactgagactattaattattaatttagtctggcttttgcgttgagatctacccgaatttccctaatactttggaactttacatagtgagagaaaatgaagctaccaggttcttacgggagtccatattactggctggagtttaccttttagtcattggaatacaataaatatggttgataagatttggaaggttgtttaaacttttttgatatcttagcaaatttatgtgttatttgttgttagacatgcaatgggcgtaatgaaattaagtacctaggataggtcattgcagcttgtgaatttcacaaacatgccgttgaatgatgaagatggtagtgcagaagtctgatggttgccaccctctatgatgtcatcatgttctctctgtttctatctagttccattccatttactaatattcaccttacgtgtgtgatcacgggtgttgcctatttgcttaatatttggttggtcatatgatgacaatggcaattgattttctttacgattagttattgtttaaatgagacaaacttgcttggaatgggtgatttattaatgacaaacaagtttgtgccactaaagagcaaaaaaattaaatgccaaaagttttgtaatggttttgattgttgattatatatctgtggaatcgataaaaaatcattctagtttattgtaatatcaggcagcaggaattccaaagaaacttgcaccaacggt

SEQ ID NO: 108886 - DNA, 921 bp, Aquilegia coerulea
  Intron number 4 from transcript AcoGoldSmith_v1.011589m (l ocus AcoGoldSmith_v1.011589m.g) derived from phytozome v7. 0 (chr-ID scaffold_27; pos 3424616 to 3425536 reverse stra nd)
gagggccacaaggttttgaaaaggtaatgagttatttatattttctaattaaagatagtgaaagtgaagttcctgatccgtgaatggaatactgatttgtacaaacaacttagtttcttcaaaacctagatattgtataaaatttcaaacttttgaatagaatatttttcaacttgcttgtgtgactagtaatctagtataacgtatcaacacgattgcttgcagctgtattctctgtttggaatgtttggttaggatgtactgatatttaacattttgaaatataacttgaagaagcacaaaagggttttgagaagaagagattgtcgccccagtcccatgaaacttagctaaatatatgtacagtgtaactggatgatcggatggatggatttggatttttcatgcatgatacaaatcaaaggattctccctcttctttgaaatacacaactttattgattaaatgcaaagatactctcctttttttttgttaaacgttattagattgtcatcaaaacctagcatacggggttatggatcttcatatgatgaaaaataaatgcgaaggaactggcctgcaaattttttactgttattggacgtaactcattaagggatatatacattaccagggagtatgctagaaggtaacgggtatataacattttgaagcaatttttcggaatttaagagacaagactaaagttctgattttaaatttgaagtttagactaaggtttttacagatggagttctgccattatttcatttttcctggattctgtttgtgaaatttgttgaagttggtgatttctttccagataaaatctttatgattgtaattttatttgtttccagaattttccaaattagaaatttctcaaaccatctgttttgcaggtattagatctacttgaag

SEQ ID NO: 108887 - DNA, 135 bp, Aquilegia coerulea
  Intron number 3 from transcript AcoGoldSmith_v1.011589m (l ocus AcoGoldSmith_v1.011589m.g) derived from phytozome v7. 0 (chr-ID scaffold_27; pos 3425592 to 3425726 reverse stra nd)
cacataaaaaggtttgtgtatgcaatttattttggttttatttttatttgatttattggtttgtgattgctaatgtgaagaaatgctattttctgttattcatttgagattaatggtttgatgtaggttaagttg

SEQ ID NO: 108888 - DNA, 974 bp, Aquilegia coerulea
  Intron number 3 from transcript AcoGoldSmith_v1.005951m (l ocus AcoGoldSmith_v1.005951m.g) derived from phytozome v7. 0 (chr-ID scaffold_37; pos 2194579 to 2195552 reverse stra nd)
agaacattgtggtatgttatttctttccccattccttataatgtagacagtaggagtattattattccacttggtctattctctacagataattgctatgtaaattacatcatcataggagacttgtatgattctacaaacctacttcaagaatccatggatagtcaaatatattgctaatggtagaattatatcttaaataaattcattccatccaagttactgatgaattgatgatcaatacatcttgtcgatatgagcacatcacaacttggtgcatgctcataatgaacaactgcttgtttacatggtataggattaataaaagtttctgtgcaattgtaccacaatccacaagatttgtcgatatctatttattgttatcctaaggtctagttgcatatcatctcatcttattttggtcatttgggtttataattcggtccactgtgcctttgaaagggataacctatggaaacacgacttgtaattatacgtttgatttatctatatctttatgtaattatttgtagcttttaactgtttgagataacataatatgaagttgaaattcatttttgtttgttttcattggaatgatgagctaagtttttttagggaatgatgggtatattctggattgtagtgctgtccatgctatccttggcttggtttttcgaattagattaacctggcattgggctcccacattattttcttctccatatctttttgggctcccacatttgcctctatatgttcctgcattattatgtcacaattgagcctcctcaaattatgtagtgtgtaaattatagagttacagtttaagaatgttgacatgtttgtaagcgctactatttgctccaagttgctgtctcatgcatgcatgactcatccgtataatccatattgagcaagcaatcattttatttcttatttatgatgttacatttgtatacagacagcgatca

SEQ ID NO: 108889 - DNA, 321 bp, Aquilegia coerulea
  Intron number 1 from transcript AcoGoldSmith_v1.005951m (l ocus AcoGoldSmith_v1.005951m.g) derived from phytozome v7. 0 (chr-ID scaffold_37; pos 2196070 to 2196390 reverse stra nd)
gttcgacactttcgcaccaaccgttctggtgaagagtaagagaactcaaaaacttccttctacttcttcttcttcttcttcttgttctatttgtttcttgcaattaattgatcaaaataatcaaatcaaatgaactatctattttattaatctatcagtattctttattattagcttaatcgatgatggattgttattattacaacattcttcttcttcttcttgttattgtttcttgcaattaattgatttcatagaaataccttacctacctaaatgtctaaatcaactctcaactcttgttgtttatgtttattaggt

SEQ ID NO: 108890 - DNA, 560 bp, Aquilegia coerulea
  Intron number 2 from transcript AcoGoldSmith_v1.008406m (l ocus AcoGoldSmith_v1.008406m.g) derived from phytozome v7. 0 (chr-ID scaffold_1; pos 2744427 to 2744986)
cagcatccctctctcttactacactggcattctcggtatgtttcttaactaaattgtccatacaacactactaagtactaacttatttcaaaaaaatttgtaatccatatacaatagtgattcattccccattttgcttatacccatttcaacatacttctattccaccaaatcattacaagatcaattttagttcccatgacactgacattctaatatccacaatattttttttttcttttggggtaatacatcagtttccacattctctatttgatattgataattggttcatgattagttggctagtttctcaatggagaactacgcattccatagcaggactagctctatagctctagatgtgaagaaacagagcagtcctcttgtactatataactagaagcataactggggtgtttatgcctctctttccggctccccaccaaattgaatgctctcaccattttaccgtaacaacgagtcagtcgggtcttatcaccctctttttattccaaaaaaatgtctttcatcctgtctttattgtgtcattcacagga

SEQ ID NO: 108891 - DNA, 318 bp, Aquilegia coerulea
  Intron number 1 from transcript AcoGoldSmith_v1.006701m (l ocus AcoGoldSmith_v1.006701m.g) derived from phytozome v7. 0 (chr-ID scaffold_1; pos 2155733 to 2156050)
agagttgaaatcaaagttaaagcaggagtttacacgtgagttctttatatttctatctatcactttgtctacattcatgttttgctagcttgttgttttctttttgtcttcttattttctgaaaaaaaaaaaatatatcatttgacttgtataatatatagtatagagtaaaaactaaactcttttcatgtggggtttttatgtttttttttgttttctatttagttggatttgaacttagtttattgattccatttacattattgggaaaaaatgtttttagggagaaagtgaatatcccaccattgaagtcattta

SEQ ID NO: 108892 - DNA, 811 bp, Aquilegia coerulea
  Intron number 1 from transcript AcoGoldSmith_v1.008005m (l ocus AcoGoldSmith_v1.008005m.g) derived from phytozome v7. 0 (chr-ID scaffold_10; pos 2405132 to 2405942 reverse stra nd)
gctgaaatttcctcattttagagctcaagcttcaggtatgattatttctaagaaatggttttttttttcctgtaatgtcaaacctttgcttctacaaatatgaatttacgacatgtagacattgcttgtactagtcaatattttggacccctttggtagaatttgatagtttgtttatattagacaccaatgcagtttgcagtccacatgtaaatttcttgtttatggtagttggtttcgaggaaaaaaaatgatctgtatcagtgtataggaaattaatcatccacatgacatgactaatatgtaagcatatttgtagtgttacctttgcgaatttttgacatttatcacataaaaaaagtataacaagattgagattagaaggattataggaattatttgacttgaagaatggagaaacatataggtacaactggaaagaacaatgaaatttttggaagaagagtctgagcttgttcaggtgcaagttactaggccttatggtcattatcaatacaaaacaaattgaaggatatagaatctacaagtaaatctttaagggaaaggaaaaaagtctcttcggccaatatctcaggctctatcatcactgtaaggatagttttaaggcataattccctcaaaccccattgaaagtagaaaataagtgctgacatgtaatcaaaatttgttgttcgtgtattatgtacataactacaacctgtatgaaaacaattttcaactttgaaaataatatggtcctttcacgtgttctgcagaatctgtacaagccactacaaaatccagttcagaa

SEQ ID NO: 108893 - DNA, 938 bp, Aquilegia coerulea
  Intron number 1 from transcript AcoGoldSmith_v1.000612m (l ocus AcoGoldSmith_v1.000612m.g) derived from phytozome v7. 0 (chr-ID scaffold_18; pos 2399615 to 2400552 reverse stra nd)
tgtttaacgaattcattcgattcaaatctcttcaggttagatttcttacatctaatcaaacttttctttatcttcttaatgttattattctgattcttttgaaatttgatttcaaaattatgatttagaatgaggtttaattaagaaaatcaatctcacatcgctgtagtgaaattgtttgatttattgattttttttttgttgattttaaaagcattgttcatcaatttccatgattaatgaattaatgaactgtgctattttttttttctggaaattttatattattgatgttatgtaattagggttaaattttgatgaaatgtttcttttcttttaatatcttgtgtgtttcactttaaagcatattggaatgaagtaaattcatgagctacttgcttagttatttacataacatttcatcaaatataaacgacttgctatttgctaatgtaattcatcaaaagtgtctttagttatgtgttattattgttggtggtgcttttcatcaaaatcaaattccttgatactttttctagtaatgagccaatgaggggtttggttgtactaatatagagctggtccgattagtggtttacaaaggactaataggtaatagaacaacggggttgttcttccctagggctgatcacatgatagaggaccaatatagagctggtgtgagttctagaaactactttctctttgcaaaccagggccatgacgtagagagatgtgaccttgttttgaaatttaagtgcattccaacttccaagacttccaaatgatccatgttatggtgaagggtagccaactttatacatctttaatctatgagttttcttttagtccaagtttgattaacttatatagctgacagtactcatgctgatttccttgaagctgtgagaagcaagagttaaagatcgagtgtttct

SEQ ID NO: 108894 - DNA, 952 bp, Aquilegia coerulea
  Intron number 1 from transcript AcoGoldSmith_v1.004323m (l ocus AcoGoldSmith_v1.004323m.g) derived from phytozome v7. 0 (chr-ID scaffold_28; pos 1337336 to 1338287)
aagatatttggctcaattctaaggtataataattttctttcttttttacttcattttgattcaattaatcgtgttttaatttacgaaaacaatggtcgaaagcaatttatagtttaagtgtacataatttgagaagatgattgagctggagagttagaacaaaatcataaagaacgatcaaaataagtaatgttggtgaatttgatgaagatttttggcttaattgtaaggtataattattatttttttcttacttcattttgattcaattaatcgtgttttaatttacgaaaacaatggtcgaaagcatttttatagttcaagtgtacctaatttgagaagatgaatgatgttcagaataaaaaccgaagcttgagaaagaaaaaaaccaataggttggaatgataaatttgaaatattggaaattacatatagatttgactgttggtttggcaagagagatttgaatttgtaatttcacacgctgatataatatgtttgggaaaggtgtgttatctttttaatgacacttcatgttacagaattcttattttagcaattaaaatttaaaaaaacaaaggtgggactgttagagtgttagggtaacttcactagcaaaattgtaatattacccactggaaaataccagttctcttgaaattgtagaaccatactcaatcaataattgatgaattggattttttttttttttggtaaagaaatggtttaaaaaccaactaacagaaaaaaagtgtttagtttgtgaaatgtatgattgagaacatattagagtgcggtgttcttcaaaacgatttggtggattgtttttgtccatcgtgcttttttatcatgtttaggggctttgatgttagatgatgtcaattttatgagtcaagcatattgagaggtcttcttattcaggagcatagatccattgccaggtttatagcat

SEQ ID NO: 108895 - DNA, 979 bp, Aquilegia coerulea
  Intron number 1 from transcript AcoGoldSmith_v1.019143m (l ocus AcoGoldSmith_v1.019143m.g) derived from phytozome v7. 0 (chr-ID scaffold_1; pos 11450871 to 11451849 reverse str and)
tgccttgctttcagcagtttctgcattttcccattgtaagatctgcttcttaatgtctttatttttccttatttccttattctggcaccagtaatgaattatttagaacatttggctgaataattgtaatgtgaacattgtggataaggtcttggtttgcaattgaaaggggtaatgcaaaattattaaatgaaaaacaattggaggcagagggtaggctttttaaagagacaacacacaacaatatagtgaggagtctcactaagactaagatgacaaggatataagtgaaggacatctactcatctatccattcttaagctcctggagtttctttttgtaggaataagttggtcaggaatgtttgagatatactgtgtatggaactcccacgatttctatgataccctagagttagttgatcagctggtgcaactctccacaagtattctttgagttgctctgactgaattaatcacagatccccaaatattatgcttagctcaacaaacctgtcagacgctcaaagagttaatctacggtggctcaagtctcctaatttattgtgcagagccttattggagccttcaatcattgagctgagtgaatactcatagtaatccttcatctccaccctactccactactactaaagtgcagatctagtaacttgttatccaccagtccctaatattatctacatatgtgattgttgtattaatcttcaagcatacatagtatggtctcctcgactttgacgacaaagtagccaggtcaaatcctaaaatacagatacttcttccacatctttcagcatttgcccattcgacaaatctatcttttctttgcatctttctgataaaaaatcatgaactttgtatcatgtgttcatacttcatacccctgcattcaactttaattctatatttatgttcccattcacttgcagtgcacatcccagcagtatctgtcacagaag

SEQ ID NO: 108896 - DNA, 919 bp, Aquilegia coerulea
  Intron number 2 from transcript AcoGoldSmith_v1.003626m (l ocus AcoGoldSmith_v1.003626m.g) derived from phytozome v7. 0 (chr-ID scaffold_10; pos 1218054 to 1218972)
ggtgagtagaaagtagattgttttggttagtttatatttggatggattactgatgttttggttggaattatgttgtattgagtattatgtgtaaatatatagtcttaaatacatggtttttaattgcgtcctgcgtgtcatgttttgattaaatacccttagaatatttggaataacaaaatatagctttccagtttagaacaaagaaaataaaggaaacgaaagtaaagtaaacataacacatgtgatctacattgaaaacatctagatactaagatacggaacaaaactattaggttaggagttaggaccaacatttaactgagcttttactaaggacaagaatagtaaaaacgtagaacccggagatgaaattccaggcattctaatatcgattctcaactcgcagggaatgttgatagttgttgaatatcttttcctctctttcatgctgttatgtcaattaactgccaggagttatttctaaggaattaaaacaggctcactgaaaaagtaacacaatcaaatcagtagttccataatatatggcctgcccattgaacatcgtacacacttctgtactccctttgacctccatttgttgcatctatccttctttttctctctttttattttcttctgataatgtgattcttctatcacacatccactccaaatatttgaaaagtgggtatcttatcggatagattgaaacttgtctggaaaaaaatgttcatcttctattgaagtaagttttaagatatatacacgcttttgacttggcttgccgtaacgggatttaagtctttattatcagtatattattattattattattagtttagaaaggttgtcacgtacttcacaaggtttcaaaggcttaatattgtgagtctttttctctgacagccaagtgttc

SEQ ID NO: 108897 - DNA, 571 bp, Aquilegia coerulea
  Intron number 1 from transcript AcoGoldSmith_v1.024809m (l ocus AcoGoldSmith_v1.024809m.g) derived from phytozome v7. 0 (chr-ID scaffold_21; pos 1308885 to 1309455 reverse stra nd)
tgtggcacgtagaatgggttacagacattatttcttaaagagtgcccatgtgcatattatgtacactgttttgcacatcgactgcaacttgcactgttttgattattggtctagtagttgcagtgtttttttggattaggagttctttggattttgagagatgttatccattatggaaaatctgaaaggccgaggttgaaagtatcacaagctttatctcgcattgatactcaaggagcctttttttgctaggaatccttttctgtcagcaggtgttctattgattaaaaaaaaggttagaccgtttttgttagacaagttcaatatagattgttgatcttttattctctcgcctctaaaatgtattgcaaagtggcatcctatgacatttattaatgccaactgagtaacataatatagtaagaagtgtaggaagaactttcatcttccaatttctatatgcctcatcaactacataaaatggaaagttgcaggtagattacctgatcatttgtactaaacagtggatcttttttcgccttctagagactacgtgaaatctctcaagcgg

SEQ ID NO: 108898 - DNA, 679 bp, Aquilegia coerulea
  Intron number 1 from transcript AcoGoldSmith_v1.007961m (l ocus AcoGoldSmith_v1.007961m.g) derived from phytozome v7. 0 (chr-ID scaffold_30; pos 892333 to 893011 reverse strand )
cattccttgacaagtaattatacatttctttacacactagctttgtatagataaactagatctcgatttgtttcgtcgtcttcaagttttttaattaccttgcgagattaatttcgatttgatttcatcattttctttttaactaccttatttaaatttatttggagattttagatttgataatgtgtttgaaagatcttctaaaattcgatgcttttactatggatctactttgttgagattttttttttttttactgaattgagattacagaaatggatcgttatgtttgttgtaatgttcgttcaatgtagatttagaatgatttattaagtgaagttcttgttattagctttgaagagtgtgaactaaacgattgcaaattttagaaaagatagatctagtttagagggagttatttgttactagatttttagtttttgctgtaatgtttgttaatattagttatagaataaaagatcgatcttatgttttggctttattgtagtctataaatccactctaacctcaattttggaactagtaaaaacaaaacacatgtctaatctgagccttaagacattcaaagttaatactaatttttctttagagattaacttctatcaattgctattgtttgcatatatcataagattaacttgttcatattctgacagat

SEQ ID NO: 108899 - DNA, 230 bp, Aquilegia coerulea
  Intron number 1 from transcript AcoGoldSmith_v1.002846m (l ocus AcoGoldSmith_v1.002846m.g) derived from phytozome v7. 0 (chr-ID scaffold_18; pos 3016378 to 3016607)
aatctctcaaaatttgaattttttatcttccaacggtcaaatttccttctttaattccacttcaattcaaatatttcccaccaaaaaaaacattcctttcaccattaaaacttatccaaaactcaatcttcctatacactccaacccacgattccccacaattcttcaacgagcttctttcattgaaaatgatagtggggaagaagaattttcgattatcgaaacacgac

SEQ ID NO: 108900 - DNA, 366 bp, Aquilegia coerulea
  Intron number 4 from transcript AcoGoldSmith_v1.005879m (l ocus AcoGoldSmith_v1.005879m.g) derived from phytozome v7. 0 (chr-ID scaffold_1; pos 744782 to 745147)
tttggagctcttgctgtaagttattattgctcacatttttaatatgtgaaagaacaatcaacataactactttttgttgaccatggaaaaattacggaatggaaggaagttgtcctattggaaattattctcaaaatttaactagaatcaaaccacaatgcagttgccaatatgtttaataaaatgccatctcttatataaatggtctaagaatggaattggattgaaacttcaaagattctgaaaatttggatccgttagattaatatcagtttgttaacatagtttcttaccctttctttgcaagatacttatgatcgatctttaatttccagggaaaaggccctaaacgcattggggctttaa

SEQ ID NO: 108901 - DNA, 913 bp, Aquilegia coerulea
  Intron number 4 from transcript AcoGoldSmith_v1.005380m (l ocus AcoGoldSmith_v1.005380m.g) derived from phytozome v7. 0 (chr-ID scaffold_1; pos 1444164 to 1445076)
ctttggatttggaggtatgttcttatcagtgtatttcgggaggacaacttaatcccatgctttggatttggagatggtatgttcttatcagtgtatttcggccaacatgttttgagcatatcttctagataatctgtactactttataaaggcgcctcattttcgaggtacttgcgaagccttagctgtcacatatttagatttccacgtattcaggttttttaacttaaacttaaatataaattgggccttaaaacaaagcccaacactgtttaagctcaacaaccaaacagacttgattttttttcccatccttctagatttccatttctttttcgagagtcttcttcatcttcctaccaatctgttcgtctgagatcatttttgattcacttttcttcagttttaattgctgattaatttcacaaattttgattccttgctgctactctgttcttcggtttcacttttacttcaatttcaattgctaatcaatttttcgaattgtgattcattctcccctctctggtttgggtaatctcttaatttttgttttctttttgaattatattatggtaatttgatttttttagtgggtaaatgtttctgatttgaaagagagcgtaggctgatcaagcaatgtatatgtttttttttttggtagataaaattactacactttatcaaataaacaactatcagaattcaccgtttattatgcactatatatagtttgtattcaattatgtgttgtgcatgtgtgctaaaatatgatcaggttcttttttataccattactgaatctcaattgcacgcgaaagcgtgcacattcacataatgttgatttcgcgtgcacattcacataatgttgattaaaatcttatggttgtacacattatgacagcctcaacgc

SEQ ID NO: 108902 - DNA, 626 bp, Aquilegia coerulea
  Intron number 2 from transcript AcoGoldSmith_v1.014837m (l ocus AcoGoldSmith_v1.014837m.g) derived from phytozome v7. 0 (chr-ID scaffold_6; pos 8778901 to 8779526 reverse stran d)
gcgttcagcattggtgctgatttttgcgtcagaaggtttgtttgttcaatattttcaaaacattactgccgaatatttgagggacttttcatgttatcaattatatttgcccactgtaatgtcgttgaattctcgaaaatggttaatgcatctgttctataaataaatcattacacatgtgtttgcatacgatttgatgtgactcatgaagagagagggggggggggggggggggggttgagtaggtctcctttgattttttttttttccagtctaatgcataagttagttactgttattgattaggtattcatattcattaatattagcgacatgtataataatgatggtttgtggacttttttgtatctgtttgcacatgtacttattatctcctgccatcatctgcgtcattttcactatatctgcatacatggaatatttacaagctagatagtccacacgttatcttcttggataatgatttgatagattgtataaactgtttttgatatcttgtctaatttactcatggaaaggaaagtattcaaagtgtttgcatgtttatggtaaaagaactacacttggtaacttatttcctcttataattcccaggtataactttg

SEQ ID NO: 108903 - DNA, 493 bp, Aquilegia coerulea
  Intron number 3 from transcript AcoGoldSmith_v1.010304m (l ocus AcoGoldSmith_v1.010304m.g) derived from phytozome v7. 0 (chr-ID scaffold_40; pos 1045556 to 1046048 reverse stra nd)
ttttgcgcagttgctttagctctcagtgatttggggtatgtgttaagcgtttggatgcttatataaattatatcatatatacaactgttttctgtttgtatgttatcattgtgtatcaagagaaattgatatatgtgattaaaacatggaaaaaacaatactgtagaatgctgtaagtttgtagatggaagactgttcagttgtttctttctgtgtcaacctgatggctttgctgttatcgcattcttgttgcctacccaagcatatgaaccaagatgatgatgcctttttcttttctgaaatattttttcttttgtttaaaactctgctccttgatatatttcaagtttgatagcttgtgttttatttccttagtagttttttccctgcggtccttatatgtgcttaaatttgttttgaattttctgagcgataaaatagaatattatgccgtgcagatacaaaccagcgggaatcaggttggactctggcg

SEQ ID NO: 108904 - DNA, 726 bp, Aquilegia coerulea
  Intron number 1 from transcript AcoGoldSmith_v1.025222m (l ocus AcoGoldSmith_v1.025222m.g) derived from phytozome v7. 0 (chr-ID scaffold_1; pos 8895628 to 8896353 reverse stran d)
ctgaagtcttcatcaccctcaccattgcgaaggtcagtgcctccatccttggtcaaaacctttttttcttctcatattgatttcttaaggagtctctcagtgcactgccttctggaccagcttaagagagctccgactcataaggaaattgtttgtgtgattaaaagaagtcaattcaaaacttcagcgaaaagaagatgacacatgcaataatttacagtaaaatctgatactaatttattgatacttcaagtatatacaaaatacaatgtataattgtatgaaccataaatacttaagatacatgctaagtgtgtcagtgttcgtcaattcttgaagaacaaacacagaaatttttcgaaaatgtagaattcatagcagacacaattataccgactccagaaacattcaagtggtcctgattcacgtactggttacatccaactggtttgaagttattactttttattaatttgcagtcatagcaacacactatcatgtttgtgaaaatatagtctacaaattataattgcttcaagataaacttaggattactttgttggagatcagatatgtatacagtaaacatattttgtaaaaatgcagagcagtatcacaatctgaacagattaatcatgtgagacatattctaaaatgtcagaaataatgtatcgaactttaaaagacagatataaacacactgttcttataaatgcttttttcagc

SEQ ID NO: 108905 - DNA, 610 bp, Aquilegia coerulea
  Intron number 1 from transcript AcoGoldSmith_v1.010901m (l ocus AcoGoldSmith_v1.010901m.g) derived from phytozome v7. 0 (chr-ID scaffold_11; pos 5146120 to 5146729 reverse stra nd)
caacgagcatatccatatcaaatcaaccaaatacggtaattctacgattgtttttttctaatgcatttaaactgtttgttgaaatgcctcaccgagtttttcatgcttttgtttctccatattttgaattttggatataaagtagcaaatttctactctttgtagggattgtgttatttcacatatatgcatgattgacaaccaatgcagatggtttcgagtgaagttatatgcttgtggtattcataggtccatagcagttcatttctaccgtcctatcatatgcttacattaaattagagtgattcacatgagtttgtttgtttttatttttttttttgagaagaaaagatgagcaagtttatcttttaggcaagacatgttcatacataatacgacaatgatttacaccctttaacaggagttttggtaattctgtaatttgagactttaatgcattgaaatcttgtttaaatgatcgtgtaaagtttctgttagatagtttcttaagcttcgatatattaactaaatttatgagtataaatggtctcgatcttattttcaaccataagaccaattttgtttgtttgcttcagaatataggttgagc

SEQ ID NO: 108906 - DNA, 414 bp, Aquilegia coerulea
  Intron number 2 from transcript AcoGoldSmith_v1.005727m (l ocus AcoGoldSmith_v1.005727m.g) derived from phytozome v7. 0 (chr-ID scaffold_30; pos 2372884 to 2373297)
caggtaaacgaataaaacggaaattatgtcactacttactataaaattcaggtatactcaagaaaccaaattcttatctttcgacattgactttcaaggtgtacacttgacttattcgatgggaggaccagggagcaaggctccgatccttgatcttatgatttgtagtaaagaaagaacttgttgaaatgatttcatcatgcctccattttcctaattgaaaatggaatcattttccgcagatgttcatctcgataactgataactagacatcaaaagttgttcttaacctttcaaagttttcagtatattcctcttttatatccaaccacctacttcccatcttgacacactatattttgatgtggtctactgtcaggctgttgttgggattgtcgtacgcaagcattttgc

SEQ ID NO: 108907 - DNA, 932 bp, Aquilegia coerulea
  Intron number 3 from transcript AcoGoldSmith_v1.005727m (l ocus AcoGoldSmith_v1.005727m.g) derived from phytozome v7. 0 (chr-ID scaffold_30; pos 2373279 to 2374210)
tcgtacgcaagcattttgcatcacaaatcgatcaagtaaccttcttgttattcttttttcttcgtgtttattttatctacatatcaatatacagtaggacacgtcattttattatcctgtttccaaccgacattgacttgacgactaggagaggaggaagatgaagtcgaaccactagttatgagtattcaaatgagggggcagggaacatgatagcatatgggagtcttgtaggttgtatggtcatattttgtaggatagagggttaggtgtagttaattcttgattatctgtattgtctctcgaagtcttgattatgggttgatgacttgatgtaattgtcgttaggctttttcatcaatatacctttttatctataaaagaagagaagatagcatatcttggagttgaggctattaacgctcagagtaggtgatcccaactcctgttgcggactaattttcacaattgattgaacttttttcctgacttgctagctagatttcttataagtaaccccaacattaatcgagtcgtatgcatcagtttgccatgtctctgacgcaatgagtgacctccattttgcatacaataaatgaagtgaagaacaatgccatgattcattctagaagcaccaaatcaaatgcatattgtacaagacataaagatgtttaaatactagtggcatgttatgattgtaggattaatatatatttaccctgtaagaatattaaatattaattgatgcatgcaacatatgctaaacctgcgatccaaggtacaccagttgcagataagcttataacgtagcaatttggattatttcacaacacatattgaatccatgtaagtgcataagtaaagcaaaagaaccacacatactatggtttgaaagttttttaaatttattatccttctctattgggcaggag

SEQ ID NO: 108908 - DNA, 916 bp, Aquilegia coerulea
  Intron number 1 from transcript AcoGoldSmith_v1.004197m (l ocus AcoGoldSmith_v1.004197m.g) derived from phytozome v7. 0 (chr-ID scaffold_60; pos 1168363 to 1169278 reverse stra nd)
gtttcttcaacaacaacaaaaaaaaaaaaaaacaggtatgttttattattatttccatctttttaacaagtttttttcgttttagatgttcttatgagttatatacaagtgaatcaaatttactagctagttccatcagttggtattggtaaatggtaacatggaaatggtctgctttgttcatcagtgttttttttttcttttttcttataattaatccagaaaaaaaaaaacttcattttagttggtttagtttatatatatatatatatatatatatatatatatatatatataacacttatattatctcatgtattacctagttttatcattacagagaaatatgtattgagttctacaacattttctactcttcaagctacaaagtcagcaagaaagaaaaagccaaagcacacaatgtgatttcttatgttcatagtttggaattatatagttttgaattttcaagaaattacaaatcttcacaaaaaaaaaaaaaaaaaaaaaattgaaaagatttttattaaaactttgatttggactagaaatatctgtacgagggtcggtgtgaaatgtgaatagaaacatgaaaaagtgggccatagataaaaaaaaagtatccacgtggcatacaaatacaagtcttagtggaactcttgttgacttgtgttctatgtatagtttccttttagaatgaaattactgctggaaacttaaaacttgggtgttaagtactagtaattttcttcttttgatttctttttcttaaataaaagttgatgatgatgatgatgttggtctgtaattcgaatagaaattaccattgtataattatgaaaaaaatattagtaattgagaattgatcaaaatttaagttgttaagctaaagaaattaaaattgtggcagcagaaa

SEQ ID NO: 108909 - DNA, 818 bp, Aquilegia coerulea
  Intron number 1 from transcript AcoGoldSmith_v1.023589m (l ocus AcoGoldSmith_v1.023589m.g) derived from phytozome v7. 0 (chr-ID scaffold_72; pos 1051641 to 1052458)
gtaacagatggttggacacttttgtatcaaacctcattgtatatcagaactatttggttgtccaagatctttgtaaaatgccatgtgagcttcttacacataagcaatttgcatgagcaaaacccacggccacttgtctcaaagtcaagccatgaataatacctatttcgacacatgtcaggataacggcacttgttgtttatatagaaggacagagatgcaactacctgctttgctagctaacccacgtgtccgccatcttcaatacccccaaaatttcttcatatacttatattcacagcaactgtgtttctcatatctgttgttagttgttactgtgaatagtaaagaagaagctaagtagcatttctcttaagttattgaattttctatctgtttgaaatcatcgaagtgtagtgctttgttcaaagaaaagatcatgacggtgagtacttgttaaattagtaaaaaaaaaattaatagataattttatactatttcatgttaaaaatgtcaaaatgaatggcaacaagtgtaagacaagtatctctatactatttcatgttcaaaattaatagataattttttttttaaaaaaaaaaaaaaaaaatactatttcatgttcaaaatcaaggcattctcaaattcttgttccatgcatttcattagaaatagaattaaggtatgggggtagcaaaatctggttatacgtagtttcataaacatgcactggttttgagtttactgtagataatattaagcttttctctgtttacatgcatggtactagaaggctccagagacgaggtctcgtgccc

SEQ ID NO: 108910 - DNA, 899 bp, Aquilegia coerulea
  Intron number 2 from transcript AcoGoldSmith_v1.012201m (l ocus AcoGoldSmith_v1.012201m.g) derived from phytozome v7. 0 (chr-ID scaffold_21; pos 3300949 to 3301847 reverse stra nd)
atagcagtgattcctcagacaggacacgatcccttgtaagttgttttcctttttttttcagtgtttgtttatttattttcatcagtaaagggtattaaatagatgggttgcttgaaatagtttgctaaaaataattattcattaataaaaatcatttttgtattgtttgttcataactaattattttcatttatcaatggtgcgtgcaattattattattttttatatttttttctattgtttgttcataattaattactttcatttatcaatggcgtgttgcatttttatttgtgctgaacaaccaagtacatttgaagttagaatcaaataatttaataaatgaagaaatggaaaacagcaaatacatttaaaaatgtagctttgatagacacacgttgaaaaccaattagtacaatatatggttgtgcctcttttatttgataacatcttttgctgttaatgtaaggtctttgatgacagatgataatagtcaaaccttgtaatcaatttatgactaaaataaaagttgaaaaattaaactaggataaagaagatttgtcacaccccaggcatgaagaaaatatttatgaaaaacataatcaaagttctgagtgaaaaataattcagtaggcatccacacatttataactaaactattttttagacatccacggtacatgtacagaactcacgcttaataaaacaggaagttttatcatcttatgcctataagaagtttatttggcaagatactgcgacttatgtaataaaaaactgtaaaatttaaagcatatgtgttcacataaggctccggtgatgtctcctttaaacaatgattcatgtggcttatgaataattacttgatttttttgcagaagaagaaggcatacgtacgt

SEQ ID NO: 108911 - DNA, 836 bp, Aquilegia coerulea
  Intron number 1 from transcript AcoGoldSmith_v1.012201m (l ocus AcoGoldSmith_v1.012201m.g) derived from phytozome v7. 0 (chr-ID scaffold_21; pos 3301828 to 3302663 reverse stra nd)
gatcgatcgaaagctgctcgtctgaatttatttaggtcagttttttttttctttcaatattttgtttcagtttaacgttatttgagattattggagtttcgtgcaaacttctttgtatcaagtacgaaaatttaaatcactattttctttattcaaaaatctagttttatgttttttttttttttttttttaatttagtgacagtgctacaacttaatttatcaaagttgttcctttttcgtttcagtttaatattatttgagattattggattttggttcaagcttctctgaatcaaagtaagtaaattttttttttttttttttgtatctgaaatcaaaattttctttatccagagttttagttttatgaaattgtatatcgaaaagagtaatgtatggtgttaaattcattaattataccacaaaatgataaaaaaatccaaacaaatttgtgtgaattgatttaatgcttcatacatagccatgctcagtagcaactagtagcaaattgcggagtgaagataaccataaaaatagtaatgaattgggattgaccaactgttagctaatatgaccaattaatgcaccatagtactcgagaagaaactataaagtataaagaagaggaggaacccaaggaattgattgaaaggaggcagagttgagtaatatatggaaagggatgagagagtaaatgtaatatgattagtgggaggatgggttaccatatttgcatattagtgttttatatataaataaaatttgacaatctctgaaattgtgtttttttttcctacagtggtggctaacaacaatagcagtgattcctcagac

SEQ ID NO: 108912 - DNA, 694 bp, Aquilegia coerulea
  Intron number 3 from transcript AcoGoldSmith_v1.007299m (l ocus AcoGoldSmith_v1.007299m.g) derived from phytozome v7. 0 (chr-ID scaffold_1; pos 2229649 to 2230342 reverse stran d)
ggatactttatcctgtaaggtgagtttggagtaaattagctccatctcttgcaatgaagtgcttttaagcaaaatatctaatttgatgttctactctttctgatttcatcataaagataattgcagcctgtcagattttcttattgttgatttttgatgtttacccaaagtaatttgaattagaaaaaataaataaaaatccagacatacatcaggattctggacttattctagattttagagtttgtaaaagaatgcattaattgctccaacaaaggatcttctgtgcctttggttgaaaatgtgagggaacttgacgacctaccctttgaggattgtagccttgtaggttcagatgggactcaattgcaagctcaatgagagagtaataacattgcttgtaattatgttaagtactgttatttttaatgtatcgtatcgatcgatgtagttggtctcttcagaatagggtaggactaaaattcatctccatagtgaccaaaattaaagacagagtgactcctttaaatgctgattttatgagacggggtaggggaccctagttaacaacctcgatttctcaaaaataaaaattaaacacatgtgatgtttattcccgaaatattgctcagagaggtagctgacagtaatatatattttcattaaaccgcagggtgttggtattaacaatagg

SEQ ID NO: 108913 - DNA, 717 bp, Aquilegia coerulea
  Intron number 1 from transcript AcoGoldSmith_v1.006830m (l ocus AcoGoldSmith_v1.006830m.g) derived from phytozome v7. 0 (chr-ID scaffold_30; pos 1561912 to 1562628)
ttttgtttctgctcctggtcgtagaattgttgctggtgagttttaattactatatccatcaatttattttattttgatgaaattacatgttttatagtgaaatgaattgaatttaatgatacccgttttgataatttgtttatatttgaagattggtacttgtgttgtgtgtttaagctgcagttttatagtcaatttttttttattaaacttaggaatttaatcttaaaatagtgaaactttggtagtaaatggtcgaaatcgaaagaatgccccagtgaaatttgtgattaatactgtgataatgaactttaacctatgataagtaacgactctttgggtagaagttacttttgttgtcatttgtgtaccacagtatagttaaatttagctgcactcaaaagacctagaggaaaatgcattcgtcaagacgacgttattctctctcgatcacaactgtattggacatgacctatgaagagatgtaggcatttcggtgtagatattcggttacattgcaggaaaaagggttttgcagtattcagtttcgacgaatttcactcttgtacgttggatattgcagacatcattgattcatctagttgcatctagtgtttttttttccaatagctacgagcctactaatttatgcctaaaatttgatttattctcacttttgtttctgatatttttctaattggttagttggagatttgc

SEQ ID NO: 108914 - DNA, 923 bp, Aquilegia coerulea
  Intron number 2 from transcript AcoGoldSmith_v1.006830m (l ocus AcoGoldSmith_v1.006830m.g) derived from phytozome v7. 0 (chr-ID scaffold_30; pos 1562702 to 1563624)
gactggggaagaaacggtaatctctttgacattatactagtggatgagaatgttggaggttagactcatcatttgatgggtcttgaccatagatgtttcttattatgttggtcatatatgcaggattattttgaattgcttactagtatctacttatttgggcagaaatttgcctgtctctgttaggcaccctttagtaacataaccttttgaatagtgtctaatacttcagatgaagttctacgattctattaagcaaacaagtttccacacatgttagagtgcctgaggatcattctgtcaacctaccaacacaaacccatgcttttggcatatgtttgtgcctacagcatgtgctagtgttagacagtctcataattttcactgtcagagagctccacaacaagaatttatggagcttatcagaaaaaggcgtggcacagtaattgttggtgcttctgtagcattgtaacatacttctataacaaataaggggttcggggatggagctgatttctgaaatggatgcttctttcaatcataaataaattaaataaatgactacttacaaggcttctctttttctcaattatttgctatcttccaactaaatgtccacccctctacaatttagttttctccagcaaacatttcagttaatccaaatgtatttagttgttatatatctcttcatatatgcctaatccatatcttgttatatatctcttcatatatgcctaatccatatcttcattacttactctcttctattatgtcgtgttttattagttaaatttactttagaccatactgtaatttattggcttcatatttgatccttgtcgtgccgatttgtaaattgtaaaatttgttaaatgtttgtttcaggtattaattcagcttggagatatccttgacagagg

SEQ ID NO: 108915 - DNA, 777 bp, Aquilegia coerulea
  Intron number 1 from transcript AcoGoldSmith_v1.021247m (l ocus AcoGoldSmith_v1.021247m.g) derived from phytozome v7. 0 (chr-ID scaffold_15; pos 4142888 to 4143664)
ctggaaccattgtgttagaagagttggaaacccaagtttaattttcccttaaaactacaaaattgattatgatataatatttttttccattaagtaaaagtaaactttttaaaatgtagtatttaagctctcgaaagagccgatcttataaatatatgattgtcgttatctttcttaattttcaaatcaaaataatgataatatctagtgggtatatttatgtggattttcggcactttaatcaataagttaaaatggagtcaatatcacttggatacataagtataaaattgcattgatgatcctaggatatgttgatcattgattcttataaattttcacaagtcaagaaggagttgaatgttttgtttttttcttatacactagtaatgaagtcataaaaattatcacctaaaattttcttatgttctatcacctaaaattttcttatgttctatcagtgaggttccattttatggatttaaaatgtatgaattattgaattatgatatatatatatttccaagtgcaatagagcacaataaaattaggttgcaaacttatctacgaaaatctaataacttggtatctgcaccaaaatcttcatatagttaaatagttaagatcagtaaactaagccacataaatacaatattatgaacataaaccctgccaaatcgatgtataaatcataataattacatccgtttacttcacacttaaaaccatttggccaaaatgatagcatttcttgggcgggttgagtcattctcataa

SEQ ID NO: 108916 - DNA, 428 bp, Aquilegia coerulea
  Intron number 1 from transcript AcoGoldSmith_v1.012775m (l ocus AcoGoldSmith_v1.012775m.g) derived from phytozome v7. 0 (chr-ID scaffold_28; pos 2362598 to 2363025 reverse stra nd)
gaggtaaaggttattttcttgtttagcgaaattctgttttcttaagtttacttgtgaattggatggattactcatggtgatatacttgtatgatgcttgttacaggtgatcagtggaactcttctgttgagaacctgacgaggaaaaccatgggagatgtttatgtaaatccatattcaccaacatatccgtattcatcaacatcggtcgctaattatcataatattatggacaatgcaaccatgggaggtaactatgtttcgtcgccgcctttgagttactgcaatatgaatacaatcaaaagacacagcggagacagaaatctaggtaatggaagtgtgggtaatacacttaagctctatctgagggattctaaaaagtggactgaagaagaaattcttaaactttatcaaagtgacccaagctta

SEQ ID NO: 108917 - DNA, 790 bp, Aquilegia coerulea
  Intron number 1 from transcript AcoGoldSmith_v1.009800m (l ocus AcoGoldSmith_v1.009800m.g) derived from phytozome v7. 0 (chr-ID scaffold_10; pos 5895936 to 5896725)
gcttgttcgattgatctgagttatctggaatctaggtaatgatacatatgattatgtgagtgaatacataatgcatttatgttgttagaagtagcttatgttaactacaatgtgatgtaaatgttgccaaatgttacaatttaaagttgaattttctttttttttagtaaaatgcatatattctgaattctgatagataaatttggggtttatatctaatatatacaattcattttgtctgttttgagagttatccaaattttgatgtgggataaatgtggaaagtagtgttttttaagtgttactcaattgaataccttggactggtttcttctacttaactagtatctagacagcccaatcaccagaaacataccaaatttgtgttagatgtgttatctgaagagtaatgctgaatacaatatttgactttaactggaagaatttggaagaaagaccacaaacaaagagattttgtacggtgtggcatagggtatttagcacgtcaacaatttcatcgtgagcaaacctcatttgtcagatgttattggattctacatcacagtgtctaatataaagattaactaaggtcttttccattaaatctaatctttgtttgatgcaccctcactgcgtgtaaccttattttgtttgcaatactttttccccctttctatggaggttgcatctttgaaaattttatggttgtacgtcttatcattgaattggcttaagaacgtctaataagagtgttttgccttttcattcatgtaggaattggtattctctg

SEQ ID NO: 108918 - DNA, 835 bp, Aquilegia coerulea
  Intron number 2 from transcript AcoGoldSmith_v1.009609m (l ocus AcoGoldSmith_v1.009609m.g) derived from phytozome v7. 0 (chr-ID scaffold_30; pos 1171856 to 1172690)
tccctgtaagtaactctattatttattcaactttacaaccaatacctatcatgtagtatgcaccatccaccagttcacctttattcattcacatgccctgtccttatcttactagtggactataaagcatgggggttgtgggaactttggatgtgtggtcatcaaactgaattagttttccagacttctgttcaagtcctacccatgtgatgttgtgtctagaatcagcatgagataagggaccatatggtacaaaactaatgatttaataagatatccatatgtaacaaaatcaaattgagattttcagaaatcttcaccaaatttctcatcttgggtcctttggcaaacccaaaaatttggtgactacacacattatagattaggccttattaactttttgtgactacacaaacactgaggcacatgtttgagtgggttgggcggtttgtctatattggctttggcataatggagtgggtgataacagtaactcatcagtactgcaccttgatgtataatttcagtggactagtttgtaaataaagcatttcttgtattctatcctatgggactatgatagaaagacacctttttcttttcttctttagactggaatccaaagaaactcatgtcattgatgtgcattttagtggaccttgtgttctttggactattaaaaacgaatttagtttaatttatttaacctaatgtaatgtaatcaaaattattaaaataaattatcatgcaatttagttactaacatagacataaatggtttgtgtttgatatgaaatcaggtcttggcaccacttcccattggatttgccgtgtt

SEQ ID NO: 108919 - DNA, 897 bp, Aquilegia coerulea
  Intron number 3 from transcript AcoGoldSmith_v1.004920m (l ocus AcoGoldSmith_v1.004920m.g) derived from phytozome v7. 0 (chr-ID scaffold_51; pos 108051 to 108947 reverse strand )
gaggtacaatatactattacattttcttcgaatgttatgttttggatcattcaagaacaatttgaactaaactacaacttgttaagtgatcactctggagagtaggaagtaaaagtaagaacattctttacgggtgttctttgaaaatttgtatgttcaagataacctttcttttggtagttgtaaatataactaagttaaaaatctcattaagatagtttatctttggtcttgattaatagttagattttcttataatacgcgcagacaaacacttactgtggtaaacagcaaatttcatgtttaagcaaaatttatacatgttgtttgtttgttaagctatttgtgataagaaatgggcaatctaggggctttgctctatctttgtgtaggtttgattaggtccggtaaactgatttacaggggaatcaggaagataatttaggaatatttgaatgtacaaaaagatgcgaagaagacaaagttttgactttacttctaattttcttttaccatcctgccctaaaattaatttaccactgaaattgattttccaatcaagcagagtaacagaccctttataaatttgtcattgtgtgagcatttttctagcagcaaaatacagagggtggattgcgaagtagtatctttttctgttgtgtttataatacattggtcatatgttagaatagggaaaaagaaatatacaagagcacagaggatgagaagtcctaaaactactaaaacaaatcagcaaactctctactacagaggaaaccccaacaacaagactgcacttatactctattggctttagttcatgaaaattactcaaacgtattttgttgtattcttttggcagaaattcgacattgggatctagcttccaggtagttt

SEQ ID NO: 108920 - DNA, 206 bp, Aquilegia coerulea
  Intron number 1 from transcript AcoGoldSmith_v1.003615m (l ocus AcoGoldSmith_v1.003615m.g) derived from phytozome v7. 0 (chr-ID scaffold_9; pos 1954132 to 1954337 reverse stran d)
ttgccgcttcatcgttcctcattgttctgtttaacgtaagtactttcttcccttcttctgaatctttgtttttctcaatgtttttgtttataaattattggaatttttattcttaaaccctaggggttttagttttatcaaaacatctaacttgtctacataattaggtagtcgaattgctgtagtagcattagcaccaaggaatt

SEQ ID NO: 108921 - DNA, 1005 bp, Aquilegia coerulea
  Intron number 1 from transcript AcoGoldSmith_v1.020051m (l ocus AcoGoldSmith_v1.020051m.g) derived from phytozome v7. 0 (chr-ID scaffold_15; pos 3160793 to 3161797)
ttgtaaagaaactagttgaaaaggcttctaagaaggtaattaataacttcttacttgatcaatccccatctagctagcttctaatatatatatatatattcatttttttcttagtttgattgattttaatcacttgaaacattatgttaactagtaagtttctttgagattaaactgaaaattttcaaatcgtaaatgtaaagttgtgacagtaatgtctgcatttgctctgtgtgttgatgcaaaaatggttggataatctttatttaattagtagataatgtatgattttcttgactagtataatatgtgtagagataaagcaaaaagaaaaggaaagccggcaactggcaatgagaatatgattaatgaaaattttacttaaaaagagaataatatatattttattctaaaagtgacagtacagtactatgttaatatatatgttttgcattaagaagaaaatattaattaaaatatgtcattagattcggtcctttggattttaaaaaatcattatagtcaagataaaataaaaaaagttggcaccttagtagatgtgttgttaacatggtattggatttgggccctctttgacccactacatgattgagtacacctagtcacctactcaactttaaccaaggacaaggatatggtattatggtattggtaatcttaatatttaataaaaaattataataaaatatgcagaaaatgtacaaattaaggaagaaaaagattgatgtgtatcaagttatgactcatagtttactgattattgggcccatttcagtgaaagaaagcccaaacccaaataataaaaaaaattaattaaactatagaaaattagaacgtctaatttagctcctggtgaggattgaactcacgacctttcgcttacgaagcgaacgcactaccactatgctacagaagcacaattctgtttactattatgtagttttaattaatttaacttattgcagtcaggagttgtgaagaaga

SEQ ID NO: 108922 - DNA, 969 bp, Aquilegia coerulea
  Intron number 1 from transcript AcoGoldSmith_v1.002715m (l ocus AcoGoldSmith_v1.002715m.g) derived from phytozome v7. 0 (chr-ID scaffold_15; pos 3960529 to 3961497)
ttgtaagttgcaaactttggctgatttcttctttgggttttttaattttgcaatttctaatcctatagtattgaagttaatctgtttctgattgttttgttcctttagggccatttctaatatactgtattgatttttggtaaattattaagagctaacctcgtagctgagattgaatataactacgtggggtttgctcatattgcttattcttttgcacattttaaaaagggaatcatgcgtagttttatatatgttcgtctacatttgggtgctgaaatcaggctaaacctggaggcttggcaccttgggtcgtcccagaaaattttgaaatttcaatgtgtcattaaccttactaccttagtgtattatcaggattccagaattcaaaatactaatctgtcaaactggatagaacacattctactttagctgggttcttgctgcagtcataacgatatattaactgcacgaagaaattatggttggagtttatacaccgcgttgagatgatgcatgtctagtctttagcagacctgattatatatagaaaattttacttcagttgttacttgttcagtaagatttcaaggaataaaatggaatattgtttagcttgttttcatatgaagaatgtatgtcatttgatgttgaggaagttctgcatccagcataaacagattcaaatggttctgcacttctgctgcttgttttcttcctcaagaccatgactagtctgccattttgggctcatatttttctcatataattcctaagtgagatttaaaaacttatgaacttttgattttacttttcatccaatcaacactcacagtctcgcatttctttatatctccggttagatggtaacaccaataatatttattttaattatcttcacttgcttagttgctaaattgtaaatgttacttttgttggtgtttgagcaggttgctacaatatctccca

SEQ ID NO: 108923 - DNA, 616 bp, Aquilegia coerulea
  Intron number 4 from transcript AcoGoldSmith_v1.007735m (l ocus AcoGoldSmith_v1.007014m.g) derived from phytozome v7. 0 (chr-ID scaffold_7; pos 6631822 to 6632437)
atcacacttgcaaaatcaagtacttgagatctctttcattctattttattatgtatttacacatgtttggttttaacggaaagtacgaaaaacaaattaacaacaaattgatctcataacctgctatagaaccgataataattcattcaatttctcccagtcctattgcttagatttatatgtatgtcacttgtttgacatgtggtgtctcagacagtttatatggagctttagtctttctcccttaaaatgcgttattttgatgcttatttaacttgatataataaaactctgaaggaagaccatgagcataagggattaaaccacaatgtgaattgattagaaaatctttaaacaaatcgtcttgataaatgattatgttggtatcgcctttctcaaggattaagactctgtccaattttaacaagactgcatagaaaagaagacttttgaaggaacctacagacctgcatagacaaatgattgcagtctttttctttctgtatttttgttaaaaaaacttcctcagctttgtatgttgggttggtttacttgttaacttattccaccaattttgtttatcttaacagcattctttggtggccatctggacagc

SEQ ID NO: 108924 - DNA, 162 bp, Aquilegia coerulea
  Intron number 1 from transcript AcoGoldSmith_v1.003932m (l ocus AcoGoldSmith_v1.003932m.g) derived from phytozome v7. 0 (chr-ID scaffold_9; pos 2255927 to 2256088)
gatagttttcaaggcgaaacaaaaagacctaagtaagtgttttatttttcttcctttctttagtgaaatacgtatctatttgatttattagacacatttggataattaatttgtttttttttttcagggatttgtctttgccacctgttgatactttgatca

SEQ ID NO: 108925 - DNA, 848 bp, Aquilegia coerulea
  Intron number 1 from transcript AcoGoldSmith_v1.001568m (l ocus AcoGoldSmith_v1.001568m.g) derived from phytozome v7. 0 (chr-ID scaffold_1; pos 517541 to 518388)
gcttggagacggattctcgctcaggtcagcagaatcatcatcatcatcatcagctaaagtttagatttttatttatgaatgatcttttgttttgattgattagttatctaaacctcaccttcttttcaattacatgaaaaattgtaattttttttgacgattttaagaatccccaagttttcaacatgatatagggtttcttaattaagaaaacgatgattcttctgattgtttggggttcttataaatttaatggatttgaaatattttttccaaatttagtaaaattaagcaaattattagtaagtttctgagttgtatgagcaaaattattaaatatatgtggaaagattgaaactttttgtttaaattaactgattaagaaccctttgtatatcggaagagtgatgaaaacataggaggcggtgattgggggaggaataagataatcttcaatagacggagaataagataatcttcaatagacggaggcactgatacactagagataactgacacatttgattttcaaaagaaaagacattattttggaatcatttgcaattcgcccatgatgtttataagctcttaatggctgtcatcttccttcctatcttaagccgcactatatgactatatatgacaatttttttttaaagatgaattattattttgtttcctgtttcttctttatgatgcaaatttacttggattctttctgtataaaatgacctttaattcatttgcaccgttttgggtatgccagggtactattgtagtgttttttgtaatgaatttctaatcatatgacaggtgtcgagacaaggactggagttgcaatatatcaa

SEQ ID NO: 108926 - DNA, 951 bp, Aquilegia coerulea
  Intron number 2 from transcript AcoGoldSmith_v1.001568m (l ocus AcoGoldSmith_v1.001568m.g) derived from phytozome v7. 0 (chr-ID scaffold_1; pos 518383 to 519333)
tatcaagaattctattgttaaaactcgtctttcaggtgaggtattttacaatgttgatattatgtctatatttgtttgtttttttttttttcctcttttgacagcatttgagataaaaagagctagttccaatatctgtaataatttatatttatgatgcctttcacaattgaatcaaattcatggtgttactgaaacacggactgcgcttggccatgtagatagtatagacattataaacctagtgaagcaatgttttaatagatttatgctcaatagaatcctactctgcttgctcttgcagctgtaaacttgtatttttaaagtgagaaatgacgatgctttacaatcagcgcccttttgttaacttctgactaagatactttgtctttcatttggtcaggtcctttgatttaatttatctcattaagagtttaagaatgtaattaccttttttttaatgaatggaagaacttttgatcgtttagagcttgtattcatttctagaatttcctttcaatgttgttgatgttgtagtttcattgtttggacattacatttgttggatgtttatcattaagagaaattcataagtaacttcttcaccccctccccccccctctctctctctcctcttttttaaaaaaaaaaatatgcatcaagagtgaagacacccactgaggtgcgcctcacattttgacctcatctagagccctgaggctagagccatcatggcttaccaacttctgcggttcatccttcaatatttgatgctttctgtttctataactacattctatctttcaatctatgcttaattgaagaaaaaactcatattgcacattatttttaattttttatctcgtcagtgcctccaggctcttatgttttattgatttttctcattggtatgcagggaataggcttccaatttatcaggaaaggttcctg

SEQ ID NO: 108927 - DNA, 828 bp, Aquilegia coerulea
  Intron number 2 from transcript AcoGoldSmith_v1.006419m (l ocus AcoGoldSmith_v1.006419m.g) derived from phytozome v7. 0 (chr-ID scaffold_6; pos 7679398 to 7680225 reverse stran d)
ccgtaagtattttctttaagtagtgctaacctgtgtttttttttattttcgatgtaatcaaacttaaatgaaatccatatcaaacatcggtgtctgaaatgtgttcgataactttaactttcattgaacttgcttacttgtattattgcattgaaatttattaggtgttaatatgactgttagtggaagtttagtttggataccatttgtgaacagaaaggccattattggctttgttttttggttagttaatgcaagtttttgtagaataagatgagggggtttttcttatagaggccttggcctggtatgattatgaaggcgtgtttggtgtgtaattttcaatgacatccagttgttttttagtttggtgcaggctgtagggatgatagtaactgtcaatagtacagtatagtgaaccaaataattcgccattactataaaagatctaatgaagggtatatagttgaaagaaacaggccagagtagttccctattcattcgatcactccttataaaacaaataggaaaaataggtttggaaagatgtcctgtcctgtcgaaaattaataaattataggattacaatattagggaaaataatagatatatgtattagtatgcttttttctgagaagtttcgcagttatacttataccaaatgttagaacaactttttatgaatattgtattgcacagtgttttgttgatgagataactgaattcttggttcaagtctagttctctagtatgctttattaaaagatgctaaatacatttgtttgtcttcttgtttgcatgatggatgcgtcttcacccagaccaaac

SEQ ID NO: 108928 - DNA, 714 bp, Aquilegia coerulea
  Intron number 2 from transcript AcoGoldSmith_v1.009193m (l ocus AcoGoldSmith_v1.009193m.g) derived from phytozome v7. 0 (chr-ID scaffold_7; pos 6122786 to 6123499 reverse stran d)
caagttcctgctgcagctcagtggaaatttagaaggtattttacatgacccctaaatttgcattttgcatgacccctcgttttctttttttgatcaaagtaatgtgtatccatatgtttgaattgtgttgtccattagaaagaaaaaatgaagaaaatagcttaagcccatttgtaaaaattttaatgttttgtttttggatgaacattaattataggattgtaaaatgtgtgtggaatttataagaattaaggaaaataaatacagtaggacttcagttatttggaaaagaaatggtgtacaaccagttgtccaattcatattgtttccccttactttgcaaatgaaggacctatagaagagcccacaaaaaatctgatgaatggttttaagaaccaggtgctgatgtcaaaattgtgttgcatatgtttaggatatattcattaatgaaaaagaacaccaaatatattttgctttcgaaaaagtaaatatattttcttgtaaaggacaaatgctatattgaatgtataggagtgtgttatgtacttatgtgaagactgaagaccatatacaataaagaattatattttcaatatacgcatattgctcgtaattgaaatgtctgaatcgttacactctacgtggaagtatgtcacaagctcatgtttaatctctgaattggcagcaaattgttccaacaagtgatacttgact

SEQ ID NO: 108929 - DNA, 611 bp, Aquilegia coerulea; identical to SEQ ID NO: 107652
  Intron number 1 from transcript AcoGoldSmith_v1.016085m (l ocus AcoGoldSmith_v1.016085m.g) derived from phytozome v7. 0 (chr-ID scaffold_118; pos 324426 to 325036 reverse stran d)

SEQ ID NO: 108930 - DNA, 857 bp, Aquilegia coerulea
  Intron number 1 from transcript AcoGoldSmith_v1.009578m (l ocus AcoGoldSmith_v1.009578m.g) derived from phytozome v7. 0 (chr-ID scaffold_96; pos 435042 to 435898)
ggtgttccaagttgtcgagtttcgataactagaaggtaatattagtaatgggtattgtttgattttgcttatataacattttttctattggatgacttttggttttctgattgaaatttgggattttgtatctttgaaattatagcttatgcaaatgataagattcaacatgtttgttaaagtgtctgattgacttgtgagatactcttgctttctgattatccaactatgtcgatgcattgtatatgatagataacactgtaagtctactttgtgtttaaagtgttagtaccttgaaaatggatgcatatctggatgtgtgatgtgttatgcgagtagggatgcgggtggaggtcaatgtgaatctgtgctagaaactatgacaattagcgaccaacatttatcaaattttcattttgcgcaaactctgagttttgagtgtgtgcctgtctacagtctactgatttaatacatccatttaagatctattattctagaaattgttagaagcaaagttcaaatttgagggtaggataaccagaagttgacgaggaattagaattgaaaccaaagtgtaagatgatcagattttgcttatcaaactatgaaatgcaaatgaaatttgtgatttatctattaattgcgactttacatagagtatgatatgctatgacttatcatagttatatttttcttgaacgtttcttccaagtgtagatggattccgatttccttactactgtatttattaaaaaaatgagaactatgttagtgtggtcgaagctactgtttcttgttatttgcattaactctttggttggggcttttcagattaccttcacttgcaaacatcccac

SEQ ID NO: 108931 - DNA, 695 bp, Aquilegia coerulea
  Intron number 2 from transcript AcoGoldSmith_v1.021346m (l ocus AcoGoldSmith_v1.021346m.g) derived from phytozome v7. 0 (chr-ID scaffold_10; pos 1422611 to 1423305)
actgaatctacccctccatcaattgaaattttcaggtgaggaaactccattctttgatgtgttcatgaaatcaagccgttgtaaaaagtcgagttcaaatgaataggtaggaccttaagaagtaagcttcagtcagctgaaatgtataggattatccagtatttttcagaagcaaatgccattttgaatatcagcatgccttctagttactctcactcacttggtatcttctctgcttgactacaagatcgatatagtatcacctattaattgcatctaatagaatcagtttccttgtggaagcaaaatccattgtcatgtcacccaccaagaattgagcagagaacctcagaagtaataaccatgtaacacatgataaaagtagaactcctagtagctacgatatttgttatctgcacactgcagtattttgacaaggatatcctgacggaatagattccccttcaatttacaaagattaacagtcgttaataatgattctctataaaaactactatatcgaggacttcaaatcgtatttgtgataattctcatttataatacctgtagatagtacatgaatttgtttcaatatattttaaatttgccataagatggggattattgtttctattaacttttggaaataataaaaatcgtttgttggaccaggactccattggtatcgtttctgt

SEQ ID NO: 108932 - DNA, 877 bp, Aquilegia coerulea
  Intron number 1 from transcript AcoGoldSmith_v1.004434m (l ocus AcoGoldSmith_v1.004434m.g) derived from phytozome v7. 0 (chr-ID scaffold_27; pos 1230485 to 1231361)
ctttaaacttcactcgtcgaatcactagttctgaggtctggattttcattcatttactctttctctaaattcagttttttttttttttttgttaaaatcagctatgaattacagtattattatggaaacagcgaagcacaatcacgttttgtatctcgaggcaccttcaatttgcactctacatgaataacttcttcatttgagttactgtgtctagtcactatagtgtgagttagatgaaatctggaatgcttaaatattgatagtggattggtgaaatagtcgtgtctcgtgtacttgtgttaactgttaaggagtttgtttgattgcatattatacctgtgataccctcaaaatgcaatgtagaatatatcatttaacccatgagctatgttgagcggagggaacaaaagcgaaaagaaaaaatggtagttttgtgagagatagataacaattctgccgtgatctaaatatatctaatttcactatttatatgcaagcatttttttatcaactcgtgttattaaattagtacactaaacttgtgcttgaatcgaaaaaaattggagcgctatatgtctcctcccgggtctagctgagagacccattgtgaaattatggaatgatgatatatttaaatcggtcttgttcacttattcagttattcttcacaccagaattgcagtaagatcagccttcagttaaaactatcttctgctctggaccaagtaggtcttgaggattgttgttttgtaatctgggtgtacaagtgtacaactgtttgtatgtctgaatgattctgatttgactgatgcgttttttatgtggtagtgatctacttttctgtcacaggccatcttgaagcagattgacttgt

SEQ ID NO: 108933 - DNA, 754 bp, Aquilegia coerulea
  Intron number 2 from transcript AcoGoldSmith_v1.022757m (l ocus AcoGoldSmith_v1.022757m.g) derived from phytozome v7. 0 (chr-ID scaffold_27; pos 757796 to 758549 reverse strand )
caaaaccgattttgctggcgcgcgtggtcgatttaatttgtgggaacttcacttcatcctcacattcactccaacaggagggtatgtcatacatcccaacaaccaaaggtcttcgtgcaattctattgtttattactagattactgtatgtcgagatctgtgttgcatgggtacgggtacgtgtgttattgtctgacacgggtacggagtgtttgacacggcaaactcaaaaatttaagattcgtggactcggcaaattttaatataatatattaatttttaatttttaattattaaaaatatatgttatattctatataaagttaagagcccataataatatactcgttcattttaaagttaagagtcatttagaatttcttttaagattttaggtgcataagtaagtgagtttattaggcggtggactgaagattttgcttcaattaacttttctgggctttttattatgtttttttgctttttaatattttgatctagttgggcttgagtttaagtatggcccataataatgaaagaagacctagatgatactaatcgcaccgatctctctctctctctctctctctctctctctctctctctctcttttccctctaatccgcgacacaaatctttctctcttttccctccgcgactaagataatcgcgtcggttgatgatcagtttttatgatttttacatcattgatattatagacgaatctgtagcaaatccgagtctacacgtatcg

SEQ ID NO: 108934 - DNA, 878 bp, Aquilegia coerulea
  Intron number 3 from transcript AcoGoldSmith_v1.023048m (l ocus AcoGoldSmith_v1.023048m.g) derived from phytozome v7. 0 (chr-ID scaffold_9; pos 5237794 to 5238671)
ataggtaagcagatttattctttgtttggtttcgtgttgtttatcatgatcatcttcattctgatgaatatggattactgtatttgaggcctgataccaatgagaccctttccatagtttggtacttgtgccactgaaacgatggatacttgggcctattccttaatgtgtgtcttaatcaactgtgatgctaaattttcagccgacgagcctcttttagggcaggtcacggattaacaatttaaagtttaaaataataaaatacgaatggactgaattgtgtgttatcctgttcattcagtaggactttcccctttgcaatcaactgtgatgcatattgtatctggagaagacaaaatcatcattctataacccttattttcccctttaataaactgaagaagacaaaaatttgtaaccctcttcaagaggaactcactcaccttactcccaaggatcctgaaggctttttgtacactagaatttagattccaataaaactattaggggtccatgccaaaccccagcttgctattgcaaaaaaataaaaataaaaataaaaaataaaaaaaagtttgtatcctaagagcagcagaaacttaattttcttataaactaatcggcgagtatgttaagaatttatccattgcaggtaacactatggttaaaaatatctcttgatctcttataaagagaatgttttgcttgtaagaaaaataatacagtagttggttggtcctacattattggtataacttttgagcgacctggccatctttttctttttggctttgacagatcagtgaccttattactgctttgttatttttcatataacggtactgaaattcgaaattacagttttgcagtttctttta

SEQ ID NO: 108935 - DNA, 584 bp, Aquilegia coerulea
  Intron number 1 from transcript AcoGoldSmith_v1.016928m (l ocus AcoGoldSmith_v1.016928m.g) derived from phytozome v7. 0 (chr-ID scaffold_1; pos 1620193 to 1620776)
caggtcctcgggtaggaggtatattggctacatggaacggtgtttactcacgtactttgtgacaatggtttagtccactactattgaattcaaagtattacaacgaaatcatctgtcctggtgttgcatctgccttgctacggatccggcaaagtggaattcctgctgcatccagagtaggaattaaggtttctgctgtatttgctttgctgcgcataagtttagttatgctaggtaattctgagaatataccagactggagcgtccaaagcaccctaaatatactcttctaatgtcgtcgtgttcttcttctttgttgacccatatgttgccttcactgtcgccacaatttaattactaatgattccaatttttctggcaccggcctccccttatctcagatgccaagtgtttcttcttatttgtttgggggataacttactactgctcgctttaattaattaatcgtggagttgttagaaattgggagcaagagaaggtgggagggattaatatcattaacagctatacagcctatactgcatgttttgatcatctgaccactgaaggttcttaaacaaagc

SEQ ID NO: 108936 - DNA, 512 bp, Aquilegia coerulea
  Intron number 1 from transcript AcoGoldSmith_v1.025847m (l ocus AcoGoldSmith_v1.025847m.g) derived from phytozome v7. 0 (chr-ID scaffold_49; pos 173506 to 174017)
tctctcgccaacctcattggtatgcatttggatttattcaaacttgggtcactttggcttttcattttgaaacttgggttatgtttgattttttttttcttttttcatgcatttttgcatctagttatgagtacttattaccattttattttaattttcatcttcatttgtttgtttcattacatatatctaatactatatattaggtgtatatatctaactattttctgttacgtcagggatgggggacctaaatcatagatttaaatggcttggcattgtgtattggcatatagaattaagtccttgtaataatgtacactgatatgtcattggcttagtgatgaaaaattgtgaatgtggtagaatgttgagggtcctaggtaaagaaatagctcgttacgtaatttttaatagagggaatggttatagattacagatttaataattaatttgagtttacttggatgtcaatggcttatggctaaactcttttgacaattttacagaac

SEQ ID NO: 108937 - DNA, 413 bp, Aquilegia coerulea
  Intron number 3 from transcript AcoGoldSmith_v1.004624m (l ocus AcoGoldSmith_v1.004624m.g) derived from phytozome v7. 0 (chr-ID scaffold_10; pos 1205632 to 1206044 reverse stra nd)
tgcttgtcatcttcacaaattttgtatgtatgctctaatctattcttttacttttgctatagatgatgagatacaaaactttctattgacattattttaaaatttatcctactttatatctgtgcacatcaagtcatcagcggtgattgtgtgtcttcaaaagttaaatgttattccttctgaatgattggaaccttttgttttcttgagttgttgacaaatgtatactcaaaagatcatatacctgaatccgtgttgctattagtcaaatacgctatatgatcgctggataatggggtttaatagataccgcacttcacaatagaaacatattgattgagaattacccagacaatggctcattcaaatcatttgcaggtctgcttacatattgaaccaggacagtctgcctc

SEQ ID NO: 108938 - DNA, 848 bp, Aquilegia coerulea
  Intron number 1 from transcript AcoGoldSmith_v1.019837m (l ocus AcoGoldSmith_v1.019837m.g) derived from phytozome v7. 0 (chr-ID scaffold_110; pos 47628 to 48475 reverse strand)
gctttatcactcacaaggtaaggctaatggagagttagaaaaattggatcccattggtgtaatttatttgttgattggattttttttttcttgattttcatgaaaatggtaagttgcttggtagctaccttccttatttcttcttcttctctaatctctaatccaaccattaactcaagccacaccacatacaccacaccacacacccatctagtatgtggtcatgaagtccatgcttaatttcccctgagcaaaatggtttctactgagcggaatctgctagtaagtttggtatatatggccagtgcaaaagtagtatactttttgagcagattttccataattttgtttttggatttgtggtagaagctagagaaatgggggaggaatcaacacactgcaaaccattactttggtctgattattgatttccaacttttcttatataggttttaaaaggaaaggagaaaaaagtcagaaaggagatatgcatcaacattgatgaagataagaggtaaaaatgcagcacctttttaatctatatatatgatttatatatagatatgtaaaagttattgatgtatgttgtatgatgtttagatgttacagtggcaaaactatttcttttcaagaggcagtttctttgctttcatctcctccatattcctctaattatggtaagattgacgcgctttgaataaaaatgtacaaaatgcagaagaagttttttgattggaaatcccaaagtacatctaatacttttattttttgttttgtttcaatttatttgtgaaaattaggtgagggtgggcgtgttatacttgtgaaggtaagcaagtcatacttga

SEQ ID NO: 108939 - DNA, 819 bp, Aquilegia coerulea
  Intron number 1 from transcript AcoGoldSmith_v1.012236m (l ocus AcoGoldSmith_v1.012236m.g) derived from phytozome v7. 0 (chr-ID scaffold_21; pos 3760621 to 3761439)
agctgaaagataaggtacatctccttttcaattgtactttaaaattttaatctatattatagcttctggtgcatcagcttacaagaatgaatatcgaataaaatgtatcatcatatcaaataaaatgtctgtaaccagagagacaagtgtttaaagaagcactaaaatctggacagatgttgctattgccgattaaactttgttgcttaaagttgatattgcctaatctggaaaagtgtttcaagattataccttttttacatttgagtgattcgtggtgataacttataaacagtttgattaagaacacatgattaagtttagtttagtgtttttcatgcataaatgagtagaaaattcagtggaagaacaagatctcaaatgcaatgattttcaaataacctggtcaatgtagcagaaaactgaaaacttaagaaataaactaattaaatcttgacattctaactaacattgatcatattaacattacatttatcatcttaactaatctaatattacattgttcatattaatcatgaaaaatccagataacaggaagttcataatccttttgtttctgtgttgaattttacagtgtccttttgtgccgtcaagcttgtatattggttgcagattcataattgttgttgtgcctaatgtgcactggtatcccatatctgcctatgggcatttggagattctgctattacatcacagttaaatcgatgatagctggcattcaattttcccaaatattttgcttacccgtcttgaaggaaattttcattctctttgttttcatctcctaaagtaacattg

SEQ ID NO: 108940 - DNA, 803 bp, Aquilegia coerulea
  Intron number 1 from transcript AcoGoldSmith_v1.015355m (l ocus AcoGoldSmith_v1.015355m.g) derived from phytozome v7. 0 (chr-ID scaffold_77; pos 142396 to 143198)
tggtcattgggcacacttcattgctggagggttgggtaagcgtaatgaatttgatctttgatctaattgagcttgtttatctagttgagatagatgatattaaaatgttttcttaaaagtcaaatcactccctcagatgcaaatcaaagggaaaagaataaacctaaaccttcattcgccagtttctatcttatcttaaaaggtactatgagagtcatcccaaaggagcaatattactttcttacccttgtcattcaaatggaagagaaatgcctcaggaaagaagaaggatgcatgcggttataactttcaagcagtataatgtattgatgttgaaaaatgtattttatcacatctaagtgactcttttggtaatttatttacttcttctctgattattatgttccaatttgagaacattcaatcctgcgcctcctacttttatctctctttctctcccctcttcaagcatggagttttaaaattacgagcatatatatgctgatgtcaccgtagtttggatctagatggcacctagaggcgcacacccatgcttgggtgcggagtgtgggtgtcggggtacgctattgactgcataggtgccagtgtgcattaggatgacaaatatcataacaactatatgttcttgtgtgtggttgccaagttattatctctgtaccctataaatgataattataatattctccttcctataagttcgcaatttaattctctagcatcggtttaggctcatatcgctgttgtctataatgttccaggagatacacttggttcttttatat

SEQ ID NO: 108941 - DNA, 690 bp, Aquilegia coerulea
  Intron number 2 from transcript AcoGoldSmith_v1.027150m (l ocus AcoGoldSmith_v1.027150m.g) derived from phytozome v7. 0 (chr-ID scaffold_6; pos 5802759 to 5803448 reverse stran d)
caacctcacacaaggcaccaaatattgcttctctagttaagtttaaatacttttgccttctttcttctctcccttcattatgaatttaggataatggcacgaaaagtttacagcaatcaaatgttgctcagaacccaaacatgtccactgcaacactgtgagatatacaccaaagcataggaggttcctggtccctggactgtgaatgcaacagaaaagtcatggtgtttggaaattttggtgataccatagaactattgattgagagtttgttgttgactagttgttagaaaggtcattcacgcaggcagtttgctcagcaaacttaaccaacacctttgaatacacatacgcattactaaatgtggtccaaaccaaaacacttaagtaatgctccccccttatcgcatggctagctacctcacaccattgatcatgagaagttcattctaagtactttccaagtcatccttcattggcattcatgtacttaacattccaatacatttctagcagatagtcgtaaagatcataggctcatgtcattgttattacaccaaactggtataatgatacgggtgagtaaattgttaataagtcttgttgtggaaatgctgagatttttatttatctgtgtggtgtgtttaaatttcaggttgggtcaaaattgagtgtgcagaatcttctcta

SEQ ID NO: 108942 - DNA, 392 bp, Aquilegia coerulea
  Intron number 1 from transcript AcoGoldSmith_v1.027150m (l ocus AcoGoldSmith_v1.027150m.g) derived from phytozome v7. 0 (chr-ID scaffold_6; pos 5803536 to 5803927 reverse stran d)
attcctctgcttacactgaggtatttattgtagcttttctctgttttgctgtgttcagatgtatagcattatgaatgatctcaaataaatcaaaacaattgcattcttataagtagttcaaccacagtatatatctgattttagccaacacaagtgttcttctcaagacccatgtctattcatggcaaaacttgttacatccataatttttctcaccatgtattgtgtagcaatgtcgtgctgaatatcattatgcctatgaatgaagtgctaaatgcaaatgctatgttcataaactgaatgtgatatactgatatactacctgtttattgatgatcaatcacgaatgcggtgcagtgtaaaaagtacccagagaacccactatacaaggg

SEQ ID NO: 108943 - DNA, 832 bp, Aquilegia coerulea
  Intron number 1 from transcript AcoGoldSmith_v1.008515m (l ocus AcoGoldSmith_v1.008515m.g) derived from phytozome v7. 0 (chr-ID scaffold_109; pos 247033 to 247864)
gcactctcagagacccaagtaatcttctcattctatctgatcatatctatttgtacaaccattcaagatcgttcagtatcgatgtttcttaagttaatcatgatcacactacttacatgtatatatcggcaacttccatggtttagatttgcaatgctagcttcttgcaatttatcaatgatttggatcagtttctgaactagcaatatgtatctttaatgattcgtatctctaactagtaactttagacttttgtgtgtcaacaactctttgataattgatccgtttttaataaatcagataatgattcaaataatgatcctgtcaatatattaattatatctcagagcattatataacaaacatgagagatttaatgataattattttatttttggaaataattgtgcgccttaggctctttcatatgatgattttggtgtggcttgatttttttcaccgtcagtgataatatataagagttgcttatatattaagctgtaaattttgctccttggatgacatggtcttgtgtgtttgcaatatggggagccctctgtatctgtattttagtaggtaaactctctgttctccttctgtttttccctgtattctccatttattacgccaaacatctagtgctactattgatatataatgagactttgcttgctcccagtgtgcattatatatcgcaaggagcaatgtgccccaacttatttcagtgtgcatagcctggtagtagtaaacatcaaatcaatgtgtttaatttcttttgcagagttatcatttccaatggatttaatttttgttctattaatattgcttgcag

SEQ ID NO: 108944 - DNA, 847 bp, Aquilegia coerulea
  Intron number 2 from transcript AcoGoldSmith_v1.004845m (l ocus AcoGoldSmith_v1.004845m.g) derived from phytozome v7. 0 (chr-ID scaffold_81; pos 593194 to 594040 reverse strand )
tccagagtgattcttacaaggtctttagagccaaggtattatcacttccattactacttttttagtaacatgcctaaatatcaccaaagacacatgtctcgatgacatccaacagtttagattaactacatctaagtatatagcaattggtgtcaaaatcaaatataccatagagtgctcttgatgccgaaaaacaaagttatttaagtgccgaaaatggtttcgatgaaccgtgcacgccaatgccagacttctagcacgattcatcaatctgtgcggtagaattgttgggccatgtatgaactatgatcagttcatgaatgaaaagatcacactggaaagatgcagatgatatgtattaaagaaagtttccatgtttaaacttgaaattaaagtcattttaatgttctgtcatacacagctacatattctatatagccatataggttttgccttatatagttttcctcctatgtgtccattctcttgatattaatgattgtgaaatcttcattatcaatgtcacatgatcttgttgctaaatttaaagaatggcaagtccttcatgatttggacaactttttcctttctaagcatttttatgattccattgaactagggtgttaaatggttggttacattccaattggattctaaaaggaccttaactaaacctaaatagatgaatattgcaaaacctcaaaatattttgtgcattaggtgcattgttttgggtcaatttgttgggagtttattctgctttttgctttattagtgttttgttcatgatctaaatctactcttacatgcaggactataattgcacagttgagttttattggagccc

SEQ ID NO: 108945 - DNA, 962 bp, Aquilegia coerulea
  Intron number 1 from transcript AcoGoldSmith_v1.010670m (l ocus AcoGoldSmith_v1.008932m.g) derived from phytozome v7. 0 (chr-ID scaffold_9; pos 358013 to 358974)
agtaagttcttcattcgatctatttttcttccatttagcttttcaattacatgttattctcatttttttttttatgttaaaaatcgtatttttactagattatgtggattataacttgattttttagttaatgaagttgataaagtttaggtttttggttggtttttagggtttaaagttggtaattgatttctgcaatgatatttacactaatttttaacaaaatggccttccttgtgttgtttctgattaaaaaattctctattttttttttttttgttagaacattgacaaaaattgaattttgttttttctgtatgttatcaacttttgatattagaaaagtttgtactaacagatctgaatacttgtaaatttgcttaattagttccatggtcaagtgtatactagtgaatgctgatgagtgacaatagtataaatatagtgagagcaatgcttcagcaggagacactgacaatttttttgtctactttgcactgccccctagataggtggtggtggctgtcagcctgtcacttggtaaagttgataaaaccttattttcatatatagaataatattgtcacttgagcgagccgtcatctatggacccttgtactgatgctgatactttcagttatactgtttgattttaattaaaaaaaataaaatattatgattatatacttctagtttcttgcaagtataaaatagagataaggtaaagttgtttgctttctcaattttattgtaccatacttgatttctcaaggatggactcaaacaggtcagtatctacattgcatgatatgtcactgcatctatattgttttggggaatccaatgtttgtttagtgttttagatgcacattttcaaagcaggagtgcctagagttctttttgacatcctttagtttcttcaataatctgcagtgtccttaaagccagaacatttcgagggt

SEQ ID NO: 108946 - DNA, 788 bp, Aquilegia coerulea
  Intron number 1 from transcript AcoGoldSmith_v1.013219m (l ocus AcoGoldSmith_v1.013219m.g) derived from phytozome v7. 0 (chr-ID scaffold_71; pos 553817 to 554604 reverse strand )
gagttttgctcgtttggtaattaattttatactttcaaatatacccttgttttaaaatgtttataactagcttgttgtatgttgtagttggatctaagatgaagagtttggacttagagtttgattggagtcgttttaagggagtcactatagccagaacaatatgtttatataactggtttggtcgttgtttagtctttaaaaggaagtacaataacaaattcagtttggacataagataaataaatatctttccttttttttttttctttttttttcaggtactcaaaacattttgtgttgcataggataatttgatttctaatgtaccaattttattggaaaagtcattgtacacttattagtatgtcataaacacagggatatatggctgaaatcgttgctgcaattggatctctcctgagttgcttttgtacacaaaattgtgtaaatacgcaaatttttgaacaatgcaagcacgtgataaatccaaagaaagatattcagaaattgataaagataaagactgacttaattgccttgatggatgaagttaatgacaagttacgcactgctaagatcaaccaaggggtggttcctagacatgttgtgcgaaaatggctaaacgatgtccaatgtgctttggatgagacacatcacattgaagataaagtcataacaacaaagatgtgctcaaattgtttatttcctaaatgtcattcaaatttaattttggggcaacgtatctctgagttgatcaaagaggggactgcacttgctcttacagg

SEQ ID NO: 108947 - DNA, 486 bp, Aquilegia coerulea
  Intron number 1 from transcript AcoGoldSmith_v1.026586m (l ocus AcoGoldSmith_v1.026586m.g) derived from phytozome v7. 0 (chr-ID scaffold_15; pos 2691959 to 2692444 reverse stra nd)
aaaaagttagtatataacacaaagggatcttgtttgaataatatagttggcattgacaaacaaaagttggcatgttcaactaaggtctatgcttgaattgtcttttttataatcaatttcaatataatgcaaacaaaatttaagctaagataaagaaaactaaaatataatgaaactatgaaacaaatcgtttctacagtattttgattaatcacacgttttggatctagtaccagtgcaccacttgtagctgaactggtcagaaacaaacaactactgtacaacttataccatttgatttaattaattagagcagcctggaggaaccatctaacttgataccatttaaatctgcggtaaagagcagtctgcagagatgtcatctgtggaatctcctccacggttttgtttctccagtcttcttcacggacatcaacggagtcggcagaactgttgttaatcttcaacaataattatcaagctagc

SEQ ID NO: 108948 - DNA, 832 bp, Aquilegia coerulea
  Intron number 1 from transcript AcoGoldSmith_v1.007169m (l ocus AcoGoldSmith_v1.007169m.g) derived from phytozome v7. 0 (chr-ID scaffold_15; pos 475703 to 476534)
tcaaggtactctttaattcttaatttgatgaactagctttttattcagcattttcttcttgtatccagcaacttaatgggtctaaaatttccattttttgatgatttgatcaagtttttcttagaattcagaataccacttttctgaaatttactcagaagtctgaaattgctgagattctcttatctcatacttgggtatgttcaagttcaacatcaacatgtatattttttttttcatattcaattcaaagaacacatgaaaattaacaaaatttgaaaatgtatgcccgcgggtgacatcctcttcaatcagtagctgtatcctttttatgttagccactttgattgaaacttaaaattactggaagactagcttacaagtcgaatgtagttagaagaattctgctccaagtagacttgtttttactatgttccgatgtactgatatgctaatttgttactgatgattataatgaagtttatggtacattagtaatgcttcttaacactaaaatgtagatgcagtttataggctagagttcatgtttaaggttagctgatttgtttgttttgtgatactagacaatcgctaaccacaggaacatgactaataaagtaattttctctttcgtaaataacaataaggaacctcattataatcccaagttatcatttgtgttaaaagtaaatgcgtgataagttcatccctaatattcttttatgattattaatcttcagctttttatatctaaagatctgtttttctggttccctctttacatttgttttagttgtgtgttacagctttttttctttctttctcagggtac

SEQ ID NO: 108949 - DNA, 664 bp, Aquilegia coerulea
  Intron number 2 from transcript AcoGoldSmith_v1.023795m (l ocus AcoGoldSmith_v1.023795m.g) derived from phytozome v7. 0 (chr-ID scaffold_77; pos 1845 to 2508 reverse strand)
aaataccagtggcggatccaagattttgaaagggggtgggcttagatgaattaagaaaaaaaaaacaataacacaaagtgaaaaaaaaaaaaaaaactaatttaatatcgacaaaataaacaaggttctcattatttgaaaaaaaaaaaaataaaaaaaaatatatatatatatatctaagttataagttataagacacaaagggtgcataagttggggagacagtttataaaagacaattttgagagatattttggatcgtaggatgttgatattttggaccgtaggatggtttattaaaataataaaccataattaaacaccctaattaaacattaatttgtaaacaatacgaaccctcctctcttctcaacgaagcctcattctcttctcatcttcatcaaatcaatacagtatctgttgcgatctgttgctaaccgaaatattcaatcgtaattaatttctaaacaatacgaaacctccttctcttctcaacgaagccgacataagagcgtttctctctcaaccatctccagcttctgccttctcaattggcatctgtacgtctctctctctctctctctctctattgattttggtttttaagttttttttgtgattttacacagcaggacctaaggattggttaagagagcagaagaag

SEQ ID NO: 108950 - DNA, 574 bp, Aquilegia coerulea
  Intron number 2 from transcript AcoGoldSmith_v1.025044m (l ocus AcoGoldSmith_v1.025044m.g) derived from phytozome v7. 0 (chr-ID scaffold_43; pos 1663187 to 1663760 reverse stra nd)
tcagttcgtgcatcaaaatatttagagacggccttgtgcctgggttggacatctaatggaaatctggaatcattgaatattttagctatcgtctaacatttggaatattttcttcagatttgcctgaatggaaacgcttcgatctaaggtgtccatttctttttgaattgaatgtgaatctttgttgtcagacaatcattagcgaagaaggtgtgatttatttgcttggtttcgctaaaaagccagagcaatctgaagagtgtcttctcatgtttaatcaaagcaaagaacccttgcaactgatggattccccctttaaaactagaggtacacgtcacacggtttctagggtaagtctggcggactacttttatactgacgttatgatcaacctggtgagcttaaagtatgggtactcaataacaaggatgacagtagaagggtatggtctttaagacagaaagtgagtctaccagagttttcattggaaaataatcctcatcttcaaggttcgatccatggtattgttgatataacagcatttcatccaacaaatcctcaagttattttcttt

SEQ ID NO: 108951 - DNA, 682 bp, Aquilegia coerulea
  Intron number 1 from transcript AcoGoldSmith_v1.009062m (l ocus AcoGoldSmith_v1.009062m.g) derived from phytozome v7. 0 (chr-ID scaffold_30; pos 2398298 to 2398979 reverse stra nd)
ctgctgtttcttctcttcgttctcaaggaattcaggtaaaccaatttatccctctatctctctatctctctctcccaaacttgtggaattttcctaaattgaaatgaaatgaaattgaatattattttcattaaattttgatgttgtattgtttaattatgcttttgattgctaatagtatctacttgtcaccatcagtgtttgtaagttttagataaaagtgaatttgagttctgttttgagaaaagtttcaatctttagtctccatccaatattatggttataaggtagctttacgtctcaatgaatcaatgatgttgttgatgctatatatgcaaaactgttttaatttctagctttgttaaaatcgaacttttctaacatctgattgttgggttttctgtacattctacaagaaaggaatcagtggttgtactgttgttgtttaagttgtaagtttgtaactttgttagttttgacgggaataaataaataaatagaagaaaatacttgttctacattttctgcatacatattattttagctgactataacatgcataattaaaatttgatgtacgtgttcattgcgttttttgtatttgctgtatttttggtattattctgttgtacatgaacaagtgtcccaattattgtgtggcaggctattgggttagagggag

SEQ ID NO: 108952 - DNA, 959 bp, Aquilegia coerulea
  Intron number 2 from transcript AcoGoldSmith_v1.026748m (l ocus AcoGoldSmith_v1.026748m.g) derived from phytozome v7. 0 (chr-ID scaffold_21; pos 1116538 to 1117496)
ttcgaaccttggaaaaacttgaattactaagtgaggtatggtttcatgatgtaaatttgtaggcttcatatcatggatactgtaattactgtatattgttactccctctcatgaatacacttgatcttttacatttgtttgcaatgtccgtccacttgaagtaggcactagactccttgcccgagaaagcttgatagccaagtcaacaacattttacctgttgatagatgtatgtctagtcaatgtcatcctttcgtcatgttcttagactgtgaagatcctgggtccttgacagggactcgcattatctagacatatgtgggtggccatgctttctaacgcaatccacccaggggctgcattatgtcttggtgtgcagacttcttaaacaaacagtgtcgtaattaaccaggtgatgcctagcgctcctctgtagcgtaattaacagtgtatggctccgaacaagcttgccatccatagttaatcaaatacctagcccctctgattataaagttctctagcgtacgccttcacaactgattccaggcatttttgctaatcagttaagagtattcaagtgcactggcttaggaaattagttcacattcttaaaatagaatctgctcgggatgatgcagtgaattagatagctgcgtttccttgctctttctaattattttaactttctccagaataaccaacaaacagtaaaagagtgacgtgtgtgctgtcctaattagctgttctttacaagtgaaacctatgacccgtactccaaaaaacatcagtagtgaaagtgaagtttgccaaaaataggcattaaggaatggacttttttggacacaggaatgtttgtatgtgtttttccctattatgcatggtttgcatatctgacatgtttatttgtgattgcttcgtgtgtaggagaaagtgggccacaatttgaaggtcttccgaag

SEQ ID NO: 108953 - DNA, 792 bp, Aquilegia coerulea
  Intron number 2 from transcript AcoGoldSmith_v1.018108m (l ocus AcoGoldSmith_v1.018108m.g) derived from phytozome v7. 0 (chr-ID scaffold_9; pos 4734955 to 4735746 reverse stran d)
aggataataattggcttagaagaggtaatatattttcccattgtggaatttttcttgataattttatctatttttcttttaagctatgaattgaagattggttcctttaggccagcatactgtccctccctttgatagggatgttgagtgtattcttaagcggactggttagattcaaggtagttatatccgaagtagtaaatgcaatattatatagttttgataacctatatctatacaagccatgttcaatagtattagaattatttacagagatacgaacttatgtttattcttctgcatcattcttattggttaggttagtgtataagaatcaagttaagagtttctttcttgtcttctctgtgcatcaacggatttttttttattgaaaatattgcatcccataccaacaattattacgaaatctgactttataagtaaatgaatcacatggtgaggaatgccaaaaagcaactgatgaagtcctgatagagttctcttgtgaagcaaccccagcgtaaactttgtttcttttaggtgggtgaatttaaaaatcaaatttctggaacatacacctttttgcaatgatgatttcttagatatttatttgaagatatctctgtgtagcattcctctcagtatttctactccttgtatgcactgggctatatatgtggcacaatgctagggacaatagtagtgtacatggcaatctacaacttggtagtaacttttcatgtgtatttgttttcaggttctgtctcttctcaggcttctctttgtctcaga

SEQ ID NO: 108954 - DNA, 986 bp, Aquilegia coerulea
  Intron number 1 from transcript AcoGoldSmith_v1.000958m (l ocus AcoGoldSmith_v1.000958m.g) derived from phytozome v7. 0 (chr-ID scaffold_10; pos 1466311 to 1467296)
atttctctgagatccgaagagaaattcaagtaagattttctgaattcttttttccagtaattgatatacagtagttgtattgttgattttgagatttgttttataatcgaaatctgtgtattgtatgttttaagtctgttttggtgtataatgaatatgaatttgatacttttctcctgtaatgattctgaagttatttggaatatatacatttcagtcactacttgttatgtaatttgatttaattaaattcaaagtgattaagtggaggagttaggacattgtaggcaatggtcaatgagagagtgcagctgaaaaaagaagagatggaagaagaggaggagaaggggggggggtgggggggggggagtgagatagaaaaggagggggacatggccaatacagacaggcagctatatattacatgcataagtttatctcctccaacttgagataagttttttagatcaattaattgactacagattatcttaactatacatttctatcatacaattgctaaacactctactcgctctttttttacctgtaaaagtggactattatattaaatcaaaagacatacatattacgtgcgtttaaaaagaatgaaaacaataatacatataaatcaaggtaggcccccagccaagaattcagattcttgatatccacccctttatataataagtgatcagacatgatgttcctgagatcaacagaagtttagaacaatagaagagaagacccatcatatccaagataaccttctgaaagtctacactctacagcagtaccctttacatgctcatgtcagcagacttagaatgctgtttagttgtggtacttgaaactctgcgataatcaccagacatcttattctgaaatttaataatatatttagagcaacacatgtaaattttgatccatcctatgctccacattgcacaggcggaaacagatagggaagcaggacataacaaggg

SEQ ID NO: 108955 - DNA, 881 bp, Aquilegia coerulea
  Intron number 1 from transcript AcoGoldSmith_v1.019638m (l ocus AcoGoldSmith_v1.019638m.g) derived from phytozome v7. 0 (chr-ID scaffold_115; pos 20643 to 21523 reverse strand)
cacttgttagggcaggtacacaatactttctactatttccttttattgtcttcatttgaatgtatgtgctttttgtacatatttatatgatgttgacattgcatttgattttagttcggtaaagtaattacttatgagtcagtcaagttggaagatgatttgatgtagttttataaatgcagagactacttggattgaaattttgttgtcatgaatcaccaattatgaggatcacggtttatttattgttaagctttcaaatcaaaggggcagaattgtccatactcactgacaaaagtcttggactttgttaccaaaactagagtcattaacatagaaaagacaaagaaacggtgtggtgacctatcttaggtttttatggaaagctactgtacgtggaggtcactattacagtatctttagttgtgtttgatgtctttgtgcttatgcgggtaaaaacctgtgatgtctgggggagatttcaatatgcttatatgcttctttgctttgacagtatgtcatttaatgactagtgtgcagattgtggggaagccatggcaaattgttaactttttttttttttgagaggtaaacgagcaaatatatgtataaacaaaaattttgtacaagagtttcaagggacgagatgtccatcgacaagaaaaacgaactaaaagaaaaaaagaagtaaacgtcacgttttacaaatgactgactcccaagagaacacaaacgaagcataaggaatctctttataatcgggccatctgttacaccaaagccataagagggctttggtgttgtggatggtacgtgccaagttccgctgaagatcctcaaaatacctgcgcttgtttctacagccttgccagctgtgttga

SEQ ID NO: 108956 - DNA, 452 bp, Aquilegia coerulea
  Intron number 3 from transcript AcoGoldSmith_v1.006903m (l ocus AcoGoldSmith_v1.006903m.g) derived from phytozome v7. 0 (chr-ID scaffold_30; pos 1065498 to 1065949)
acaattctgggttccccaccgaccttcctgttccggtgagttttttctcctaatttttttttttttttgttcttttcttattcaaattatacatgttgcatacaaacttatatttaaaggattaaaattttttgaagaaaaataaaaattggtagttcaaattatcagcacttttttgaaaaatggtactttaaaaccctctctttgagagcaaaattgaattattttctgaaagaattaacttaatatagttttaaataattttatttgaaataaaaagggcatgctaacacaagtagtttgaatgatgactatatagactgtgctagtgacaattaatggtcttgtttgcttcacaaatggttttgagatagtttgcaagttgcaagtatgaaaagaatggtaggtttgttttcttttaaattagcctttgcttgtcttatttcttcagg

SEQ ID NO: 108957 - DNA, 940 bp, Aquilegia coerulea; identical to SEQ ID NO: 108278
  Intron number 2 from transcript AcoGoldSmith_v1.009394m (l ocus AcoGoldSmith_v1.009394m.g) derived from phytozome v7. 0 (chr-ID scaffold_9; pos 1583561 to 1584500 reverse stran d)

SEQ ID NO: 108958 - DNA, 979 bp, Aquilegia coerulea
  Intron number 1 from transcript AcoGoldSmith_v1.011246m (l ocus AcoGoldSmith_v1.011246m.g) derived from phytozome v7. 0 (chr-ID scaffold_9; pos 2770086 to 2771064)
tcacggttaactttctctccctaaaccctagatttcgttctttttgccgtttttttttttttttcgtcatcttgaatcttgagatcgttgttcattttattaatctagatctgttattgttttattagttttattttgattagtttcaataactattggggttttatttgttgttattgatgtttttgaaacaaaatgtttggttttgatttaaactagataaaagtttttgctatgattcgattgcgttttcaaaaatgttacattaggtttttatttgtttggattaatgttttgaaacaaaatgtttgttttgatttaaggaagataaaagtttttgctttgaatggaggttgtatgatttgatttgatcatcattttcaaaaatgataaattagggttttttttgttctatttgagtactttaggttagtaggttttagattcccatttttgattatttatatgaatgttgaatttgtatcaaagatttgtattgtggaatgttgaatttgtatcaaagatttgtattgtggaatgttaaggaaatacagtggatacgaagatttcacgtctcaattgtgatttttttgtgcttaataataaataaggtttctctttttatgattgtgtgttgagatgaaaaactccaaagggtgttgttatgtttttccatatgttataatgtcttgtatacagggtcaacaacatagagtctagttaactgaatgctttctgtagtctggttccttaccattatttatattgtttgtggaagtttttgacaaaatgggagtccccttttaattttatgttatgttagcttggaaatgtgtaacatgtcctaaggtaagctagtccaaaggtaggaaatagttgattaaagggccttaatctactcaaaaaattaaagggccttcattattatcctgcaatctgtgcaggtcgctgaagtgcctttggaagactacgttgctgt

SEQ ID NO: 108959 - DNA, 596 bp, Aquilegia coerulea
  Intron number 1 from transcript AcoGoldSmith_v1.023264m (l ocus AcoGoldSmith_v1.023264m.g) derived from phytozome v7. 0 (chr-ID scaffold_1; pos 4552475 to 4553070 reverse stran d)
cctaatcgaggattttgcagagttgacgaacagaggtatgtgttaaaaacagttattttttcctttcatgtttaaaaagtcgataaatctccctatttattgatgataagatcttctttgataacgaaaagtcggctttcatgatttgctggaatatttaactcgacgttattacttttccaattaacgtctgtaagcagctctgcaatctttatttacatttatgaaggttttgatataagtgttttatcattgattctcatcttgaactttaagggaataattctcacattcttttttatttttaatacgaaaacacgatgatggtagtacacagacactctacctgtgccatactgcggtactgccacctggttatagaacaagtattttattttttaaggcaatgcttcctacattttgttattactttcacgactctctaaaacgaatggatatagaggatgacatggtttgttcaatttttgttttaagagtctatcacctcattgcagctggccgttgatagttgagagatgagtgaggaaattctgatttcagccttccggtgcgagttttagatagaactgggcacc

SEQ ID NO: 108960 - DNA, 905 bp, Aquilegia coerulea
  Intron number 2 from transcript AcoGoldSmith_v1.011429m (l ocus AcoGoldSmith_v1.011429m.g) derived from phytozome v7. 0 (chr-ID scaffold_96; pos 128070 to 128974 reverse strand )
gactctgctgtgaagaccatcgagattgaacactggtagtattttctctttttctttttccgatttgttgtgtttttgcactaatttcagtttgttaacctaaatgttttgttttggttaaaatcttgcattttctttgttcaagaactggatctagttgtatttgcaagaaaatctatgaatgtctgcttgtttatggtctgagtgatagaaatatagaatgttgttattgatgttaatatattgctattttcaaggatttctttgatttttctttgtgacaatttatcttttaggttcttgagtgctaaaatgttgctcttccttgcttaagaaaaatcaatgttttcgatgatgtttcttcaaagttcctttttaattttttgttcggatttcatcagttaaactatgtgattccttatatgctgttagaaacaacatatatcagatgactgtaaactccaaagaagtcctagtctggtcattatcatcaatctgtttactggaattgtcgtttttagtacatcttcactaaattgttatgtgactatgggacgttactgaatattgtttgcatctgtagtaaattgttatgagaggatacatggttgtaaatattactaatacagtaatacttgtaatagtgctagcagcctagcaataataaagagaaatatcaaatataacaaatattgtttgcataccatccacaagaaaattactattactatcgataagtattgtttattgggtcaactcagtcttctacctttgttttcctattaatttattgaattgtgtaaaatgctttattcaccacaccttttgtccattacttatatcttggattttgcattattctggctgtagcacacaaaataaaacatttaaggaaacggctactg

SEQ ID NO: 108961 - DNA, 767 bp, Aquilegia coerulea
  Intron number 4 from transcript AcoGoldSmith_v1.000981m (l ocus AcoGoldSmith_v1.000981m.g) derived from phytozome v7. 0 (chr-ID scaffold_10; pos 314517 to 315283 reverse strand )
cggctgttaggaggcagagtcctttcttttatcaggtaacaatggaaagataagcccctatcagccagtattactttttttataatgtgatatccaacaaatgtatttgacttgtattcttccatattatgaaacttttatacaacaccatcatatatatgaggagagagatacattagtaatactgttattattatgaagctgtctgaatatagagattaatagttgctaagttagaaccaacttaaactaatgtctgtgagtctaaatttgtgaaaactataggaatctcagcccattactactaatcaattattgagcagaagggctatagcacaataatcgttcaaaattatctatctcgttggagactaagctaatctcgataaaatgagagactaaaagaattatctcttatttatatttagatcgcattaaacatcgtcacatcctaaaaacacgtagatgggtttggttccatcaaattggtgttatgactaccatgaaaatggaaagaaagatctaatccagccagtgatacagcttaacttttgtatgcgtagggatcaactgactattagctaacgacatctatatgaaccagatattaaatgctcacagtatctaacttttcccctttggtaatatagctgataatcattggtttattctcaaaattcaagacgcagtaattattttgtttttcaagttggctttttgcttatgaaaagttttttttttttttgtaacaggtatccaaactcttc

SEQ ID NO: 108962 - DNA, 448 bp, Aquilegia coerulea
  Intron number 1 from transcript AcoGoldSmith_v1.000981m (l ocus AcoGoldSmith_v1.000981m.g) derived from phytozome v7. 0 (chr-ID scaffold_10; pos 316001 to 316448 reverse strand )
taataattttccttccggcgaattgtcaaattctggtgagatactccgatcatgtttgttcttcgtttctcatcattctctattaacgaatagcaattgttgatgttatatatttttctttcagtctgtaaagttataaatttattcttaatttagtaattatgaatcttttatttgtagattgagaaaccctaatgcttcatgcaattatgaaaagaaaatggtttttcttagatctttttttcgtttatggagaactttgatttcaattactaaatttcaaataaattcttcagagaattgcatactgactacctgattaaagggaaagtttcaatttttagagttgattctaagtattcgtgtagtatttttatatatataatgcagtagaaagaattagtaaaagtgaagtttttttttatttttttttataatttagtgagaa

SEQ ID NO: 108963 - DNA, 720 bp, Aquilegia coerulea
  Intron number 1 from transcript AcoGoldSmith_v1.011077m (l ocus AcoGoldSmith_v1.011077m.g) derived from phytozome v7. 0 (chr-ID scaffold_72; pos 909455 to 910174 reverse strand )
aggtatctttctttctttctgaattcattttatgttaattatggtttgtttgaagcttttgttctgaatttttggttgtttatatcataaattgctatgaaaattttcaatttcttattatagcggttagcatactcaggaacaccatactgtacatgctttttttagcaaatgcatacaagttattaggtctagaaattgtttgatacttttttctaacccctactatatacaaaatttgatgactggctaatctaagttttttttaaattgataaatgcaaaaattcttccttttagattattaagaaaatttaaattcgaaactcttgtccaatgaagttgtaaaaatctagacacatttatgaatgactgattatcacattgttcttaacggaataaaaaatgttccaaaggtgatgaatggttactacatatggttttggtgaaaataaaatgatctattttgttgatttgaacaatagctgtaaatgaattccatttgcgataaataagcagaaatcctttgtgattggtacatgatactgacagtgtgaactgtgcaccttggaagagattgtacttttataagtttattaagttgaatgaatatattatttgagctgtgtaaaccattttacagcatctatttatgataaccttcatattagcatgagttgactttgtgaacttcatttcttttgcagtaagcttcagagtg

SEQ ID NO: 108964 - DNA, 597 bp, Aquilegia coerulea
  Intron number 2 from transcript AcoGoldSmith_v1.009918m (l ocus AcoGoldSmith_v1.009918m.g) derived from phytozome v7. 0 (chr-ID scaffold_1; pos 10922534 to 10923130)
atcaagaagaagccgaggacgaatctttatataaggtatgtactttttttctaatttcaatttactgattttacatcctttcttagttatacatacaatactttattcatcttcaattgcgattgatgctttggaaaatgcctataatgatctttgacaagcaatgcacagaaacatgagaatttcttaatgctcagaatttgtttcaattcaaataggataaggataagaaatcataccattgaatttcagtggattaacaattgtagctgaactcttactattgtctgcaagacggcacaattgttccaactgactttagacaaaccattgagtcaacagatcagaaatcacaacatgacaacagcatgtgctatcatgttgttttagcaaaagatcgaacatcctctgcttaatatattgccttgcttttgtaatcataagtgatcttatctgcaagactgcaactcttatgctgactccttgtaattttgaactgcatgaagcctctatggtcttatcttaaagaatagtttttaagcatacctacatataactgaattctttctccagatcgttagaacaaaatactttgag

SEQ ID NO: 108965 - DNA, 1018 bp, Aquilegia coerulea
  Intron number 2 from transcript AcoGoldSmith_v1.004667m (l ocus AcoGoldSmith_v1.004667m.g) derived from phytozome v7. 0 (chr-ID scaffold_9; pos 463658 to 464675 reverse strand)
tcgaggttccatttctcttgttaacatagttcaatttttctttttcttctgatcaataaagattttatgtgtattgagaatgattttaatttgtaatttgaaattattatataaatgtagataagaattgctctaggcatgagtatgagaacactagtaagaggtgaattaaaaaaacaaacaggtaaatttaaggataagtcactattattttgatgcgagtgcttatgtggattgtcttggttcagttatattccttggttctagggacgtagtaatctgtggaagtttgctccaaatctgccttaattaacaaatttccaatatataatccaaatcatctctaaagaatttgcttcaaaatatacagtgagacgcactagggtcgctactattgtaccgaatgcacttaatcgtaattttgttatcctatccttacaactcatttctccttcaacagaacgatgataaaagtgctctgggatataaaccacggcaacaaatgtttattgcactgattgtatgaatttgctgtatctttgctgattttgttgtggagtttgaaaagtataccttgattccattagatattattggtctcactttgtctccaagtttacttttcaatatcaaaactaatattgtcctccactccagtcactatactctaattccataagcattgtatccctttatctccccatccagtgcaccaaaagatttaaattttaccaagacaccatcctacattcttgttaaagttgcaaacgaagtttaaatggtaaaacaatttgtctcttgactcttcccattacccaaagaaaaatgtgccagttcctcatacatgatgttgagcttattcatatatcgtttgagtttgtgacaaactaagcgaggctccttgtggaaccacatactgttttattctgattttcttatcaatacattgtcttgcttgtgaacatgatggcgtaataaggattgtattaccacttccaggtagctgcagttcctgagg

SEQ ID NO: 108966 - DNA, 485 bp, Aquilegia coerulea
  Intron number 1 from transcript AcoGoldSmith_v1.002100m (l ocus AcoGoldSmith_v1.002100m.g) derived from phytozome v7. 0 (chr-ID scaffold_6; pos 8499006 to 8499490)
caccaagtcataaagttccactcttgaattccaaggttatatataagtttttcagtttttatttattttaacaactaaaccaatttctttttctttattgatttttgtttataatgaatttcttaattattacccatgtttgaaatttgaattcaagttaaattttgttgtgtctttgggattcttaatttgcttacccaccatgttctagatgttattagttcttgaggtttaattgtgattttggaattttgaataattgaagcttgtttttgttagaaattttgttgttggaagaatatggttttttattttcaaatatatttgggtattataattgtatctaaacctttttaattatcaagtcctgagtcaaatatgtcaggagtagagtgtaaaaagattatattgagatggtcctataaatgtttgtaacattcatttgaattgaggtaattaaagctgagttctgcaggcgtctccaa

SEQ ID NO: 108967 - DNA, 912 bp, Aquilegia coerulea
  Intron number 4 from transcript AcoGoldSmith_v1.002100m (l ocus AcoGoldSmith_v1.002100m.g) derived from phytozome v7. 0 (chr-ID scaffold_6; pos 8499785 to 8500696)
cacttttgatagcttccacaacaagtattttgattgtaggtatttcttttatgaacgctctatctttatatgcttatttattacagcagccattctcatttgtttggtaatagaatacctagaatcctgttagaattcaattttctttctcgttacaaattaaatgcaacaacaggaacacattagactgaaacttcacactgtcaaacttgtgattccctccacatagaataaaattctaagttgatgtttctctaccacttgtattgggtttattgaatcaagcttatcaccagtatctgacagtagtcacggtattatgtgaggtatttatcccttgtaggccatttttatctatttgacatttatgcatcatgtaaaactacaacatttatcctctctaaataaaatgttaaaaagttatggagccttaattttgagtaggctcactaacctcgtcttttaccagtgtttttgtgagacatccattctccaccacgagaattaaaatagtcaaagatagggataatttgttcccttttgagaactcctcatgtaaacagtatgaactttttcatggtgggactaagtatgcctgctatattcctgctcttcctttctgtgactgttcttttgattagctaaagcatgttatcagcagctccttactttcggtaacacttttatgttttatcatttatgctaatttcactcttctgttttaatagtatgcattgacttagatcctatttgttgctttattgtcttgaaaattattcttgtcccgaacccatgtaaatattgaaatagattttttttttcttggttgctggattcgttctggattcttctgaactgctacatttcttttattcagccaaaatttggtggaaagataattgacattgtgtc

SEQ ID NO: 108968 - DNA, 801 bp, Aquilegia coerulea
  Intron number 2 from transcript AcoGoldSmith_v1.006710m (l ocus AcoGoldSmith_v1.006710m.g) derived from phytozome v7. 0 (chr-ID scaffold_11; pos 1509025 to 1509825 reverse stra nd)
ttcaggtaaacaactttccggcaaatctgacattaattaatctagaaattgttttccggcagatttctgtctatattattcaacgtgtttaccagatggatgcgttgtccttgtgccgcgtcgcaaatattgataggctacacttggatctacgttaagagattattagttatttatttgcatgtaaacctaatcggaaatcggaataggagtaggtgatagcacgtggttggattcacgtgttctgggttttatctttcaaattaggtgaaaaaaatagaaaattacgtggaaacacgacgatctatgcgttttttatattaaaaataaaaaaatggttttgataaggtgcttttatgcataccatgtgactacccattcatggttttgactttgaccaaattataggtaggggtattagcaaattaaaacccgaatatgaaatccaatattatttaaaatcttaaaaatgagcccaagcccactgtgcatgggcaggggcgcagggcacctaagtatgttgaacccatcagtatgtttgagggttttagccactcagctgacttgaagtactaacgcataacacagagacagacttgataggccataaaactacgagttgatagatttttttttgtgttggtttaaagtttaaacagaagatttttcgtctcaaatgtactgatattattattttgtttttggccccttttcctattgatttcgcttcattagaaaataattggcacagcgaaaactttggagtaaaacaaaaaatgtggtttttgtaggttactaaag

SEQ ID NO: 108969 - DNA, 252 bp, Aquilegia coerulea
  Intron number 2 from transcript AcoGoldSmith_v1.014500m (l ocus AcoGoldSmith_v1.014500m.g) derived from phytozome v7. 0 (chr-ID scaffold_30; pos 1792007 to 1792258 reverse stra nd)
cttataatcaacctgcacgcagagctcggtaataggtatgtaccagaagattgcttcagattccatgtaattgagctcatggttagtggtgttgactcaaatctcaaaagataaaggcatcttattatttatggactaatcatgttctaattagccccaagaaaatggaaatttaggtttttgttttttgttttatccaatatgatttggactagtacaactttcatatgatgaaacaagtttattgttcag

SEQ ID NO: 108970 - DNA, 792 bp, Aquilegia coerulea
  Intron number 1 from transcript AcoGoldSmith_v1.025896m (l ocus AcoGoldSmith_v1.025896m.g) derived from phytozome v7. 0 (chr-ID scaffold_1; pos 939291 to 940082 reverse strand)
atttctctcggtggaaaggttagattattttccaattcaaacatttttttgcaatttgtttttgatgaatgaggttaagattacgatttttattggttatttgaatggattttttaggttgaatttgaattttttgttggttttaagacttgtttggttgattttgaattcacatttgagtttttctttcaagtatttaaacttctttgatgatcattgttgggttctgctctttatttgtagattgacgaaggattgggatttatttttgcgaggaagaagagctttgtttgagttgattaaaatgattttttttctatgtagttgttgcttgttatttggatttgagcttgaagctaattcctttgagcttattttgcaccagctatgttcaatgaatttaccttattattttaatatggaatggtcagcctgtcattggttatagttgtttgtttcgaatttgttttcaataaaatctctaaatgccactcttacctttcttattgcaaatggttttcctcggattcctttttttgttgcaaatggtttttcttggattctttacttcagttttatccattattattacttgggtatcagactaaagtatttacattgaatcccttctttggatttgcatagtgggttttaaaaaactctatcacctattggctggttctttattctattctgttcttgatagctgtgttgaaaatctgatcatagtgttgaacttctatctatgtgttcacaggaacattttgttcgaactagctgcggctctgtatc

SEQ ID NO: 108971 - DNA, 309 bp, Aquilegia coerulea
  Intron number 2 from transcript AcoGoldSmith_v1.004052m (l ocus AcoGoldSmith_v1.004052m.g) derived from phytozome v7. 0 (chr-ID scaffold_6; pos 7653626 to 7653934 reverse stran d)
gatacttttggaccgattcaagttccttctgataagtatgatttcactcttttaagctcctttgatttcagttggatatgataattttgttctgtaaagttcatctgatctcattcctttgtttcgttttactttttcttttttgaatccaatttagcagattgtttgattggttctgtaaaattaattttagaagattaataatttgtagatagtgtgtaagtgtaatggtgttgatcaacatataatgatgaaaatttgatttggtatttaggttgtggggagctcagacacaaagatcattgcaga

SEQ ID NO: 108972 - DNA, 417 bp, Aquilegia coerulea
  Intron number 1 from transcript AcoGoldSmith_v1.022055m (l ocus AcoGoldSmith_v1.022055m.g) derived from phytozome v7. 0 (chr-ID scaffold_60; pos 474161 to 474577 reverse strand )
aacttaaagctggtttgaaaagatatggatctgatttgtgatcttatggatgcagtaagtcaaaagaaactgtttgttctttaatagttgatattattattgcatttgacacttcttaaaataatttttcttatactgaaacttgagagtaattttggattttttgcatcgaaatattttgaggttggggtccttataatactatcttgtgtgtgtgtttctgcaacttttgtcttccttctccacaacgctgctctttgaaaaagatgaatatgttttttaatgcataacaaagagaaaacttttctaatagaattttcatgattagaaaacatggtgaactcgtttccttacatattagttgagtgggtgtgtgaatgtttgtgtggattgttttgttagggacttcccttaacc

SEQ ID NO: 108973 - DNA, 774 bp, Aquilegia coerulea
  Intron number 3 from transcript AcoGoldSmith_v1.024216m (l ocus AcoGoldSmith_v1.024216m.g) derived from phytozome v7. 0 (chr-ID scaffold_27; pos 1786232 to 1787005 reverse stra nd)
ttattgctgatcaagattacactccgggtaaacaggtcaatacttgtacatgaagtgcttccgggtccggttctctattatatgttggtttgagtaattagtgatttgcgatgacttgaagatgtttggtagtggtttattctaagtttgtaaatactggcacatgctacttcttccatttttccgaggttgcatattcttttttaaacaaaaaaatgtttttgattctttgcaaacgaaatagtatatgtataaaactattatacatctgtgaactatcaaacgaaagagtataaaacccttatttttatagtgtaggactttagatggtttcaatacaagactcggtacatgatggtgtaaagaataacccttattttttttattggcaagcctgtttttaatgagatcagtaactcaaagatgcactacctaggatcgaaccccaaacctctggtataatcgcccagaggtattaccaactgagctcagctagcatctgcaagaagaactcttagttctatcctttttaagaaatttaacaaacaggtttctttacagagtgatacctgtctttacgcttttgttcttactagtattatattttccaatatatagatctttggatatagaatactttgttttaaaataggagattcttattatatacgattttgttggaataacctgtatcagtttttactgagtgtgggccatttatattctttattctaaattattgccatttttgttgatttcaggttctaataagtt

SEQ ID NO: 108974 - DNA, 875 bp, Aquilegia coerulea
  Intron number 1 from transcript AcoGoldSmith_v1.008584m (l ocus AcoGoldSmith_v1.008584m.g) derived from phytozome v7. 0 (chr-ID scaffold_54; pos 1452329 to 1453203)
gtcagcaaaaatataggtgtaattttcattacaaatgcttgtttcttgtttatttgatttgatttatcattagttgtgaaattgaattggttcttatgtgtttgtaactctgtttaattaacaaattgtttgaaaatttcgtgatcttataagtttgtgttgactattttctaattttgttgatttgattacttaatgaacatatactctatttgattgatttgttagaattagaacctgtacataattaaaccattttattcaaaggtttatatcataaattgcatttttttttttttttggttatgtctccaatcagcaatcctagatgttgtcaaacttaaatgaaattcaactcaaatccagaaacatcattgattctgagtaatttttaggatcgtggattagtagttgaattcatagctggaagatatgcgggtgtaatatattaggtttgaatttgtttcgcattggaagtggaagaaagcctttagaataagtaaacattaatatgaatggcacatgacactttgttaaggaaccagttgagatatcttctgatgtatttttgtttactgattggatgctcaaactacaaacttaaacacaaaatgttttcgagcgcttctttccattttaaccatgaggcaaatgtagtcctaagtgtgcactgttcatgcaatatgctttgatataaaattttggaagaataagaagaagaaagctttagggacaattttctccttgtgcactacagaatataaatataatccagatatataatggatgtaatgcgggtatctgttagggtgagtatctatgtggatgacttggctatatcatactctcttttaatttatgtaggaagctctctg

SEQ ID NO: 108975 - DNA, 725 bp, Aquilegia coerulea
  Intron number 1 from transcript AcoGoldSmith_v1.003513m (l ocus AcoGoldSmith_v1.003513m.g) derived from phytozome v7. 0 (chr-ID scaffold_7; pos 5225352 to 5226076 reverse stran d)
ggatctctggatcgtaagttgtttataattcactttcaaattcaaaatttcgtaatgtctaggtagtatttttggcagctgcactcattgttattaaccatgataatctggtggtcgatggaaggcatgttatcggcgtatgatcttttgtaacgatgttaacttaatataggcttaaccttgaactctacactcgggatagaaaagactatgtactgtacagctgcacttgactctggttacatttcagtgctttacacttgttgacaagttatctaaggcactgcagtgctgggtatcagagaaaatttgtttagcactataatagtagcaaaagttattgagcagccaggccagacaattaggcctcataatcattgaagatatcttattccctaaggagctcccaccatgtttccaataaacatgtttatgactggatagggtggccatcacatagaacacacattataaacaagatcactgtctcagttaaccaatggcctactgatcctttcagaagaaaatatctgaaatgaactttagtgacgagcaactcattacatgttgctttactacttttatttagaatctataatattttggccaatattaatccagagttgttttctttactgacttaatgtttcaatagtcatatattttagtaattttctagctggccatcaggtacagcaaatttgatacattcacacctgctgtag

SEQ ID NO: 108976 - DNA, 878 bp, Aquilegia coerulea
  Intron number 2 from transcript AcoGoldSmith_v1.021932m (l ocus AcoGoldSmith_v1.021932m.g) derived from phytozome v7. 0 (chr-ID scaffold_51; pos 49016 to 49893 reverse strand)
tgctatttctcgccgttcttgttggctaccagaaggtatagttcttattcttcatttattttgtttaatttgagtatgtgttgatgggttatattttttatttgttatgtgttgatgattgattggttggatgagattatgttatgggtagcctttggtttttttgagtgaatttttgacgattgtgttggatgaaatcgatttggttagtcaacaatttaggtctgattggaattgtttttgtgtgcctggatctcatttgctattgatattttttatttttatttttcgaaatgggtgtatgctattatttatcttaaaaaaacttggacaaacaaaaggagatattaaaatttcgatcacttcacgtctttatctgaacttgtattgtgtagtttgtttggattaacattttgttaaattaataaaatgattggtgagtggtgactaagaaattcacgggtcaatataaaggatgacaaagaacagaaagaacaaatggatcataaagttcttcccaaaagagtatcccagtcaaagagcatgttctcaactcttacacctcatctccatagaaaaatggacacccaattccataaagttgctttagtctgctttctgtgataaagtcttggtgttagcaacaaaagacttccgaaagagttcgttcatgagtgtgcagaaccttcaatcagcaatagagttctctcattaggccaggtgagaaacgatgatctacctctttatgactagccttatatagaatttagctcacaacatcaggttctagctccttagagtttggtagtggaattgcagtcccttcaaacatttgttgtttacacatttgtcttcattggccttgtcagtagttgagg

SEQ ID NO: 108977 - DNA, 487 bp, Aquilegia coerulea
  Intron number 1 from transcript AcoGoldSmith_v1.023525m (l ocus AcoGoldSmith_v1.023525m.g) derived from phytozome v7. 0 (chr-ID scaffold_27; pos 1613714 to 1614200)
tactcgagttaaagctgagagtccaatacatacaggtaatctaatcaaatcaaatcaaatgtcactcactcttgatgagtttgttttatgtataattagtgttttcttccatttttagtaactggggtttgatcaaaactgttttttcagttaaaaatttgatttttattaatttttttatttgtttgattctttctattttagatatttgaagtatattcaaaaccaggatttgattcttctttgtgtggagttaattttgctggaactcctatattctgtttagttggaatgtttttgctttttataaatgaaatcattaattttttgttttaccttaaaattgccggtagaggttgctaatgttttcggactgatttataaaccatggtctaatgccggatatggaatcaccattggagaggaattcacatgttttttttcttctcttgtatatgtttaggggagacagcaaaatacgttagta

SEQ ID NO: 108978 - DNA, 989 bp, Aquilegia coerulea; identical to SEQ ID NO: 108660
  Intron number 1 from transcript AcoGoldSmith_v1.012023m (l ocus AcoGoldSmith_v1.012016m.g) derived from phytozome v7. 0 (chr-ID scaffold_7; pos 2727911 to 2728899)

SEQ ID NO: 108979 - DNA, 549 bp, Aquilegia coerulea
  Intron number 1 from transcript AcoGoldSmith_v1.013259m (l ocus AcoGoldSmith_v1.013259m.g) derived from phytozome v7. 0 (chr-ID scaffold_15; pos 3265059 to 3265607)
ttttaaattgtccttttggtactccatccgtgaaggtattttgtttttagacatactgtaattttttaagtacaataacaagaatatatataggaacttatattgggccatgtccaaagaacattgtcaaacttgcttctttgtactagctatacatgtttttcatcatcttcctattgtattctatttcactagctgttttataagtaaacttcattcggaaataattttgacattttagacatgatgttccatagatgcttgggacatgctgacgcattcttgctaataatttttgtcttatgtagcagacctatttccacttattttgtaaagttggttgaatgatttctgaacgtaattaaaggatgtgaactttaaattaacaattttttttcccaccaaaggatggataatactgatcatctaattgtttactaatcatggattaaaactattgccttctacatatatgctgtttatatgtatggcgctctatcaacaagatacattgatgatttatgtgcttcattttatttttgcagcctg

SEQ ID NO: 108980 - DNA, 287 bp, Aquilegia coerulea
  Intron number 1 from transcript AcoGoldSmith_v1.000049m (l ocus AcoGoldSmith_v1.000049m.g) derived from phytozome v7. 0 (chr-ID scaffold_9; pos 5959539 to 5959825 reverse stran d)
aagtgttagcgaccaacccccacagttgcatcaaagtaagtacaaacattttagtttatttttcggttgaacagtcatattgaacttctgctttgttcattcttctaagagataaaaaaaagtttcctaattaattttgtaacagagacctggtatctctccacaataacatggagaccaggattgtaatataacttataggttattattttttattttatatgctgcaatagtgaattaatgataatcaaaacgctgttattttacagataaggttcctgtttcat

SEQ ID NO: 108981 - DNA, 956 bp, Aquilegia coerulea
  Intron number 1 from transcript AcoGoldSmith_v1.000387m (l ocus AcoGoldSmith_v1.000387m.g) derived from phytozome v7. 0 (chr-ID scaffold_1; pos 10351051 to 10352006)
gtgaacttggggtctgtgtttttactcattttcatttcattttctatttcaaaatgttattttttatctcaattttcattatgtggatttcaattctattgctaatgagctcatactgagaattgagttttttcttgtggaattgagcaatgggtattgattaaattggtcaatttcagattttttttttcaatctgggatttcgaatttatggattttagctgctgagatgaaaacaaagttattgacaacttgatttattagtttctagtaactaagtttcttgctcaattgatcgaattctatttgatttgttgttttcaagggtttattttcttttactttttgagcttagatcttaagagattcactcttctttttccaatttaactagtgattaagaatatgagctcttaaaatttatgagtttaatgaacagttcagtgaggtttatgctttctaatttaccttaatgattagatctacttatgtattttgattactcatacatgtatttgtttgattttttaatccagtttaattagtgattgaaaaatgtgtttcttctaatactctctcggtgaggtactactgtactaggatatttcgagtgcttatttggtatatatatggagatcttaatgtttgacatcgggttttggcagttttagtctttaaatttattatattatcatattactagaaatttgctggtaagatctagtgtcaattttatgcattatactgttctgatcatgggaagaatattttaagttgcttgcttgtatccacagtaaaataatgtaactggcgaagaataatagtcaagtcacttttcctgttttgatttttagatttatggaatgtaactatctaagtggcatttgatagtttattataacttctttatatttttgtattatgaataatgcagtccaagccccacaagcctttga

SEQ ID NO: 108982 - DNA, 758 bp, Aquilegia coerulea
  Intron number 1 from transcript AcoGoldSmith_v1.021585m (l ocus AcoGoldSmith_v1.021585m.g) derived from phytozome v7. 0 (chr-ID scaffold_27; pos 3125941 to 3126698 reverse stra nd)
gttttatctctggtaaccctcgatcttatctatcccttgaaatggaaggaagcttttttgtttcaaaactttcaattatttccctgtttcatacaacttttatgagcaaataatgaatttgaatatgttaggctctgagagatggtatgcttatgtctgtctagatggcccatagcaaacggcatgctgggcgcaaaaacccatcaagactatgcaattgtttagtgggagctaagttttgatgatacggtcctccaatgtgttatgatcctatatctgactcgcaaggcaattgtactcccttgaacatggtcaactatgaccacactacaaagaaggcctgtcattgttgataactgaaacataccatcttcttaggaaaacaatacttgaaagcacgcattgaaattgcagaaatggtttacatagacattttcccctgattaaataggaaacatagctatcacggcaaagtgcaaagaaacaaacacctgggtgcttagaaaaaacaaattcttctctgttttatgatttgagaagtggtttacacctacattacacacctcattaaataagaaacaaacattacgcatacgaccaatgcgaagaagcaagcaataactaggtgtttagacaagagtcctctatctttaaacaatatgtttattttaagatgagtagtattgatatgagtatagtaaagatattttaatttccaggaactaagttgttgacttgacaatatgtaacaggtgttg

SEQ ID NO: 108983 - DNA, 872 bp, Aquilegia coerulea
  Intron number 3 from transcript AcoGoldSmith_v1.018273m (l ocus AcoGoldSmith_v1.018273m.g) derived from phytozome v7. 0 (chr-ID scaffold_72; pos 31825 to 32696)
agaagaacgccattttgtttactcatcctcctgctgtgagttttcgctttgttttgcttatctattgaatatcattttgtcatttagattagtttacatgttgatacctcctgtgccaatccatcaacggcataccatgtacattggacaatgtaaagcaaatgatggtgctttgatatgtctaggaagccatcataaagctgcaacatcaacctctaattagtaatctttcccttctattccatatctgatacttgaaaactacgagttgttcacaaatcatatttataaagtattgtcttattgtctctctatagaagagaatttcatttgattggatatctatttaaatgatgtttttaccttctcatgtgtagtaataggctaatagcatgttcatctcctgccacatctttattttctttttaaattgttatacatcttccactgaactattgaactgggattgcaaaggtgtatctattactggcccgacatactgtagtcctgtatgttacattgctaaccagacccttgaaaccacctaatccattcacctttgcaatcccagtaatgattttattctcaccatcggcaataattaggtttgtggacacaggatcaccttgtctgacgataagagtaacagattttattcaatctaataccttttgcaaagactcttaagcaattgtgtaatatgaaaacacattcagttctcattgtgaagctttaataatcactatgttgcggcgaaactggtctcttcattccaaatttttgaatgtctgacttatcattgatgactggatttaagttgcaaatcttcttgtgcagggatccttcaaaagcactggactagtggtctcatc

SEQ ID NO: 108984 - DNA, 957 bp, Aquilegia coerulea
  Intron number 1 from transcript AcoGoldSmith_v1.000735m (l ocus AcoGoldSmith_v1.000735m.g) derived from phytozome v7. 0 (chr-ID scaffold_6; pos 2216048 to 2217004)
ctgttgaagtaagttttaattaattgttttggtttcaattttcttaaattgttgttgttgtttgtttaactttgcgcaattttcaaaaaattgggattatattttattggaatgaagaatttatattgggttgtaaatgttatagtgaaattataaagatgaatagagacattagagcttaatcaataattcactatttatattggtatggatagatttttatattattatgatcgagtatttaaatcgaacgttgagaatcatatgtctgttcttaatttatagtacatacagacttcgttatataattgacgtggaagcaaaaagatttttagggaaggtaagaaatgataaggataggaaagctaaatagatttaagagaacattgttgtatatcattccccatcgcctttctttgacctgcgttgttgtgacttgatagagttccagggtttacttgtgaagttggccccagtggagtcaccctacgaggtgtgctcaacatatattagaatgtatccaacttcaataattttatcggtcttaagaaccattaaagggtacttatgtatgtgtgattctttagatcagctataaatcaaatggtgttggatttcatctggaaccaactttttggttgatggcttctactatagatgatcaagtacgaatctgatattgatattatctagaactaggcatatatttacaaggtaccaataaaaatataacatcaattgatagtctaatcttaaaaaaacactcaatgttactgctttatcaaatcttaaaatctgatatgtttttaggccatttattgttgaagcacaatataatatatttttgttctgcttcctttagttctgcttgctattacaggtcttttttttattgcttatcaatgtatctttttccttgcaggcaggcgcttccttagaagcactcgctaaaggtgc

SEQ ID NO: 108985 - DNA, 976 bp, Aquilegia coerulea
  Intron number 2 from transcript AcoGoldSmith_v1.016478m (l ocus AcoGoldSmith_v1.016478m.g) derived from phytozome v7. 0 (chr-ID scaffold_11; pos 2423328 to 2424303)
ccttgggttcttcgtgtttgttgtcattggttcatgtaagcttttactcccttaagcctgataaacttttaatttttaattaattgtatattgcaactgtttttctatttgtatatgatccatatttgtttgttagattaatgtcatgaataatctggattgtgtttaatcatatataagtaggtttgtttattgtttaatgatgtctgtaatgatgaaactaagttggtcttaaggatggacaaatattttaaggagagtagttaagttatttttaaccttccctcgatgagggtcaatgtgaaggactcatatttctctgttgtaaagatactatagtaagataatttcagtgaggtggatgtaaggagagattcagaaaatttgaatagactaagaatatgaatgaagatcaatatctgccatacaagaaaagaattattttaccataatgtggcatgtatggagatatcaaatgattgaattgatgattttaacaacaaaacaagaatagaagctagtgattcaatagtgtgatagtgtcacaatctgatgttcagagattaaatgatagaaaacaatacatgtatattggaattgaaccatgaaaagatcttcatgtgatttctgtttgccacttcatgattaacattcaaaattgaaaaaaactttgtgattttcaagacaagcttttcttactaatgaaataggaaaagctgaatccctttcacagagtaaatgaatttcttttcggctgctcattccgtcattcgtaggtcatattttggttaggtttgaaattttggatttataaaagtttagcaatttcattagcttgttttttatttccttttggttagcctttgcaatgtgcatattgtttttaattggtcctgtacatctaatctaaccatattgattttggtttcgttccctttcagctttgtttcaaatcatccgtactgcaaccagtgga

SEQ ID NO: 108986 - DNA, 812 bp, Aquilegia coerulea
  Intron number 1 from transcript AcoGoldSmith_v1.002069m (l ocus AcoGoldSmith_v1.002069m.g) derived from phytozome v7. 0 (chr-ID scaffold_9; pos 6494922 to 6495733 reverse stran d)
ttaacttcattactccccaaggtatgtttttcttattttttaaaatcaatcaatttacttattcttgtgttaatttgattgtggttgatttgattgtaatgctgttgttttattggattgatttatattctgtgtagttttttgaattgggttttttttaattggggacttaatatatgaatctgcattggtattgttgattgatttggttaaattttttcgtttttgattgtttgattatgattattcgtgcttttttccttctaaagattatgtattttttggtataaagtagctattttttttttatcagaaatacactgttttttatattgattatattgttgtttgttctgataattaatcactgtcaattttcttagtggacttgttttgtgattggaatagtttgtgatttaaggtagtttgtaagtacttgtgttagattcatcgcttttaattgcttcttattcttttcgcatccaattatcataattgtagccttttcttcatgtttgtttgattaattggtattttggtgttgattttgctcttttgaggtattttatggatttgttctttttgattgtttgaacatggtaatgtttgctatattgctcctcaaaataatattgtagatataagctatctactttggcattttccatggtccctttatgctttgtgaagatgtccttgtacattgagaatcttcatgtcttctggtattttagtgtacttacatgttttctgtgttcttaatgcatcgtttaatagcaattcgagccattgagaaagtgaataacactcct

SEQ ID NO: 108987 - DNA, 841 bp, Aquilegia coerulea
  Intron number 2 from transcript AcoGoldSmith_v1.012022m (l ocus AcoGoldSmith_v1.012022m.g) derived from phytozome v7. 0 (chr-ID scaffold_1; pos 1337564 to 1338404 reverse stran d)
agggcttgttttggattttgaaagcagccaagaaggtatcccttattttgattttggtgtttaattgatttgcactttagttgttgtgaagttttttagtctaatttgtttaatagatcaacatcgatcctatattacaatagtttcagtcacattttgattcgggtctaagtttagaacttgtttaattacctcgtaaatcattacgagtttcaatttgattagaaaatgttagacgtcacttttcgtaagtattcaatctcaatccctcaaatgttcaaatgcctcaaagcgcataataatgtactaagtaatgtatttttcgaaagataattaacttactttggtcagattcaggtaaaaaaagtgaaacttgtgtgtattatccaaatcccgtaaataaacctacagaattaaaaatcctaattcatctgtaattcataatgggtttttcttcccttttaaaaaaaaatgttagcatcttatattagaatttagaagtagcagattgggaacaatgtatttttctggcgataacataaatttggggggtttagtttttaagttttaaccattagtgctatttaaagtaccgctcagcagatcgaggtttataaattgttctctttatgtgactcattgccttgtatccatttgaaaatgtgaaacaatgaactctccactttttcaccttttattttaagttctgaatatgaccaaggtctcatatttgccttgtgacctttttcgtttcccctgttcttggaaagacttcagatttgttaatggcattttgattatattaggttcgtctgagccaaagaaagtgcttcacttcact

SEQ ID NO: 108988 - DNA, 369 bp, Aquilegia coerulea
  Intron number 1 from transcript AcoGoldSmith_v1.026630m (l ocus AcoGoldSmith_v1.026630m.g) derived from phytozome v7. 0 (chr-ID scaffold_12; pos 2219587 to 2219955 reverse stra nd)
tacaggtatgtcccttgaagatatataatcactatgatttgcaaaattctaaagtaatcccttgtctgttgaaagaaactactcagaatgttgttaattcatccaaagaacatcaggttcccctgtgtacgtcgactgtacatttcttaatggtcctcaagatgtaatacatgcataaaccttgtaaaatccacttaattgtatttgcatctgcaaggactacaaaagatttgactgttcatgcacgcctatcttttaaaacattacataagctaagaccaaattcttattttgcttttttcacactattacactaataatgatatgtttgttgttggatgatggtgtccgtctcgtcactagatattg

SEQ ID NO: 108989 - DNA, 724 bp, Aquilegia coerulea
  Intron number 1 from transcript AcoGoldSmith_v1.010436m (l ocus AcoGoldSmith_v1.010436m.g) derived from phytozome v7. 0 (chr-ID scaffold_49; pos 1164888 to 1165611 reverse stra nd)
tattcatcagataaacaaaacccacttcttccaaggtaaaataatacccagatctgaaagttcttctaagtttgattacttttgggggttttttttttccattttctgattaaggttctttataaagaaaatggtttttaaatatattaatttggtgtgatttgtttgtttagaagaaatagataaagtcttcgtagatctaattgaaatcttgatgtgataatgttggttatgtatgactaatgtgttagatttctaatttgttacttgatttgagtttagaataaatggtaaagttttgttattcttccttgataatggattgaagtcagatcttgtatgatcggcattgaagttgtaaacatcatctattttgttacgctgttccattcttatagatccatatctttatttgatgtctgtcaatgcttgagttcttcttgttggaaagatgagattgattagtttcttcgatctgcataagtgcataactgaaaagaaaaagaacgaaagggtatgtttatttggttaaaaccatgaattgaacagcagaataggtctactctttgagtttttctctgcatcgtcattaaggtccatctttgggaaaccagaagacgttgggctgcatttaaagtgctacaattgatgattttgatagagcctttgtttcttttcttctctaccaggttgtttgctgttgtcgacggtattttctgcttgt

SEQ ID NO: 108990 - DNA, 907 bp, Aquilegia coerulea
  Intron number 2 from transcript AcoGoldSmith_v1.022650m (l ocus AcoGoldSmith_v1.022650m.g) derived from phytozome v7. 0 (chr-ID scaffold_81; pos 808533 to 809439)
gacactggaagtcaggtgaggttctgcttgtcattaatgagaagttgtttgatactattttatttttgttttcaagtttcggtttttattttattttttttttgatatctacccatttatttacttcctattaataaagtgtgctttgctctcagctatataatatgacaggcattttactaaatatatcaagcgtttgtatattgaattttttctactgagctatactcaaatttgtagaaattgcagttctgggtttgtgatctaaaatagtatgatgtcactcctgttcttttccgaaatagtttcttggtgacattacgttattaagcggccagactcttttacgttgatcatagttccctttggtctctgtagattatgtcaccctatattgatgtatggtcttttttttctcttgtttgtatgcttggttttgttgattgataaaatcatggctatagacattttttggggaaagatgatgttgagttttcttttcatgtatattctacttcatagaaggatgtattatttgctactatgttccttatttatccactctgcttgcacataccattgtgtatgcaaagacacttataatatgtgatatggggtgcttacactaataattatgaggtttctttagtaaacttttgagacgaatacatgctttctaccgattttgctagcaatgcataaagtgtatattgtcagatatttgcagtcttttggttgcttttaattgttttagtttatactttgtagcctgacttggttaaaagtgactttggatgtagtctgtaaatgcgcttaaaccaattaagtttcttttttgtatccagtgagaatatgaaatgtactagctttgtgagatactaatccctttgtaacctttgtcataggt

SEQ ID NO: 108991 - DNA, 968 bp, Aquilegia coerulea
  Intron number 1 from transcript AcoGoldSmith_v1.002716m (l ocus AcoGoldSmith_v1.002716m.g) derived from phytozome v7. 0 (chr-ID scaffold_110; pos 115983 to 116950 reverse stran d)
gctccttccctgcatccctagcagctgccattgttgtgagcagccactgcgttgcagtcagcagttttgttccagctgcctgaaactaattgatcatcagctactctgcacagtaacagtaccagtcatgagtcccttgcgctgctgctactgtttccctgccgtgttctcctcagttgctgttttgagtgaatgttgaatatttattgttcggcttgatcaatgcgttgcttcctgctcagcaatcttgtcagaatttctgcctgcagttgtaccattctcccactgtttcatgtcagagcttcctcccattctaccattgttgaatcatggtcctctcccattctagtagtaggtctttaaatttaatatcttgcctcatctcgaagctctttgcccttacattcaaccatggccagactgttccgttgatgtgtccaagcaatttacagtattccttaacaacttgagatcaattaataggtagtgttgtagaatcgcatatattgttggttagctggtgtagggaaattacttttttctctcaaagtctcaagtttattttaaatttgctctacaaataaaaaaaacacagagccttaaaaaaagtattttgttttattagttatgatatgctttgtaaaaggaccaagtatatttgtgctatccatatgcctgaagataaactgtacaactgttgcaactaattttactttgtgttacttggagtaggctaaagatggagaccctgattttatagcaaaaattgtggagttgtttgaatctactgataagcaattgtgttttactgcacaatggtactacagaattgttgacacggtatgctttactccacataaccttattattatacttattttcttggttgtgtgtgcactctaatgcttttgtcttggatttattattctgtaggttattggagttgaatttgtcgcaaaacataaaga

SEQ ID NO: 108992 - DNA, 523 bp, Aquilegia coerulea
  Intron number 1 from transcript AcoGoldSmith_v1.018739m (l ocus AcoGoldSmith_v1.018739m.g) derived from phytozome v7. 0 (chr-ID scaffold_7; pos 5062248 to 5062770)
cttaagttcaaagttctttcgaactctagagccaagaatacccaaaaaacctaaataataatatatgacgaatgtatacctatattccaatgtaaggacatttctctcttaaaatgtcgtggaacccacttccacaacaaactacgtgtcgaccctgggtattacatattacataagctcatcttttattataagtataaaactttataaatcaggaatatcgagatctgtatacatctaagggctgtggattgacttcgcgggatataacgtgaggcatgtctcgtgagtcgtgatagctcagccctttgggcttacggcccaattattttgatctataaaatccggaaaacgtttttttcccaagcttttttcttatgttagaaagagtggcggcggattagcgctgtcgatctaaaggttcttgtgaaaatgtcaacaacacatactgattcacgattcgaagaagagaatcttgcaattcagaaaacaataatgtgaacaacaacaacagatactaata

SEQ ID NO: 108993 - DNA, 563 bp, Aquilegia coerulea
  Intron number 1 from transcript AcoGoldSmith_v1.006049m (l ocus AcoGoldSmith_v1.006049m.g) derived from phytozome v7. 0 (chr-ID scaffold_27; pos 1000606 to 1001168 reverse stra nd)
caacttctttactgtttgaagatacccagatacaggtatgaatatgatcattgttttacttcaaacaaatttgttttataatttgaacttgggtgttcttcaaatcttatttttaataaaaatgataaattgggtaattcatttctcttacaattagactggaattgttcttttcttagtaaattttaatgttatagatgttttttagagttagttagtaataattctaatggtattaggattctcttgagttaatttatttcaaaatggaatgtttagcttgaaatgcccacattcaagttctaatgaaaaattgtcaataagttatattccggtgattactttagatttttgggaatattctgaatacaagtactaatgtttgatagtcttgatcaatgaaccctttgtgtcaatgaacaaacttgggttttctcatcaaaatatatggaacttggattttatatttttggttattaagagagttctttccattctattaatactttcgtgttttgatggttacagtttaaacatagtgttgcacaatttgctcaagaaca

SEQ ID NO: 108994 - DNA, 626 bp, Aquilegia coerulea
  Intron number 1 from transcript AcoGoldSmith_v1.000361m (l ocus AcoGoldSmith_v1.000361m.g) derived from phytozome v7. 0 (chr-ID scaffold_18; pos 3362495 to 3363120)
tggtggtttacttccctcaaggtcatagtgaacaggtaaagtgctacacgctcacatgtggatgtggttttgctattttgctccggtggtgctactaaaagtggtggtggggttgtgtaactttttctcttacaacccttttgggttagtgggtgtaggaaacgtgacccaaagtgatgatgtgagatgttggaatatatcaaagaaactagaccaattgagtattttttttttcttaccatctatagagttgctttaggggattaaaatttatttcgagcctatattttgttcaaagaataatttgataaattgtagtaatttgaattaatttttttgtgaaatttgataatttaaaattttgtcataactgattttcgttaaaatttgttattgtaaacgtatcaaattaatgcttttgggaaaagaaaatcgacgatctctgttgttagagttgaaacttgataagattgtagtttgaacaaatttgtatgaaatgactaccaatggatggttgtaattcctgtaaatgacaatatatttgatgtaaaacaagaatgctgagtcctttttgattgtagtgtttgtattcatgtgagatctttgatttccaggtggcagcttct

SEQ ID NO: 108995 - DNA, 920 bp, Aquilegia coerulea
  Intron number 2 from transcript AcoGoldSmith_v1.010558m (l ocus AcoGoldSmith_v1.010558m.g) derived from phytozome v7. 0 (chr-ID scaffold_9; pos 351494 to 352413)
ttaccccttctgatcttggggtaaagcaaggtaattttgagtgaaatttaattttgcatacttgaatgattaatatgcatatgtggatattgtttacaatggcgagctgaattatttttaatgattatgcataaaaaaaaaaattgatctttttggcatggattcaacgataaaatgttttatagcgagtagtagctaattttgaacttattatttaaaacagtagatactatagttatagagggtcgtgtaaacatcttagtcatcaactttatgcaattaattgaacacccatgacccaccaccacccagtcatctggggggagggtgtagttgctaccaagttataaacagtttatggtttctatgaaaacagccattgtttggagttgggagttgtggacctaattgataagatggctgctagttgtgttaaaccagattgttcctataatcattaataactgtattgtgagggtaaattctttgctgaacctaggatcacttttagtctcttgaatttgaactacttgacaggctttctttgtttgagcttccggtacttattcaaataccattgcaaattctttgtatgggtgtttgtcaaatggcttcgcataatactcttttgttatgtccaaatttgatcctagcagcatcacatactaataagtaccgtgcaaaatttgataagttttagagtaggacctttttattaaatgtgtggttgaatgtagcacagaaatctggtttctgcttctgtatccttattacaagcaacacttttcagattaataagaaaacctttgtttgtctaccaaaaaaaaaaaaaaaacctttttcaagttatcttaagattttttttggagtatgagaagttttttccggtaaatgatgattgggctggtggattaaatcag

SEQ ID NO: 108996 - DNA, 665 bp, Aquilegia coerulea
  Intron number 1 from transcript AcoGoldSmith_v1.019227m (l ocus AcoGoldSmith_v1.019227m.g) derived from phytozome v7. 0 (chr-ID scaffold_11; pos 1260787 to 1261451)
attggaaacctagacattcttctcacccacaacaggtaactaagcctccccccctgttttttatggatgaattgctgtattttgaatgaattttatggtttttatagcttcaatttagtgcggttttgtttgaagttgttttgatgaattgctaaaggtttggggtggacaatctttctgaaattttagatttttgtgtggttttttcgagcttttatgcgcagtgcttagtttattgtttgggtgttattttgtaatctgtgagatctgagtgaattatggtctctgtgatttttgaaacccgttatcgaattggtgtttacttgtcttatgttgcttgtaatagaggtttagagaagatgggtatttgttgtttttttgtagaaacacacatctgagggatctatggtgtatgttgttttatttttctgtaattggacttatagcagtattacatgacatggtcattagtatcgacctttttttgaagttctcagttatatgccaatcagtcagtagcatacattttagttccacttctgcagattctctacatttttctaaagtttagtgtctgtattaattttatacttagttattagactctaatctactgatatttccaaattttgcaggttcatatctctttggctggagagaagcac

SEQ ID NO: 108997 - DNA, 335 bp, Aquilegia coerulea
  Intron number 2 from transcript AcoGoldSmith_v1.025034m (l ocus AcoGoldSmith_v1.025034m.g) derived from phytozome v7. 0 (chr-ID scaffold_54; pos 1010789 to 1011123 reverse stra nd)
aggtggaaacttacattttagttacgagtaccaagtaccaacaaatattatgctaatttttaatgatcaaaacaaataaactaattttgcatgtttataaacaataaaattgtgttttttgaatttgaagttttaccacgtgaaaaggtagtttggtcattataaaaatatggatgccttgactctggtgggttgactgacagtcaagtgacggaaaaatgaccatttactaataaacgataaagattggactgaatgctaattacccatcttctagagagaccaaatacaaaataacccttttttttcctcttatacaggaagactttgagttg

SEQ ID NO: 108998 - DNA, 575 bp, Aquilegia coerulea
  Intron number 1 from transcript AcoGoldSmith_v1.019265m (l ocus AcoGoldSmith_v1.019265m.g) derived from phytozome v7. 0 (chr-ID scaffold_9; pos 2262318 to 2262892 reverse stran d)
ttggcgtttgcactaaaggtcggattgttctctcatttcatatttggtttatttttgtttttatttatttaattattattttcgtgttttttaattttggtttttctaggattaaattgatcctagatattatatttcgcttagtattagtatattcgattttgattttgttttcatgaggatatatgttattgtttaggatacattttggtaagagatgaacaatattctagacttaattctgatttaatttgacgaaagcatgagagtatgataccacattcacaagcatcatatcatatgccaatttgaatcctaggttccccaatctcacctgccaactatattggaagtttgtaagagatcaaatgcaataaacacttcattttatttgttttgatgattttgcgcaatagttcggtggggctgccatagaagcatagggtgcgtgagcttgtttcctggagaaatacgtttgtgatttgcctgaagtcctggacttttggtgccaacctatagcgcgtgaattttgttttctgtatatttgtataacttttcttctgtgtaccttgcag

SEQ ID NO: 108999 - DNA, 1036 bp, Aquilegia coerulea
  Intron number 2 from transcript AcoGoldSmith_v1.000321m (l ocus AcoGoldSmith_v1.000321m.g) derived from phytozome v7. 0 (chr-ID scaffold_6; pos 2385995 to 2387030 reverse stran d)
cttttggtattatttctataactacattttcttttttacttaaatttgtttagtagagtttgattcccttgatatatatactcctttcccatttgagtttttttagaatttctctcttttattgcattgaatcagattatgatacagaaaaggtttgctagtattttacagaactgacaattaaacaagaaaccatgcatcaatcataccaaaatcaaacataacacgagattattagatgtgattaaatctcaatacacgaacaaatagtgtacattataagcaattatgtacttatgtaagaacacatattctacacgatgcttatcaaaaatctacagcaggcttcaagcagcaaagataaacatatttgttagttccgcaatagtcagtcccatatgtactagcaacccggaattgacaaagttgaaaagttgcaataaaattttagaaaaacagtatgaagtgtcattgtagtaacacttcttccagtcaatgccgaattgatttaaatcagtcagaatttgtgaaatatgtcaaatgcctattgttccctcagcaaaacaccatcacttatagccatatacactttatcaaaaacatccatgcacccgccaaagtaaaggttttatacgcatattaagtatatataaatataccattactctaaggaaaagataacaatgcacacacattgcgtcacaaatttggaacatctctcaagggaaaacaagatttcccaagattcaaaaggtgcaatataattttagcatttttaggtgctttgttgttttctttaatatataaaagacagacatttaggcaccaaggacaaaataaaaatatccaataatcaaaagcgttgcccaattattttttatcgtgtgctttattggattagtaggggatttttttttgaggaggtgaaacttgatccgattgctatttgttggagagaaggtcttcctttgacttatatctattattcactggttgtacagatcgcgtctttggtccttcaactaattctaaggta

SEQ ID NO: 109000 - DNA, 402 bp, Aquilegia coerulea
  Intron number 1 from transcript AcoGoldSmith_v1.002528m (l ocus AcoGoldSmith_v1.002528m.g) derived from phytozome v7. 0 (chr-ID scaffold_49; pos 1684429 to 1684830)
agaactagtaatttcgagttgaatttctacttaattgatgttttaatgtgaatttttcgttgaattagaatgaaattgttttaagttttgtgaacttagtggtttgtttttcggtagtttaactactgaaggaagaataatatgctcaaaatttctgccaaattatgggtgtaacagttcaattatcaaattaaattaaaagtatcgatggtagaaagtgattatttgcgcataatgtagtgtttgtttggatgactatatatactttttaaatagttaaattatatgatttgagaatttaaggttgtttaggggatttcattgtattgtattctaatttacatgtgtttatataattatatttcagctccaaaaggtttatttccacctgaacctgagcat

SEQ ID NO: 109001 - DNA, 962 bp, Aquilegia coerulea
  Intron number 1 from transcript AcoGoldSmith_v1.016904m (l ocus AcoGoldSmith_v1.016904m.g) derived from phytozome v7. 0 (chr-ID scaffold_27; pos 2216264 to 2217225 reverse stra nd)
taagtcagagcattcatctgcttctgctccacaaggtaatctttttttagaaagtgttctgtaagttcatttgcattgctcaattgaggatgtttaggagataatttctttgataatttgaattaaactcattctccactataagcatttatacttgaaagatattttcaatcagcattctgaactacctccatgccattagctcaacattttgtaaggcgcgccacaatatcataaacttttgttaataggaagtgcagctgattatgtgatcatttgagtagtatgtgacgcctcacaagattccaatcaagaagagctcattttgcaaagcatcattagggaatgctagagaaacatcacattgttaatagcaatcttgcatttagacattagaatccagaagggacatttatctgatcgaacagaagcacacatctgacatagctcctcttgtatatattctttcgccaaaaggtgaaatggactaagatatagtatacaatctataggtgaaaattgtttgctggatattaatcatgtctattggaattaaccaaccaaaagtagcactcaacagccccacatcccttactgaacttttcttattctatggttgttaagttgtaatcccaagatatttaaatctcaatgatgttagaagcagctctatgcttccaagtttcatgttccccttcttgaactgaaatgaaccgtgcatgcattttgttccgattttcttcctttatatttttgctttgggagtcaattgttcccctcttttgtctatgtactctaaacttctcatttgtttattccacccctccatataaatatgcatttcctccttgaaatatggaattaggacttaggaggttgtagagtggatagaaattttacttaatactcgttctttacgtttgacagataagcctgggagacgacaagcacttgcagtaggg

SEQ ID NO: 109002 - DNA, 599 bp, Aquilegia coerulea
  Intron number 2 from transcript AcoGoldSmith_v1.018014m (l ocus AcoGoldSmith_v1.018014m.g) derived from phytozome v7. 0 (chr-ID scaffold_27; pos 1919869 to 1920467)
aagataaagattctccacgaaaaccttctttggtcagtgaatgtaattggccattgtttttctctccacgaaaaccctcttgttttattgttttatacgtgcatttagtagtatgagctcagtaagttgttagttacgtatatgagttgaagactgtgccttgtttaaagatgactttagtttgaaataaatttggcttttcttatttatttatatatttattttatctcagcgtataagacattaatcacctaaacaaactttcctcatatttgccttgttgtgaaaactactgcactctccatactttttccaaaaccagctgtttcgatgtaagatattttaatacaagtacactatataatgaaggcataaatgttggtgttcataattgaacctaagtcttcggagagatggtcatgtttagcagagtgcttcatcttccttacagtgatatatactctggaaccatttactatttgagtgttgtaaatctaagataactgacgagtctttttgtggttgttgtgtcctgttgttatgacttggaagtgcttattagttattacttaccttcgactttttacaggttctttatt

SEQ ID NO: 109003 - DNA, 851 bp, Aquilegia coerulea
  Intron number 1 from transcript AcoGoldSmith_v1.004462m (l ocus AcoGoldSmith_v1.004462m.g) derived from phytozome v7. 0 (chr-ID scaffold_37; pos 256872 to 257722 reverse strand )
accagctaccacttgttctaaagtttctacaagaggtaaacatatatacgatacactcgctatgacatctataatctatttattgtactttatacttgctgagttcaagattgtgttaaggacttctgcctgtactagcttggtgtgccccatgaagtatatgcatgattaacaatcgatttttcgttcatttgattgaaattatgatcgaaattaatttggattgtgtttcgatacagaagaaaatatatacctccttttcttaaagattaatacttgatttttttttttttttttttttgcatgattgagatccttggttattacgtacttctcaatcgattgtcatggaactcgtttatcagtcattttatgtaattttagctaattaattatactgaagtagacattttcttctactaaaaatgggagaaggattgtaaaagtggacttgacaccaacttcatcattcaaagaataacaaatttagctttctgttttcctttctttttcttcatggtccatcacaatagctgtaaatcatggactgacatcaactacattcaaactatattcttagtgcgttatgacatataaatgaccacaaatatattttcaatcaattgattctatcaccatgacaatatgacatgagaggtcctaataaggtccaacaagaggttatacaaaagggccacaacagttcttattttgcataataaaaataaaataaatttatatattgataatttgatagagatggtttttgtttttgtttgtttaaatctttttactttgtacttatctcaagagtttttcactatgtttcaggtatcaaaggatcaccatcc

SEQ ID NO: 109004 - DNA, 399 bp, Aquilegia coerulea
  Intron number 1 from transcript AcoGoldSmith_v1.023772m (l ocus AcoGoldSmith_v1.023772m.g) derived from phytozome v7. 0 (chr-ID scaffold_10; pos 3553869 to 3554267 reverse stra nd)
ggaatctaccattttgttcaaactcgaaggcttcggtaaccatttctaaaccatagtgctttgtttttcatagcatacttggaatgaattagtttttttatgataaaattaaacaacgatttacatgacttagtttggaatatatgtatttttgttgttcgcgacatttgttcttcgcgatatcttgatatagccttcaaattttcatgcaaaaggaagaaatgaaaacatcagaattttaatctgccagtttcagtggcctcgagaatgtcagaacgatcaaaagggccaaaaatagaggcccagtccaacatcatcatgcatgtagtctgcaactctgcataattccattttgttcattgcataaattcatgtagctggattgtatataatataggt

SEQ ID NO: 109005 - DNA, 674 bp, Aquilegia coerulea
  Intron number 1 from transcript AcoGoldSmith_v1.000191m (l ocus AcoGoldSmith_v1.000191m.g) derived from phytozome v7. 0 (chr-ID scaffold_9; pos 1379319 to 1379992 reverse stran d)
gtcgtggtgctcttattgcaattttcggtaagttttcttgattcttaggaatttgaatttgagtgagtaattttgttttgtttgatatggattacgatcactatatatgaactttgttttatctagtttcagtgattatttgaagttgtgatagttattgttttagtgatttgattagtaatagctatttaactgatatttgtggaatttttagagtcgaattaggttattttagttgatcaggaagacatatagaattcttgtttatgtgaagtagtaatccttgtatagactgattctgatcattaatcgatcttgtgattagttgacttatagcagattctgtggaagttgtgacttgtgagtttatgagcattgattaagcttggttgagtgataatcatgacaatttttttcatctatttgagtgataatgagaagttccaatcttgttggagtaatcactgatcatgacagtagcaacatgttatttgaattctgtttatctaaacgcatgattactatctaattgcttctgctggaaattacaatatgtggttctttacttgtggagttttcaattctttctagtattacacttcagtaatctatgtctttcgcataccatttttttatcagatactggtgtggatcctgctgctgccggcttacaa

SEQ ID NO: 109006 - DNA, 925 bp, Aquilegia coerulea
  Intron number 2 from transcript AcoGoldSmith_v1.005135m (l ocus AcoGoldSmith_v1.005135m.g) derived from phytozome v7. 0 (chr-ID scaffold_11; pos 2634625 to 2635549 reverse stra nd)
attcttttagggtttctgaatctgatcttgttaaggtatttattttactctagttgctattgaaattcttagttaacttgatattagcttaagctcattgtacataataagaagaaaatttaactatggacattgtttctagactccagctaaaaatttatagattcttaataagtaaggttgttgttatgtttaaaactcaaactgcatagagatagagtagtctaagtaaaatatgcattagagctttggtgaaggtaaaagagaaagttctctgtgaaaagtgaaaacatattattttcttagaactatttgtttagtgtttgatttcttcttgtagaaggtattactatttactaatagcgagtatgcaagtttgatcccacttccccgctctgagaacaacaagtactctgactagaattttgctcttgtcacgaaatttctaaaattgttggccttcaatccatgagtttggggtgacattcataacaagggatggctacaccccacaacccaatatataaaattttctaactaaagtcactcttgatcttcttctttgcaccagacacagcctacagaacattacggtttttcagtttgattttgttaggttttattttctttgtcatttttacttagaatccgtactcccttttgaacagaaaatttaaatatagtgtggaacataacccaaagattagcttgggtataaacagtactgctcgttgaaaagaattaagttctattgaacaaggacgaagcctacctttttcttcttctttatattctcggttctttacatataaatatgcagtcaatatgtcatatgacattgtattggtcagtgtttaccaccctgactaagatgcctttatttcgttgtaactgcagtgggagaataagtgcaaaacactgaaaa

SEQ ID NO: 109007 - DNA, 943 bp, Aquilegia coerulea
  Intron number 1 from transcript AcoGoldSmith_v1.018966m (l ocus AcoGoldSmith_v1.018966m.g) derived from phytozome v7. 0 (chr-ID scaffold_43; pos 2004436 to 2005378)
ggcaggtaaaatatcatgacttgatttaattaaaggctaaatagattatattatacattgaaatagaacacctactaaagttgcattacatcgtgagaattatctgttttcaataagaacttctttccaaattgattttggtccatatatgttttcaattgttagtctaaggtggttgaaaactataaggattttttattaaaaaaaaaaactataaagatttgacttacaattactatttttttttatgaatgatttactattttagttagttggaattttcatcaatatgtaaaatcatgtaagtgattggtttattaaatgaaattagaattcaaatattattagatacctggttgtagattctagatgtgcaacacctgatttcattaacaatacaacatgggtctggtaaaccatgatatgaataaacattattcagtgaagtccaacgtactaccatctttaccaatggcctgagcattaacatccacaataggggtgccaagtttaaaatgtaatcagaggagctaaccaagctagctaattagtaacatatatttgttcaggcaaattctcttccctagaaacgtttttgtcctttgaaataggatatgatacatgtacctacagacaatatgttaacgttgatgttgagaggtagatgttacataccatcactgtattattattattattattttcatgtattaatttctgttaatatagatgttgacaggctcttaattatctgtgcaagtgtgggtgttatatttttagattcttgacatcttcgactaatattatctattggttatttgattttgcatattcagccatttacacgatagagttccagaaaagaggcttaccgcatgcacatatactaatctttctggatggagcagacaagccagatacttcagtgaaggtaaacaagatt

SEQ ID NO: 109008 - DNA, 1011 bp, Aquilegia coerulea
  Intron number 1 from transcript AcoGoldSmith_v1.004270m (l ocus AcoGoldSmith_v1.004270m.g) derived from phytozome v7. 0 (chr-ID scaffold_27; pos 2665212 to 2666222 reverse stra nd)
tctatctcaaagatcttcaccaattctaaaaccaggtaacataatctgaattccattgatctatgtttccatttctcaaagtcttttttctgaattttaatgtatgattcgattgcaagattatcggaagatgttcttgagttgtgtaaatttcttctggtgtagttaacttaattcaatttgatcgttttaaacaagttagaaaactcaatgttgtggtggttttggtatataggtaatgatttttttataagattcgtgttctataatgtacatttagtgttgttggcgggttttttatttgaattaggaagtttaatgaacattacaaggagaggttgttagatttggaatagtataatacattttcgtaactagtttttagaagaaaaaattgaaaaaaaaaatctagtgagaggttttgttcacgttttcattcacattaggtactgttggattgttctttgatttctacgagatacagttttttattgatgaaaaattctcaaggcagtgtatgtcagttttaattgaggattatgtcaattccgttctcaaggaataataaatgtttgaaactttgttacttgtcttttttcaatacatgaaaatataaacaagcttggagtgataagttgccaactattcagtttctagagttttctggaaacttgaatttcagttttctatttgtctctagagagtcttttgtctctatgtgttttataaggttacattgtagtagtactttgctgagcaaactattattggactgactctattgttcacacttcctctaatggactgaagtgaaatgaataaccgataaagaacacacacacacaaaaaaaaaaaaaaaaaaaaaaagagatcatcaagcactttaaaggaatgtatgcactgtacacttcgtctaattagtttatcgacagttttatttttcatttcaggattgttttagttaatatttcaactctctgcaggttaaggttggattttatcatcacttcc

SEQ ID NO: 109009 - DNA, 503 bp, Aquilegia coerulea
  Intron number 1 from transcript AcoGoldSmith_v1.007349m (l ocus AcoGoldSmith_v1.007325m.g) derived from phytozome v7. 0 (chr-ID scaffold_69; pos 1080391 to 1080893 reverse stra nd)
ctacaagaaagtttctcccaattcatttagctctggtaagtaatcttgaaatcttccgtacatgatcaactcaccaaatcaccaatgtctttaaatagcatttttaatgtctatgtttggtaacttttgttggttcttaagtttgtcttcttttcagtgatataaaggaaattgaataactagtatttttttaggttatttatcttcatctaaaaccctaaaaaaaaaacccatcatctcccaatttctgtggttttacaattattatgtggtgacctttctcattagacgacaatttagaaatgtgaggatgcatttgggaatgcagatgaagtaggcgaaaatctaaatattttgccatacccaaatgtggtttatttatgaaaatgaactatcttgttgtttttatttagatatttgatataatggaattatagaatgatggagttaggatttggggttttgcaggtatagatagaaacactttgtaaccagtttttatt

SEQ ID NO: 109010 - DNA, 766 bp, Aquilegia coerulea
  Intron number 1 from transcript AcoGoldSmith_v1.010806m (l ocus AcoGoldSmith_v1.010806m.g) derived from phytozome v7. 0 (chr-ID scaffold_11; pos 6109397 to 6110162 reverse stra nd)
gttttcgtggtggagattatagaagaaaacaaaggtgaagaaattctttcacatatatactagggtttaagaagggttttaagaagagtttataaacaaatttaaatttttctgaaacgtgttatagtgtttatttagaattattaagttttacacgttttggaatttgattctagttgtttgtattttagggaaaatggggtattgagttttgtgtttggtgctatgtactaattcgaattaaaccttacttctagtttgacgattttatcatatgtaattagtgtctttgatatatgtggaagtgtaattagtgtctttgatgtttgtattatgtttttacttcaatcactacttccccccatggttaagtgaaatgatttgtcattgtcattagcctgtcaaggtttacatgcttggttttgggtgtatggccattagtaatgtttacatatgttgttaagtaatttggatatttggttagaatcttgcgaggtgtggactgtggagtgactttaactttgtcctggagtaatttgggtttagatttaggttgtgtggatttgctcaagaacaaataaacttgctcttcacctttgtgttggatattgtcttttgtgtagtgtgttactttgtttggatatgttggaggataaatagataaagctcttgattggttattttgttgtgagtgtttggttattattatgttgtttgttgtatttatgcgctgatctctcatgtgtttttgttttctttcgacagg

SEQ ID NO: 109011 - DNA, 834 bp, Aquilegia coerulea
  Intron number 1 from transcript AcoGoldSmith_v1.023827m (l ocus AcoGoldSmith_v1.023827m.g) derived from phytozome v7. 0 (chr-ID scaffold_28; pos 2432501 to 2433334)
gtgtgggttgggcttggtaagggaaattgtgtgggttgggcttggtaagctggttagtaagtagaagtactagtttttttttcccaaaaacaccctgggctttagcacagaggagccccttcacagatccgcctctgaccacacgaccacgcggacatcatccagaaaaaatgtaccaagggataaatagaacctagtgtactggattggtaccgcgaagcttgctgagaaacatattaagaatcatgtgactgccagctggaagaagacaactaagagcatctccaatggtcttttaaagttgtaagtttgaaacaaagaccatcaaaccatctccaatggtatcttaaatttgataaaatattaacatttcattactcttaaatttgagagttcctcaaagtgtttttaaattaaaaaaacaaaactactagtttcacgcaatactactacttgtgcattttattttattttttagtaggtgggtcccacattttatagagaaaaattctctacgcaagattactaatcttgcgcaaaggtattaactgtgcgtggactcagtcaactaacgagattgacacagaatggtgactaaacacacaaaaaaaaaaataaaaaatggtgacgttgtggaaatatacccccaaaagtggtgaagtgtgtccaaaaatctcttaagaaatattgctccaataagtgtgttgtgtaaattttagtacatcataatttttttttctaggaataattaactagattgctaattactcttttactggcaacagagcaagtggctattcgctgcacttgtcgcagcacttgtcatctggaagc

SEQ ID NO: 109012 - DNA, 835 bp, Aquilegia coerulea
  Intron number 1 from transcript AcoGoldSmith_v1.005238m (l ocus AcoGoldSmith_v1.005238m.g) derived from phytozome v7. 0 (chr-ID scaffold_28; pos 1839810 to 1840644)
gaaggtggcagtggaccagagattaagaaagaaaggtttgatttttatttttttattttttttgttgttgtaatttggttgaaaatgtgggaaattttgttttttcaattgggttttttttagaaattattttttaacaatttctttttaaatttgattgattgtaagaaaggtttgattttttggtaatttgtttgaaaatgatgggaattttagttttttttttatatttggtttagaaaatgtttgattttttttttttgaaatgtgggaaattttaaggtttgattttgaagtatttgattgattttctgtttagagattaagaaagaaaggtttgattttttcttgaaatgtgggaaattttaaggtttttgtttgtttttttttcaattgggggtttcttatatttggtttagaaaatgtttgatttatttttgtaacaatttgtgtgaaaatgtggaagcttttgaactaatccattgttttttctgtttagagatttttgaattaggttttaaaaatttggaattttggaagttcttagtttgttttcctaaattggggttttaaaatgttcaatttgattgtttaatgtttgttttctggttgaagtagctatgtaaatgtcaaagtttgcatcttttatttgtttgactgggtttatagtgtcttcacatttttatagtgtcttcacatttttttctctttattttagtatccacaatgcagcaagtccatttctttccattgttgggagaagattcttagtgctgacgtgttatcttttcatgttgcagtgctcctactggaaccaaaagaagaggtggcccag

SEQ ID NO: 109013 - DNA, 193 bp, Aquilegia coerulea
  Intron number 1 from transcript AcoGoldSmith_v1.003531m (l ocus AcoGoldSmith_v1.003531m.g) derived from phytozome v7. 0 (chr-ID scaffold_30; pos 1716262 to 1716454 reverse stra nd)
attgtaagtcgtttaatatgagatttgtttgtagttttctgtttacaaataataatgttgaagatcgcatttgttttgattaaatgcaaaggttaaactctaatgaacatgcaaattgcattcaccaaattttgctatgctcttcagttcttttaatgttaatgtgggttcctttctctttgttatagttatc

SEQ ID NO: 109014 - DNA, 849 bp, Aquilegia coerulea
  Intron number 1 from transcript AcoGoldSmith_v1.009361m (l ocus AcoGoldSmith_v1.009361m.g) derived from phytozome v7. 0 (chr-ID scaffold_11; pos 1551764 to 1552612)
tcaacatccattgacatttacttttggagttataggtacaggacattaaacttattattagctaatacataccttcaagatttttttttcttcatttaaacatcttcctctttgagtctgttaattaagacttttttccttgttcagctttgattttgctcttcttattcttgttcttcgatcttcttgcagtttaatttatttgtgttgtgctttttcttccctttttctattaatccagccagttttttcctcatcaactagatctttaagcagtttcctccttgggggttgcttaactgcttaagtagtagtaattcatatgatgtgttgtatttgatcttcaaagtttgtttcatataaaaaattttaagtctagctcgatcgatatctgtatatattgtttatcaaattactttataaggcttggtttcagtgcgctatatgcacatctagttcttcatcttcttgactattaattatgttggtactaattagctaaacctctacttgaattgattctactcattcaagcaatataatactctttagtaataaacaattaatgtcttaacctccttatcatgtacctcacctgtgttgtaactactcctttctatcccttcagcatgtaaatctaagaaacatgaattcaatgtgaactcaaattttacaggtcattttccttgtggaaaaacctatggtgttatacatgaatttgattagttcaacaaaaaactgcatagttaagttctactagtttttttatacagctagtcatcatccactagttactaatgttcattttaatttgttgtaattgatcatccaggtaatcttatctcactc

SEQ ID NO: 109015 - DNA, 951 bp, Aquilegia coerulea
  Intron number 2 from transcript AcoGoldSmith_v1.006413m (l ocus AcoGoldSmith_v1.006413m.g) derived from phytozome v7. 0 (chr-ID scaffold_59; pos 1271946 to 1272896)
aaaaagtaaagaaattcataaacttaattagttttcaaacgatcacattttggccccagcttggtagattgtgtaatcattggtaaagtttgtcaaatgggagatgcaacagggccaccacaaaaggaagaaaacttcccgttatgatctatgacaaattttgccaaagcatagagcagactttttccttgacctcgttgtttcctgcctctctatgtttatctccagtacagggtctgttccctctctcgcttcatatattggtgtctttcccccttcctctatcctctagattattttccctatcttaaattgcagtgtagatgcgacaataggttaccccatgggtgttcttttaaagatacatgcttcactgatttcgaatctcttaaaacaccatctgaatgaccttgtaaatctgaaaatctacaatcagaagattagaatccccatttcaaacaaaaggcatcgagaaattatatagagatttttatctataagagttaattatcaacatacatatcaaggtgtttcttttcttctatgactttaggaattaccaaatattatgttgatcaaagctgctctttcttcattcttccctatttcaaatttgtgagtgtttgagggttttgcctttattgcattgaaagaatcggttattgtgccactgtttaatgcataggaatattttgataaattgagacttcttcggtagtttctgtaatttggatcctccattcttccctcccttcttttctagtgatcccatcccggttaagaaatgttcaaatgatgtattaagtataaacgtaattgcatcccaatgccgactgcatttgcgtattcaagcagggccttaatgtattatgttgttagctatagttttgaagtccttctcatgatttgtttttatgaacagagcatctgctataggccagaagtatccaa

SEQ ID NO: 109016 - DNA, 498 bp, Aquilegia coerulea
  Intron number 1 from transcript AcoGoldSmith_v1.012823m (l ocus AcoGoldSmith_v1.012823m.g) derived from phytozome v7. 0 (chr-ID scaffold_30; pos 2536005 to 2536502)
cctagtacggaatttaccaatggaaccagcccaaatgaatcatcatctccaactcgttttcccctacagttggaaggctgcaaaaccaagcctagctgtctatgtacattggagaaatgaagttgataaccagttcaaattcaaaacttggtaaccagttgagatttgggtaagtctttctcgaagaatttgtcacaaacgcaagtcagcagcagcagctacaatcaaactcctctctgttgccaacggcagcaggtatagacgtatattagtatttcagtaatattttcaaagacatgctatgcatagagcttggatttgtattttccctgcttaacttcaacacaaattgttttagcttttaagagtcctacattgctttgcaaaactcttagttgtttgtgtacgatctcatttttgctaagagatttaattggtattgttctaattgatgcaggtcttatggtggaagtagagaagagaaagacggatttcgaa

SEQ ID NO: 109017 - DNA, 539 bp, Aquilegia coerulea
  Intron number 2 from transcript AcoGoldSmith_v1.006468m (l ocus AcoGoldSmith_v1.006468m.g) derived from phytozome v7. 0 (chr-ID scaffold_9; pos 1709757 to 1710295 reverse stran d)
aggagcttggtataaaacctgttcccagtaaacgggtgagtaatgaatacgaacgtaattcagaaactgcttgtcttctgcctgtgaaagttcctgtgcaaatgtcctcatcacatcaccccacattgcttcaatagtatgcatgtctatttgattgtccacagaaacatattttttgaggtgcctattttagaaacatttcagccacagttctgcagaaacactttggattcacaaaccaaacaattttataatttaggttttttcagtaagaaggtaaacaagattttattgatgttacaatttgacacaaaggtggcatgcaaattcctaatattacttagcattacaattaacaaatttagcatgacaaacatcgctacttcagtgtgatatacatcagatttctatctattacattgctatttacccaatcgcataattgtgtcaatgttttcagcttcagttttctgtctgtctacccttctctgttcgttttaacgagtgtgttgttatgtgcagtgtttgtcattgcttct

SEQ ID NO: 109018 - DNA, 896 bp, Aquilegia coerulea
  Intron number 1 from transcript AcoGoldSmith_v1.002758m (l ocus AcoGoldSmith_v1.002758m.g) derived from phytozome v7. 0 (chr-ID scaffold_11; pos 3663346 to 3664241 reverse stra nd)
gagatttggttcatcttcgacccagaactaacacggtatggttttttttttcatatatatatatatatatatatatatattttttttttttttaattttctagaaatgggttcttatagtattgatgttaattgtatgtattttgtgttttgatgatgggggttgtatttatctgcaattgatctatatatctgtgatggtgtttcattggttaaatttcaatatgttttttttataacatagactaagttttatgtttgcgagaactgatgttgttttaatttactgttctattcaatatcagttggatatttacatgtaaattatgcaatacctgttgtatagagtgcagtacagtatctgtttagaggaaaattataatatagagtaatttttgcgtacatcatattgtttgggtgaggaaaactataatgattgtgattttagacaggatgccccctttcatatgtatttttgtgaagacatagaatttcaacaagtcatattatctttagttattgtctttgtacacttaaatcctagtttctgaatctcatgatttaaagaagatcaatttgaagttatggtaaagtagtaaacctgtatgcttagttggattctaatctcacaatggaacttttatgtgtgagccttatagtaaatccccaccagttaaatatggtttccctaggaattagttgattagccagctattgagcatttcttgtttgtgtgcaagttattgagttacctaaaataatatcgtttacttattctttgcttttacctaggaacttttatgcttattctttgcttttaccctcccttgaaataatatcgtttactgattgtgcttttcatgtatttccagatatcagcagttgctcgaatcagga

SEQ ID NO: 109019 - DNA, 594 bp, Aquilegia coerulea
  Intron number 1 from transcript AcoGoldSmith_v1.014318m (l ocus AcoGoldSmith_v1.014318m.g) derived from phytozome v7. 0 (chr-ID scaffold_40; pos 50629 to 51222)
ctagggtatgttaaatatccttaattcaaaaattagaatgaattagatcttctgaaaatctagtattgattaactataaacaatttttggaattagtaaatgtacacttgggggtttattctcgtatcagttcattgcatgtaagcattttacaatatcagtacaagtaacttgcgccatctgaaagtttaacttgtacactttagcaacaaaatttaggcattttttaagtgattaaatgagagatgggttggctctttcctttgtgcattagttttgaataatgacaacaaagttttgatagttttgaaaccaccccaccccaaataagaataaacagatcatgattaaagcttgaacactggagccaaactattcgatctctgatatatttttttgctaatttcacattatagttacaaaaattttgcttagccaagtagagatgttattaattattttgttttcagcttaaaagggccaaattgctttccattctagtgaaatagttttgattcatagaagtttcaaatttcatagtgagttatctatcttacaggggtcctggcacatttatactagtcttatcgtgga

SEQ ID NO: 109020 - DNA, 567 bp, Aquilegia coerulea
  Intron number 2 from transcript AcoGoldSmith_v1.011060m (l ocus AcoGoldSmith_v1.011060m.g) derived from phytozome v7. 0 (chr-ID scaffold_30; pos 371482 to 372048 reverse strand )
atcctcaatttggtccaccagtaagtttctcagtcttaatttgttattaatccaaacacgcagtatatctacattaattagctagattttcatgactgttatatggctttcgattccttggtgccaagtgagggtatatgtcacattgtcactccactatccccaatgtagcttatttgcttatgtttggttcaggttcttgattgcagcaaaccacaaaactagtgcattttattttcttcatcaatacttctcttctctgcaaaagtgcaattgttaaactttaagtgtgctactgtgccactcaaatttgtgacgtgaactggtgtatatggatacatcaggattgttagaaaaccaatatagctatatatgcccagatcatatttgattcttttccagttttttagaaagttggtagtactaccgatatcgtgcatacattcagtctgttcttgcagtttcccacactgtttccactttccttcagtggcacatttgaattacctcttttttggttttttgaatgcaggctttactactgttgggatttgatcttgaggaaac

SEQ ID NO: 109021 - DNA, 474 bp, Aquilegia coerulea
  Intron number 1 from transcript AcoGoldSmith_v1.026047m (l ocus AcoGoldSmith_v1.026047m.g) derived from phytozome v7. 0 (chr-ID scaffold_203; pos 30455 to 30928)
taggtctggtcttctagagtttaggattagctgtggtacagacctagggtttgccacaaagataaaattcaatttcactattaaattttgatgaaattgcaaaaatgggattctagaagtgaattttattaattagtttcaattgttattctttcgtatctgcaatcaatcatttctgttttttttatttttcttggtgctgtttgtccttgaatcctgggcatctggcacttgtgcaattttggttgtcattgtctcttgtaaatttcaaacataggttgtaactttttgttgcttttatcatttatgcttatggagttatgttatcatgaatcatggttcttcttgtgcatgaaaccctatataatttggctgtttaaataacgttattatgctccaaatatctgtcctttgttgtcaaataaacatattaccacttccatgctttcttacttgcaggcacggtttttgctt

SEQ ID NO: 109022 - DNA, 867 bp, Aquilegia coerulea
  Intron number 1 from transcript AcoGoldSmith_v1.001359m (l ocus AcoGoldSmith_v1.001359m.g) derived from phytozome v7. 0 (chr-ID scaffold_118; pos 39245 to 40111)
attatttccctacgaaaccaacttgaattcatcaggtaccatttcattctacagcttctcatttcgcaactataattatatatttcttgagtttggtcattcagagctttcttatcaaattgattataatttctcatatctgaaacaaatttgaactctattacttaatcaagcatttaactctagaatcatataatcaactataaaaggaaaaaaaaaaagaagggagaagaaaggatttttcaaccatttttcagaaagtcacaaaataatctccattgtaaaggacaatagccctgtagaaaaaaagactgtcgtctcaggcttagaagggccatcacgaggaaatggttattcaatcttttgatcatagaactactttcattgtcagcaaggtgactgcattaacgaattcaacctatatacagtagtttaaactttaaatatattattagatccaagcattctggtggaaacttgtgaaggaatcagaggcatttttcatattaagagcttggagctcatgtatgactgtcagaccgtcgaaaacctttgtaagccaaatcaatagacctgtgtgtgtttttgataatgtccttttaataactcaagtaatgttttagtggttagttttgtaccaagcctataggtcgagaatgccttaaacagtcaaataatgtacaattataccacagttagtgataatatgataaatgttgtgcttcccaaactcaagaaacaatgcagttgggatcctctggctctaacttcataattaaattgcactgacatgccttatgtatgtactgtatattttctttttgtctaattttgtgttacatttatcttctaggggctttgtaaggg

SEQ ID NO: 109023 - DNA, 695 bp, Aquilegia coerulea
  Intron number 1 from transcript AcoGoldSmith_v1.005393m (l ocus AcoGoldSmith_v1.005399m.g) derived from phytozome v7. 0 (chr-ID scaffold_18; pos 3225503 to 3226197)
gaaaagacaccctattcaacacaacaaaaagccaggtaataacaccaataccaccattagagattctctctctctctctctctgacaaactttgtatattggcgacaatttcaaagtagtcatttgttttcagataaaattatcaaatcaaccacccaacaaacctttctcttcttctttcttcttccctgatttgcataactattcatctcgatttcatcatcaattttgttgttaattcaattccccatttttaactttgcatctctcaagcttgcggtagatgtaggtagcttatttttacacaaattttacattttttttttccaaatttagtttgcttgatttgaattttaaatcccatcttttattttgctcaaattcattcgttaattatgtatgaaaactcccttaccctttttcatggaaaacacaacttgtttgaatttttattttgagattcattttgaatcgcattttttttagcatgactgaaatttctgagcttttttcttcctgaagaaactagtttttttttttttttttttttttggaatttcattttatgttataatgattattagttgaaattggagatgtttattgaattgaaaaaattgctttgtaaatttattgaattttttttcttcttatttttagcggcgtgggcataagaggaacgtaaacgaaacttg

SEQ ID NO: 109024 - DNA, 727 bp, Aquilegia coerulea
  Intron number 1 from transcript AcoGoldSmith_v1.009839m (l ocus AcoGoldSmith_v1.009839m.g) derived from phytozome v7. 0 (chr-ID scaffold_27; pos 1451038 to 1451764 reverse stra nd)
ctcttgaaaagaaaggtgttcttgctaagatcagagtaattcccttaaaccctttttttttaatttgattacaattttacatgtattctgtttgcattttggttttctattgaaaatgatggattatagtttaattagacggaatttgtcgatttgggtcaagttttgttttagggtagggggttagatctgatgggttttgcttaaaacttcaaattatggtgtttggggttattgtttgtagctgaaatgaagtatttagtggtatttttcattccaatttgtttcaaaagttgaataactttactataatcattttgcaagtatgttgaacagattactgttttcgcatttacatgctaagctttactgaatctctcaattcttaatggctttataaaacattgcccgaagagagagagaggggggggggggtcataacattaatgaggttgatcaactatggggtttgtggttgtggaatttattttcaataattagatgtttgaggaatgttgattagagccttagtggtggtggtttagatgatgcacaacttttctttatcttgcatatatttggcagattatccaattgattgctacttgcaataaaatgttatctcttgtcttattatgtttcttcttcttcttcttcttatgctgtttttatatttatgtttatcacggcaggctgagcttagagctagtgtttttgaggccattga

SEQ ID NO: 109025 - DNA, 911 bp, Aquilegia coerulea
  Intron number 1 from transcript AcoGoldSmith_v1.011149m (l ocus AcoGoldSmith_v1.011149m.g) derived from phytozome v7. 0 (chr-ID scaffold_15; pos 3557466 to 3558376 reverse stra nd)
ttcttcttcttcttcttctcgttttcgtaaaaaaggtatgctaataatcttatattagggtttcatttttgcaatccttattgccaaatgttttattgatctttttgtttagatttgaatctcaattgtacctaaatagtaaaatttgatgctgagtaagtatagaagattatcaattttagaattctgaatttgttgaatatcgcagagttataagatttgaattcggattcgagattgttggacattaaaactatttttttcttattagactgaatgaaataattaagttcgaaagtgatatagtggatttgttgaggtagagaaaatgttaatcatcattggttctagattattctttttgacattattgcactcatttgaatgaaggttatatgattatgattactggattagagattattttatctttatggacttctaagttagatgtacaacacttgtttttagttaaaacttagtatacaatctctgttttcatggcgtgactaatctgaaaattcaaagtttgaaactgaagtctgaatccacttgaaggaattcttcgagttttgcatagtagaggtttatttagtttgtgatcttctggcttaacggtttccagaagcatattacgttgacaatatattagatatgattcatactattattttgtagtttcatggaaaatctgcagtataatattctctatttttttattggataatatagaaatttctcttctgacttcacatgtttatcatatgcatggaaactcttcatccatactagaatcatttcatatccagtgtaatgtctgtatgatgattgtttggttttagttatatcacttggtgattctgatatggtaattccaaatcgtactttcagcaaattgcttacctgttgta

SEQ ID NO: 109026 - DNA, 281 bp, Aquilegia coerulea
  Intron number 1 from transcript AcoGoldSmith_v1.008777m (l ocus AcoGoldSmith_v1.006555m.g) derived from phytozome v7. 0 (chr-ID scaffold_9; pos 1359433 to 1359713)
ggcgatcgcatctgcagtagtattagttccttttggtcttcttttctttctctctggtctcatcgttaatctttttcaggttttttttttttttttttttcaaatttcttattcaaattagggattcttggttatatttcatattttagaatcatgaattgcagtttatattctatttagggttttattttcttagaaatgggcgagtgattttatttattttatatttcatttttgtttttttaggtgatttgtttcgtgcttattcgtccattatccaa

SEQ ID NO: 109027 - DNA, 232 bp, Aquilegia coerulea
  Intron number 1 from transcript AcoGoldSmith_v1.010117m (l ocus AcoGoldSmith_v1.010117m.g) derived from phytozome v7. 0 (chr-ID scaffold_120; pos 225493 to 225724 reverse stran d)
catttttcataataccctttttttctcaggtaatcatttgctctatatttcatttaatttgtagttttttgatctttaaagttttgaattcattttctatgtgcctatgtagatataattagaaatgggttttcttatcatgtttgtaaatctgatttattcttattgttatgatgataggatttttttttatatatatatttagagggatatatagaattagatagaagca

SEQ ID NO: 109028 - DNA, 532 bp, Aquilegia coerulea
  Intron number 1 from transcript AcoGoldSmith_v1.017493m (l ocus AcoGoldSmith_v1.017493m.g) derived from phytozome v7. 0 (chr-ID scaffold_9; pos 1173797 to 1174328 reverse stran d)
gcttgcgtggttcatcttgcaggtaatttcattcgttggttaaaatagtgtataatctttacttacattgcacgttgagatattgtttgttgatttgagtttccagttagattgtagaaatgtttaaagcctttttgtgtatgatatttattcacacgatgaacattgattgttgtattggagagcgaaaagaatcccatttcagaatgccacatagtgtatgtaatccctcttattaatgtcacagaaatcattatttcagaaatcctgattcaaacgggatgattccaagttgatatataggtacccaataattatatattcactgtgaagcattatttttaataaacctcacattattgaatgaagataacagattcattttgaccagtttgctgcgttttctttgatttcatgctacagagttaaatgggtcacaaatttttcttcaccacagaatttttttgattttagaaaatttggctttcttatcgtaggaacgggtgaccacacatttgagcggaggttgcgt

SEQ ID NO: 109029 - DNA, 704 bp, Aquilegia coerulea
  Intron number 2 from transcript AcoGoldSmith_v1.011737m (l ocus AcoGoldSmith_v1.011737m.g) derived from phytozome v7. 0 (chr-ID scaffold_6; pos 7100497 to 7101200 reverse stran d)
aggtaagctttctcagtactcctcctttaagcttgatatattttagaaagacaggaagtatctttgtaggaagcttttcaatataagattctgctaaaagtggattgttgcagcaatttgattcctcgatttttcaaggaaatagaaaaaaataaaaaataaataaataataatttctcaacattgtgtgccacttctagtgatctattcaatgtcacctgattaatgctttctataaatttataaacaaggattcccatcatatctactcatctacaagacgcacttctactttcttacattgttcccaatttataacatactgacacatgtagtttgatgctctacgtcagtccattaacaccgcgggtagcatgttggatcaatcaacatacagtatgtgaactactaagtgtatagtgttgcagagtaccgaccagttgtgacttttcacacaaatgttgttatgaccactgcccatattagatttggacttcattaagtgatgtttgtcattggtcagaaggcaatacttattttgcttgaatcaaaattattgttctgcaagtatatgattatatccgtttttcttttccatttttagtgatttccattttagtgaaattaaatatcttctcaacctttttttatttttatttttttatttttattttttgctgatatgaaacaaaaggcgggtgaag

SEQ ID NO: 109030 - DNA, 985 bp, Aquilegia coerulea
  Intron number 2 from transcript AcoGoldSmith_v1.005076m (l ocus AcoGoldSmith_v1.005076m.g) derived from phytozome v7. 0 (chr-ID scaffold_11; pos 3526302 to 3527286)
ttgacaatctaaggcttcgggaaaaacaacaatttgtaagagtgtttccgtcacttgggaaacaagaatatagcttttgtcaaacgttccactcataattgaaattcaaccttgcgtttgcttaaggaggaacatgcaccataagttgcatatttcgatggggtgggatggaaaatgataagtaggttaaagggtgccaacctagttggaatgccatagttccatgtagaccctcacttcctgtaccatgtacttcattctattggtatttaacggaaacgtttagttcataaaagaaagtttcatggctacatgggttgtctacagtttgagagaagacatagatcaatagttccaatacatatatttttaggttttggatgggtgacaagtccatccttaattttactatttcagtcaagttcaaattagttttgagctacatcaacagtagatgcaacgtatattatcaattaaagttgtatgcttccctttttagtgactttgagtgatatacaaattttactattaaatgtttttataggtctgtggccaattagcgttttcttggtttgaaattgaataatacaaagttattcacgaatgaagaatgaactgatgaaagcatatgaaaataggaacctcgttgttgttattgaatgcatgatcgacatcattgtttatgttgtagtaagatctgtgcatatgaatgtatccactagcttgttaattggaacttaggcatttaattttcttatagtgctcgaagattcttgtttggttttaaataggtgacaccataattttgtacatctttgtcttgaaaatctgtaataatgatattagcttaagtatccggtaaactttttggtatactagactttgtaatttgggtttcctcaatatgtggctagagcttatgaatatgacttgattcttttatgctacagcctatttcgcagaacaaacggtatattgtgagaaa

SEQ ID NO: 109031 - DNA, 679 bp, Aquilegia coerulea
  Intron number 1 from transcript AcoGoldSmith_v1.000898m (l ocus AcoGoldSmith_v1.000898m.g) derived from phytozome v7. 0 (chr-ID scaffold_27; pos 1550322 to 1551000 reverse stra nd)
ctttacctatcctcacattcgaacacaagaggtaatcctaatcgttaatcctaatcacaattccaattcattttccacgcgttcacatttccgaattaatcgcaaatctcaaattaacaaaacaaacacaccttcgtgtaattcgtttttagggttttatttgatcgatttctttcttgatttcgtttttatattgcttcgatttgtttttaaatttgtgatttatgttttctttaattgatcttgttcttcttgattgatgatctaagctattgagttgttcttgatttggtagaatttagggtttaggaatagtagaaagttgagagagtgttttttttttttttttttgaattatgattaaggagtgtgaattgagatttgaggattagttctctcaacttggggaaatgctgatgagcgatatgggctgtagaattagaatttctgttaataaatatgttgttgtcgaaagtgagtagccgttctttgaccgcccagtccaggtaattgtagtgaatcttattgaattcacttgttaaagtggagttctcaggattagtttatttgtgaaattgtgttgtgtatgtgaatttttgttttgaggattttactgagaatgttgtaagttgtgtttctcaagagagttgaataaactgttgatttaacagggacgctt

SEQ ID NO: 109032 - DNA, 416 bp, Aquilegia coerulea
  Intron number 1 from transcript AcoGoldSmith_v1.023022m (l ocus AcoGoldSmith_v1.023022m.g) derived from phytozome v7. 0 (chr-ID scaffold_7; pos 2635355 to 2635770 reverse stran d)
gaaagttttgggttggagttgcaaagttcaaacatgtatttcattaattagtaactgagaaggaaataggatttcttgggtctaaaggtctaattaaggcaaaagtaccaaaataaagaagaagataatgataatttgagttacacagctatcaaaaaaaacaacaaaaaaaaacttgatgatgatctgatgttctgaatgccagtagagatatccttcctagtcttctatgtgacttgtccttttaaggttgtggatgaaagtgtaatttcatagcaaaatgaatatgcatgggttttgctacttcccttatgtatacaggataaatcccaagtaatatagtgtttgctacttatgattttacaatatgactacagaaataatacattcaattctctctctgtgttagggttgcg

SEQ ID NO: 109033 - DNA, 424 bp, Aquilegia coerulea
  Intron number 2 from transcript AcoGoldSmith_v1.016442m (l ocus AcoGoldSmith_v1.016442m.g) derived from phytozome v7. 0 (chr-ID scaffold_18; pos 1812036 to 1812459 reverse stra nd)
ctcaattcttgaggtataagttatcgttcgaacatcactatttaattgccatgaactgtattttttttttcctgaaagccatgcctagtacgaaaaattaatgattaatgatatcgttctattgggaaccccttccttgtaactataagcaatagtcatcatgtataactgagatactcacggatttggacaactcatgtcaaaagagacatctaaagtaaatagttgtttgttattctctaccagttgcattattggtttattcttaaggctctgagctactgaaatctttgctatatgctagagatgaaattttctaatctttatttgtcttagctagccatgaagaatctttaacgtattcagagaaatttgacatttatttacaggtttttgtcgacgaacttttgctacacagacaatt

SEQ ID NO: 109034 - DNA, 462 bp, Aquilegia coerulea
  Intron number 1 from transcript AcoGoldSmith_v1.023975m (l ocus AcoGoldSmith_v1.023975m.g) derived from phytozome v7. 0 (chr-ID scaffold_7; pos 5874566 to 5875027 reverse stran d)
gctcggcgagatcgttacaactatacccaccattggtacttactccaatcttttttcttgtattcattgatctgtctttcgtttaaatgatctttactttattctataatcatgttaaaaatacctgccgtttggcgtctgttattgctgatcaatcttatgcttccttaccaaacagtcaaacactatcaatttatttgagttatcacttaagtttatttgaaaggtaagtcacatttggttaaaatatttatgattcacatgttaataatgacgagaactagattagctaccgggcaagtacctttgtgctggtcttagcttacctagctgttggatctcgatttgaatttttttttatctaaacaagatgtttctatactctgcgaagatggttagatcttacaagaggattgaccttgtgatgctgaatgatcgcttgactatgtatggcaggtttta

SEQ ID NO: 109035 - DNA, 1028 bp, Aquilegia coerulea
  Intron number 3 from transcript AcoGoldSmith_v1.015026m (l ocus AcoGoldSmith_v1.015026m.g) derived from phytozome v7. 0 (chr-ID scaffold_21; pos 2836721 to 2837748 reverse stra nd)
tagctttggccggaaaacttgattcagatctgaaggtatgtaagtttgaaaccccaatatgtgcaatataacaatactaaaacaataataaaacgataaacaagtaaagaacacacagatatttttaacgtggtaaaacccaatatgggaaacgtccacagttgtcctcgcgacaacaaataaatccactagatgaacaaacctatcaactacctgcaatcactgcgagctgacactactcgttatctctaacacgacttcaccagagtaccttgatgtacgcataaaacactcgacttcttgatgaacacacaaaaagactcgaagccgaatgattcgatagacttgcacgaaagttctttgatgaacgcacaaagatactcacaagaaaactcaaagtctaactatgaaataagcttacaccagatatccttgacgaacacacaaggatactcgacttcttgatgaacacacaggaagactcgaagccaaatcactatgaacaataaagggaagatgaatggggaagaaaagagtgagtccaataacctaaacaaacttgggaagagaaggtagaatgggcggccaaagaactcaggttattcacacaagaaaaccgatttatacttagggtttagagataaggaaatttgggccgaaataaccaaacagactcgaggacgtacgtactccctaacgtggtacgtacgttcctgaacatactacaaactgcaaactgacatacctgaaacacaagaatggaatgaaatgggaccgaagcttgcacatcaaggttctttctaataatgcggccaatgcgagataaccatggacactcctaacctagtcacaaaatgatgtcaaacaaccgaatgccggtttcaaagtttactagtttcatactggtcttattgcataatgaggtcttaattgttgttttctttaatttaaagtgttttgcctttatgaatagaaatatgaagtgggtttttttcgaaaacattaggtttcaggcagagtaacctaca

SEQ ID NO: 109036 - DNA, 758 bp, Aquilegia coerulea
  Intron number 2 from transcript AcoGoldSmith_v1.006013m (l ocus AcoGoldSmith_v1.006013m.g) derived from phytozome v7. 0 (chr-ID scaffold_9; pos 4828573 to 4829330)
ggtcttcttcaggtaatgcttttatagcttttatggtttaatagcttataattgttacattgttgacgtttttttgttaagggtttttaatttgatagtacattgggggttagatcttgatttaatttgctcagatttggtctaattgcaattctagggttttatgaggcctagtttagtgttgtttgattaaattaaattaactgattgtttttaaattagatggtgtttgaggagttagaaattcatggtatttgcattttgactggatagattgatgaattgttgatttgttgttttcaaaaaattatgttttattcttcttagcaatctagagtttatacattgtatgtgatgtatttgtaattgtgatatggaaagtctcacatttcccccttttgaaatagaaaatttgggaaaaagcatgcccattcaatttattttcaattagatatagcaagagatcacacaaattcatctgtgaaaaatcaaaatatatcatgaatcaggatagtgtaaaagttgaactttgaaagcctcctttttttgttactaaaagtgttgaataatgcttgttttcaccatttcattgtaagatttaggtcttggattagtttacaatacatctgaattcttttacatgcatttgagtagattgtttattgttgcatttcaatttgctacaactggttacttgatcatattttggaattgaaaggatcatattattgatttgctatgaccaggctatacaagga

SEQ ID NO: 109037 - DNA, 901 bp, Aquilegia coerulea
  Intron number 1 from transcript AcoGoldSmith_v1.004275m (l ocus AcoGoldSmith_v1.004275m.g) derived from phytozome v7. 0 (chr-ID scaffold_6; pos 8751930 to 8752830)
attctgcgcatactaagtggacttttgtccgccaggtaaatttgtttccctgttatatggattgagaaaaccatattgtagagctggactatccataacacgaattgctgaaaagttgttacagttttgatatttcacattgcgttgtcaaacatagattttagtgctatcgtttactctatattctaagcacacgtaaacatttcacatttgagtcaggttttgataaaatgtccaggagatactcagcatttaatcagcccaaataagtgtattgctaaacatgctaaatatggtgctcccttcctctatatgtagtcgtcgttcgaagagaagttttcatttcatatataggttttttcttcacttagcttaaagactaattaaataaatagagtaggaagctcagaaagcagaggatgaagatagattccactgaaatattctaggaggaagggaggaaacaaaacatgtgagccatgtgatttcgaaaggtaaggagatggtggtggtagcagcagacaaaggtggaaaggactggcataggtcaggggagaaagtgaggtgtggcgagttgtatatgatggacagaatttggggtgttaagtaatagtactaataaggtcaagataaatcggatgttagaagatctagaggaagaacacaagcggcagggaagcaaagtgtttaataaggttaggtcaagttattggagcggaggattgtttttgtgcgaaactgtgaatttactatgggctaatcctacctttatgaatcattacatgcaaatcattccttcagtctaaccttaagtttgcaatccagacatattttttctaggatctgaatggacttatcttttacaggaagcagctagtacctacaaagtcgtagagataag

SEQ ID NO: 109038 - DNA, 414 bp, Aquilegia coerulea
  Intron number 2 from transcript AcoGoldSmith_v1.001429m (l ocus AcoGoldSmith_v1.001429m.g) derived from phytozome v7. 0 (chr-ID scaffold_10; pos 2045898 to 2046311 reverse stra nd)
gcttgattataatcaagaggctgaaagatttggaggtaatgcattatgattttctctggagggtagaagagatagattttttgagattgctagtactactagtaagaatgaatgctctcagtagtgttgtcgtgtagttcatatgtaggatgtttgaattgagatgattagaagaaatgttttgggagaggatgcgagtaaatactttaggatatggactgacgtaacatgagcatatttgataaaaatctagcttttagagcgtattgtcattgactaaatggaacagtatctacttagccgaatccaaacattttggataaagtgattaattgttatggttaaaagacttttagccatttgtttttccttgagacgtcttactcatatcttttctattctgctttccaggtt

SEQ ID NO: 109039 - DNA, 630 bp, Aquilegia coerulea
  Intron number 1 from transcript AcoGoldSmith_v1.007054m (l ocus AcoGoldSmith_v1.007054m.g) derived from phytozome v7. 0 (chr-ID scaffold_1; pos 10985937 to 10986566)
gattatctgaaaaacctgctgttcttaaggtaattcctttttctaaggaattttgtttttttgtttttctttctttctgggaagattttgtaaattgtgtatgtgttttgtgaataatttatttatttatttattaattttgaatctgaagttaaattattaaaatacaaaaccttaagggaatcgaagacaaagggcttttttcttatttacaactttttttttttttttttttccagaaaaatgttctgctgatttgttttgcatttttatgtcacatatatctttttaatgaaatttcttattcttaaacaaagatagaaatctatcatctttctgtatgtgatataattatgtgtgattttaatgttgtagaacctctattttattgtaattagtttagacattatatcttttgatgttgaatgatgtaaaccgtgggtgttacagtttaggtgctagtgctgccgcatgtaacagttttggtttgactttgacatttgtttgatttttcttaataaatcttgtgaaatgatgaactgtgtgtaggtgcttattgattatgaacctaaatttcatttgtcttatttcataggttagagactggtatttagattcttttcgtgatct

SEQ ID NO: 109040 - DNA, 393 bp, Aquilegia coerulea
  Intron number 1 from transcript AcoGoldSmith_v1.003106m (l ocus AcoGoldSmith_v1.003106m.g) derived from phytozome v7. 0 (chr-ID scaffold_27; pos 855166 to 855558 reverse strand )
tgattgcttgttttctacttaagatccaaacaaaggtaaagagatatatatgatatgatgggtatttgaaggaaagagtttggattattttctagtcttaagtttgttttgattccagttttgagctttgattgagtagtagatatatatttctttctttttagtttgtttttggcagaatcgaagaatcaactgagactttgatttatatatatatatatatacacactggatttatctgtttgtgttcatcttcgtccttctttgtacggttttaaataacttgttgttttttagctctttttcagctaagttttagtctcaactaattataaactcaatgttttaatttctagttctaattaagctaactatccttttatgtaacagatc

SEQ ID NO: 109041 - DNA, 724 bp, Aquilegia coerulea
  Intron number 3 from transcript AcoGoldSmith_v1.020090m (l ocus AcoGoldSmith_v1.020090m.g) derived from phytozome v7. 0 (chr-ID scaffold_51; pos 907004 to 907727 reverse strand )
ctgactgtaagatatatcctcctttctttaaataatttacttttcatgagtttagtgttttgtatcattctacatatatacagactccttctctgttttcatagaactgaaggtctaaattgtggctagaaatatgtactatttctcaaaaagaagaagtttttatctttccttgatattagtgtagaatttcttctgattgcatcatgtagttcaaatacactaaaaagctgtgttcctttgctgaattataattcattgtgtttccctttgagcagtgagcaactcttggaatcactggcaaaccatattgatattttcaaagctctgtcctttacgtatatgtctagggttgcatcattgactcatgttttacttggtggatcattttcaatgcatttgtagagttgtcaggcagtaagttgatgtaaatgtgtccatggtcaatgaaggatttacatactagcaccatggcccttcaaatgtagaggcgcatatagagcatgttgtctatgtgagttctgtcttacttaataacgtaagttagtaaacgtaggaaatggtctataacgtggttggagacttggagttagtaaactattggtgtggttcttggcttagttggaacactgtatttgagctttgatttttatgagttggtatttgcatagagcttctatattctctattaaattatctctatgttgtttgtttgacaggtagg

SEQ ID NO: 109042 - DNA, 481 bp, Aquilegia coerulea
  Intron number 2 from transcript AcoGoldSmith_v1.007193m (l ocus AcoGoldSmith_v1.007193m.g) derived from phytozome v7. 0 (chr-ID scaffold_11; pos 2144740 to 2145220)
aactagcactggtgaacctaaggaaattggaattggtattctgatgatgattcttctattctattctctgatatccattcactagctacattatgctaacttgattgtcttattattgtttactgttgtgtattatatgtattgttgcgactgtaatgataatccaataaaactcgtgtggtgtggtgtgatgttatgaaattcaattcaatggatgatatagcaatccaatttttggctgatacaggggcaccaaaagtttgattgcgcataacattatgttattatacaaatttatagcataaacagccaatggaggaaaaggtttgccttccagataaacactgtgcatgtaaaacatatatttaagtagtagattgtgatactgtcttaactatatatagctttgtcctaacaaatttcatcggtttttcgattttcttaagggggctcttgcaattgcctctcagggcagccttcc

SEQ ID NO: 109043 - DNA, 319 bp, Aquilegia coerulea
  Intron number 1 from transcript AcoGoldSmith_v1.022607m (l ocus AcoGoldSmith_v1.022607m.g) derived from phytozome v7. 0 (chr-ID scaffold_6; pos 7516826 to 7517144 reverse stran d)
taagtctaaccagaacagggttgttaaaacccctggtaatcttcttcaatttcattttaccttaaaccctaatttattttttgcaacattaaatcataaggtttgatgattgttttgaatgtttttttatacattagaaacgtatttgatttcatttcttgaatacccattttcaattgatctgtttttgctcttttgtctaaaaacatttgtgatattgttatgcatttgatttgatattgttaggtgtttgttgttcttactttgtgtttgatttttgttaggtggaaagcttgtttatcagactactaagaagaga

SEQ ID NO: 109044 - DNA, 695 bp, Aquilegia coerulea
  Intron number 1 from transcript AcoGoldSmith_v1.006112m (l ocus AcoGoldSmith_v1.006112m.g) derived from phytozome v7. 0 (chr-ID scaffold_49; pos 1423212 to 1423906 reverse stra nd)
gtgggatagtttctggcataagaattcatcttctggtaatctttaattcttcattattattttactagttatactttatttctttatttgagttcaatttgctatttgtgtatttgttttgattcaaaatcatgcttatattcttgttcaaaatttgatcttttttttttttattgaaagaaatgaaattataactcaattagaagttttagtaagtccccacattgttaatatatgatgaattagttttacattaatgtgtatactcattagtcactgaggttatgaagtaaaagtgttgcattttctaattttgttgtcgtcaaatcagtattgagtctataaaattggttctttttaggttaaaattgtgatcattagtcttcaatagattgcatgttgtgtcaattgaggactcaggacttcttggttacaattttaggcaagaaaagtttacattgagaagaaaacgttgattgagaagaaagcaacttaggtaatagtgccttcgaaaaaggggaataggcgactctctctgccatcttcaaagtcattgtgaaacacaattggagaagtgtgacattacattttcttgttcctttttagttatctatatagattatgactatgaatgttctgcatgtagcttaacataaattttgaaagatggcagtttgcgtttttcgtttgtgcag

SEQ ID NO: 109045 - DNA, 732 bp, Aquilegia coerulea
  Intron number 1 from transcript AcoGoldSmith_v1.005886m (l ocus AcoGoldSmith_v1.005886m.g) derived from phytozome v7. 0 (chr-ID scaffold_9; pos 702019 to 702750 reverse strand)
aaaatttttctgctttagaacaggtgcaccattgttcttgtttttttctgggggattctatatattatattctggggtgacagtatacttattaatctttacagataaaccaatggcctttgtaagaaacatatttgagttcgtgtaattgttcttttaatattgttgaggagtggggggtggggtggtgtagttacatgttaaagaacttgggtccttagtgtcatatctttcaattatattaattaattatttaattttttcgataaaaaaggtccctaagaatactcaactgtcttgttcttgtatattcacttttaaggaaaattagaataagaagttaaaatcagatttgtagaccatttatagcatctttttggcctcaaaattctgaagtgcacctgaaatgttgccgtatattgtttgttattttcattcatctcctttggtagccatacctcacacaggtatgaccacccattgataaatttagttttagctaacaagtacatccttcggctaataatatttatcttgaggggtctacttagattgacgagccacattgtaatcaatttcttctttttgttcttttctcatttgatattacttttcaaaatcttttcttttgatgatgttagtgtgatcaatatgtggtgatcaccttgcttattgtgggttctctatttctatgcagcatattgaagatttgacacaagaaaagttctctct

SEQ ID NO: 109046 - DNA, 948 bp, Aquilegia coerulea
  Intron number 1 from transcript AcoGoldSmith_v1.025682m (l ocus AcoGoldSmith_v1.025682m.g) derived from phytozome v7. 0 (chr-ID scaffold_10; pos 2344623 to 2345570 reverse stra nd)
acacatcggtatggtttccaagtttgatgtcgataacatcttagaatctggttgctctgatgttgatcgatggcttttagtcttatctagaaaaatgttgaagtaactggtctttgtgttccataaataaagtaataaacctaacaaataccaggtgcctctttgcttgtgagaatttgagcagattgatattttaaggttgcatattaagaagatattttcttatttgcaacctcctaacaaaactctaccgctatactacacaaatctatagtacttcttttctttagcaggtctttagatggataatgggagttgaacagaaattgaacatgtgcttctctactataagactttagggttaataaggttattttcttatttgcaaccacataatttactctctgcagctatgaaactctctatggatactattgggccaaattcatatttttagattcggttagactcaaaaacccagttgtattcattttgattgtatatatatcttgaccatgaactctttcttgcctctaattcaagaatcaaagagattgttttttatttttattttttgccttgttagcttttagaagaaacatatatgcataacaagaaaatggcaagtggtgagattagcaatttaccggatgaagtgatcaacgaaattctaatgtttttgccaataagggaagctgtaaaaacatgtgtgttatctaccagttggaggtacaagtggacttctcttcccaaccttgtgtttgatacttgttcaatcccctctcatattgaaggtgaacaactcaaaactagtctagttacctttgtcgataaaactcttttacttcacaatggtatgatttccaagttcaaacttgatagtttcttagactctggttgctccgattatcgaggaaaatgttgagccatctgtctcttctgtttaag

SEQ ID NO: 109047 - DNA, 1009 bp, Aquilegia coerulea
  Intron number 1 from transcript AcoGoldSmith_v1.014435m (l ocus AcoGoldSmith_v1.014435m.g) derived from phytozome v7. 0 (chr-ID scaffold_81; pos 280106 to 281114 reverse strand )
ttctttaaggactcctctagatctatcaaaatcatgtaagttaagttgatgttcctgtcaaatttgtcaagttctttttggctaactgaacaagcatacattgtaaataaagtaatgtacaacacctatactagtagtagttgaagcagtggctgcatcattttgattgtagtgacaaccgtgttaagtataccagaactactataggacatttatttcttgttccatctatgtatcaaatttttcaaggttatgttcaaagcttgctattacaatccatgtaagattaagtggttcttctaacggcaatcccagagttgctggtattgcctctgtatgtagagcatttcctactcgttatgtggttaaaaggaggtaatcagcaccaccacatggcagaatgcatgggtatacatgactcagatgaatgcttggctacatgaccaccatataccagaatcagatgaatgcttgggtacacgagcatattgctctggaaaactaccttggaaaatttaatacagagatggaggagtctgtgtttaggattaattttgtagtggaggggctagccggtatccagaaatgttctaaacgctgagacaatactaaccactccgggattgcccaccattagtccttcacagttagtcttgaactatgaatcttatgtagcgcgcgttcaatagcgttctttgaccattaagattttgcatgcttagtaggacatagtttgagtttcagaccatgtttaggggtttaggttgttgatattttctcagattgccttggcataggtaccccgtttcttaagcgcgtctgtgatctccttcatacagtaaacctgttttggctctaacttcgcaattaactttcccactgcagtatgaactgttttcttttttgcaagttattaactaaacgaactcttaccgattccatatatttgatgtttcttgtatgtttgtttacaggtttaaccaaaatttggttaggtctatcttgacaa

SEQ ID NO: 109048 - DNA, 887 bp, Aquilegia coerulea
  Intron number 1 from transcript AcoGoldSmith_v1.008482m (l ocus AcoGoldSmith_v1.008482m.g) derived from phytozome v7. 0 (chr-ID scaffold_9; pos 2918037 to 2918923)
atattaaaagggcttatcgtcttcttgctagaaaggtaagccttttctcaatctcagttcttcttttatttcatgttttttgtgttaatttattatttgattagaagttcttttcatttcctttactaatacagtacatagaagaaaatcaaatatttcatattagagtagattaattattatgtttataacatttttttttaatgcaattatgtaaacttaaacacgataactgatctctatggtgaattttttgagaatggtcgaatggaaaataattacaaagaatcctacttaagttatattaaaataattttctttgactagccgtgatgtttttacttattgaccatgttatgagttatttgagtcatagaatgagggtagtgtcttaagtgtaatgatgcagctataagtcataagtgtaatgaaagagcagcccacgaagtccaactgagtgaatggaatattttcgatggtagcaagtttgagacatgcttaaatgagggaggcgtgatacggcattgtgctgttgtgtggtgaagttgccacgaaagattctattagactgcaaattctcagtgtgcgaaaccatataggaacttaaatatacaataagttccagaatttgttcactttattgatgaacaattgatcttttacaacaatattctacggatttttttacaaaaacatacaagtagagttgtagaactaattgatcttccaatagaatttaaattcgaagaccttctacaactcattaactcgcacgcgattgttgtaaatgtaatcatttttaattttctttgttttaacttttaaatatgaagctaaggttctcatgaagcttggttatatctgttggtaattgcagtatcaccctg

SEQ ID NO: 109049 - DNA, 469 bp, Aquilegia coerulea
  Intron number 1 from transcript AcoGoldSmith_v1.005840m (l ocus AcoGoldSmith_v1.005837m.g) derived from phytozome v7. 0 (chr-ID scaffold_30; pos 1261842 to 1262310)
tatcgcgaattgcaaatttagcttcaaaaccctaggtttgtttattaatttgtatcaaattgtcttcaattgaatttgtttaaattaggggttttagttaagttttgatttgtttactgtattgattatttattttttgaagtttaatttttgttagggtttattttgatttgaagtggaagttagggtttgtacgtttctgtcgtcattaactattcgttttcctcatttagatattgataggtatttgatcatactatatatcgttttcgctcatgtttaatggtgtaattataaagaaaatctataatgttttgtcttctattgaaattcaacgcatctttttttatttatataaattatcttgggtaacagttttttttttttcatatatataaacaaaaaataattaattttggtattattttagttaggtggagggtggtggtgcacctgtggcggctggggt

SEQ ID NO: 109050 - DNA, 876 bp, Aquilegia coerulea
  Intron number 1 from transcript AcoGoldSmith_v1.023313m (l ocus AcoGoldSmith_v1.023313m.g) derived from phytozome v7. 0 (chr-ID scaffold_40; pos 1057735 to 1058610 reverse stra nd)
tattggagaaacggcaagcatcttgaacgagctgtgtaagtttaaatatttttgttgattttaatggaattgtctctttgtttgttgttttttttttttttttttttttatttgattgttaatctattgattaacggaattaacagaaattgggatggttttgattgctcagtgatgaaattatgttattttctattatatgagaggcagagaagctattcgaatgtcaataggttttcatgtattggagaattatagttaacatgaggaattaagaaatagttatgattaatatgattatcaactgatatgtccatgcgtcacaagtgtcaggatgtatcatgctaccgaacacatttttgttggaaaatttaacttcttcaagaagactacgaattttggtagaatttttttttcctaacataaaatatcttgaagcggtgcagtacaatatgagaatacttacttagtgaatgatatttggtgcataataatataatacatataacattcattttttgcttgactacatttctgccactttatgtttcttatgaggtagtcatggtctaatccacttgatgaacactacaacccttgctaggaatgggcatacaacaaatgataatatttgagtatagtactattttatttaataaggtttggtaaaatgattgtgaaatgtcagtaattaggacaagcgtttttttgtttatatgcatttatgtttggaaaacaaattgaagcatgctctattgccaaaattgtgaagctatgtgcattttttaagttttgtacgcttccaaattttccttgattttctgacaatgctaatgttcaggtttgatttattttttcggaagaacccatttggtg

SEQ ID NO: 109051 - DNA, 338 bp, Aquilegia coerulea
  Intron number 3 from transcript AcoGoldSmith_v1.008051m (l ocus AcoGoldSmith_v1.008051m.g) derived from phytozome v7. 0 (chr-ID scaffold_123; pos 269922 to 270259)
atcctttcatcaccactgactacgtataacatcactctctactttttttttttctttttcatttctatcatttgaagagcagatctgttaatcgaagatcagacagtggatcttatgatcttgttgctgtttgatttcatttgatcaatatgtttgttgtttctgtttgattctgaagtagaattctagttgatatactagatcagttgttttttacttggatcatgatcatttgaatgaaatagaatattgtcttgttttttaagagttgataatacttattggaatgatattatgggtagtgagcttattatggttgctttattttgcagacatat

SEQ ID NO: 109052 - DNA, 736 bp, Aquilegia coerulea
  Intron number 1 from transcript AcoGoldSmith_v1.008524m (l ocus AcoGoldSmith_v1.008524m.g) derived from phytozome v7. 0 (chr-ID scaffold_69; pos 959916 to 960651)
ctttgtttttgaaggtgtctctggaagaaatccaggtttgtttgtttgtttgtttcttcgaatttcgtaatttcagttgtttttgttcacgatttgagttgagtttaacttagtgaatgaacagctcagttgtgaactcagatttcacatatttgcgtttcaattcaattattaggttaaattcttagttttatccccttaattcagatatgattgaaacatcttatgggactatgggttcttagttcttacaaaacagcagttaagttttttcttttttcttaaaacttgcttgatttataaaattttatggttatacccaataaaatatgccgcaatataccaaaccctgattttgccttttcaatttactagaattggtgctttttgattttcaccacatgaatttgtaaagtgtcaatgcatgtgttagtaattcactaggagtacttggaatttacataatgtcaaaggagagtcgagaatcagggttacctttaacaaagtgatgcttgcccatactagaattttacaatgatgtccttgatggcatgcttatattttttgatttgttaatattttctatttcatgtggtacatatcagaatgattaaacgtctatatgaaactgaaatatgtcccaaatgcatttctttttccttttctggaactttgttttgtcagaattgtatcctgatacatatatttcttgcagctactcatcggcagattttga

SEQ ID NO: 109053 - DNA, 758 bp, Aquilegia coerulea
  Intron number 2 from transcript AcoGoldSmith_v1.017753m (l ocus AcoGoldSmith_v1.017753m.g) derived from phytozome v7. 0 (chr-ID scaffold_69; pos 727989 to 728746)
gttttatctctggtaaccctcgatcttatctatcccttgaaatggaaggaagcttttttgtttcaaaactttcaactattgccctgtttcatacaacttttatgagcaaataatgaatttgaatatgttaggctctgagagatggtatgcttatgtctgtctagatggcccataccaaacggcatgctgggcgcaaaaacccatcaagactatgcaattgtttagtgggagctaagttttgatgatacggtcctccaatgtgttatgatcctatatctgactcgcaaggcaattgtactcccttgaacatggtcaactatgactacactacaaagaaggcctgtcattgttgataactgaaacataccatcttcttaggaaaacaatacttgaaagcacgcattgaaattgcagaaatggtttacatagacattttcccctgattaaataggaaacatagctatcacggaaaagtgcaaagaaacaaacacctgggtgcttagaaaaaacaaattcttctctgttttatgatttgagaagtggtttacacctacattacacacctcattaaataggaaacaaacattacgcatacgaccaatgcgaagaagcaagcaataactaggtgtttagacaagagtcctctatctttaaacaatatgtttattttaagatgagtagtattgatatgagtatagtaaagatattttaatttccaggaactaagttgttgacttgacaatatgtaacaggtgttg

SEQ ID NO: 109054 - DNA, 719 bp, Aquilegia coerulea
  Intron number 1 from transcript AcoGoldSmith_v1.026078m (l ocus AcoGoldSmith_v1.026078m.g) derived from phytozome v7. 0 (chr-ID scaffold_126; pos 493791 to 494509 reverse stran d)
atcatcttgataaattcttgtaagtaattcaattttttgattaaaaggtttttttttttttttaattgaattgaagggtaatgtctaagcctctaaggtcttgtttggaatgcaataaaaatggattatttattctttaaattgatatataagtataaagtatgcacatttacattcaaaaccacactcaaaggtacaaggtacaaactttacaatgattccaaaccctatgttggttttaatgtaggattggatattagagatcaacaaccaaagagatagctggtagaggacaaggaggaagtaccacagacaatcaaattgatgctcttggtagactcttgtaagtcttctttcattcattaaaattcgttatctgaatttatttttttttttttctattggttttgaactgtaatgttaaatttctgcttggaaatgcaatttaaaaatttaatacaccaatagacaaactctgtttagttatagtgtggcgttgcttcttagtttcttggcatgattacaagggtaacaaattttattttctttgttgcttccacaatggctcacaagtttttccttagcgatcattttcaagtcttacaaatacctttgctcagctctttcgtttgtttttaatgctctacaggacacgtattttgcgtcatatggcttctagttgaagttgtatatgcggagtgatgggtacgtcagggtgg

SEQ ID NO: 109055 - DNA, 909 bp, Aquilegia coerulea
  Intron number 2 from transcript AcoGoldSmith_v1.015612m (l ocus AcoGoldSmith_v1.015612m.g) derived from phytozome v7. 0 (chr-ID scaffold_11; pos 1495843 to 1496751 reverse stra nd)
aatctgatccggtttgttttcttctttctttcgaattcttatgttttgtcatgatagtatcatagttaatcatttgtgaatttcaatcctttccatcgttgcatgaacaaataggataatgaatgttcaagtagtgatgtccaaactagaattgcatcaaagcccatgcggcatgcgcaaccaagcgacttttgtaactatccttagtaccaccatgaagtagtttggtcccctagtcccacttcttacttccaacaaagtttgtatgtggatgacgaaagttcaagtagtgttcggacgatgattatcccacatttattatccgaaggacttcccagataggagttcgaaattcaatgtgatggacgtataaaagcagggctaactgaaggatgtggaacaagtgaacagtgggaagaggatcttcgcccatgattgcacaatatagtaattccttttcctagttccaggtgccatctgacccagtttgtaatacctatgggcaatgataccagaggtccgaggttcgatcccagacagtgcatctttgagttactgatctcattaaaacaggcttaccaatctaaaaaaaaaaaaaaaaaaatccttttcctagttgagcagaagctctgtgttgtagtagtgatttcgtatctcagcggttcactaacaacatcaaggggctggtattcattcaggggtggtgaaatatcttgggcaacatgcccatgtcttgaagcttagggactgtacaaaatgcactaggtttaggatataagatgtctctgcctaatctgcacaacaaattgttgtcatgcatgtagtcttgataacctcatctgtcccttatgttaatgttttctattggtgtttttttttttcattagctggaagaaggagagaaagact

SEQ ID NO: 109056 - DNA, 664 bp, Aquilegia coerulea
  Intron number 2 from transcript AcoGoldSmith_v1.014344m (l ocus AcoGoldSmith_v1.014344m.g) derived from phytozome v7. 0 (chr-ID scaffold_123; pos 12285 to 12948)
atccttgtcccaacgactgtgtgcaatacgagtgtggttatcctacccctgataatattaaagaatttatgggtgatgatggagatgatggtcaaaacttgtaatgttgaaaccctatttatattcatactttgattgattttgtatttctattatgaacaaatgatgttgtattactattgattcatgtaacactcaatttgatgtaacactatatatagtgggaccacttcaatttattataatattagtataatattgtcgtatgaatattgattgacattgttcaacattatattattttcttaatgacagtcaggtgttaaagcaactttgtcaacaattagttgttaagatggcaggttcggcatccggttcggcttgggccattaataactgcaagcacgagccactgcaggaagacacacgttggttgtggacccatattcttaccgaaagcaacgtatcaggagtttttaacatggtaagtacaatattatttatgcagtctgaagacttttaacaagtgttgatacgaagtctggtggttgatattggttttttttttttctttgtagcaaatacccaaaagttccatccgttcttgcctttttatagtgtgggtcgagtgaaccttatacacaacaagcaaattttcaaaact

SEQ ID NO: 109057 - DNA, 824 bp, Aquilegia coerulea
  Intron number 2 from transcript AcoGoldSmith_v1.008505m (l ocus AcoGoldSmith_v1.008505m.g) derived from phytozome v7. 0 (chr-ID scaffold_11; pos 4631121 to 4631944)
ttcagtgtcaggtatatatgtttttcattcttgagaatttgaaattcctctcctactctcctagtgtgttgacagtcaagtacttggatcactagtcagaactggaggagtaatcaataacggggtctggttattgtcgtaatactcccctggcttttgactgtcggccgtgcttattggtgaaccagatgtgtttaagtgtctaagctctagcgcgtgtacgatgaatcaagaccgtctaaataacaatatatatacgtacatattattattgtagaagtaactgcatattgcatccagaacaaaagtaatttcaaacacccatgcagcagaaaaaggaattagaagggcaagtacatattagagcaggctggagaccagaagtccagaagtatgaatatgatcggtccacttccatagaaggtagctaggtccgagtgttgtcattgaatgaatgcatagaatggttattatcaacgaactaactgaaggtacaggccggaatgtagaccactagttcatgatcattatatcaaaatcaatcaatgcactcacatgaacctatgtacaatacggggtagcgtttaagcttcactaatcacaacaactaatagcatatagaaattccagtatcaagtttgcctgcttgaaaaactacagtacttctctaaaaatctaaaatgccctatacaagagaacgatgctagttttactgaagattgtggttcgacttgaaatcgcattacgcagactaaatataatcataaatttaattccattttgtctttaatgtagtactgatgccttctgtcaggttcccttgt

SEQ ID NO: 109058 - DNA, 1000 bp, Aquilegia coerulea
  Intron number 1 from transcript AcoGoldSmith_v1.010421m (l ocus AcoGoldSmith_v1.010421m.g) derived from phytozome v7. 0 (chr-ID scaffold_6; pos 8619740 to 8620739)
cttcttcatcaatagatttccaattgcaaatcaaggtataatcttcttcttcttcttcttcttctatcttttgcaatttcttcttcttcaatctctttcaaaagtttattgcttaataaataaacgaattcatttatggtaattgaaaacctaggtataggtacatctatttgttgtaatattattattttttccatatttaatgcttgattttttttattcttaaatttgataatttctagtgataatttgtatcaaaatatgcgtaaaaacatgatttttatgtgttaaaaacacttctgtaatgcccatttggaaatgatcttataatagtaaaaaaaaaaaaaaaattaatttcttaatcttaccaattatagaatgatgtatcattaaagtgtgatgttgggatgaatgagttgatgattaaggtgttaatgatgtatgattagattctcgattctctctcctggattatagtggttggttacttggtttggtgtagcatctttaacataccatttatcctacttggattctgcggcttacaccctctaactgaccctaaatgacactatccagtagtttgatttggtgttgacaaacgaattcataagtgggattcatagatacaaatgatcatcactttatcagcctttatagataagatatcgacttagattatccatttcatatcttgctgctttacaattaggtaaggatggagatgaaacatgcatatatatatatgaaactcaagtccatacttactagtctttcagcaaccatggttgttccagagtggaaatgttgcatatcaatggtttctgaacaccatatagtctttagcttgttctattgtttttgaagagcattgtagtactatttgcgcatatagagtcctattttgtccattgcagattacctctactattgttttggggaacagcattcttggttcgtcgtttgagcttatagtcctattttgttcattgcagagtga

SEQ ID NO: 109059 - DNA, 933 bp, Aquilegia coerulea
  Intron number 1 from transcript AcoGoldSmith_v1.002187m (l ocus AcoGoldSmith_v1.002187m.g) derived from phytozome v7. 0 (chr-ID scaffold_18; pos 1675767 to 1676699)
gtcttctacctcttatcatcggattacttagaacggtgaggtccttatttattgtttcttctgtagattgctttaatttgctaaactaggtataccccttggttccctctcctttaatctttgtggccatccaatactacattgaagctttggcgtggaggccattattttccacggtacgagactacatcattaagttgagatctttttgagttttaaaacgatcctaaccactgcatatggtaactaagacaaaagtctaaaaatgtctactattattcgacttgggccagaagaaaaatcaaccctttattttgaaaagataagtatagaagaatgtcaattttctactgaagatatgtatataattgttaggggcacagaaggtggattctttaatgggttgggtgacttgggtcttccaacacactagagtcaattacatagatcagcagcacgccagcacaaaaacaggaataaatatgaaaactaaatataagaaatacaggctaagtatggctcatggttgctgttgtgttaactcttatgagtttgagatgtaggtcaattggtcccactactcgatagaatggtctatgggttgagcacaacttatttgaaagattaaaacaaaaagtgcgctgcctagcatatatataagttactacacaatacttaagaaggggtgcatagttcataaccccctgcttttacgtgtaacaattttgattggtagtttttttttccttgctgatatagtgttattgctgttatgcgtgataataagagaacaataattctatcttccttgacacctttagggtgttctggatacatcttgtggcacttgtcttatgctttctttcatttgtttttggattttttttccttttgccaggcaaaactgcctaccgtgttgagaatctaccgtga

SEQ ID NO: 109060 - DNA, 847 bp, Aquilegia coerulea
  Intron number 3 from transcript AcoGoldSmith_v1.002187m (l ocus AcoGoldSmith_v1.002187m.g) derived from phytozome v7. 0 (chr-ID scaffold_18; pos 1676978 to 1677824)
caattttcaaggttgtacaggtaaggtaatgattgattgttttggtttttcagtttcatgtaatgaagtttgtgggaccttatttagtagtatatacattaaagattaatttgaaagatatttagtatatactttaaggatgtcttatcttccgtatgtgtagtgagctactcctctagaattttggtatcgtgttgccctgctcgaagataaacaaatgacctgatgaccacttctactggattaagggaaaaaaaaaatgtccacttggtatattgcctaaacactaatcaccatgttgtcttgagaaacccatcttcttccttctttcacatacgtttactattaccatactgctgcgccacctcagtccgctttcctcaccgtgttcgattctctgatgtactgacatcagatagtatctcaaaaatcgtctatgggttggcataacctcacatcaattcatagctcttagaaattttgttgtaatggaatttgtatctcttggttttatagtgaacactcctcttggttgtaatttggataaagaattattacctaacagaactcataagttcctcaaaatctaaaatgaggcagatgccctcatttttacattatgtcggatcgtcacccatacgttcttaatgcatagaaaaaacattgttggatccatcgagtggattatgtgcaaccgtgttcgatagctgcatagtatatagtggttatccttttctcgaactttagaaacaagatctactgactgtcttaagtatgatgtaatgtaatatctcttgttttagtgaatgcaggcacatttagtgcgggctgctgaagttaaaaaatc

SEQ ID NO: 109061 - DNA, 579 bp, Aquilegia coerulea
  Intron number 4 from transcript AcoGoldSmith_v1.007010m (l ocus AcoGoldSmith_v1.007010m.g) derived from phytozome v7. 0 (chr-ID scaffold_9; pos 5978657 to 5979235 reverse stran d)
agttgctttctgcaacttttggatttagcgttcttgtaagtttaatttaatacactttatttgcaacaattacaaatttattacttgcttatcatcattagttttactttacaagtattatatccaattttaaagttgttatacttgagagtcttgttgacctggggagatcataatgtcgaccataggcttctcttcaaaagtcttgatgtttagggggttccttgttaagtattttgctctttggtggatgtgactccattattgtatatacattggagtgatgtttgttgtctgtagtatgtttcagggctatcttttcttaagggtctcttttcctcatgtaggccttccaaatcgtgactatctaataaaatctccattttactgatctttgcctattgttatcaagaagctcccataataaagaactgttaagactaacgatgaatgtacacttaacccccacaattgcatccacacattaaacttttgagttgacatcatctaaacattacttcctattgtgttttcttctgttcaggttacattagcgctttacattgctggtcaccagtc

SEQ ID NO: 109062 - DNA, 805 bp, Aquilegia coerulea
  Intron number 1 from transcript AcoGoldSmith_v1.008311m (l ocus AcoGoldSmith_v1.008311m.g) derived from phytozome v7. 0 (chr-ID scaffold_37; pos 505885 to 506689 reverse strand )
ttgctgctcttctcaccattctcactagttcacaggttagttttactttcgaaaccctaatttttctaaatctttcatttcttctctttaactttgcaattcgttttcgtttacaccattttttacggattttgtaagcattttagtcactttagggatcttatcatctgtaatttgaatataatgttggtttgattgaagtagaattgattatgttgagagtgtttaatgtgaagtttggtcgtttggaagagaaacaaacatgaaaatagtgaatgttttgtttgatgttttgatagttagtttgaattgtggatcatttgatctagttgagatgtttatattgagctaaaacaagtgtttatttgtgtaaattattatgaatgaagaggtgttgaacgaggaaaattacaatgtagattgtgaaattgtaaatgagagctgtaaggttttaaaagtttggttgtgcttggtttgttgaatcagaggaaaattaactaattgagttaaattaaagcaaaatgaagttcattaatcgaaacattgtattagtaggaaagagtgtatgtattggatgtgaggatgtccatgttggttttatttaaatttgtctgttgggaaatattacaaagttttcataaaggagtaggatttcggtcaatgacttgttctctgcacaaattagttcattttctttgccttctgtattttgccatcttcaggtggctgctctattgtcataagaatgtcaacttaacatattatgtaatatgccagggaattttgacgacactctcacaaagta

SEQ ID NO: 109063 - DNA, 381 bp, Aquilegia coerulea
  Intron number 3 from transcript AcoGoldSmith_v1.004852m (l ocus AcoGoldSmith_v1.004852m.g) derived from phytozome v7. 0 (chr-ID scaffold_11; pos 5234591 to 5234971)
tgggatttatccttcttggtggaagagcacttaaggtaacacattagtatagtataacaactttccctctcactgactaagtcatccaatattcatggaaaattagtccttactcagactaagaaaacaaactcattcgatctgttgtaattttataagactaaacatcaatcatacttgtatactcaaaggtcaaagatgcaggaccgcagtacaaacccgaaagatgaaattgcggtcaggcggctttgaatctttattttgggaagagaattttttttgctagccctatcttatatttgaagttgaacccctttgttgctgaagtttagtctcatttttgcaggagatcaattctgagattagtgatcccaccttgag

SEQ ID NO: 109064 - DNA, 640 bp, Aquilegia coerulea
  Intron number 1 from transcript AcoGoldSmith_v1.007864m (l ocus AcoGoldSmith_v1.007864m.g) derived from phytozome v7. 0 (chr-ID scaffold_7; pos 4820874 to 4821513 reverse stran d)
ttttatcacaaaggtatgtgcttatgtttctatttctcttgcttcttcatttccactttccttgtttatgagtttttcatttcaaacagagatttagtggtaatgggtgttcttcaaattttgatttttataagctcattagtgattcagaaataagaagttgtgatgaagaaatgttgttcatatttaatattttcgtccttagtttaaatttaacttttgttgggtgtttttcaaaaatttggtttagttaaaaattcatcatgatcaagatacctttgatttgcatgtttgatctgtgtttttctaactattgtaaacaattttttgtaaattatttccatcttaatttgtaaagtgggagaaggaactcatattgctccttggttctgtatgaagtctttgatttttctctttgtagcattaaattagttccaactatcatggtcaagtactcaactgcgtaatttgtagtttataaagtttagttttattcaattgttatctgtgtttggccggcaattttaagaatttattttgaatgttcatttcatttggtgatgtaatgttggtttactaatatctgggtatggattgaatcacaggatactctcataataaaagctcctaagaagtctcc

SEQ ID NO: 109065 - DNA, 512 bp, Aquilegia coerulea
  Intron number 2 from transcript AcoGoldSmith_v1.003990m (l ocus AcoGoldSmith_v1.003990m.g) derived from phytozome v7. 0 (chr-ID scaffold_9; pos 1851078 to 1851589)
gatcaggagtagcacctgatcacccagaaacaaaggtgtgttttttgagttttaaatcgatgaatatagtgaataagtggacatgcagtattaatggctattatgttgttatataaatataatgttatcatctactttggagtaaatgtttcacactgcactttagcatattagccctgtattggagctcaattgtctttcttaagcaaatagtcccagagaaatcaggaaatgattgctatgtttgttctttaaattggagttttttttttctttttttttttttttttactgttatagcatgttggttatatctttttttccccttattaatagtgaacatgtgcaatatgtatttttttcaaaattgcagcaacaaaatttaggttattcttagcaactgtttgtatgcttttaaagatccttttgtgaaatattcctcttgattgagcttattttaccagaaacttgcaacagattgtggttaaccaattttctcgagtagctttaaa

SEQ ID NO: 109066 - DNA, 903 bp, Aquilegia coerulea
  Intron number 1 from transcript AcoGoldSmith_v1.016084m (l ocus AcoGoldSmith_v1.016084m.g) derived from phytozome v7. 0 (chr-ID scaffold_12; pos 637109 to 638011)
agatctaaagcaacacaattctctctttctttttggtgggttatcagtctgagagtggtttgatttgatttgatttgatcacaggtcatggagttcaacccaatgaactttttacctttttcagatcatcatcagtgttttttttgttggcaatattcagaactgttgtgatttctcaatcactatgtattttatgtatttaaagtcattttcattgtaggaccaatttgattagtagcattacaagtgactcttgttataccatgtttaactttaattaatgccctaaggttttactttattaaatataagtaggtataaagcatcaaataattaaaattattacacattagaaagaccaagtatgattggaaaatggatttataagaaaagtttatttggtgaacaaactttgaattcttttataaaaaaaaatgtttggtgggaaaaccaatcttcatctctcttcttcttcttccttgtcattcttcaaataatattcattctctctcaatatatgttactgctattattatgaagaaccatacttctgaaatctcttatatttgtgttactcatcaacctcttatcgtaaagcatataaagaagcaaaccttatcatttcaaagtcttgttaagccacatagagtagggtatatacttcttgtattagcaatttgtactagcttaagtgtattctatataggtcttattcccattctaaggtgtaattcagaacatccccagaatagaaatgttcaaggaatgtttcatgacagtggacttgtcgaatcaagctatgtcaatgtatcatataacgtacagttttcgaagcagcaacagctagtcaatgtatcttataatgaagagttctggaagcaaccaaacgatttaggatatcgt

SEQ ID NO: 109067 - DNA, 272 bp, Aquilegia coerulea
  Intron number 1 from transcript AcoGoldSmith_v1.013349m (l ocus AcoGoldSmith_v1.013349m.g) derived from phytozome v7. 0 (chr-ID scaffold_1; pos 5025033 to 5025304)
tgggtgtggtactaagcttagtaggcttagtttcttgctaatcatgtttaagttcaacaaatgtgacctcctgttttacaacagccatatatcttgaggcaatatggaagtagcaggatattggtttaccacaactgtttttgactttgaactgtttggtttacttcagtgctatttctggtgatttttcttttcttctaacagttaaagttattggttttaattttgagcgaccactgacttcttttatataattttccttcaggctcgca

SEQ ID NO: 109068 - DNA, 948 bp, Aquilegia coerulea
  Intron number 2 from transcript AcoGoldSmith_v1.010689m (l ocus AcoGoldSmith_v1.010689m.g) derived from phytozome v7. 0 (chr-ID scaffold_6; pos 7613994 to 7614941)
aagttaatcagcttcgaaaggtacttgtttgaactatattgaatgatgggttttgattattttataagattatctcaattgtatgtgttaaatctgttgattttggtatttaagaagatatatgttttgaggtttttttcccccttttccgggtaacaatagtgggtaagtagggattcttactaaacataaatgcttgttttagtttctgtgtttggtcgtaattccgagtttgatgatattatgacatagagcatggttttttgtgaattttcctctttgttgtgtttgaactgttgaaaattaattaaaaggcaaattcacgagttttaaatataatgctgccgtagtggccatcaaacctgggaatactgttttgccttttatcgaggcatttggctggaacataaggcaatgatgtattagtttgggaactttgtattactattatttgttaaaggagtacagggcaactctattaaaaatggcaaataagaaaaaactgaaaaagaattggtgatgttacaatcaatataaatataatgacaaggaaggactctgctttgtcacaactctcataagttacactagtttattgatctgtagtctttggtgtctttgtgttctgtcctttataggaaggcaggtttggaactcaaccctttgatagctgcatttcacattaaagaatcaaataatacagacgaatataaaataaacaaaaacctagtaaaataaaatctgtatataagatgggaatactacctggatttgtttgtatcttgcaaagcatgaatggctacatatatctaacgcattgatcacactataacgaaatatcattaatatcagttttatacttcattcatcgatgattgcgaattttctttttgccttccgtagttctgtacatgtaaatccttctaatttgcttttgtagggtgtttc

SEQ ID NO: 109069 - DNA, 668 bp, Aquilegia coerulea
  Intron number 1 from transcript AcoGoldSmith_v1.006257m (l ocus AcoGoldSmith_v1.006257m.g) derived from phytozome v7. 0 (chr-ID scaffold_9; pos 911938 to 912605)
tctctgtgagttctcgctccatttttctttttttcttttttttttttcttatattggtatgttaaattttttgatttttattagaattctcatgttttcaagcttaaaaatttgatttctaatgtaagtttaatgaaagtgttctgcatttagggctattgcatatttgctaataaaaagtttttctttttttttttttcgtgaaaggttgggatggtgttgaatgcattgctattatttgattttataaccataccaccttaagggacacttgcatatatcatgcccttcaacgaattcttattatgctcgcaagagtttactccatttaaactaactaataactacgtataacacttatattaaagttctcacttgaaaacaatttttgcctaaagtttttggaagaagattaatttttggctgagttcatctcgtaagcccaaagtcttgcttagtgataatttagaagtttataaattattgtattttcatttgttaattaccaaacttattgtgcctagttacacttgtttatttccctaaagcttttatttgttctaaacttctaatctataagctcctttttttggcttctcaaataactaaatgtgttttttcttgcttttgtagaggtgcgcattggcagactcatttcaatccgccaa

SEQ ID NO: 109070 - DNA, 869 bp, Aquilegia coerulea
  Intron number 1 from transcript AcoGoldSmith_v1.021108m (l ocus AcoGoldSmith_v1.021108m.g) derived from phytozome v7. 0 (chr-ID scaffold_16; pos 1456004 to 1456872)
acttaagtagggaaaataaaaattttgactccttagtataggtagagatacactacccacccccaacaagttgccccgctgttatatcaattctcaataatccttggagatataacatataactgtactttcaaagatacttgtacaagtctacaacataccctcaaggagttttcattttcccaatatgataaatttattggctatcaaattgccttttaaataaattttgttgaaataaatttataagagaaaaattgtgtttcgtcaccatgtttttggggcaaataatttgctcagcttcaccacttgattttttttttatttgcatttcgtcaccaatacgtcccagcttcgtcaattctaacggtcaactcaactttgacctggtcaaagtgttatcacacaacaaaggcttgggtttttttttctctattttcccttcgttgttattgttcttcgtttcgttgttcttcgatttcttaatttattgaagctcgatctctgtcaagtatatttgaattagtcaactaatggttgactttgtcaactaacgagggtgagacggaatggtgactaaacacaaataaaaaaataaagtggtgactctatccaaatataccccaaaaattgtgacgtgtgtccaaaaatctcaatttataatcaaccaatataaattgacaaggggggcctttccaagaaactgcttaaatcaccaatataccaatcaaatacctaatatgccaatttatgccccttctttattcatgtcattatgtcaaatttatgtttggtttgcatatgttaatgatacattcccgaaatttgtaacaggtcattcttaaaaacctaccccctaacagttccct

SEQ ID NO: 109071 - DNA, 948 bp, Aquilegia coerulea
  Intron number 3 from transcript AcoGoldSmith_v1.016741m (l ocus AcoGoldSmith_v1.016741m.g) derived from phytozome v7. 0 (chr-ID scaffold_3; pos 5466281 to 5467228)
ttacagtacttcaatcagtacttagaccttatcaggtatttgtttacactcatatagtaaggttgttggagttggaattgatttggttttacttcagtgatttacttttggaatggttacgattcacaaaatgacaagctttttcgcaagtcccaaatatcaatcctatatattacctgtctttgattcatgaaattagaactccacgggaaatgaggtacaacaaaaaaagtagaatactacaatgttagggaaaaaagaggttaggaaagacatagaaaggtgagatcccatatctgttggggcaaaatcaggaaagtgaattgcctttctgttagataggagcttgttactgtcatacatcttttttttttttttttttttttgtagatcatatcccactattttctcatttctttatcgcttgtactgttcatctccgtgatggacattgcttacctaatattgtcagactcaaatagcaagaatgtagtttgttcattttggtgccggtacatgagtgtggatcttttagtcttagcttctcttgggtgatcaatgatttgtgtttgtggtgatatatgcgttgatgcccttcttcatagcatttcattattctaatcaatagtatgaatgtaggtagcaaattagagttgagtaatggactttgtatcttatttattattcgtaaatcaccttgaatctttctgctatttgttgaagtcctttattcttaattatcaatctgttattttttggactgtggatgggtctctacgcgtggagttagaaatgaaattgtagtatcttgatagctatttgaatgcacatggaatatgagtagatgaaagagaatcttacttctttgttttgggatgttagtcttacttcagattaatttgtaaattttcagtacttcttgaacccaaagcttgaaaaggagccagt

SEQ ID NO: 109072 - DNA, 549 bp, Aquilegia coerulea
  Intron number 1 from transcript AcoGoldSmith_v1.019173m (l ocus AcoGoldSmith_v1.019173m.g) derived from phytozome v7. 0 (chr-ID scaffold_26; pos 1493628 to 1494176)
agagtttaagggtcggggttttaatccaagccagggtttggaactagaaacaaaatcctagtagttccttgatgttaattcgcgtctctgcaactacaagcttcatttgcaggggattgttcaggtcagtatctctccccacctaaaccaaacagttggatattaaaattgtactttatgtgtgattcagtagatactcgagtgtttagtcaccatttcgcgcctaaaatttggttttctgttttttttttttgaaatcacgatatctcctacttttcgaagagcttgtattataatttgttcaaattgtttagtgcataatttgtgcttattgtagaagtgaagtgtctgcaaattatttgccaaaaataaaagttttctttttccactatattttattgatagttgctttttcatggcagtgaaggatttgtatctcatttggctcttattgatcaacgcccaaatcattcctttacaagaaatttacaccattttggaagtgaatctgaaggaccaaacagtgaaagcttctgcataccacaccca

SEQ ID NO: 109073 - DNA, 732 bp, Aquilegia coerulea
  Intron number 1 from transcript AcoGoldSmith_v1.008556m (l ocus AcoGoldSmith_v1.008556m.g) derived from phytozome v7. 0 (chr-ID scaffold_13; pos 1352445 to 1353176)
tcttcttgaactcgaagctccaatcaaaatttgtggtaattaatttctctctttttcttttattttatgttttttttttctagcaatttgtttgtttgtttgaattatttaggttttggtgtgggaaattattagaaactcttgtgtagatttgaggtttttgcagaaattattgaagcataaatgtctaattcttgaaaattctattaccttgaagggtttttatagattttcataaaactttgagagatttttttgtatcggttgaactacttgagctggtttaaagagcttaatctctcttggtaaagtgattgaagagctaccactagaatgcagctactattttacttgtttagggtttataggccaaatttgtttttaaattttaattgcttgaaaagtacaaccttttgggtccaatgtgtccgctttatttacttgagacttgagaaactgttcaattttacatcttgataagagcatcatttttacaggacatcagccttagattcattattattaaacttaattgagtcatgcatgaatgtagatgtagattttgcatacgtgcagcctgtcattatatacgtaaaattcctgatttaatatttcatctagttcttgttgaaacaaaagtaaggtaaagaatgaatttagaatatcctttttttttcgtcaataaatatttttagcgaaaccaaatgtgtgtattgtttttctttgcaggtg

SEQ ID NO: 109074 - DNA, 807 bp, Aquilegia coerulea
  Intron number 1 from transcript AcoGoldSmith_v1.004665m (l ocus AcoGoldSmith_v1.004665m.g) derived from phytozome v7. 0 (chr-ID scaffold_13; pos 2631303 to 2632109)
actttcttcactggatttggttaccttattggctggtacgttcatgttagatctaatttgaatctgtttcttagtttggtttgtcatttttttttataattgaatgacttgtgttgaagaagattggttggaattcatgaatttgtgattgatttaagttcatttgactttagaatgagttgaaacttgaaagagtagtttattaggacaaagatcaaagtgttctggatttgaaattgactgacatgtgatgtaattctgtttcggcatctttggttttagcttaattttttgctctgcataatatactatgaattggccgaattggaacatgggttactttaaaatagttatcttaatattagattgagaatggtgttttgtttctacatgactagagattggatcatacattcatacataattatctgttttaaaatatgttttgtttttgcaacaatataagcttctccaaaatattgtgaggcagtatagcattcgacatattttcatgtctgagaccgtctacccagaaacagtcacttccatcattagaacaatcaacaataacttttgagcccatctctacattcacagtaaaattttgaactttctcgcaatactaactttaaatacctgcttcctcaagaactatacgccttcacaacaattgccaggatcataagattatgctttgtcagtagtcaattaacatgctcgagtagagatttattgaaaactatgtttctaaaagcaattactcaggagtgttgaccagtcttttaattttgtagccactggtactac

SEQ ID NO: 109075 - DNA, 929 bp, Aquilegia coerulea
  Intron number 2 from transcript AcoGoldSmith_v1.005072m (l ocus AcoGoldSmith_v1.005072m.g) derived from phytozome v7. 0 (chr-ID scaffold_34; pos 420953 to 421881)
ctcctaaaactgtctttccttcggtaattttcattatcatctatttcttcaattcaattaccttactagcaaacaatttacaattttgagtagttttttatggagtttataggttgatttggttgttttaaatggttttatggaaaacactaaacattttagctagaaaagtgaattcttaggatcaattgttgttagttagggaagaaatatatgtctttgttgagcgagcattgatgctaatttattttaaatatttttgttggaggatagcaaactccttcaacacttagagagttggttttgagcatttttctaatggaattgccatggttaacaagggttgcccaactgactagacaaaccaaacattttcttcctcgtattttttgaaccagttttactgcaagtgaatgttgagttaaaaaatagcacaagatagataggaaccttggaaatggtaatatcagtaaaatggatcatgcgattcttacaaattgactactgatgaaatatgatgttgagattatatttatagccaaatttctttgttagatttcgagtcctctgctagttggaattttttgtgtagtcaagttcgttttctgaaacaaacctgatgtactctatgtagcttcagttttttggtcctcgctctctaggcttctgggcttgggaatcccttggaatggtgaatgtttataacatattcacactacctcctgaagatccttgctgcctataaataatgcaacactgtcatcttgaatagcatcgcagtattgaattatgtatttgtctttatcacccacaaagtctgtcaacactcaacagtatttggatatatattactttaatcatagtaagagactcctaatgtgcgaattcatttttcaaggtcgttggctcgattgatcagttaggaattg

SEQ ID NO: 109076 - DNA, 667 bp, Aquilegia coerulea
  Intron number 3 from transcript AcoGoldSmith_v1.007363m (l ocus AcoGoldSmith_v1.007363m.g) derived from phytozome v7. 0 (chr-ID scaffold_16; pos 4595860 to 4596526)
gctctgtgacaaatttctttattgtttctcagaaggtaagcaattttgattgatattgcaatccagattattttttcgcttgaagggattgatatatgattctgtagttatgctttacttataaactggaaaaggtaaattctattgacaaactgctgatggcttcatgatgcttggtgtgcattaatcaatgttgacctatccagtccaggacgttagaactttacgattatagataaatatttgtccatcacacctttgcatttctgtgaattacatgtatgatttctgggttttttcatactcaccttagtcgaggttcatagttaggggaatcaattccctttcatgagttttacaacctcaagtatgcaagcatcctttcatttttttttccctagcataagtttcttaatgtgccactggtatgattgtgtttctctaaaaaaaattactttcaactgggagatattcgagtagccaaataatagctgtgcacttgggaaactttttgggttatatacttccagttaagggggcaggttctttgtcagctttatgtatttcagaaaattaataaaatgtggaagaattacagtgatattctatattaaacttaaagttatatacaggacagtagtaatactctggaggaaaatcattttga

SEQ ID NO: 109077 - DNA, 873 bp, Aquilegia coerulea
  Intron number 1 from transcript AcoGoldSmith_v1.005950m (l ocus AcoGoldSmith_v1.005757m.g) derived from phytozome v7. 0 (chr-ID scaffold_2; pos 6530783 to 6531655)
ctggacctgaggtattaacttgaatcactttttgtttcttcttcaacgtctttgtagattgatttatcgatactttgattaaaactattggatattaaattttggttttttttttaaactttttgatattttatctatgagctagatgaaggttttggttatagtagagagttgtttgaggaaaaagttagatcagagtgttaaaatttccacttgaaataatttcaaagcataagttttatcaataataaagaaattggttttgtaactgatttcatgtgaaaggtatacactagcacacacaaatagcacaatattctccaataccttgtaatgttcatattagactgcggaacgaacaccaaaacctagaacagaatgctatacactagcaaaatatcggaagatgataatgtaatttgtcatagtttacgtgtctggctgttgaactttggtttttttttttttcttcaactttttgatatgttatcaatgagctggtcaaaatttattgatagtagaaagtagtttgaggaaaaatttagaagggagtgcagaacttttattggtcaagcagaacttttattaataagaaagaaattggtttggtgataataaaaattgttacttgttgcatttaaaaggtatttctgcatttacggaatcatggaagccaacatagcacaagattttcctcaatactttttattgttgaaattagactgcaaaaagaacatcataaccttgaacaaaatcctatacactagcaatatgttgggatagttgtcctgtctggctgttgagttttggtagatattgattttgttattgtaattattattgttaggtcgctgaacaacaagttgccagact

SEQ ID NO: 109078 - DNA, 676 bp, Aquilegia coerulea
  Intron number 2 from transcript AcoGoldSmith_v1.017442m (l ocus AcoGoldSmith_v1.017442m.g) derived from phytozome v7. 0 (chr-ID scaffold_13; pos 4350691 to 4351366 reverse stra nd)
accgcctccggccgccacgttgactcctcctccaggtattttccgtttttttttttttttttgcaaattttgttattatttcagtatgattaaagattattttggttaattagattttttttttttttttgaagaatatggaagttttaattcctaaaattaaagcagaatttaggtcacacaattcatatgaaggttgtcagcttctcaagttgcgtttgatactgtttaaaaatggtttttcatttcacaataaattcatgatcttcaaacccttttttagttgaaacaggcagtttgtagtttgtacaatgatatagtaggttaaacttttatgacaaggatctttacaaattgaataagaaaaatgtgcatttgatttacatattaatcataaccaaactactttgggatgtttgaacatttgatggtaaatactttaattgtcgtcttcatttatattgataaccaatttacaactaacagtgtcaaatggagcaaaaaattaattaactgtaccttgccacaaattaattttgtaggatgttatctgcggtttatagtgtaatgtcaggcatcgtctagatttcaagataattgtgttttttcatattatcattcattatcgattcttagactaacaataaattgaactacacaggtgtagctggacgtg

SEQ ID NO: 109079 - DNA, 1018 bp, Aquilegia coerulea
  Intron number 1 from transcript AcoGoldSmith_v1.010516m (l ocus AcoGoldSmith_v1.010522m.g) derived from phytozome v7. 0 (chr-ID scaffold_58; pos 1372604 to 1373621)
ttcttcttcccattctccatcaaattgttcggacggtaagcaataagcatctgtctccttctctctatctctctttctttgctgtattgtatggatttcagttctttttagtgtgaaatatcagagttatagataaccatatcaagaaaatttagaaacacaatcaagcttggttttttttttttttttttctgggtatgagtgatcgtatttcttctcttcacacgcttttactgggaattcgagttacaattgagtgaaagtttcaaactttagacatataaggttggttctgcattatgtatgtatagaatgagtattctttgtattcaatttactggtttattcacccagatcagagcagagtaataagggtaattttatatactaatggtgtcttctaggtaggttttgatatatgattttattttaaccattcagccttgtatcatctttctaaagttggccacaaatcaatgcatatgtattttaaccattcagccctgttattataatttttttatgttatttttttcagaaattgtattcagataaaaaggaattccatttagaatttcaaatcttttgtttctagttacatcctaatagaatatctgtaatttttcttccttctctttgtagtaatgttgtcttaaacaaagaaagacataaagaatatattttttagtgatcgttttttatcattagggttgaaaaaacattaaacagtttgttaaaccaaggtgtataaggagaattatagccgttttatcaaccattcatctggttggctgcgaaccacagttgtcctatgccacatccgatgcacaaaaatgagggtcaaagactcaactttaaatagtaaagtttcattcgtgttttatgtttcagatcttttactcaattcagccctcatttcatgctttatttattgtttgataattttgatttcgccttagtagttgcatttttttgttggatttcgtcttgcaggttcaaccttactgtggctctcacc

SEQ ID NO: 109080 - DNA, 932 bp, Aquilegia coerulea
  Intron number 1 from transcript AcoGoldSmith_v1.002361m (l ocus AcoGoldSmith_v1.002361m.g) derived from phytozome v7. 0 (chr-ID scaffold_3; pos 6979971 to 6980902 reverse stran d)
ggtcattcactttctctctgttgtattggattcaggtataattattatttcgctctaacttgttcttcaactactttcattcgatctcaaaagcatactctttcgtgtttacgatctatttgattaaattacaggttttgattctcagatgcttgctttcgtttaataatttctatgaaatgcgcgcattttgaatcacttttttgtttgttttagcttgagatctgatttcaaatctattagaaatgttcctcttgcattgttcttgagattcaaaatttttagatttgtttgttttgaatttggtgataagtagtagtacttcttgcttgctttctttttttgaatttggaggtgataagtagttgttgtatggaagtttaatgcattgatcttgtatagatctgtttacatctaatgaaatttagtgaactatagcgctttgcaattgtttgttgattgatttgtttttgtgtggagattgatctttctgatttctgaagtagtgtacatatgttattttcatttacattcatgcttagtgataattcagttggaacattgtaattttatattgaagactgtttagtgatagataacttgtataattttttttttcttaatggatacggagttgaattaatttacatttaccatgcagttataatcatttttttttccttgactttcagttaagcgatttcatcagaacaatgttaataataatcttattaataatggcttttgagattaaactgaagtaattgctgaaattatctattggttgattcttgctacatgcttaagtcgatgatgtatggaaagttaactgtaagatgttgttttatttaagtggctgaagtatcgcccagatatagattgaaattggtaatattgtttgcatgcaggtctgattagtgtgtctgtgcatc

SEQ ID NO: 109081 - DNA, 658 bp, Aquilegia coerulea
  Intron number 1 from transcript AcoGoldSmith_v1.014938m (l ocus AcoGoldSmith_v1.014938m.g) derived from phytozome v7. 0 (chr-ID scaffold_79; pos 975897 to 976554 reverse strand )
gctggtacagtggtttgagttattataattttctttggtttacaacaatcacagttctactaatattctagcaagattagaatcacctgatcattttttcctatatgatccaaccaactcataatctcatcttcttttgtcaaacaatgcaaaacctctgataaactaaagatctacaacttcatatgagcatatgagtatatatatatatatatttcttcctttgtcttcaccttttcttcatctttgacaaatctgtaaaatgaacccacccgattcaggaccaactccattaaaatctgagataatcactaattgtaacagaatctaatattggaatctaaatatgaataaacagaatttgaccttattgaagaaaatctaacagtagtcaaaactcacaacattaaccggtaatcggtaatctaacagtagtcacaacagaattagaggtacgtagtgtaggaattaaaataaagtttattgtacaataattaaaacatttttggaattacattaaagtctacatactcatagaattactgttcttttaagtagtttgatacaccatatatagtaaatatatatatttgtattattatggatctaatgccatgccatatacgcatggactcgcagaaaggaatctacttgagga

SEQ ID NO: 109082 - DNA, 619 bp, Aquilegia coerulea
  Intron number 2 from transcript AcoGoldSmith_v1.005943m (l ocus AcoGoldSmith_v1.005928m.g) derived from phytozome v7. 0 (chr-ID scaffold_2; pos 6767477 to 6768095)
aaaagagatcaaagcggtaattatactttaaattaattaacactactatactacttatgcttagatgttctaatcctagtaatagcgacaaacaagatagtttggggttattcttattattatttgataagtattaatgttttatcatccatatcgccaataacattacattgcaaaattgaatgcttctgtgttactatttttcattttgtactttctatgagctacatgtcgatttatacttgataacaagaaacgatgcctattacatacttgatatatatatttgtaacaatttcctcattcccactaacccacatcccacgatattagccttaagtaagatggaagcataatattaaatgggtgaagagaaaataatatgcatgagcaagtaggatgtctaaatctgtatccatgtctgagcttcacaatatgcaggtgtcaatctaactgtgtatactaataaaagcaaagttataattaatgagtgtgtattatcatctgaatacctattctgtattttcaagctaaagcattgcttttaggatttattttttttacttattagaaattacctctgcattgagagcttacaactggtattaattttactcag

SEQ ID NO: 109083 - DNA, 437 bp, Aquilegia coerulea
  Intron number 1 from transcript AcoGoldSmith_v1.004443m (l ocus AcoGoldSmith_v1.004366m.g) derived from phytozome v7. 0 (chr-ID scaffold_2; pos 6363035 to 6363471)
ggagcttcaacgcagaataaatcggtatgatgatttatcttcttgtttgttcagcagtttctctaaatactctaagtagtaagtattatggggttggtttctctactttcagggtttattctttgatgaaaattgaattgtttgtgttcttcttgtttttgtttaaaatgggtttgtttggttagttaagattaaacttcaaagggtctgaattgggtggttggattttgtttgataaattgtttttaacaaaatttcacaaatataactgaattttttttttttttaatatttgtaaaagtgaaaacatacattaattcttacattagttgatttcctatgcgagatgatgatttatcctcaaagccttgagatttcatatagggttgttttgttcttcagagtcaaccctgtgacatttgtggtgatattggaaa

SEQ ID NO: 109084 - DNA, 708 bp, Aquilegia coerulea
  Intron number 4 from transcript AcoGoldSmith_v1.007487m (l ocus AcoGoldSmith_v1.007487m.g) derived from phytozome v7. 0 (chr-ID scaffold_7; pos 43359 to 44066)
ctggagatttcgggaagaatttagtatttcataaggtttgaatcgttcgattcttttcaattttcttttttattgtagattgttgatagatatgcaacagatattggtttatgattgtgttttgagtcttaattttgcagcttgatgttcaaattttgagttatatgactgaattagaatgaattttaacataagaaatagtaacgcatatgtttctgagaagaaaaatgttaattgatttgagttatattaggctaacattaaaggacagttgatatgtttgtctaaatttctatcttttgaattccccaaattatcagttttacataatattgtacaaagattaaagatataacatttaagtcgcaataggaattagtgagagtcataactatctgggacttacttctcaagtctgaggctaattagtgacatggcataaaagatctttattggctttataatcatgaaaattagatgagatatttgtgtctacctctcctctcctctcctctttttatttttggtgctctggattctcacttgtaataaataatcatgtcttaggaaaaaattaccagtgctttgttcccctctgctttcctctcctttatttgacacgcatatcattgttcagttgtagtgtttgaccttcttttatgttttattttaatctacagattgatctcctggacaaaccagctctga

SEQ ID NO: 109085 - DNA, 971 bp, Aquilegia coerulea
  Intron number 1 from transcript AcoGoldSmith_v1.007836m (l ocus AcoGoldSmith_v1.007836m.g) derived from phytozome v7. 0 (chr-ID scaffold_2; pos 7814197 to 7815167 reverse stran d)
ttcaattaaacgctcactcctccactaaagaagaggtatttttcattttttttttctagtttgggcattggttttactctattggataattgaaattcaatttgttttctctattaatatgcaattcttccttgaaatgttatgtttggtataggtttctcttacttgaatcttgaaattcaccttttttttgaactataattttttccgagtaggtatttgtattcagttattcaaaaaatataatggattaaatgaagtgatgtgaaacttggcaaatcacaagttatatgaaagaatacttattgcatgaaaaattgaattggttatgatacatttctacgaattgaacattaaaaacttcacattttttgttaattttgttttgggagcatagtttaagaagatcagttgaattagaccttccaatagtacaaattcctaataaacctcttcaacattagattttcgaaagagttgtactcttatggatatgggattgagattgatcatctgtactaatacaatgtcaaaggatgaaacaaacataactaacctttaaaagacgaatattcttaaaaatatcaaattgtcatatgcaaacgcaacaactaatagcacgcaacaactaagagctatcccaaagatggatacactttcctatttttctcaaaacattggccgtcaaagttcttggaattcagaataatggattactgtgttgaaacctatagagatttacaaaagacctgttttatgagagatgccttaaattttctcaatctacttgaaattaactggaatttgttagttcttcttcgttgtgataagtagtttgtatcctactgatgttttgatggtgaagggaactgaagtcagtagaaagcattttcatctgatatttactcattgtcgcattattctttctttttctaggtgcaacagcgtaagatagcactgcaagaagaaaa

SEQ ID NO: 109086 - DNA, 667 bp, Aquilegia coerulea
  Intron number 2 from transcript AcoGoldSmith_v1.017500m (l ocus AcoGoldSmith_v1.017500m.g) derived from phytozome v7. 0 (chr-ID scaffold_31; pos 2346377 to 2347043)
tcatcccactgggtattgtttttcctattttcacccttttgaaaaaattctttctatgatttactgaatgcgatgtagttttcggcttttttttttttaccacatataattagaactagaaaagattcgtatggaggaaacccaaagaaaagggcacattgaaacggtgaattattactttcacctgcacttagaaactttttgtgacgaaacacctgattttggtttttctgaacctagaaaaagaagttatgatttgatcttctcttcccaatgcaattcctctatgaatccctccttcagcaaaagtaattttggcgtgtcattgacaaattatttaataattgctatatgaattctgatgaagccagatgttttaaaacaaacttcaattattctaattgtctgattacttactattttaaatgtgcctgtattcttcagtcgaaaggacctttttttccctcaatgccatgtaaacttagaatacgtcccctggtgtgcattattccattttaccatgtttatcttatcaaaagggacctgtgttctaaacttgtacagtgaaaagtggactagtgtttaatgtaagtaacctgttttattgtagtgttattattaatgtgcctgttttcttattaaattctttttgtcactgcagatattg

SEQ ID NO: 109087 - DNA, 783 bp, Aquilegia coerulea
  Intron number 3 from transcript AcoGoldSmith_v1.000236m (l ocus AcoGoldSmith_v1.000236m.g) derived from phytozome v7. 0 (chr-ID scaffold_13; pos 5647711 to 5648493 reverse stra nd)
ccatttcagagaaggtatggaactcatgtgagctcttaaatattctacctatagtttcgcattttagtgaataataataataaaatatacagtaaataattttattaaaaaaaaaactaattacctaaggttgtaaaataacattctacaccatcaaaaaaaaaaaattctaatcaaaataagtagctaaaatatgatctgacagggaaaaaaaaggaagtttaaaggattgagttgagggcctttcaaaggctttgagggcccggcccgtatttcaagcctgctaactgtgttttttaatatgggccgaatcgggctggacttaggcctttaaaaaggcctcctgtttgaccgtcttcttcctctactcactccaccagttcactgttcatcacacagttcacagttcacactaaccttctctctctctctcaatgggtgaagaagaagaacaggaagagaaagagaaagaaaagaatgaagggtagacaattaatgatgaaagaagtgaatgtgtttggtttatgcttactaactgtttgacaaaagacctcaaagaaatctatttgactatttccatggaaaaagacccctttcattggattgtgaaatcatctccatggacaattgattccagtaacatgttcttgatcgaaaaaggtatgataaaatgtcacttagaagaaaagaaaaaaacacttagcatgactgtgatcctaatgttattgttttttatggaatattgcaggttgggaatttcttgcattatctaagtcgtttcat

SEQ ID NO: 109088 - DNA, 457 bp, Aquilegia coerulea
  Intron number 1 from transcript AcoGoldSmith_v1.001216m (l ocus AcoGoldSmith_v1.001216m.g) derived from phytozome v7. 0 (chr-ID scaffold_2; pos 6822993 to 6823449)
tgtagtgcaaaattcagatttcgcttattgtattggtaagaaataataaataaaataataataaaaaaaaaacacagagttcagagaactctgtttttttctatgataatcatcatcatcatcagttacaaaaaaattcttgaatgggtacagttgctaacgtatgctgtatgtatttttatgtaatatcgaattattgattctgattgtttcttttcatttgagtttaaacaaaagttcttggcatttagctcaatttggctaacatgcgcctttgacctctaggggtcggtgggagaaaacaaaatccttttattgtcttcttaattgctaaaagttttataaaaaaaaaaaaaaaaaaaattatcaaatcaaactatgataatcatttgtgcatatctctagctaagaaagttggttttcatgttttttatttttatttttaatatttacaggg

SEQ ID NO: 109089 - DNA, 784 bp, Aquilegia coerulea
  Intron number 1 from transcript AcoGoldSmith_v1.002612m (l ocus AcoGoldSmith_v1.002612m.g) derived from phytozome v7. 0 (chr-ID scaffold_3; pos 9971192 to 9971975)
gattgggtgctattgcttctaattgcaggtaaaacttctttgcttgaatgattagtattaagtgaaaacattattattatttttttttggaaattttggttaatgatgtttatattgtacttggtaatgactttttttctgtttctgtaagagatctaaagtgaggggttttttagtcattagagtagtaatgtggaaaatctagtcaggatcatgtggtttagattacaattacttcatacttttgttttgttgttggattgttatgatgtggggttggtttgaaatttcttggataagttcttcttcttggagtaatgtggctttaattttggattcagagattctgttttctttcactttactttgttattattataataagtagaatgccttttgattacatcaatgctttgacggttttcttgtgaaattatagtatgtatatcttgttttggtcacttaattatttggcaaaacattacttaaactggacatttttaaactgtttctacttttttttcatttgggattttatgtaattaataattttgtttcttgttattttgattcattaaaattctaacaagctaaagctattacacaatcattgatttttttgaaattccaataataaatcaattggtcttatggaaacaaagttgttcctgcatttagcttttgttttaagctcttggcattgtaggagatatgaatttatgttttaatttatcttaatcttcatatgctaatgcaggaaactgactacactggatttgcggga

SEQ ID NO: 109090 - DNA, 506 bp, Aquilegia coerulea
  Intron number 1 from transcript AcoGoldSmith_v1.001834m (l ocus AcoGoldSmith_v1.001834m.g) derived from phytozome v7. 0 (chr-ID scaffold_2; pos 423003 to 423508)
gctcgacttgttgctagcgatcctgtatgtttctttcttcttttttaatctttttcttaattttcggatctggttattgttttttaatttgatttcttccagtaatttttttggttctattgtattgtcttgtttgatcggatcaagttataagatcttttgggattttttttttttttatagagggtggtgcaattgtataatttgatctgaggctttaaattgtttatagttacagctgatttgtctgagaaacaatgattgtttgctgaaattactgtaatttgtcagcttgatttgtgcaaactatggcacttgattggttgtgattattgatgtaaagattagatagattatattgaccgagtttagtgccattattgcaaattgtttataatttgatggttcctagttttgtttatgtagatgtttcatgtataatgttgtattattatttttttggtgatttaggcttttcgcaaggattacagagtcacccttggtcg

SEQ ID NO: 109091 - DNA, 457 bp, Aquilegia coerulea
  Intron number 2 from transcript AcoGoldSmith_v1.003795m (l ocus AcoGoldSmith_v1.003025m.g) derived from phytozome v7. 0 (chr-ID scaffold_8; pos 3634092 to 3634548)
tgctcttgaacaacttaaagcttcttctgctgatagtaagtctttttctttcttctgggtgttttgcttttttttctttcccgtatgattgaagaattgatgtacatttgattagaaatgttcaattgttttagcgaattactctatctataaagtctcacacataagatttgaatttgatcaaacaaattgcaaaattcaagtttatatgaacaaatttgttaaaattgtcattttttgttgttaaattgcacttccaaccattagcacttccactgtaagttttaactttgtgaactgcccacattgcatttggtaagagtcaggtttcaatcacttgaaatgggatgttgttttttcgccgtagttgtgaaaatgtttttgcagggtactaatatttttgatgaatatgtctttgtcaggatatacgaaggaaaagagtagtattgtggttttg

SEQ ID NO: 109092 - DNA, 427 bp, Aquilegia coerulea
  Intron number 1 from transcript AcoGoldSmith_v1.002297m (l ocus AcoGoldSmith_v1.002297m.g) derived from phytozome v7. 0 (chr-ID scaffold_35; pos 1137713 to 1138139)
gatctttggtctcattttaataaacttcctacaaggtattctttactcttatctaaccctagatatttatcttttctttgctcttccattttttaatgtttatatgcttttgtcttatttgttcttttcatattttaaaataaatatgcttttgtaatcttaatctttctattcttttgttcaaattgtttctaaatcaaggtttgtttgtttgtttattgttcttattgttgtagcaataatattagtttgatttcggttacgaaaagtggcttgattgattgaaataggacttttaagtttgttttgattacaaagcattttatcaaaatttgttttgattttatgtttgtttgtttgtttgtttgtttaatcttcgtcaaccatctttcttacttgggatctgattttgtttattgttgtaggt

SEQ ID NO: 109093 - DNA, 801 bp, Aquilegia coerulea
  Intron number 2 from transcript AcoGoldSmith_v1.010738m (l ocus AcoGoldSmith_v1.010738m.g) derived from phytozome v7. 0 (chr-ID scaffold_2; pos 3801487 to 3802287)
ctcctccaaagtgattttgattgctcagggagagtgtatgtgttctttgtgattgagtggtagtctttcttcacataaatgtaattttttttgcttaatcaattgcttaattaattttttcctgcataattgggtatgatggcgtcattctatacgtataaactaacatcacaaataaattcaatggctatcaccttcccaaaagtcaacatattagtcaaaattaagttaacaaatcaaacatttcactatttcagcgtgaatcctatatatatgtccaccatgctcatctcattcacttgatctccatttcagttccaaccatcaaaaccagatattcatctgtgattctcttcatctgtgtgtaattttacgtgtcatggcagtaaatgatgtgaaagtattgggttcatggtcaagtccctatgtgattcgaacgcgaatagctcttaatctcaaacaagttgattaccagtttcttcaagaaacttttggagctggtaaaagtgaacttttgctgaaaagcaatccagtttataagaaaatcccagttttgattcataatgataaacctgtttgtgagtctcttatcatcgttcaatatgttgacgaggtttttaatggtccttctatttctatacttccttctgatccctatgatcgtgctcttgctcgcttctgggctgcctatgtagatgataaggtaataatgttttcatactgaatattttccttatatgattcgtgatcttaaaatctatttttattgttgtttggttgcatttgcagtggtttgcctca

SEQ ID NO: 109094 - DNA, 936 bp, Aquilegia coerulea
  Intron number 3 from transcript AcoGoldSmith_v1.009834m (l ocus AcoGoldSmith_v1.009823m.g) derived from phytozome v7. 0 (chr-ID scaffold_35; pos 2409120 to 2410055)
tacgtttcagggacagacacgctggccatatacaggtatctcaatacatatattcttttttatttcaagagccaagtagttagattttattaacaaaccttaactacatagagtcagaatgacatgacatcctatggaatggagtcagacatacaggggaccaggggaggagtgcattgctgtggtagctaacacccctactaggttggcattctaaaggctatcaattctttccaccattttccttaattcatccataactaattacattaaacttgccctcagctctatgtctatacagtaaatcaatctcacatcctcgtgtggtaagaaactaagaaataagtacatccctttggtcctatggtagctgccaagaagtctattgacctatttgcatctctgtatatatagtggattggtggagagtaacttctcataggtgaatcctttcccacatattatgtgctgtagatatactgccatggaagcttctcttattagttgctaatctctactaaatttttagaacctgaggtaattaccagtttattgaatcccaaatgaatgagtaacccttagtggtgccaatacaagctcgatacctcatacatctacccatatggtttgcttgtactctggttctttgagacagaatcttcagaataaattgataacttgctaattactcaatgtttttttatctgaatatatttcattggctgattaaggtttgaagtttaaaatctccataatgcatgaatgattgggttgtgatctcgaatgcttaaacagttaaactaaagtcttgtacatggttaaagtagaaatagataacttacggatttttactaatattggaagatccatttgcatcttgaatgtgagagaaccaaggtttaactcttcatgttgattctcattttgaatgccagg

SEQ ID NO: 109095 - DNA, 725 bp, Aquilegia coerulea
  Intron number 2 from transcript AcoGoldSmith_v1.018625m (l ocus AcoGoldSmith_v1.018625m.g) derived from phytozome v7. 0 (chr-ID scaffold_3; pos 10239464 to 10240188)
cagggtaagttcatgctccatgtatttattttactaaatcagctgatggaatatgtattagtattgtactatagaatatgaatgagtaagtgagagagtgaaatctgctcgaatatggagtatgttttaatgaataccttatcaatatgacaacactatgactatacacctcccacatgaaatcaaatcattaatatgatatgccctaaacgtttgttcccaagattttaaatgtatcttaatggaggcgaagttatttcacaaagtgatacatcacggaatgattgtagctagtttaaatgtttaatcatgctattcatacattcattcatgagtgcgtccgttagatttatccttttacataagtctgtcagcactttctgtactatagcagtattaaccagttctgctatattcatagcctcaacttgcttaaagtgaagatttgggatatgcatcttttcttgtttatgttattacttattagacgtatcaaatcatttttaactcccagtacactgttgcagggagtttcctgtcttaaatttctgaaatgaatatattgtcagtttttcaagaatgctatatcataaaagtgacaggacttaaacttcaattgtagaattaatttatattatggccacatttataactgttttccttctccaccctttatattttggatgccaggttccaggttaaaaagaagcaatttttccgcaact

SEQ ID NO: 109096 - DNA, 592 bp, Aquilegia coerulea
  Intron number 1 from transcript AcoGoldSmith_v1.010220m (l ocus AcoGoldSmith_v1.010220m.g) derived from phytozome v7. 0 (chr-ID scaffold_2; pos 7139445 to 7140036)
ttttatcgtcactctcattcatcactaacgaagtagatctcatcactcttctcatcttcatctctacatctgtttaattctttgtgtttctctacaaatcctcttgttttcattgatagattttgatattttatctttgaatgttatttttataaaactttgcaaatctgtttagatttcatgtttcaaaagtgttaaaataaattattttagtgaaagtaaatcgttttaattgttagattgtaacacatcggacaaagaaacagcagcttcgtttgaattataagcttattgcatttgtagctagtttgaaatctgtgtaaatcgtttatagggattatggaataataagttcataagctcaaatccagcaatataagtttttttttttctcaaatgagtctaataaaaatgaattttttttttcatttctgatgttgtagacatgtctgagatttaagtattattagtagtattgttgtaatttacttatttttccggcacaatactagttgggacttggtatgtctaatcgtagtttgttttttccctgacaggcccccaaaaaaggtgcaaaggcagtagcaactaa

SEQ ID NO: 109097 - DNA, 757 bp, Aquilegia coerulea
  Intron number 1 from transcript AcoGoldSmith_v1.025406m (l ocus AcoGoldSmith_v1.025406m.g) derived from phytozome v7. 0 (chr-ID scaffold_31; pos 1849085 to 1849841)
tgctctgagtgggaggagatttcagttccttcaaggtagattgttaattgattactttcttatccattctgttacatcatttaactagcatggatgcaaacagatgagtgtcgtgtacgacataacatgtacatggggatacattaaatttataaaacttaggacatggtaatagaacaatatgcaaaatgttaatatgatatttgtaaaatgttcaatatataaaatgtaattgttatatctatccatataaagttgttcaacatggacaacctcgtcattggagtggttgtgcttttcaaaaaaattggtgtctaaaaggtataaagttaactatcatttatattattggtcaatacaaggccccgcgctatggggaatttatgaaatttgcatttcagatgtctgcggcacttaactggtgtatacagttttttgttataaaattacgtatttatgtttgatagaacttgaacaatctcaaaaattcgtttccaatgacactgagtttattgaaacccaagaggaattataattttgcgtattgtataacctgcattatttctaatatgtttgtgcactttattgatgaaaacgagatatgtataaaaagttttgaaaattcatacttcattatagccctctgcatattgccctaaactatgtgttttcttttaactgccattattagcttactgacataaaagtttacctcctctcagtgttagggcgatagttgctttaaatcttcatcatt

SEQ ID NO: 109098 - DNA, 740 bp, Aquilegia coerulea
  Intron number 2 from transcript AcoGoldSmith_v1.002743m (l ocus AcoGoldSmith_v1.002197m.g) derived from phytozome v7. 0 (chr-ID scaffold_2; pos 9048559 to 9049298 reverse stran d)
ctattggctacgatctttctcctgaggtaatgttttttttttttttttttttttttttttaagtgtgtgatttcgtattatttatttgcttagattagtgagaaggtaatgaacagttattggtttgcaaattattcagattaaggaaaaaaagtagtacaaattgggtaaaatatgttgtaaagcagaggttaaaatagagatcttttaatgtcctgatgcttattttgatggagaaaccaagccattgtagcttaacaatgatgacagatctcattttcttgcatgaatgcgtaatggctaatgacctggaaatgtagcaaaatatatcaatttagtggtcatatcggcgaagtttggctatgttgtgggttaacgcgttattttagctctatgtgttgtaggatgcattttgatgtatgtgactccatcaataattatctactctactctactcaactcttggttgttattcttaaatattcttgtctaaactaaattacaattttggtatttttgtagtccatttcaaatgtttcttgtagttttattaatatttgttcctcgtgtgctctgcactttctattccattcttatatttaaggtgcatgttaggattgccgggtcattagagtcaaaattatatattgcttgttgtatgtttaatcttgatctttaggtaggacggtctgcatgttttaatacgcttgatttgttttcagtgttcatttgcacgtcat

SEQ ID NO: 109099 - DNA, 742 bp, Aquilegia coerulea
  Intron number 3 from transcript AcoGoldSmith_v1.009379m (l ocus AcoGoldSmith_v1.009379m.g) derived from phytozome v7. 0 (chr-ID scaffold_22; pos 958270 to 959011 reverse strand )
ttgtcagtttcagtggaatcaatacagtagacaaggtgagttattatgatatttgtttttggatgtcgattgaatttatgattattgttgtcttcatttttctttatatttgtatacatgaagatttgatttgaatcaaatacttgtcgtgcttcttaatatgtccacaggttggtgcatattttaagttgattgtgtatttatattttgggctgcatttggtttcaacaagttccagaaaccagtgacggaatgcttttaagtagttaagaagacttacgataaagtatggggtgacaagggcaaactaaacctccactgaggcagtgaggcgtacaactttttgccctttacgcatatctaattgatatgttgagggaggtgaagtgcttttaaccactatatttacatcccataaattttctctcagtaccattttttgatttacaatgttatggccttaagggatacgaagtattgtggttaatcgctcttcagctcttctcaaaattcgtttgacagagaatctcaacctgtagaaaaattgcttatacccttagaaattatcatataagagaatccaaaagttgactgaatattctgtataatgtgtcaaagctatcgggtcagttcggtagtaatgtaccactgttccaatctttaagttaactactttagcttaacttctttgtctgtcatgttcccaggctaaagaacttgtcgggtctactttactggtacg

SEQ ID NO: 109100 - DNA, 1000 bp, Aquilegia coerulea
  Intron number 1 from transcript AcoGoldSmith_v1.027880m (l ocus AcoGoldSmith_v1.027880m.g) derived from phytozome v7. 0 (chr-ID scaffold_2; pos 2306799 to 2307798)
ctcatcatcattcaaaggtactgtgttcaatatgattttgtgctttcttttattcaaattgattatcttaagatatactactatatgtttattaaaagagatttgttttgattaatgttcattttattaaaaatggagttgtttgttttaatttgagttcatttttttgctttgtgctttgttctcatttggtattaattaaaaaaaaaaggtctcaatacatatacaatctagtttatcccagagcttaaaatagtatgaactgttaaggttttagattggtagcgctttgtcaattgcagaaacaattcaaccctgtacataattctgtgaattttgatgtgcaatcatctcgacctcgtgtttgtgtgatatgcccaagctttgtcaatcagtgttcctattttatattaatttaaagctttgaggttaatgtccttgaaatggcgtttatatttaacaccaatatcctggtttgttctgtatctcatgcttaaggctttacctggttattgttttagagacagagatatccagtcgtttcaaccttctacctgttttttctaacttcatttgatattgaatcaatcgaattgacatctaaattctaatacctggccgagtggttcaaaggtatagcatttgaactgctatctaggcttttgtgtaccgagggttcaattccatcttttcagtaccttcatctaatcaaacattaatgactgcaatgtatcaaattaataagaacaataaacaaggctaaatactcttaggtgactgataatgaaggagtacagcgagggaagcatttatgttcaatgccaattcttcactggaacagtgtttaaagtgggagtgtgtgacaattcttaagatcctactcatgcaaagctagacaaatggaaagaacacttccccacatagaagatttttttttttaattggaatcatgagaaaaactagagtattctttgttagtgatgacatcttaatttccagg

SEQ ID NO: 109101 - DNA, 491 bp, Aquilegia coerulea
  Intron number 1 from transcript AcoGoldSmith_v1.021052m (l ocus AcoGoldSmith_v1.021052m.g) derived from phytozome v7. 0 (chr-ID scaffold_68; pos 189057 to 189547 reverse strand )
ttcaagctgcccttgctggtatgtcttcctagtttcttaccttgttacttattcttcatatagttttgaacaatttaacagtgagcatcaattactacagcaacctgctttaaaagctaaatgttttttcccttgtaattaacaaaaatgatcatttgatatggagactctctcaaaagaacaatcagttccgggagttgaacagaaactcagaaaggttcttataagaagtttgttatatataagaaggttctttatatagcaagaccaagattaaagtattatataatgtcataatgaactatgcatgatccatcaatacttaatccacagttatagaaaagaatgcttcagtcttattgcgtcaagaatagttaaatatagttctgaaacaatatttaacatggaataataataaaagaaagtcaataaggtagaaacttatatgccctttttttttccccattatacagttttggacttgctacaaa

SEQ ID NO: 109102 - DNA, 928 bp, Aquilegia coerulea
  Intron number 3 from transcript AcoGoldSmith_v1.001218m (l ocus AcoGoldSmith_v1.001218m.g) derived from phytozome v7. 0 (chr-ID scaffold_22; pos 1791831 to 1792758)
gtctgtgtcgaaggaattgttactcgatgtatggtttgtttctttatttcttcatgcctaccttgcttattactacactggtcattagtcattttattttataagcgttaagtaagttaacattgacagcattttatatgctaatggatatcttaattcactggaaagttttacttgttattggagagctgtgctatggaatgtgtggtgagatagaactacactttagtaaaatacaacactaaggaaaaatcttcaactccttttcagtcagttcaaactagttcttaaatttacagtggccatctacttttccctttatttcccttttgtgtacatacttcttgtaaagttcagttcaattggaggaaaaagaagaagaaaaaactgaggatgcttgtgagagaattgattatataggctaatacagccacattcagctagcacaagtttcgaaagacatatagtaattattggttgatatatgcctgtatggcttgaagaaaataatttgctaaaataaagctatatgatttttgttttacaaaaataaattttagattggtaaattgaatatctgctgtgttaatttgaatctaggatgaagcccaattaggaatcccaaggaaggttcttgactctttttggataatttctttatgtttagtaagatgtcttacaagcttacgtaccttttgcaagcaatagtcacataacaaaatactgcactttcgggcatccctatttatattttagttgaaatatgcatgggagggtaggggtttgaaaatttgaattactgattgaatgtctgttcattttgcttgatgcgccctccactcataaaaactacacaatctgatagtgtataaccccgcttctacctattgcaggttctcttgtaaggcctaaagttgtcaaaagtgtt

SEQ ID NO: 109103 - DNA, 742 bp, Aquilegia coerulea
  Intron number 2 from transcript AcoGoldSmith_v1.004917m (l ocus AcoGoldSmith_v1.004917m.g) derived from phytozome v7. 0 (chr-ID scaffold_3; pos 3722310 to 3723051)
tactcttattcaaggggctgctgctaaaggagcaggtattttttttttcttcttattgttaatttgttatgattttgatttacttgtgtttttgtttgtgaattactgtatgttcatcattagtgtataatttaattatgccaatgtcattctttttgtgtgtcaccataattgcctaaattcagacattttcctgattagattttggctttctttgtccttcccatcattttgttgatttattattgttttgtgattatgccccctaccccttcccttttttcccctcagctagtctcatagttttgctgcttgttggttgtattgcctacattttaagtattctctgcctagtatactgcagcgaattttattttattctagtgggaggagaggatctttttatgtttttcttattcaggggaatcagtatacagtatattgttgtattcttcaatctagattgctatttattatttatatgatcttaaatcggttgaatttacctgccatgaactcaatgtttatcttattcagtattgtggggttgaaatatatggtgtattaggttgttaaacgagtgtggtatctgtgatttaaatattcagcattccttttcttgtgaagaataagcacatatcatatattcatatgcagtatgtaactatgtatcatgcattttttgtgccttgtcgtccttaacttttcttataatcatctggtgcttctacagtttgtcttg

SEQ ID NO: 109104 - DNA, 580 bp, Aquilegia coerulea
  Intron number 1 from transcript AcoGoldSmith_v1.000310m (l ocus AcoGoldSmith_v1.000310m.g) derived from phytozome v7. 0 (chr-ID scaffold_34; pos 2338846 to 2339425 reverse stra nd)
gcttgatccatctattaaaaaggttagtattcaattcatatttatcggttgttataattttttagcattttaatttttagggttttgtggttttagttgaaatttgaaggtaaatggaggtttagttccttagtatagttgatttatcaaatgagttattcatatagtttattcaaatgatttatataattttgaatttgagttttgattggattaattttacaacttgtatatagaagatataggttgtatcgacttaggtttcggcatttcactcatattaaatttataaaaaaaatgtggtaagtatagtcttttttctttgttcggggtttgtttactataattgttttcatcactagaatccttgtgcattggcttagtatcttgagttatttcagtttaaaaagagtgtaaacgggttccatctttttgcttgttgtatttgtatcttatctttgatgaatgtttgatttttttgtttagtttattttctttctggttaaattttgtatgttagaatgtttacttacaaattttcctttttggattgtttagactgagtggaccagagaagaag

SEQ ID NO: 109105 - DNA, 629 bp, Aquilegia coerulea
  Intron number 1 from transcript AcoGoldSmith_v1.014195m (l ocus AcoGoldSmith_v1.014195m.g) derived from phytozome v7. 0 (chr-ID scaffold_68; pos 1003406 to 1004034 reverse stra nd)
ttgaagtaagtacacataagcttagcttccttctacagtgagtccactgtccaccttcctctgagttgcgaaggagcattcccactgttgataatgcactaccttcaatcagaaactaccacatgtatatttatagtgcattgtataagtgaaacttccaatgatttctgttgttttgtaagcatcaacttacgatatacttcagtctgtatcactatcatgccatcatcaaatttttatatgtattggtattttgattgcaagcagctgatttagatatactcttttcctttatatttcttttacaaagggaggacttcccaatatgttcccatccatgttcgttatttccaaccaaaaactaagtttatattattagattccagtgccgtctatatgttaaacttaacctttttataaatgaaggaattaagttcatgcaagtggccggtgtgagatatatcatctatacatcttcaaattttcaagtaaccttttcactttgtgaataattagtagtatgtctttctctttttcttggggatggatttccattgtgattgtactactttcttgggttttacatgcactaaggaagaaaagaaacaacaaacgtttaatcaatttac

SEQ ID NO: 109106 - DNA, 783 bp, Aquilegia coerulea
  Intron number 4 from transcript AcoGoldSmith_v1.005809m (l ocus AcoGoldSmith_v1.005289m.g) derived from phytozome v7. 0 (chr-ID scaffold_35; pos 244652 to 245434 reverse strand )
ctagcgaaattgctatacaagtaagtttcttgctgtggaatgtaacgtagatgtttgcgagaacacgttatcatgctttcttgataattattttatacctgtggttaccttatcatgcttttatgaagttgctacatgttgaaaaagagttgtacaaatgtatagaaagtgctggtctagtacgggaattagagaaatgttaaattatatagagtaatttgacagaatcaaccaagccatttcttattgagcaaagggatacaatgcactcattgatgtctgtgtaaagtttaaactgctaaaactatgtggatccactcctaactataccaggtggatcccatatttctaacatctcattagtttggtattgatcaatactccattggtgtgagtcttatataattgaacgaaagtaagtcagaactcatccacaatagtcaatagtaggggcatttattctttccttagtatacctcaaatctatctcaggattgtttgtgtaaaaatatgggatatttgtattttctcccttatgaacttgttgacatgtatcttcaagacttcaactatgaacttgttttttctcccttatgaacttgttttttcacattttcttcttgtatttgtaagtttgataggtttagtcatagtttatctagaaccatctttttaaacgatcacttgataaatgtgagtgtaactccatgtaataggtaaaatctaagatattgctgcattttcatttccattgtttgatttttgcaaatgttcaccaggcaa

SEQ ID NO: 109107 - DNA, 880 bp, Aquilegia coerulea
  Intron number 1 from transcript AcoGoldSmith_v1.023859m (l ocus AcoGoldSmith_v1.023859m.g) derived from phytozome v7. 0 (chr-ID scaffold_3; pos 1045959 to 1046838)
actttcaggtattctccttgctcccttttttgaagttgctgtgtactgtatatgcatgtttttttgcttctattcatggaatagcatccttgtttcactttcatatattccttcattgcatggatatatctgcgttgatgtgtttactcaatcaatctattcaacaaagaatatatggtcaggtctgtactttcttactgtaagacgtatgttatatattctgccttcataaaataggagtaggttgatatacttaataagtaactgcttatactgatttgtggaggttgttattaggggtgtcgggttggtgccgggtttaaacaggtcgaggtgtttttggactaaacccgaacctgatctgttaacctgtataacattttttccctaaacccaaacctgacctgcttagtaaacaggtcgggttcaggtcaacctgtttagacctgtttactgaacaggtcaggtccaaacccgttaaacccattagacccgcaacccgttcaacctgttatacctatatgatttcaaaatttcatcagtaacctgccttggttataaagaaaataaaaatactagtaacttgccttgcttttaattttaaacttgccttgctcgagttggattacataacttgccagccctacttgttatattcaccatctggacgtttgtcagatagatcatgggataggtcccatccaacttttgacttggtggttaattcaaccttgtcttgtcatgcataacattactgaagaaaaagtatgtatctgtagtttcagcttatacagattcaaatatttaagaaaatgctttgataattacgtcttaattagtatggttacattgttactgcaggaaatagttgacgacgagg

SEQ ID NO: 109108 - DNA, 760 bp, Aquilegia coerulea
  Intron number 1 from transcript AcoGoldSmith_v1.003669m (l ocus AcoGoldSmith_v1.003669m.g) derived from phytozome v7. 0 (chr-ID scaffold_13; pos 178326 to 179085)
cgatctctccatacaggttagacacactctctctctctatctctccaatatctgttcaaatctcagctgttttaccagagtatgtttatttagatcttgaagaaatttttttagcttttctccaaaactgtattttagtaagaaattgttcttatttagatgttaattcgagtagctgcatcaattataatctccatgtggcaatgtgatttcagacactagcccagatctgatattgaatggtacatacacattgcgttacttcattccacaaaatacaattttctacctcttatgcccttatcccactcaaacaatttactgtacctagaccatggtgacaaataaataaactttgtatcgtactagttattgcccattactttttttttttttttccaacacaacaaaatatgtgcataaaagattcacctgaatgtttattcaaaaaagaattgtcactatatttgtaaacgagttttgaattcttgatgacattatagcttgtatatacaatgttagaattgtatgggaggcttacagacaacagagtgtaatatactaattgtaagtattagatgtaaccttgggtttgtggtgtattcatcttgatcgtacctccttatatattgtgcaaaaaagttcagtcattcttcatcgatttgagcatacgttcttttattctaaagacaattatttctaaatgaaaacaagcttttttcacatgtaatctttgttttttaattttgtttcagtcaag

SEQ ID NO: 109109 - DNA, 524 bp, Aquilegia coerulea
  Intron number 1 from transcript AcoGoldSmith_v1.012308m (l ocus AcoGoldSmith_v1.012308m.g) derived from phytozome v7. 0 (chr-ID scaffold_58; pos 766373 to 766896)
tccctctatacatagtttgacacaaatcttgccaggtatttgttagagctgtgatgtccatatatttgacaccatcggagattttgaaaccttgggactacaattcaaatggggatgttaaaattgaaatttttggcaaagtttgttgatagtttagatagttcagcatatacaataagctaaaaagctctatatcgtaataaaaacctggagggacttacacagggtgactttgacagatatacaagactagatataaatagttattatgactaaaaaatataaaatttatcagaaaattatttaaaaatgccaaaaataagtaatcagaggctttaaataattctactcttcaactgacaaaggcagactcatgggactttgccaatcattatgaatcaacaaaaacacaagaaaaaaaccccttaaaagaccaaaaaaatgaaactaataatcatataaaaaaaattcaaattattataaacaaagttctaaaactagggttccaaaaggaacaggtacaa

SEQ ID NO: 109110 - DNA, 662 bp, Aquilegia coerulea
  Intron number 1 from transcript AcoGoldSmith_v1.008908m (l ocus AcoGoldSmith_v1.008908m.g) derived from phytozome v7. 0 (chr-ID scaffold_3; pos 7159705 to 7160366 reverse stran d)
agtcttcctcttgaggtataataatttcttacctaaaaaccccaatttcttttctagggttcttaaattttgattgaatttctaatttgattgtttgtgtttttaatttgatacaattagggttcatgtgattgaaagaggaataggttcagtgctgatctgtatgaaaattgaaaaattattcttgaattttatataattattattttttgagtggaaactttggggttttatgtcaatctagctgtttgtaagggactaatgcatgaacataaaatcttcattgttgtgttgtgttgcttttatttgtcaaagaaaagcagttcattatgcaatgtttaatcctgttatcaattgagactccatggagatttgaattgaatgcatgtggattgtatattaatttatatgccgaagttcttttgttgagctagttattagggagtaagagtgagtacttctggccaacttcttggtcagattgaacatattgttcattgtgatacttgttgtttcaatctccttttttgagctttatgtttgtgtctgtatgtaatttcatttgcagctataaattcactttactttttataaattgtatatggtatattatgaaataatgaggttatttttatttgctttggtcaggaaaatatatttga

SEQ ID NO: 109111 - DNA, 521 bp, Aquilegia coerulea
  Intron number 3 from transcript AcoGoldSmith_v1.004073m (l ocus AcoGoldSmith_v1.004073m.g) derived from phytozome v7. 0 (chr-ID scaffold_2; pos 869275 to 869795)
aaggttactgttgaaagtgctgaagctacactcaagtaagttcactcttagactcagtgtgtgtgtaatttgagattttctcaaggctgtgttttggttcacagaaatgaaatttcacttataattaaaggagaaagaaaggttgtttccatgttaataggggtgaatgtagtaatctagtaatacaaacttagctcattcatttgttttgttgtttgccaaatggattcatgattcaatttgttattcttcttcatcatgcaaaatacacacagtatctacttggcctgtaacatttgaattcctacaattatatgataaatgatcaaaaggtttatcttttaatagcgagaaatgaaaaaataagcgctaatatttatgcaagtttagtgatttttgcttctattatgtgtgacaatcattctttgtatctacaatatatcaccagggttttgctacaatttagaccaattatttttgttttattttcttttctcttacagatacaacgttgctgtcaa

SEQ ID NO: 109112 - DNA, 903 bp, Aquilegia coerulea
  Intron number 1 from transcript AcoGoldSmith_v1.025238m (l ocus AcoGoldSmith_v1.025238m.g) derived from phytozome v7. 0 (chr-ID scaffold_13; pos 1291304 to 1292206)
cagttagcccttgacattactgatttatatataaggtttgtttaaaatttcgatatttttggtgttttgataatttggtaatttagggttttgtagctggtttgatgcttgttcttcaatttaattcccacttttattgtaaatcataaattatcaacataattactcattttaagattatttgataaaaaattagtttggtttgtatgtggtatcattaggtatttagactgtagtactaaaaatggacccccagaaaaccaagaaatttaaatcacattcaaatttttacaaaattttggatactgtcattcatcattctgatgtcacaaagttttgcgaaagtcctgcagtatgattccaaatgctacactaaggcacaatatgtatatcattgatacaatgcccatatctactatctaggataacctgaatgtgtgaaactgtgaatgaactaatgtgtttagagtctttgtccagtttctgcatatactcatggatccctaaattgctttgttgccaaccaactacccgttgtaacatgctttcatcaaagataaaaggaccgaaaaagaaaaacctaagaacagcgagtcaaacccttacgggggcttgatacgaagtatttcacttagtaatcctcattgcactggcactaattttggatattattaagttgttataaaccttagggaagtgaagtatcccatctgtaatttgattgttatttgcgaagaagaaatggtttcttgttttgaagttttggtcattaacaaaaggttccattgctttctcagttggaagctcactgtgagcaacatactattttagtttgcttggcagtgagtgtgttttattttgcatgcaggtatctaaaaagtggacctgggaatcttgaaaagg

SEQ ID NO: 109113 - DNA, 808 bp, Aquilegia coerulea
  Intron number 2 from transcript AcoGoldSmith_v1.013598m (l ocus AcoGoldSmith_v1.013598m.g) derived from phytozome v7. 0 (chr-ID scaffold_19; pos 924332 to 925139)
gccataagaatacaaattgcagaaatttgcctgctgtaagccttttctatctaatttctcttatttccctttttataaaattattagttatgcatagatgagttttatggtcataattagatatttagattagatattatgaatatatattttttacatttttatttttctttggtagtgtatattttttgtatacatctatattaaagaaaagaagaactgagcagtctagtatactctgctgcattgacatacatttaggcacagatgaattggatggagtacagggtatggaagtgtaccgggggggtgggggatgcttatattttggcgaaaaccaatgattaatccaaataatttttttttaccaaacgttgggggtagaagggcctgcacgccctaaaggtgcaaaccctcgactcccttgatcccttctctatctctctctctcttttttgttgttgttgttgttgattgaataagacttttattaatctcaaagcataaccctgaccagcaggtgttaaccaaccaagtcagggctgtttcttttttgggaaaaaaataaattttaagctatgctaaggaaaagaagatatcaacagtattttttagaaagaacatatcagtaatttagtataaggattactaccaccattggtaagtagagtgcagatcaaaaaaaaaaaagatatcatccaaatactgtctacgttcattttcatttctatttcatgccttggatttacatatagtttgtttggtttcgattttcgacaacagaacttaagatttgacttcgtcacgg

SEQ ID NO: 109114 - DNA, 420 bp, Aquilegia coerulea
  Intron number 1 from transcript AcoGoldSmith_v1.004750m (l ocus AcoGoldSmith_v1.004750m.g) derived from phytozome v7. 0 (chr-ID scaffold_3; pos 7987223 to 7987642 reverse stran d)
cagcagaagtttctacaagtgtaattactcttttcaagttttaattggcttttcaacttttcattattaccaatgtttttgcttattttaggagtagaaagggagtgactattgagggtttgattttttttttctctggaaaagaactgactattgaattctgattttgggtattaattggatgaaattgaggataatggagataacccaattcatatcttgctcttttgagttgaataagctaatgcccttcactttataatttggtttacatgttggttgggaaggaagagaggatttctttttgacttcaggtttttttttttttttttatcaatctcaatgttgattactttccatgtaataatttgttttatctttgttggttttgtttctgtctattgttgcccaggactcaat

SEQ ID NO: 109115 - DNA, 873 bp, Aquilegia coerulea
  Intron number 1 from transcript AcoGoldSmith_v1.007758m (l ocus AcoGoldSmith_v1.004983m.g) derived from phytozome v7. 0 (chr-ID scaffold_58; pos 291430 to 292302)
tccagatttaaccaaaccctcagaaacgttcaagggtatgtgtatgtgtatgtctgtctttattttttctctctctctctctttctctctctctctctctctctctctttctctctctctctctctctctctctttctcttagattgattgatctaatttttttttttacttctctcgcaatctcgcatacttatatatactcagcatatgacaatcgcagtagtcaatgaaactcattttgaattcgagattatacgatctacctgagaaaatttgcatacgcatgcccgatctcttgattctctgagaattctctttttatcttgaattccattaatggggttttctccaactatgaattgaatctttttttttcttggaattttcagatttataggaatttattcacatctgatttttattactgtagatttagtttcttagcaaacttgaacttcaatgtacatttgtatagacaaataaaacttgaactgtcaaattaccacaaaatgtaaatttttttttttttatattcatttcggatttcaatgtattaagtttgctttggttctttttattttctagattgctacaaggtcgcagctttcctggtaaagttttgctaactcgtagatcagagatatcgaatgactctaacttatctagacacactcctgatattgaaagaagttactctgaaaatgatattgagccaagtgaactcatcaatagatcttctgaggtattatagaaaaatctgtctgagatacctatgccatttctactttacatagaatttttgtaagtgttccataatagaagataccctttgtgtagggagaaactcaatacacaagcaacaacgacactac

SEQ ID NO: 109116 - DNA, 771 bp, Aquilegia coerulea
  Intron number 2 from transcript AcoGoldSmith_v1.011793m (l ocus AcoGoldSmith_v1.011793m.g) derived from phytozome v7. 0 (chr-ID scaffold_34; pos 2084270 to 2085040)
cacttgtaaaatctgatattgggggaaatataacggtgagatactctgtatttacttccccagttccctatattttcttcctgtggttggtatttacttctttagttctctatattctataatgacgtgaatataaaagttgaaatgattttgttcttcgcactaaaccattgacatagctgagtatgtccaaaataacagttgattaaggaattgggctcccgaactcacacacacacacacacaaaataaataaataaaattagaccaatagctgctgtgattattgctacaaagagtttactacttgtttggtctaaggtgcatgaggagactgtgaaatataattttaggccttttgttttcagaagagaggttatcatataatgttcatgtttgctttagtctatagttatttttatttgagtcgattgttgcatcttttgttttgtactccagcttgtctgcttttcgtatttaatcagttaattaattcaatctatctttacagattaccaaaaaaagtaaaaaaaaataaatgccatctgtagaagcttccatatgtattgtgtgcgtcctccttaaataagtacccagggtttgataccgctaaatttaagctattcattttggaggcgtccttgcatacaattttaagataccttcaataagtcagtggtggcaatcatttgtttggcaagatttttgtttatttattcacgtctcaagttcttctatccaacattcccttgcagaggttggagtcaaagt

SEQ ID NO: 109117 - DNA, 389 bp, Aquilegia coerulea
  Intron number 1 from transcript AcoGoldSmith_v1.015867m (l ocus AcoGoldSmith_v1.015867m.g) derived from phytozome v7. 0 (chr-ID scaffold_31; pos 1731028 to 1731416)
tcaacttggtcatctggtaacatgatgcgtgaatcatttgtttatatattattattttgtcaattaaccaatccacaagatctgtggaacaagcgttgggagctattatccgacgatattttaagatatcaaagaaatacatagcaaccctactctagaactgagtgatgaacaaattaaaaatttatctttgatagaaatagaaaaaattatgaaccaaaacaatagaagtttaaaagaatttgaatctttgccatttcctgaattagataatgtaaaccaacttggaaataagtatgtaagagaagaaataacttacgatcattgtaaacttcattcagagtttcagacattatatgctggactaaatagccagcaaaaacacattt

SEQ ID NO: 109118 - DNA, 713 bp, Aquilegia coerulea
  Intron number 1 from transcript AcoGoldSmith_v1.001609m (l ocus AcoGoldSmith_v1.001609m.g) derived from phytozome v7. 0 (chr-ID scaffold_8; pos 1062839 to 1063551 reverse stran d)
cttccgatgtaagtttgattcaattaaattaatcaaataaatcaatgtttttttatttagtattataattagatttttttttcttgtaatttcttctaggatttcatgtttagtgtgatctgttttaattaatcttctctgtgccttcaattcttacattctgactttggttcaaatttgaatatattaacaccatttaaatgttttagttattctgttgtggtgtcaattcttatgatatttgggtaactatatgttttgtgctcattatgttgttaaatatatagatttttcagttcaaagtgaagctagattttaattttaatggaattaaacttttcctggtttgaaactttttgattgccaagggtttggatggacaaaatttaatttcaaatttgtaatcatgagcctttacgagctgttacgaagttgtaaattttgccaaggttggctgtgaagctgctagtcttatggatggatttttgttttgtttgatgcctcatagctgtcagtatgttacatgaaatcctaattatggtggaattacgttgaaattacgttgcattatgtactaattatggtggaatttttttttctgtggtttagcctgttattgttatatgatttgaaatgctttcttctcatataatttaaaacattttgttctgtttaaaggctttggacaaaattcgctttgaaagcttgacaga

SEQ ID NO: 109119 - DNA, 971 bp, Aquilegia coerulea
  Intron number 1 from transcript AcoGoldSmith_v1.008590m (l ocus AcoGoldSmith_v1.008590m.g) derived from phytozome v7. 0 (chr-ID scaffold_24; pos 2910736 to 2911706 reverse stra nd)
aatctatcagaaagagacatttgagtaagtttgaagcctttttttaccaaatttgagtctgagtttatatcatgagtcatgactgctggtgcaataagatctaatgtgacttgtattattaataatattaaattaatttagaaagagactcatctaaatctctctcttttcttcaaaagaatttactgtctctctctttcaattcccaacttaaaataacaaaatactctactgaaaatccccacctgatgaggtaggttaggtacttgtgtgaagaaaaaaactctgagatccacttttatcctacgtttcagagaaaactagatatgggttgtgtagtacagttgttataataaaaagggttatcagtatcatttaatttccacaaatatatataagtaaaagagagagagagagagagagagagagagagagagagatttggtggtgaagctagaacaagaagcagaaagaagcaaccttattagcatcttctgtaatcaagatgtcctgaaagagctgtctggaatatcttgttcaactggcttacataagcataacgtagtgggagagagtgagatttgtttttatgtttgttttgttttgttttgggaccctcttttgatcctcttctcttccctagaagaacaaaacaatactattaacaaacacacccttaacccaccttaacccttcaacccttttgccttgccttaacatccctttaacacacacacacacacacacccccacatcataggcttctccttccctccctcccaccttttcttgcctctttctctctttcttcacaggcacagcctgtcaagctagcttcattcattcaatcaatttttattttcttattaacttgttccttttgttgtttgttcaaggaaagtgatgagactagtttttttgtttgccttgttttagagattgctggatatctgagtttccacagaaactgt

SEQ ID NO: 109120 - DNA, 758 bp, Aquilegia coerulea
  Intron number 2 from transcript AcoGoldSmith_v1.008271m (l ocus AcoGoldSmith_v1.008271m.g) derived from phytozome v7. 0 (chr-ID scaffold_34; pos 786003 to 786760)
ttatcggcgaggtaagttccatgttaattgtttttctattaattaatgtttgatatttatttctgatagtttagttatgactgattgaaaccatattgtattagtagcttggattatttgtatatgactttggattaagtaaagaagaagaactgaatgagctatgatagacacattggcatttaaatcttagttcattacacaaaataaaaacgtagaaaatcgcagtagtatttttgtagactaggagataccaaaatttggtttacttacaagttacaatgttgaaccatatgcctttaacaaggttaggtgttaccattgctgagcatatgatattattttatgactatcaatttatacacaagcgagatcaattcattaagtgacccattgggtgtcgagaaggctctaacacacggatctatatatgtggatgtttgattgtttgacattttagaatttagttttacgtggttactgggtaggacaaggtgttaaaatagctgctctttgtttttcgttgaattattacctaaattttgtcatatgtttctttttagttaattggtgatttccaaaatctgtcactgttttagtttcctttctttcctttgtttatattatttcttttcaaagtagtaacgtaacatgggacttgatctggacaagcaacccagtcattctgtccttactaattctggattttttttttaattgcagacatacttgggaattcaaatatttaggttttattt

SEQ ID NO: 109121 - DNA, 485 bp, Aquilegia coerulea
  Intron number 1 from transcript AcoGoldSmith_v1.022066m (l ocus AcoGoldSmith_v1.022066m.g) derived from phytozome v7. 0 (chr-ID scaffold_13; pos 526673 to 527157)
atatagaactcgaaggcaagtatcagatcatattttatgtaacaatatgcacttttccacactctttcttctcttttatgaactgttattccacaaaccttatcgatcaattgaaatttgcaagataacatgtgaaaaataatctcttgaaagggaactcgcagaatttcagaaagaggttgtattcagcctactgtgataatttattggacaagcagtgaggaatccgaaggggtcgcccacacccccaaagttaattttattttttctatattctactaatgctagctattatgatatatgacgaaatataagcatttgcaacccccaaaaaattgtcatataggttacatatgcctcttgcacccccatactcaaaactgttttggatctgtccctgtggacaagtatatgatgttggcatttgaattcagattttcatcctaattatggagtcttggtttctttaatctaattgcaggagc

SEQ ID NO: 109122 - DNA, 738 bp, Aquilegia coerulea
  Intron number 2 from transcript AcoGoldSmith_v1.014793m (l ocus AcoGoldSmith_v1.014793m.g) derived from phytozome v7. 0 (chr-ID scaffold_13; pos 3578237 to 3578974)
agtcacgatttcagcttgttcctagctcttcctgggtacgttgtgtacttatctacgttaagactttagatggatttagtttcagttggctggattttaatgttgcccttggcaataagattgcaaacataacatattgaaatgcttctaacttcacagaagaagccaaacatctatttttcaacatccttcaaaagttaaccaacattagaacctttgcagtcagctttcaaccaatgccattcatgaaattaaaattggaagcaatcaaccaaaatttgtctgacacaagtttctgaataaccttgcttaaaaatatatatatatatcctgaaagcttatgctataaactatctactttttgagttctagagtccctgagcatactgggaatcgggatgactccttccatcatgagatggggttcattgttttcacactttctattccattttgctagacatggatgaaatctacttctgctctttcttatttttgtgtgaattagcatgcttggctttattttttgatgtataaaagcttattggaattttaaagcaaatatgttaatcggtacatgttcatattatatgatacattgatatgttcgtaagggagcttgttgatcaagttgaagtaatacaactaagctagtttttaaggagtgtctcaatatgattctgccttttgacatatttgtgagtagcaattgctcaagtgtttcttctatgaatgaag

SEQ ID NO: 109123 - DNA, 843 bp, Aquilegia coerulea
  Intron number 1 from transcript AcoGoldSmith_v1.001283m (l ocus AcoGoldSmith_v1.001283m.g) derived from phytozome v7. 0 (chr-ID scaffold_57; pos 1583916 to 1584758)
atttatctagctttgaattcaaaatagtccctaaggtaagcttttatgtaattttatactttggctgttcattaactcttcttgaaagttgaaagtgagtgtgcttgttgttgttgttgttgtttgggggtatttgaagtagtattttgtattttgggagatacccttttcgaaaaaaaatgcaaagtaggactgtaggtgtaggaataccctttatgattgaatttgatttgtaatgcaattcaatccataacatagcattattttatattttgggagatacccttttcgaaaaaaaggggaagtaggactgtatttttcattttgggagatacccttttcattttgatgtaattttataatttgggtaattttataatttgggtgttcatttgttcttcttgtaagtgagtgtgcttgatgttgttgttgttggggtctttgtagtggtatttcatattttgggatacgcttaatgattgaattgatttgtaatgcaataaaatccatagcatattgtaccattctcattttatactttgggtgtttaccagttcttcttgtaagtgagagtgtttgttgttgttggggtttttttgtagtggtatttcatattttgggagatacccttttcgaaaaaatgcaaaggaggactgtaggagtgtaggagtaggaatacccttaatgattgaatttgatttgtaatgcaattcaatccattacataagatgacattatttaccctttacaaaaaatgtgaagtaggattgtaggagtaggaatacctttcatgatttaatttgatgcaattcaatagcatattgaaccattcttgtttttaag

SEQ ID NO: 109124 - DNA, 544 bp, Aquilegia coerulea
  Intron number 1 from transcript AcoGoldSmith_v1.006632m (l ocus AcoGoldSmith_v1.003192m.g) derived from phytozome v7. 0 (chr-ID scaffold_8; pos 3451219 to 3451762 reverse stran d)
actttggttggtaagtgagttactcttaaaaatcattttgagttagtacacaattgctagataaaaattgcattgtgtttttcactttggtgtttatagctataatagtcaattttggttgggtgttggatgataatttactagatgtactaatttatatgtggggatacctatttggaaattatccttgcttgatgaattcaaaaagacaggctactttgttctgtctgtgggaagatatctaattcattgttttactaattaggagaaaaatcaattaaaaatccatgttcgtgtactggatttataatgaaattttgtcccagacttatatttaagtttatgattgtaataaattgaagagctccgtgctttacgtcactctggtatgacatagaagtggagttgtgttatgtttaggtcacacaggattacgtcaaatacatggcatcatatttttgatggtcgacattattaatacgtattattatgcttaaagcatatctaacgaggtcttcatctttttggacaggttacattacac

SEQ ID NO: 109125 - DNA, 567 bp, Aquilegia coerulea
  Intron number 1 from transcript AcoGoldSmith_v1.005631m (l ocus AcoGoldSmith_v1.005631m.g) derived from phytozome v7. 0 (chr-ID scaffold_2; pos 7626808 to 7627374)
ttatacaaaattttcaattctctttattgaatttggtatgttaaactttgtcttttttcttttagtttaatgttttcttgttcattcttctcttaattgattgtaatacatttttttttttttataataatgtttatatgatgagtaaataaactgttgtgttagctgaattgggattctcagattctatcttaatcatctcgaattctataaataaattgattttgtgaagtgggtatctcgattttttagttttaattactcacttttactgtaacttggggggatttgttgggtttcaggcaaaaaaaaaataaaaataaaaaatattataacatttctttggaattccagtttattgaattggcaattagtagtgaagataatttgggtttagcatatagtgtttcagtaatttgatagtgaccatggaaatgaaaaataagatgattttatcaagtgggtacattgaaatttgttaaaaatcgcaacttttgatttaatcttcctcttttgttgattgtaaccttggtttatttttttatttcagaagtaaaagacggataa

SEQ ID NO: 109126 - DNA, 650 bp, Aquilegia coerulea
  Intron number 1 from transcript AcoGoldSmith_v1.019460m (l ocus AcoGoldSmith_v1.019460m.g) derived from phytozome v7. 0 (chr-ID scaffold_2; pos 7959554 to 7960203 reverse stran d)
ttcaaactattgaaagaaagagaatacttgctcaggtatacttaatacttcttgtcttcatggccatagtgacccttcaacttctgggcttctggctgttatttatatatactttattcagtcatttttgcgcatttttttaaagggtgaattgtctgttaattttggggtttgagtgtatgagcatctctgccttacttggatttagattaatcttgagtttttttgttagtttgttctaattgtggtctttttttaacctttgtacatgttcaataccctggtttgtgctttgtgtgcctgttagattgctttcaggtaaaaagaaaaatacacacacagacacagtgcaacagattatatatatatttatcaccaatccagacaaatgtgtttaagcaattactaaaaaatcataagtgtgactttgagtctttcatataaagtaccaaattaagcagatgggtgagtttaataccgcaagttgctaactaggagaacatgatgagtttaaactttaaagagctgccaaagaactcgtgtactgtatatatgcaaagcctcatgagatgatagctctttaagttgttcttttgtatctgcttaagaagatgtttgtctttaatttgttttgctagagtgcttgtaat

SEQ ID NO: 109127 - DNA, 973 bp, Aquilegia coerulea
  Intron number 2 from transcript AcoGoldSmith_v1.011318m (l ocus AcoGoldSmith_v1.011318m.g) derived from phytozome v7. 0 (chr-ID scaffold_80; pos 483978 to 484950)
cttctttaaagctgtccaattccacaacacctcaggttttgattctattttttttttttctttttgctaaatatttcttatttttttgaatttagattgattatgagttgtgttactgtttggaaactggaatttcagttgattttattcctatctaggaattataactagttcagttagagattttgaaatttttaaatgtatatcaggggtgtggtaaaatttttggatgtcgccctactatgcttcccatcttatgaagatttttgaagagttgagactagttaacaattaacctttgtgcactgaaacacctaaatacctaatgcatacaaatgcaatgttgggtgttcaccaaaagcacctttgtgtactgaaacacctaaatacctatgcatacaaatacaaatttgtgattctggaagcttggaagctattgatcattcattttatttttttgtacataaatttggtcacaatatttctctaggattatatgcaaggtgggaagttcttttcaccataattacaatgtgtacaaagagttgagacagaagtacaaacagtaaacaccaaaagcacacatttggttttgagagtaaatgtgaatggagagtggatgcagagaggtttaaatggtagaaactcacaagtgtgtggcagagagaagacatgacctaaagaccttatgcaaaggaagttatgctcaatagagatttcggatggtagaattaaataaacatacacacacggattttgtattttgtaggattggtttgagagtcatacgagccatcttgttttcaatgtcagcatctttgttaatattactgcatttttcagtaattctccagtcaagagggaatataagagagaacaaatttcagtcgaccaacccttagacgataaacttgaagttcaaatgctactttgtgcaggtaagtggaaggccctccagtttgaagcatatatc

SEQ ID NO: 109128 - DNA, 450 bp, Aquilegia coerulea
  Intron number 1 from transcript AcoGoldSmith_v1.005633m (l ocus AcoGoldSmith_v1.005633m.g) derived from phytozome v7. 0 (chr-ID scaffold_26; pos 2339225 to 2339674)
gtgagattgggggttttggttgtgctagtggaaaggtataatttttgttatttttttcaggattttgttttaaagttttttttagggttttttttttttcttcttcttattttgaggatctttggttttttgaatcatgggtttttgttaattgctaaaaagggatttttttaggcattgttttggggtttgttgagggtttcaatttcaattgggaattcagtcttttgtaaaccaaggatgaggtcattagagatgctttatccttcccgcagtatgtttttggagcgtctgtgaattatattaatgatgattatgggctggatgtttaattaattgacttgaaagcaatgttgtttgttctcttttgctgatgcttgttctggttgtctgatgaaggtggtaatatttatatctttgtataggtacaaataattcaacagattaacc

SEQ ID NO: 109129 - DNA, 881 bp, Aquilegia coerulea
  Intron number 1 from transcript AcoGoldSmith_v1.006915m (l ocus AcoGoldSmith_v1.006915m.g) derived from phytozome v7. 0 (chr-ID scaffold_24; pos 3591288 to 3592168)
atcctcggaaggatcctgaatcgcgggtgtaagttttctactcaaacaattgctaaagcttaagtcaatcaaattattagtttgactcattcttttccaacctgttgtctattactccgcgggagtacttattgtttgtccaactgccgcaacttgaagcaaattaattgttttgaaagtaaccgttcaatgtggaaagcaagttaatcactgtcaatttaaatttggaatttcgtgtacccaacaatcgttttgtagctctaagaaggtagaagaattcttgatgaaacaattgtttaaattactctgacgaaaggaaactgtcagggttgatctgttggcacacatgcccatgcattcccaaaggcatttggattcggaatctagtgccatgtaggcatatacgttagggaatatggcttgagcgcaacagagacacctaaaggcagctttgtaattttgaagaaggtggtcttgtcgtataaagtcctcctttctttcagtggaaagcctttcttgatttaggagacacctttttgaccatttgcttgctagattttgggagattttgtatgaagagctttcagggactattaggctgtgggcacttgcttctaagttctgtatttttcttctaagttctgtattttttttttctcccaccttgaacctttaggttatctaaacctattttccttgtcattttgatatagtttacaactccacccatatatattaaaaacagaaacaagtaaagatgtcttgatatgtagtatagaatatagacttaatgcagaatttgttgaaacatgaatgcctgcttgatgtaatattgttttcctacagataccaaagaattgatttccgcgtaccacctccat

SEQ ID NO: 109130 - DNA, 523 bp, Aquilegia coerulea
  Intron number 1 from transcript AcoGoldSmith_v1.002514m (l ocus AcoGoldSmith_v1.002514m.g) derived from phytozome v7. 0 (chr-ID scaffold_16; pos 3016984 to 3017506 reverse stra nd)
atttcatcaaaactttaaagaacgattacacggtaatttttacatatatacaactatacagtactatctccatgcatattgacatgactaaaacttggtgcttactccttggggactaacacactgagctcatctttcggttttactttgaacattttaactttattttccatcaatcaaacacatccttctggccactggagctggcaagcctatctaccggtggtcagtcaaatcctttggtttgttatctagcaaccttcttgtgtgctaatcttgaaaacatgttatatccttcatagatctggtctgctttggcaacttcttagactgttaaaagagctataacagagcttctctgtttcattgcccaaatatttagttggcttcgctgaagtggtttgaattgaattagctattaaccaaagagaagagatgtcatcttgaactattatttactttttgtgaatcaacattaaaggaaaaacaataatatttgtttgcattatacagggagaagtgt

SEQ ID NO: 109131 - DNA, 933 bp, Aquilegia coerulea
  Intron number 1 from transcript AcoGoldSmith_v1.013210m (l ocus AcoGoldSmith_v1.013210m.g) derived from phytozome v7. 0 (chr-ID scaffold_55; pos 924047 to 924979)
gataggaccaggtgaagttgttttattctattgatctgtcagtattatattgcgtctatattgatctgtcaatattatttgtgtttgatgtggttaattttttttttttttgttatttattgtttgattttctcttaatcaataatgaattaggaaaaataaaaacaatatttgtttagaggatattttgcattatatatataaatttatatgtaatgtaaggaccttttttaatatgaatttatatgtaaggtcctggttcagtatgaattgttgattaattttgaatgcttcgtggttgaactccttgtgagggtactacaattgttcttgtgaaggcattcctccttgtggctgatattctccaggtcactgaggatgtactcctacagcatcactctaaggatgtactctaccactaccaaaatgtccctggggagatacatctccaggaattggtccatcacagcctccctattgttgttgaggtctccatccacctcttccaatttgtggtactccccctttctgtcgaagggttggaaattgctgctgcattaggggtcaatattgcttttgttatttatttaatattgtatagctttgaaaaatatctgaattggtattttaattttgttgttgttattttgtttgtatattttttttataaaataaatgattcaatgggtccaaacaggtctaaacatttaaaagtttagataatttgtttcatatcatgtagttcagatttagatatggtttatttatttggattgcatgtttggttagtaggtagacatattggaatgatgtagttcatttcatctgtaatttattttttatttatgaataaaatttctaaatttaattggtttcattatggaaaatgtctttgcagattattgactcgggatagatttagttttttgccag

SEQ ID NO: 109132 - DNA, 173 bp, Aquilegia coerulea
  Intron number 1 from transcript AcoGoldSmith_v1.009418m (l ocus AcoGoldSmith_v1.009418m.g) derived from phytozome v7. 0 (chr-ID scaffold_24; pos 3713217 to 3713389 reverse stra nd)
catttcttcttctctcttatctctctcaacatcaggtattgctttttcttcacagatcttatcttcaaacttaattatgatcttttaatcattcattcttttgaattttattaatgtgatttgatctttggttttttgttttgtttttttttacaggttcttaggttaagaac

SEQ ID NO: 109133 - DNA, 954 bp, Aquilegia coerulea
  Intron number 1 from transcript AcoGoldSmith_v1.003811m (l ocus AcoGoldSmith_v1.003811m.g) derived from phytozome v7. 0 (chr-ID scaffold_26; pos 352857 to 353810)
gacttgttgttggtgacaaaaataatcaggtaccctttacttttatttttagaattaaggtttgattttattttattttgttattcttgtgataattacttttttttattattattattattatatcaaagtagaatggaagagaaaatgatttggttgataaaatgtttaattaatttgatcagttgaaacctattgttatttcaagaagtgggtaaacagtatactaaacttagataatgagagaaaattaaaataaaataatggagtaatggaatgatgtcctctgcattatcagaagctgttttaagtatgcatgactatattgaaagattatataaaactaatttttacgagtattttcagtgtaagtggagaattgtgttattaacacggtcgacaacattgacttctaccaactgaacaaggctgattttggcatttctgaagttaaaagatttaagttcataacttgcactcataataagcaaaaagaaaagtcgagttcgaactacttctgttttatactcttttcaaatgcagttcagatgtgttaaaccaaggaccagagaatgtttgtttttatataaatcaaacctctaaggaaacacagcttaaaatttcaattatgctagatgacactttgaagtttttagtaaaagcagatagtatattgtatcattttatagtatgaaaaagattgttagtaactgtttggataaattcaagcaaatttcttccagtacgtcaatcagtcaatttatagacttcatagaagaagatgtcatcctagtatcctagttcttgatttcttgttatataaatttgaccatctacctagatgagataatgtaacagaactatggtttggtatatatagaacgctggcctaacactcagaaaggtggttaacatgtagagatcaggaaaagtccctggtgtgggcattgttca

SEQ ID NO: 109134 - DNA, 936 bp, Aquilegia coerulea
  Intron number 4 from transcript AcoGoldSmith_v1.000285m (l ocus AcoGoldSmith_v1.000285m.g) derived from phytozome v7. 0 (chr-ID scaffold_3; pos 6010774 to 6011709 reverse stran d)
gagtttaccgttttgacacttctccggtcacacaggtattattttttcgttgtgtacatgttatttatcaaatagatttactaggttgtatgtaagagcaatcccaatgggagggcagtttggtgccctccacgtaggtgccacataagcaaaaccaccttcaaaatcactctctatccatggtagtcaaaaccccctgcgaagtggtgccaatgggaaaatttggaaatgtcagtttaggaaaattaaatggcttataagacggaactttgagttccggtaattttactaaatataagacggaactctgtattctgtttttttttttaagtgtataagacggaacttcaagttccatatgagataaagtgtatgagacggaactgtgagttccgaaaaagtgttgaaccggaacactgtgttccgtcttatgcaattaacatggcattttagatggcactctattcccctctcaaatgccattggaacttctaaccacctttgaatatttgacccaccgttccattggggaaggaattttggctgagagggcatttcatactaccgcccttctcaaatgccctcccattgggattgctctaagagatatcttaattgacatgggttctgtttggtaggttttgattttgatgaattatattacgaaatagtatacatgcacttgattacagtgtcatttggtttactctgagttaatgttttgaaaaggatttaccctaaaaagagtgtacaactgcagaagggcaaggcagagtaactggcagtggatttttccattactctttctgatttagtcactgaactagaaagaatatcataagagtatcatgttgaagattatgttttgcaaagattgaaaagaggtttttatatgataataatatgtataaacttgtgacatttattgcagagacg

SEQ ID NO: 109135 - DNA, 699 bp, Aquilegia coerulea
  Intron number 1 from transcript AcoGoldSmith_v1.001724m (l ocus AcoGoldSmith_v1.001724m.g) derived from phytozome v7. 0 (chr-ID scaffold_32; pos 2143675 to 2144373 reverse stra nd)
gttctcaacttttccctaatttccttctcaataaggttagtttctttctaaaccccccaccccccctcttttttttttagttgattttgtattcttatatatttcaattcataattgtttgaattttattcaagaaatttttaagtaattattatttgagaataagaagaagaaaaggggagaagaaagaagagaattacaatgagaagatgaaaaaggattcattcattatctgaatgcaaatagataaaatgagaaatagaaaggttagcaaaagagatatacggatataccattttctatgtaaaggatgagttaaaaataaatcacaatctgtatccccatgcccaattctttttaagaagtcgtgttggtggacaccgacagacacacgtgtcagtgtaaatgttactttgaatataaaatctccccattttaaaatttctataacaaaacaaatagttctaacttcagcggcaccaactatctaaattaaatgaaatgttgcattaatccaactaaaacatcgcggtacttttccaatctatgatctttacccctcattagttgtcaaatttcagcctttgtagagtattaagctggtttatatttatacaccttaatgttgttactttatatggttgctttgtctcacattttgtagcttctgaagaagacctctgctcgtcaaattgcaaa

SEQ ID NO: 109136 - DNA, 605 bp, Aquilegia coerulea
  Intron number 1 from transcript AcoGoldSmith_v1.000842m (l ocus AcoGoldSmith_v1.000842m.g) derived from phytozome v7. 0 (chr-ID scaffold_7; pos 3959755 to 3960359 reverse stran d)
gttgtggcatttcaccaaacaatttcaaggtaattattaattacaaactgttttatgtgtatttgatgtggttatgtgttttattgctttgtctttgtttttgtcttactgatttgattggaattacattgtggagaatggaggtcaatagtttgagtgaagcagacaaggtggcttatggtagtgttgaccataagcaagtaagtataagatggttatattgtgaaaaagaaaccaagtatgggtgatggttatcattatgtatgaagaccaaaaacaagaaaatgaaaacatttggaagagatatggaggggtagaagtctcgatttttagtatatcacgggggatagaatgacctgatttggtattttgaagaagtagaagtgattataaaaagttatattctgtgttgtaaaacattacatgcatttggatatgatattctgcttgtgatcttatacttgaaggagctctattaattttttatacaaagtggtagagatttcttgtttcattcaaattgcttgagttttctcgaggttttttgttctaattactaatttgttgcaggttcttgcactgaagcatcacacttctaaaatagc

SEQ ID NO: 109137 - DNA, 746 bp, Aquilegia coerulea
  Intron number 3 from transcript AcoGoldSmith_v1.007360m (l ocus AcoGoldSmith_v1.007360m.g) derived from phytozome v7. 0 (chr-ID scaffold_34; pos 359230 to 359975 reverse strand )
acacacttcccaatcaaacgtagtaaggcctttttattttctttgctttgttaaatattttacaaaattcaatagccgtttaagtattagtgtcagtgctattgttttcttatctgctaatatctgtcaacctatgccctaccattttcatgactggcgtgcatgaagttaaacaatgacttagtagctgcccctatttgagtccaaatttacccatttcctacctgattttgtcaccatctataagaccttgctagtttttcagataggctctttatctaaatattttgttgttgtatatcttcaacagcaagctcaattattttgttgttgttgtatgatgatcaaaagaaaacttacatatggctcgtagtgaaaataaatataacctaacctctctacacacacacacgcacagagattgggatgccagactgtctgtcatgggccaagatgcggaatcaaatggtttaaaaacaaagtcagggaacatttgactttgctaatgttgttagtccaattctaggtgccttccaatgtccaaaagtattaaacaaattgaagtttcttctttgcgtttttactaattgaggtcaattctttgatcgtttgatctaaagaagcatatctgcagttgtttaatgaaatagccactttagcagttttttgtctaatatgctggtaaacggtattgctatctctaattatgtttctaatctgcagtgtcaataatttctttcccgagg

SEQ ID NO: 109138 - DNA, 570 bp, Aquilegia coerulea
  Intron number 4 from transcript AcoGoldSmith_v1.027016m (l ocus AcoGoldSmith_v1.027016m.g) derived from phytozome v7. 0 (chr-ID scaffold_16; pos 2899152 to 2899721 reverse stra nd)
agtgggctaaagggtggtaatctgggatttcttattgtggataccatttaataaaaatttggaccgaataatatgaaagtttgaatattggagtagtttgttcatgtcatatcagattattcagcaaaagggaaatctttctgggaataatgagatttgtgtaaaccattactactaaggtatctgaatatattgtgcggagtgcaaactggaaatgatattgtcgttatactaggttactttgggtaccattggcaatgaatatatccaaaccttaatttactgggtaaaaatttgcatctgatatgctaactctggaatatgtggatagtgatataagatctttcaaacaactcccttattttaaaatgataacaaaccaaatatctgaatgcttcagtaatcgtagttttttaattatattattaccctatattccagcctgctttctttgcagttaagtggttgcaggtccttttagtgcctggcattgtctttatagtctggaaattttatggtcatgtaaatcttgttagccagcaatatctttattctttaactagttcttcc

SEQ ID NO: 109139 - DNA, 414 bp, Aquilegia coerulea
  Intron number 2 from transcript AcoGoldSmith_v1.025729m (l ocus AcoGoldSmith_v1.025729m.g) derived from phytozome v7. 0 (chr-ID scaffold_61; pos 1228942 to 1229355)
attccaggtaattttacttttaaatttatatattcaagcttactattagcgtttctaaaaatatatttgttttaatttatatttcgcctataatgtgtttcagttggactgtattttataatcagttagtctgagtgcttgatatctcaagttcagtatgtaccagtcagacctttaacatagaggtacaaattatatcaaatcaaatcagctttcatcctttttcaaaaaccatcttattaaatttttaacttatattttaatgtccttcttaaatgcattctatttatgtttcgtatatcttcttggtaaatagcttatatttgtatctttaactgaaattgtctaatttagcagaatcatctgtttggatgtatttcacaatatttttttcttttttaagatatatcggac

SEQ ID NO: 109140 - DNA, 577 bp, Aquilegia coerulea
  Intron number 2 from transcript AcoGoldSmith_v1.026316m (l ocus AcoGoldSmith_v1.026316m.g) derived from phytozome v7. 0 (chr-ID scaffold_68; pos 945590 to 946166 reverse strand )
ccaggtatatatagtgtgcttacattacatgaagactctagattatcaagttacttttagttatttgtgcaatgtattactagggcaaatgatagtaaacaagtacataaagatcaaaacactaatacaaggattctgcgtgtttattttgaatgcaaactcaatgttaattaccagatgttggactactcaaccacaagagaaaagatcatcacgagatgaatgcccatgaatgtaacatattttgaattgttagttaagagtagttcttttctttctaagaggtggaatagaataacccggttgaagcgtaatgctcatacgtctgtaatgcattgtatagttcatgttactaggagtttaatcagtgaatcatattaccatgaagtatactgttaatccagcatagaactgaactgtaaaggtgatatcagttggcaccttattcggatcgtaaactaatatttgttttatcatctctctctctttctcagttttagtttgattgcatatgtgaactattgtatatatgtttcttacaggtgtcagccgtctgattaatcattttcacacaaat

SEQ ID NO: 109141 - DNA, 901 bp, Aquilegia coerulea
  Intron number 3 from transcript AcoGoldSmith_v1.009934m (l ocus AcoGoldSmith_v1.009934m.g) derived from phytozome v7. 0 (chr-ID scaffold_22; pos 892247 to 893147)
ttcaacatcctttcaatcggtatttgcagcacctggtaatgcatttgtccattttcataaattcttagtggtttgagagaatattttaactggattgggaattggtaggaggtaatttgcatggcaaagttgtgactcagtcttttggttttgtagttttcacttgcgttcttatttgttcaaatcagtgcttgacatgaacacacatcggtgacagttgcctatacataactctccttcaactaaattatccatataatacacataatttgagtacgaaagtttgttgtgctagtgttttgtcagaagttatgtagttacctgaggcccattctccatcatgcattctaacaagtgatctgccaaagacctctaagaggtgggtaagttgttaattctggaatgggccaaatattagatgttgtaatctatgcacacggcacacccgagttacacgagtttttatatttccaaattacttaagatcaaacactaagatactttgaccatgtgttccttgtggcctatttacatttgtattgctgcagaatgttacggattttatactttgcaatttttacttctataacatgttttctagactagatatggcttccatgttgtggaatccatagagggcatattaagcgacattatagtcattggatggcccagataaatgcctggatccagtttaattgacacctgtgtgaagggtagggtccaattattaggaaatcaagcatttgctctccaatctgtttctaactacgtctacctgcattcatgattcttcttttataagtgttcttattactctttcttatgtgatgctgactttcattatatttttatcttttttacaggggatttccagttcgaggaacctgctcacagattc

SEQ ID NO: 109142 - DNA, 1021 bp, Aquilegia coerulea
  Intron number 2 from transcript AcoGoldSmith_v1.019516m (l ocus AcoGoldSmith_v1.019516m.g) derived from phytozome v7. 0 (chr-ID scaffold_3; pos 10030723 to 10031743)
acaaagttaagagctattgtttttaaacagatactaattcaaaagctactgctatactttctttccttgagttagatttattctttctttggtatgtaatattgtaaatttgtaatgaaagttgatgtgatccccaaatataatcttccattattttttattgatttcaagctgcctctgacgagttcaatattgtcatactagatttttttttttaccctgtccattaccatatgtgtttctcataattttcagttttcacatttgatgaaatttcaaaaccaatcctacattttgctccccctcccccctccctcttttttctcccccctgtgcagtgttcaatgtgttgtttccttccaattttctcactggggctagccttattgcttctgcatagcaaagactccgcagtcagcaattattgtaaagacaagatctgtctacagtacttagaatttgtgaactttaatgttacttgatgaataaggacagaatctggatatagattcccacaatcaacctgatatagcttgtctgattaatgtttttgtattagtatggatgaactatactcatgttgtcatcatttctaatagattttattatattgttcactacttatcataatcctcaaaatacaaagtttgaagaatggagagatcgtttaccttggtcaagtcattcaaggggaaggcccaaggaagaactgagactaccatttgttgaaattgaaagcttattcataacttccttaagttagtaaaaaatgacatctcatgctttattgataaacaattaataactgagtataagaccgtaaactatcctttcatctttataactttatgtattttgtttatatattaatatatcaacattaccctgcatttcagtagtgacttatcagaataaactgcttttcagtagtgtcatattgatcttaatttggtggagtgtaaccctttgttttgtatcctacgcaggttgaattttttgaccggtacaacgtgcgaacata

SEQ ID NO: 109143 - DNA, 610 bp, Aquilegia coerulea
  Intron number 3 from transcript AcoGoldSmith_v1.003361m (l ocus AcoGoldSmith_v1.003361m.g) derived from phytozome v7. 0 (chr-ID scaffold_19; pos 1330719 to 1331328)
tgctgtacgtgctgtgacaccctcaaacttctctccttattctttctttgccatttatgtttatctgtttgactagatttcatttccaagttaacaccgattgttacaactcttctgccctaatggttttttttttttttttccccattatgaactattgtattcatgagcttcatttaacaaatgttgcattaaaagtatttttcattatataattattgattctttagcaagggtctctctctcataggagacatagcaaatgagctatacctcagagactctttcattgacacaattacaatgctcttaatgaaaatgatgaaccatcaaatacttaaactatctcaatagtggttgcaaaaatctggaaagactcattttgctttcaaatatttgttcctagctgcaattattttgagccttagtaaagattagaaggaattaaagattataaatcattggcaaagatactaataatacaaaagaagaagaagaagaaaattatgactagcgtgtgtattataacaattccttttttgttgttttaaacctgttggttcccttctactaattctcgccctttaccattttttcttcatatcaggtt

SEQ ID NO: 109144 - DNA, 647 bp, Aquilegia coerulea
  Intron number 1 from transcript AcoGoldSmith_v1.026612m (l ocus AcoGoldSmith_v1.026612m.g) derived from phytozome v7. 0 (chr-ID scaffold_2; pos 2153330 to 2153976 reverse stran d)
ggttataccatagtttaccatggggggaagaaggttttaggtttgcatatccatggggatacggtatgcagaatttagtttaagcataagaacctttatattgattattcattattgtatcagatatcctcatggacatttgatttcattactgctactaaagctgaaattatgagaataataaatgaaaatttcaatcttgattatgttttttttttttcatttttgttgctcaactttctttcagtaatcacaagagttgattagaatttaggataccaattgacgtagagttgtagaccatgttcttgccatgaccatcaattcaccaaacatatgtaaaccaagccaattgatgtaattgtcgcgtgaaagcaaaatgtttaagcagttctttccttccttatatgtcatataaacattttttttttttttttttttgcgaagataagttgttatattgatggatgaatagagttacaatggtgtcacagaagtggtaacaagtaccagaaaatcaggttacagctattcattcaaacgtaattctaaggtacagcaatttctcatgtacatgaaccaacttatagctttgagcctttgaatgtgtagtcttatctccctattatttcattgattcattcata

SEQ ID NO: 109145 - DNA, 925 bp, Aquilegia coerulea
  Intron number 4 from transcript AcoGoldSmith_v1.023532m (l ocus AcoGoldSmith_v1.023532m.g) derived from phytozome v7. 0 (chr-ID scaffold_156; pos 5467 to 6391)
gccgaaaaggtaagggaattttacatatgcaagtacacatttttttaacgtgaatgacctttaacaaattcaaaaaacaaattattattttggttacaactaactatattatatactatattaggttttttatcttagtctaaaaaaaaaaaaaaaaaattgaaaaactaatttacaaaattctgaaattatttacctatactaagttgtgctgtatatactataaagaaaggttagaaccatctttcaaaaaaccatttgtcacccactactccattctaactgatatcaaatttaaaattcttcaataactgacatctctttcagtaatgttaacaatattggataaaaaaatgctgatataaaaaatgatagagaatcaataaatccaaaaatttaactacttttaccaagtctaatatgaagtatgttttaaaattttgaaattaattccaaaaaactagcaattttgaaattttagaaggttgtaagggaaaagcttttaatttatagctaaagtttatctagaaatacttaatactgagttctttcgtatatatttaaaaggttatattattttctacattattggaaagtttagatattgtatattgtttttaccttgaattaaactattgtgttctgacaaaaattatctaatgatatgtataatttaaatctctaaattataatacattaatgttgactaaaattactatgatttttataaagcatacatatggtcattaacttaattaattaactatattgtatacatatttctttttttgtgttaaatattttcttttactatatgacaaaatattctatcaacaacttcactgtaccccaaagataaatagatataatttaattacttttttcattaatatttttttaggagaacaaacgactctgatccaac

SEQ ID NO: 109146 - DNA, 743 bp, Aquilegia coerulea
  Intron number 1 from transcript AcoGoldSmith_v1.023728m (l ocus AcoGoldSmith_v1.023728m.g) derived from phytozome v7. 0 (chr-ID scaffold_8; pos 3321397 to 3322139 reverse stran d)
ggaatccatcatctgtctgttgattcttgctgtaagtgaaaaaaagagagtttttttagatggtcatgctggtgttttctttttctttttttgtttttcttcatgtactttatgattaaattgattatgttaatttggttttaatgatttttcgttttttttttgcagtatctggatctcatcataagcatgctcctggtaataatttatttatttattttaagtattattcatatattttatttgttatggctttatgttttttattatttatcatggctttttgttgttttttgtagttggttgcatgatcatgattatggttttcatagtaagtacatacgtatgtaaagatgatttgctttaggaaaatggtttgttcgatctatacagtatcatagatgattagatgttcactaatgaaaactaagaaactacgacacttattggattgattgagaaatttacgttagtagtaagttttttttttttttttttacaattgaattaaagtaagcgttactgtttacatatataagtgtaatttttttttttttttttttttgataagattagcacttcattgaaatgtaaatgtactaatttctatttgctatttgatgtagttgatacaccaaacccttcactagtaccacattacaacaatgaatctcctagtccttcaccaacgacaggaagatcatcccatagctcagctccatctccagctccaagtgattctg

SEQ ID NO: 109147 - DNA, 802 bp, Aquilegia coerulea
  Intron number 1 from transcript AcoGoldSmith_v1.010976m (l ocus AcoGoldSmith_v1.010859m.g) derived from phytozome v7. 0 (chr-ID scaffold_2; pos 9220828 to 9221629 reverse stran d)
gggagaagtaagatttcgatctctcattctttcttttcattttgattcaaagataatgattctctttcattgtttcgtttaattttcaatctgttttctacttctttcatcatcgatttctttgatttctgcgtgtttttttttattttgaatctatatgcgttttatttttgtttcgttctaaatgaaatcgattggatatgattttccatatcttcgatcagattatgggtggaaactagggttctttattagatatgtgagaataaatcgaattttgttgcataaatcaacttttgctagaccttgttgtagagataattacatttaaatgttagataagtaatatgttccaaggctaaagtttcttaaatgttcaagtattggttttgtatcaattctatatggatatttggattttgtattaaacactataagtttattgattgttttcaaacagtttagatattttatagtttgtcaattttaacaagtaaaattcattaaacatcccgaatatgatgatatactaatcttgtactattctaatatggtcttatggatggttgtcatctataaaagagaattttcattttgatcttctgttggtttggtttttatgtctgcttcttatttatgctgtgaatacatgttatgtggtggtgtcctttaaaatacagagttagcttcttacattcttaacatgctagtaacttgacattcttaacatgctagtaacttgatgagtttatgtatttgtattttaggaccagcaaggtgctatcgtcagatcaagaacaag

SEQ ID NO: 109148 - DNA, 920 bp, Aquilegia coerulea
  Intron number 1 from transcript AcoGoldSmith_v1.013838m (l ocus AcoGoldSmith_v1.013838m.g) derived from phytozome v7. 0 (chr-ID scaffold_64; pos 1289548 to 1290467 reverse stra nd)
tggtagaaagcaacgtgcgacttgaaggacatgatcggttgtgggttcttacacccaccacttttttatataggaattctgaggtgctcgttggttcaacatagtttgttatgttctactctattggaatctccatttggttgggttttgggttaaagtaaatagtacatgatggagcttgagcgaaaaaaatcaattcatttctcagaggtaagggtctagggttaatgccaatcaataagttggaacaacttcgtaagcatatcttcgatatagaaatggaaaagatttcattctaacatctaacaaaagttttttatttgaaacttttttgttggaattgggaaaactatttcgatcaaaagtgtataacacgggaatcaatcgttcatatcactcttagacagtcaataaataacaaaagggatgttgctgccattttgaaacgattaaggatcaccgaagtaatgcctaaaccaaatgattcaaaacaaggataaatgatcctggaacaagaaaacaccattttcaattgtctcaacaacttgagcagaataaaaaatgggttagagacagctcaataaaggaaatgccaaggacaagtactccggattttcctttgaactttttgagaattattcaacttgagttataagtacgaatgattttttttttcggttttttcgttaaggaataagaaattcaattaaactagaaactaaactattgaatttcttatttttcttttatggattggatctatctatttgccttgccatacactattacataaatgaaaatcattctttctcgagccgtacgaggagaaagcctcctataagtttctaagggggggggggggggattgctcatatatagatatctatcccaatgagccatctatcgaatcgttgcaattg

SEQ ID NO: 109149 - DNA, 795 bp, Aquilegia coerulea
  Intron number 2 from transcript AcoGoldSmith_v1.002294m (l ocus AcoGoldSmith_v1.002294m.g) derived from phytozome v7. 0 (chr-ID scaffold_3; pos 10298446 to 10299240 reverse str and)
acttaaaggattcacaggtgaagtgttttgtagtttcattggcaattgcaatcttgtttctttgattattaagtgaaataaacaaaagttgagaaactcaaactctactaggcttaactgcgtgccacttcatacaattttctgagtaattgatgcaacattccatctgttctgctttctttgcttgagcgttaagttgacgtatagattatatgataacttacaacattagactactgtaatgctgactgacatccagggtagttgtttatatcactgttagaaaggtggaataataggttcgattttccatttccttaatcagtcttgtgttctagttttttttttctactttcctttctcttttatgaaaccattcgattggggaccttgttatatgctcactttacattagtttaagaagtgaaagacctttacacatttggtaacttacagcattagaccactgtaatgctgactgacatccagggtattgtttatatcactgttagaaaggtggaataataggttccattttccatttccttaatcagtcttgtgttcgagttttttttttttttttttctactttcctttctcttttatgaaaccattctattggggaccttgttatatgctcactttacattagtttaagaagtgaaagacctttacacatttggtggttctgttgttcagtaagtttaagactttgtttgttgtgttctgtcccaatgatctatgggtactgagagaaattatgttttattcaggctgactcagggaatcttcaag

SEQ ID NO: 109150 - DNA, 922 bp, Aquilegia coerulea
  Intron number 1 from transcript AcoGoldSmith_v1.024206m (l ocus AcoGoldSmith_v1.024206m.g) derived from phytozome v7. 0 (chr-ID scaffold_8; pos 3267440 to 3268361 reverse stran d)
gagacgtacgtaccgagttagagcgttcgtacgtcatgttaggcagcaggcttattcttgtgtgacgacgttcgaacgtcatatcgacgtacgaacgtccaaagtcggtttgtactgtttcggcccattttccttggtttccaaccctaagtataaaaagggtttctcttccaaagaacaagttagttctttggccgtccattcttcttcttgttcatgtgttttggttaggtttttgatattgaaagtgtttgtggctattgaactcaattccctttcttcccccttttctaaattcatatctttgtgatcttcaagagttattgtgatttcggcttcgagtcttcttgtgtgttcatcaagaagtcgagtgtcttgtgcgtacatcaaggtgctctggtgaagtcaaggtgttagagataaccaggagtatcaactcgcagtgagtgcaggtagttgataggtttgtacatctcttttcatctagtggattattttgttgtcgcgaggacaaccgtggacgtttccctgtttgggttttaccacgttaaaaatctctgtgtgttatttactttctgcgtaatttttgcttgcttgtttgaattcacatttgttatactagcactatttgtagtttctcatgatgccaggcttatttgtgacaataacagatctctccttgatgatgacattctccatggtcgtagaatgccttctgaagatgaacaggttcttgaagataagtgtagtcctcatgatacgccttctcatggtcataatggctaccaaaatagccctttccctgttgtcaggcttcatgacgataaatcccttcttgatggaaaatcggtccaagatgttagcatgccctttaaaagtagccattatcttggtgatgatctcctcattgataatggaagcc

SEQ ID NO: 109151 - DNA, 659 bp, Aquilegia coerulea
  Intron number 2 from transcript AcoGoldSmith_v1.008389m (l ocus AcoGoldSmith_v1.007743m.g) derived from phytozome v7. 0 (chr-ID scaffold_57; pos 446209 to 446867 reverse strand )
ttgaaaagctttacaggtcaactcgagcaggcaaggtagacaatagagatagcttagtgtagtgttattttattcttgttagtatagcatgtcatgtgttatctgctgttcatcttggtaacatgtgtcgactgtctaactagcttcagagataatatgtttttaattatactagtagagttagccattcagattattagcgtcagaataaatctaggttttctggggaatgcttagttcgggaggggaagtggttaaattgtggtttgcacgttgtctctagatgggactttaaataatggaagaacacgggaaatacatatcaagtaaggttacattataaggactaaagagctgcgcaactttattggaatgtagtcttcttttgggatttggatgtagaaggatccaagtgacgtgtttcatcttgaattctattaaaccttgggccatattaccttagttgtgtggctattgtcgtactatctgtaccaacaagttaccttgacttgctttctttgagctttctttgagatttttaatcattgaaatgaacttgtttaggactattcatgttgtaatagctaaggaaattatgtcatctgttcgtttctgctttttcaggattttcagaaagatatagttcgagcagctgaagc

SEQ ID NO: 109152 - DNA, 476 bp, Aquilegia coerulea
  Intron number 1 from transcript AcoGoldSmith_v1.008389m (l ocus AcoGoldSmith_v1.007743m.g) derived from phytozome v7. 0 (chr-ID scaffold_57; pos 446921 to 447396 reverse strand )
gcaagttcaaagaacaagttgccaaacaacaacaggtcttctttccttcttcttcttgttcatggggttgttttttttctctcataaagttcttgtttttatgtgaaataagcttgaatttaatatttttttagaaaaaattaagaatacccatcatttgtttattaagtaatttgttaatatatgaaaaaaaaaacttaagaatggaggttttttggttctatttgatgaaatttttatggaaatgtagaatttaagtattatatatgaaattgtaaaaaaaaagaaaaaacccatgttttgattagtgatatggaaattggaaatgaagtgttgtaatgggggaagaattgccgaagaattgcgtataataattgttataacttataaggtctctaaataattattttgattgattgggatttttttattgaatttcagttagtaataaagcagtttagtgggactggttacga

SEQ ID NO: 109153 - DNA, 358 bp, Aquilegia coerulea
  Intron number 5 from transcript AcoGoldSmith_v1.026799m (l ocus AcoGoldSmith_v1.026799m.g) derived from phytozome v7. 0 (chr-ID scaffold_84; pos 494608 to 494965 reverse strand )
aagaaacttatgtgggtaatttaggaattgatcattcacagctaaattggttcgattggaattcctcctaagataatgactttatcattagcttgtcggaagaaaaactacaaacaagatcaaaaggttttttttaattgaattcaaagggggttattttaattgaattcaaaggggttcttgatgattctgaaacttttgaaaaatggagaaatgggtatattgaattaatctctttcatgttcattataatccaaagttaggatttttatttctattttttgccatttaatggggttttttctctctttattttgtaatgttttatttttatttttaacaggatttacggattaat

SEQ ID NO: 109154 - DNA, 499 bp, Aquilegia coerulea
  Intron number 1 from transcript AcoGoldSmith_v1.020373m (l ocus AcoGoldSmith_v1.020373m.g) derived from phytozome v7. 0 (chr-ID scaffold_3; pos 3977731 to 3978229)
aaaattgttcaaggtaggttcatgttcattcaactaactcaatgtttcctttttcttcctttccctttctggttttatccatttgttcttctgcgcattgttaagaactaatcttctatgtatatcatctttatgtttttcttctgtcgatcttaactaatttacgcaattcccaaatgcagctgcactgtttgtatacacaagtcagtcacatatctttgcaaatttacaacaatattctgaccataactatgtaggaacaaaaagtcatgtatagaagaacatacagagcaatttgatgtgtaattacagaataaagaaaaatagaatcttgtccacatatataaacgagtaaactaccccacttctagggtgtgcaaagtagacattacaaacttagaacttattgctcttaccattttgatctatttaattagtttctgataaaatgctatttgattgttttttaattgcctttctctataatgtcgcagtagga

SEQ ID NO: 109155 - DNA, 720 bp, Aquilegia coerulea
  Intron number 1 from transcript AcoGoldSmith_v1.009704m (l ocus AcoGoldSmith_v1.009704m.g) derived from phytozome v7. 0 (chr-ID scaffold_22; pos 1166129 to 1166848)
aaaaatcaccacttctgatccaagaattggtatgtaatttttttgattatttagtttttcttgtgttggggtttatctaaaatttgcttaaaagttgaattttgaataaaaattgaaatttgaaatgcatgatggtcattaggtgaattttctttttggtttttcttttttttattttatcaattcatcaaaatttctagactttgggctgttttgattggatttggacattgttgtttataaagaatgaatatttcaaacaaaataataatattggaatttggttccttttttgtataatatagattagttttcaggttatgaaaccttgtattattcatattctttttgttttctggtaaatgttttttttttattattgatattaggtttcttaaaataaaaactatagcagtctgtaattcaaaatgagatcttttgcattgctcaccaacacaaggggattagaattctcctagaaaagcacttgtcaccctaaaaggtaaataccaagtcttccagcagggtgatcaataaatcatgacgaatactacccatttaattagaatttcgctacaaattagtcggggtccagtcaggtataggattagttattactcaaacctctctccccccccctctcttctgtcctctttttttcgactgtataaatatatacatttctaagatcttgttttttgataaaaaataatgctgtag

SEQ ID NO: 109156 - DNA, 820 bp, Aquilegia coerulea
  Intron number 2 from transcript AcoGoldSmith_v1.004243m (l ocus AcoGoldSmith_v1.004243m.g) derived from phytozome v7. 0 (chr-ID scaffold_3; pos 9676459 to 9677278)
aggcaatctacagcttaacgccagggtatcatcaggtgatcattgggacttctgcttagcattacatgacttttattttaaatccttgtacttttgtttgaacgattctcatgaaacccaattattttatatggtttttaagttctcaaccagacttgcttgcttgtaaaatttctggatttgttcactttgtcattcccatgtttcatgtgaattctcttagcacatttaatttttttaatagaatcccaagattttggattcttggagacaaacctattagtaggaaaaagaaaacaagcattagtgggttgagaactgagaagacatagtaagatataatcagaacaactagtatcgtgaagttaaaacttaaaactcatccccgctccatttgcatgatgattgtatccctttttgattaaaaatcaaatggctctagtttttctatttttaaattgtgttcaataaagcaattgaactaatcttacagagaagtactcaaatacttagacagtgtctaagtcgagcaagcaacaaaatgaccgcatcaatacttctatcacggctatgtaaagacaaatcccataggaaaatacacttgtggagaacagtaataaatttacctcaactgaagtccatgggacgtttaactctataaaactagtttcgctatttttttttccgtgttactggatgctcgaaaatttatccttcttgtgtgactgatttgatatacgtattgatgtttctatacttataaagggacttgtttgcattcgtcgtgtatcttgtttaatgcagtacaaattttttgttg

SEQ ID NO: 109157 - DNA, 819 bp, Aquilegia coerulea
  Intron number 1 from transcript AcoGoldSmith_v1.011083m (l ocus AcoGoldSmith_v1.011083m.g) derived from phytozome v7. 0 (chr-ID scaffold_2; pos 5680207 to 5681025 reverse stran d)
gagcagctaatagagagacttctgtataaaattattctctattttcctttcaactaacattctattgaacacttttagcttgagttggatcatatttttaattttttttattaacaataataatagggattatatctagtagattatttttgattatctaatatatatgcaagggtaatttggtacttaaatagtatacgagagaaccaatttagctgtatatatgtgaatgatttaagtaaaagacaaatttttttattggattaataaaagaaggcgtatgggaaataataatgccttaataataatagcaataataaagaaggccaatttttttttttttttgctgaatttacgacaactatatataagaagaatgagataatgagaagtcaattttagcttaggtggtttggcgccattttttttggccttggctagaatttccaactgtttttccgttgcttctcttatcaaaggagtgatgcatctcttctgctttacttttggatatattttctactatagttacttgtttcacaatttcgaaaattttgtttcatttaatttacttcttcatatattggctgttgtgaattgtgatggttgaatatgagtgttttcttttttggttatagtggaagcaatccccctctcccaaaagaacaaaagcaaataattttaaaagttaataataataaaaaatatgtgcatgcgattagaatttgactcttcaaactaattgtttatttttatcctctattttccttgcacacaactttagcggcagtttgcaagagtccctggatatagaattga

SEQ ID NO: 109158 - DNA, 848 bp, Aquilegia coerulea
  Intron number 3 from transcript AcoGoldSmith_v1.005934m (l ocus AcoGoldSmith_v1.005934m.g) derived from phytozome v7. 0 (chr-ID scaffold_8; pos 3588655 to 3589502)
ggaactgtgagttaatcaaattatctctttctatttggatactttgtagatagggatgtataaatgttttactgaattaccacttcaagccatagtttatttgtaaatgccttaatttgggctggttggtgaacaactttgatatttaatatttatatattactgatctatactcagtatattggttgactgaggtttaaaaactaagtcacatggacatcatagttttaagagtaattgtgtcggatgcactgggacacacaacctgattcataaaattttggtagtttgttatagaactctacaatttgaaacataagaaaaaaaaataaaaataaagagcggatgttgttacagatgaaggaaatattaaagaaagttgagaaggaaagatgttattctctgtctgagacatggaatatatttaactcgaatttggtatccctgtgtcgaactggttttaggatgttgtgtgagacacaggcacgcgtacccgtgtcaatgttagttagtttaatagtgttaaattccaaaatattgttttgtgatatacatatgtaatggctgaaaagaaaacgatgtgtgtctgaggatatatcaccattttggatgttttgaaccacaattgttatctattttttttctccgtcttgcatatgtatctcatacatatatcagcagtttccatgtttgtttgttcactgtttatactaagttctgtatgatcataattgcttggataattagtttgtgccttttcatttgaagatttactaactcaaacactgcatctggatgcttgtctgatgatattatctaaatttctgtcggttggatttataggtatt

SEQ ID NO: 109159 - DNA, 1056 bp, Aquilegia coerulea
  Intron number 3 from transcript AcoGoldSmith_v1.025522m (l ocus AcoGoldSmith_v1.025522m.g) derived from phytozome v7. 0 (chr-ID scaffold_2; pos 1827074 to 1828129 reverse stran d)
gtgtgcgctattactttgatttctctattgatcaggtattatttggcgtactctgtagttatttgttcatgaatgttggattttactgtcacacacgaatgatttatatgtgcatcttgggcaaaattgcaacaacaacatttggagatgagttatcaacaaaacatggaataacaatcaaaataaaagaaaaactgttggttgcagttgtgtgttcttactaaatgttgaatattgcaaaccactcattctaatatgtttttaatttagaacataccgatttcttgaattggcttaatatgttttcctttttatcagatgatcacatattcaagcgtccagtcaaaactttgttatcaatactccgttaatgaactttatccaataagggaaatgtatgaataagacattgttctgcctcttatactcttgtttgtcttcagtttggtataatcaatgagtagggtttaatgtttacaagaaatggagttcttatacctgaacttggttaattatgtatgtgaccctctctttagccaaatgagcacagggacatgttatttatagcttgacgccttgacggacatatataccaaaacaaataggttggctttggcagttgatgtttattctctttcagttccagcacacttcatgttggcagttaatgtttgttttcgtgctcttttaactcttttttttttaaataaattgaagctagatatgtcattgtaatctatcaaattgcattcttatttgatttgttaacaatcactgaaatccgataaaattaatttcctgtattaccacaactacacaaggagcagagcctgacagtctgtgtctattttttttttctttggtaggcagtctatgtctaatgatgtgatgcatagcttgtagtttcctttgcattgcagcttttgcttggtgcttctaccaaatatgttatatgtgataacgttttggcaagtataaattgaagattgtatgcgttattgggcttgtgttcattttgcagattttgacataccttctgatatcagcgtcatcagc

SEQ ID NO: 109160 - DNA, 915 bp, Aquilegia coerulea
  Intron number 1 from transcript AcoGoldSmith_v1.002656m (l ocus AcoGoldSmith_v1.002656m.g) derived from phytozome v7. 0 (chr-ID scaffold_2; pos 4030980 to 4031894)
gcaagcttaagttgcaaatccaatccatatcatgatgacctataaaaggctagatttcatctcattagcatacatgatcaccacaagcactatctaatgcctcaaattagagtatttgatcatgtaacagcacataccattttgtatatagaaattcatgatacttacagaagctgtaggaatgtattcttgatgaaaaccattgtcattttataatcacaagggtcccttacaaatattgccaaatttatgctggccaagtagtatcttaacacaagccaacatgccataaatgggatggtgggggcatcaccgcatcagttctttttcatttattagtattgatagtcaaacaagaagtaaacataaccataaccctgaattttcatgttggggagacttgattcccattttcaccttttttaattggatatctctttatagccaagcaatccaaagataagaagaaccttacctcttcaaccctttatcattttactttattggtttgagagtgctgcttcttgaatgactataggaatgttatacatttttacagtaaagtttgaaataactactgtaacagaggttctttggaaggtagtgatgaatgactaatcattttttttctattgagtctagacctttcttttccatatatatatatattggaccctctcttcccactctttaaatctagtaccaacaatcacttcttcataattgtttgatcaaggtttcttcaagcaaataaccaacacaacttgaagcaaatggttggttttccctttttcttttcttctttaaactttattttacttccttcttttgaataatcattacagatatatatgatatttttcccaacttcttttggatttattttgcataggaagaaggtcatcaactagagag

SEQ ID NO: 109161 - DNA, 458 bp, Aquilegia coerulea
  Intron number 1 from transcript AcoGoldSmith_v1.013331m (l ocus AcoGoldSmith_v1.013331m.g) derived from phytozome v7. 0 (chr-ID scaffold_2; pos 5272867 to 5273324)
gcggtgcccaagaagaaggtaatattttactggacagagaagccttattatgtcttctagttggtttatctgtttaaggatggacatttgcagaagttttttatttcttatttctcaactgaaagtatgaagaagttattcgttgtgcataaatactgaatatttttcttctctttcagctcagtttttctaagtgcctccactttcatgaagtttctaagaaaaaaatagcagaatggggattttatatcaataaattccaaacccgcactaattatggaagagaatcatactgacttcattgatcatatcatgtggaaagaaatttgattaattgatttagttattttttatctgacattgaagtagtgttctgactctttgtctattatgaatagcataaactgactcatgattgcccaacatgcagatctctaaacacaagagaggcataagaa

SEQ ID NO: 109162 - DNA, 438 bp, Aquilegia coerulea
  Intron number 2 from transcript AcoGoldSmith_v1.027494m (l ocus AcoGoldSmith_v1.027494m.g) derived from phytozome v7. 0 (chr-ID scaffold_2; pos 2833714 to 2834151)
ttggctttttctcaatcaatccaaaaccttaagaggtatgtaagattagatctgaatttttttttcccaatagctttgttatactttctatggtttatgttcatatatatatatatatctaggttttcaatttgagtagaaattattgtagttgcaaacctgtttgaagaaatgtctcaaagaaaatttagtctattttctgttatttttaatcatagagagttgggtatcattatcactgttggtcattattcattgacgagctaaggttagtagaaaaacaaatatgtttttaaatttcaaatgttctcacaccttctcaaaccaactttacacaaaactaacaccattattaccacttgttttctcaatgttcatcagcttccactcttgcttttaacagccagacactcttctcacactccaacccaactatca

SEQ ID NO: 109163 - DNA, 284 bp, Aquilegia coerulea
  Intron number 1 from transcript AcoGoldSmith_v1.001165m (l ocus AcoGoldSmith_v1.001165m.g) derived from phytozome v7. 0 (chr-ID scaffold_2; pos 8030409 to 8030692 reverse stran d)
gattcaactagccagcaggaggtttattccacaacgtgagtttaaatcttgagtttctattagtatattgacatagttaatttaacatgttctctagcttattaaaggtataatactttttgtttttctcaaaaggaccttgcgttgtttgaagaacttgtcaagtgatcttcatttttgaattctaactagttcacagattattatatgaggaattttgatagaaataagtacacaatggatttgcagaacatcagagcttgtcgaaggggttctgcaaggga

SEQ ID NO: 109164 - DNA, 359 bp, Aquilegia coerulea
  Intron number 1 from transcript AcoGoldSmith_v1.022431m (l ocus AcoGoldSmith_v1.022431m.g) derived from phytozome v7. 0 (chr-ID scaffold_13; pos 3483787 to 3484145 reverse stra nd)
agattcttaacaaaccggccatcaagtccattaaggtttgatagatttatgtttttttatattataaattatactttctttcatatttgattgagattgtaacttaaaggttttatatttatgattaatattgtattagaaaacacaaaatacaatctggttgactggttgagcaatctagtggctaaaacattcttcatcatcaaatcctaattgatttattgttttcatgagttcaaccaataactactttgttagcatctagcaattttcttataaatttttggcctaaaagtacctattgcaacttaaaattgaaatctaccaaacagtcactaaatatttgacgttttattagg

SEQ ID NO: 109165 - DNA, 260 bp, Aquilegia coerulea
  Intron number 1 from transcript AcoGoldSmith_v1.010177m (l ocus AcoGoldSmith_v1.008142m.g) derived from phytozome v7. 0 (chr-ID scaffold_25; pos 2821925 to 2822184 reverse stra nd)
gttgaatttagattctaaaaaaaagaaaaaaaaaggtgaattagtttacctgtttagattcaatcttcttttacatatagtgatatagaagaaactcttaacgtttggtgaattgttgttttgattattatttacagtttttctttttgatttatttatttaaaagaggatattcttttagatttaaaaaagaaaagagaaaaagaaagattttaattatttaattatttttttgggaagtgcagaaagaaggagaaaac

SEQ ID NO: 109166 - DNA, 451 bp, Aquilegia coerulea
  Intron number 1 from transcript AcoGoldSmith_v1.011625m (l ocus AcoGoldSmith_v1.011625m.g) derived from phytozome v7. 0 (chr-ID scaffold_13; pos 2341343 to 2341793)
cggtcatagtttcaacaactccatcgatcattaaggtttgctttcttattctttagcgttacaagtttgatttggtattcttttttattttgattcgaaagctagggtttcagctcaatcgaatttgtatctttttcttgttttcgttgttagttttttttttttccgtttcgaaattaaaatcaaatactcgtatttagtatgttaatttcattttatatcttatcttctgcgctcaatttggggaaaaacggagctaggttagtttgaaatgtatgtagatgctttatgatcatataataatttttttgaaattgaaaataaaaatatgtttttaatttccatttacgaatttgttttcatttttagcttgtgtattttatttgaaatgacaatgccaatttcattatttgtaggtttttcgccttgtagctaggtcattgttacagtt

SEQ ID NO: 109167 - DNA, 498 bp, Aquilegia coerulea
  Intron number 2 from transcript AcoGoldSmith_v1.011625m (l ocus AcoGoldSmith_v1.011625m.g) derived from phytozome v7. 0 (chr-ID scaffold_13; pos 2341805 to 2342302)
aggtaatttaacacctatacaggttaaatctttttctgattttattgtcaatgaagttccggatcatgttttgaattttatatgtgcttagttaagaattttattgttcatgatattccttcagcaatgtgtatttagttgcacttgcatctacaaattaatgtagataccgaaatctgcgtacagcatagcttcaaactttcctctctttcgtttgtacaccaaaatgttcatttttgatatcataaaaagatcgtccatgaagagtttcaactggatttttgcgaactatttgacaagtggagagttgaagttccttatggtctaagtatgtttacttagtcagttgaatgaatgaaatatttttacttataaaaaaaaagtatgttttataagattttctcggcagtgtcttttgcgtctagtaagattttagaggtgttatacgtacttatttgtattttctcatttgttggagtttagtaggggacgtgtaag

SEQ ID NO: 109168 - DNA, 795 bp, Aquilegia coerulea
  Intron number 4 from transcript AcoGoldSmith_v1.011625m (l ocus AcoGoldSmith_v1.011625m.g) derived from phytozome v7. 0 (chr-ID scaffold_13; pos 2342702 to 2343496)
aaggttcttgttttcccaatagttaataaaataattcttttgttttcttcttaacttttttctctcttttggttttatttatttatctgtttatgtgtgttcacattttacgataccagttatatgcttgtctcacatatgttgtgtgaacatattgcatttcaaacagttcccttgttcttttccatcaaagaaactactacatggatgatactgaaacaactatagctaggatttgtttaccaaaaaaaaaaaacagctaggtttgctttaggtggactcatggatgatactcaagaaagtgcattctgtaatagttcatcagggttaactgtgacatgtttgagtcaatgattggtgaactgtgaaaaacaagttttaaaattatgagtgacgaggatcagtgattcatgtggacgatgaacaagttctttttagcatacttaggtttttaccaagccaaaagaaggaaataatgagtatatcctgaactgtgcttttggttgcttgttaatagaaattgtatgcaggatgcatcagtacttttataggcattaagtccctctcattaattttgtttatcatgttattttgaaagatagtcctgtacacatttaaagatggaatagttcaatctttgctctgaaatattacttgacactcatatgatgttacctaaatagataagtgtacgacattcactagattggaattttgtatatcctgggggaatcgacattttcacataaaatcttttcagggtgtggacctggcaggagcaaaagttttagggaa

SEQ ID NO: 109169 - DNA, 794 bp, Aquilegia coerulea
  Intron number 1 from transcript AcoGoldSmith_v1.004418m (l ocus AcoGoldSmith_v1.004418m.g) derived from phytozome v7. 0 (chr-ID scaffold_31; pos 455561 to 456354)
cagtccgaaaaggtatgcttaattacttcgcccatagttttcttgttcattcatttatattagttaatattactctgcataaaaattgacgatcccagatacagaatcatttctgtagttggaccaagactaacatatacaatagacaacacttctaaattttaattaatactctttatcacaatgaagaagaaagacttgctgatcgagtttgatcttcagattcatatatatgacattaaggaagagtgaagtagtggacgtcttgaccatataagtgatttaataatttctgtttaaccctagttatttggaagttctggtaattccatgcttattaattacatgatacttaaaagagagccactgtttttgcatatgggtgatatgtaagcaggtcaaggtaaacagtcaaaacgcttatttgttcaaatagtagttagattaaaacaaacagagagtcaatagagtttgatacaagttcagaataaggtgccaaatatatatggccaatttatggaacgcctactacctgccctcctcattcaaagacctgctactccaaagtccaaataaatcaacacatataaattcattacatagcaacaagatatgagcaaactttgtagaccaacatagtccagattgtcaggctttgcatcacactttgacagtatcccatgctcatatataaatgcctattcttatattatatatatgatatgatgtgtgtcacaatagaacaaatggagattctagagtccaaaaaggagggagaacttttgaattccgaa

SEQ ID NO: 109170 - DNA, 1023 bp, Aquilegia coerulea
  Intron number 1 from transcript AcoGoldSmith_v1.004238m (l ocus AcoGoldSmith_v1.002625m.g) derived from phytozome v7. 0 (chr-ID scaffold_58; pos 240363 to 241385 reverse strand )
ttcgtgataagtctcaaatcatcagaggtgtgtttgatctgttcgtcattcccatccattttcaatatatactactactactactactactactactacttataagtgattaaattgctaaactatttgattctcatctgatcgactgtttgttttgttatcttgcatttatattttaggttttgataacttgattcgattgattctggtgttttctaaaggctatttgtagtaagttaaacatagatttgggtcaaaattggagagaaatagagattccaaaagtatgtatgtatgtatgtatggtatgttgcagagagattatctactgatgaatgcatttgagaagtatacaaagaatttagagagaaagaacaaatatatattaaaattcccacatattccaactttgttgtaaattgaatttcgcgttagtttctacaaggaatatcaagttttttattcaaatagagacaaatgtattcaaaacagaaagtgagacaaatgttttcaaaaccgaaagtgcaccgactgtggagggtatatggagggagaaaaggtacaagcaaacaacccaaggttgcacagtagttcttagtaggagcatcctagaatacctcccattccaggtctagtcagatctttgaagattgcattaaccttatatacttatagctggcagatgaagtaaagatcactatctttattctttagatgtgtagctcctcatttttccttttctagtgatgcactctacatttttgtatctgtatttaaaactcattttcacaaaagaatgaaatagctcattcatgtttaaattggcattgcttgttatgacttactaggcagcacttagttgtatgaccaattgtatattatgaatattatttgtcctacccccccaaaaaaaagatgtgtaaaaacctgttcgtagaacaagcttagccggaaaggtggtttttagtttcttactttttgcattcatttgcagctattgaaggatcatccgtcatatttcac

SEQ ID NO: 109171 - DNA, 305 bp, Aquilegia coerulea
  Intron number 1 from transcript AcoGoldSmith_v1.003938m (l ocus AcoGoldSmith_v1.003938m.g) derived from phytozome v7. 0 (chr-ID scaffold_8; pos 818429 to 818733)
tttacacaaacaagatctcatcttcaacattacaggttttgattctatttcttttttcttattttattttgttttaattacgaatcagcaagaatgatttatgtttttaattttcttctaagctctacttacttaattgagttcatcatcagatctgaatgactacatgaattagttaattatttattgtgtgacatatatatttttgattttttgaaagaagaagaagaagaagaagaagaattcaatttgttaaattgattgattgattttttttcttatttcatgttatagatttatcaata

SEQ ID NO: 109172 - DNA, 755 bp, Aquilegia coerulea
  Intron number 1 from transcript AcoGoldSmith_v1.009611m (l ocus AcoGoldSmith_v1.008614m.g) derived from phytozome v7. 0 (chr-ID scaffold_26; pos 1860368 to 1861122 reverse stra nd)
gggatataaggttagagcaacggtgcggaacccaggtttgtttttcttctttattaccctcattgcgtttcttccacgatcctaaatatcgatgttaaaaatatcaggctccccccaaaagtggtatacctcctttgtttccctgaatctttctcttcaaagtcccaaccaagttgctaaaaaagaaagtatatctaactctggaaacatcctgcaacctctgaaacactatactgtaaatcaacttactgtatcgtaaattacctcccacagggtatgtaatgtggtgtcatcatatatatatcttaaacatcttaagactaaccaatatcatctcaaagttggtaagcaaataaaaatctgctggcgtcatctcaaaacaaagccatcaataatattactttttcactaactcggtaatattgcttaaaaagtctgaaatcagtgataaaccaattttacgtccaatatgtcaaggtatacaagtcaatttttgtgttactctatttctaaccctgtttgatcttccacaacatttaagaaaggtcacatactacaataggttaaaggcaacccactctttcaccccactgataccagaattctacaagcttgactacctcaaataacgtattccatcactataaactagacaggatgtaggcttaaagacctgttctccgctacatgaaaattttacaaccaatcattcagtaaatctaattgatgaacgaaattccttctctcactagggg

SEQ ID NO: 109173 - DNA, 1068 bp, Aquilegia coerulea
  Intron number 1 from transcript AcoGoldSmith_v1.009528m (l ocus AcoGoldSmith_v1.009528m.g) derived from phytozome v7. 0 (chr-ID scaffold_7; pos 5157147 to 5158214 reverse stran d)
ctgctagattcgtcttggataatttcatctttcgggtaaacgatccttgctttctgccttttgttttaatactttcgattccaattgctatgattcttcttttatgtttttatttttagtgtttccaagtgttgttttggacttttggtattgaagataagaacaattgaaattaaaaatttcatcaaaaggaagaaaagatacaagtttaattcatggtttgtcagtcattctaaagtaaactatcaagaagagtagtatggttgtagtgaaagtggaggtttaattgactttgtctaaccatattatgctccaaacattgcctttgaactctgaagcataagacttttaattgagtaagctccaaaatcttttagaagatgtttgctattacgggatagttctgataaatcctacttctgttaaaggaatgttggtatgagtttgggtcaagtctaggttaatctaattatgattgagccttatgaaaatggtcctacctaaattcaaatcttatgagttagagaggtgcagtgtacattttgtagctattggaactattaagtctcatcttcgatgaagcatcaagccaatgaaatgactctactgtaagtatagaaaattgaagagaatcagtgttttgttatattaattttacaagaaatatatagtattgcatgttaatttgagctatagaattggattaattaattagaactgaaggcttttttatgtaacgtctatatgtaagatatcctatccaggatatatgactaaatacaaccttcacaaaaatgcattattagccaagcccccagaaacgattgattgctgcttcatttcttgtgataatccacagtaaaataaaatttccttgatatagtcaactaagacctatgtacgaactacaaaaatgtggcatgctggtgcaccgcttggcagaaattttagtgtgtgatgaattgaaatgccaatgttgttgttgatattagcagaatgcactttaacctacgcatcctttttcaatttgcagaagttggctgtctggtttagcgttggagcttcttc

SEQ ID NO: 109174 - DNA, 541 bp, Aquilegia coerulea
  Intron number 1 from transcript AcoGoldSmith_v1.003237m (l ocus AcoGoldSmith_v1.003237m.g) derived from phytozome v7. 0 (chr-ID scaffold_3; pos 4451792 to 4452332)
ttgctggtgctgctcttgcttacacgcttggaaaggtaattaaccacctagaaattttcatgcctagattgtctgatttatcgattttgtggtgaattctcatgtttctgaggattttttttttttttttttttatctttgaagaagaaaattatgaattggtagatactattgaatccaatatgatttgacacatgtaattgtgtatggtcagctgatcgcaatctagatttcagtttctgaaatttaatgtccttgatcaaactgtgagtaaaaactttgcgttttgtggtatttgaaacttcatagtggtcattgcctctattcaaattaagtttggtagtaatttgagatttttattcataattgtagtttttctccctttttgttgtgaataggagctggatgtagtgatctttgtggattaagtttgtcttagtcatcatcatggaaatttctgcttatacgtatttgtgaaaatgtttagttacatattcaaataatttcaactgtgatcttatactatgctattgctttcagg

SEQ ID NO: 109175 - DNA, 767 bp, Aquilegia coerulea
  Intron number 1 from transcript AcoGoldSmith_v1.002601m (l ocus AcoGoldSmith_v1.002501m.g) derived from phytozome v7. 0 (chr-ID scaffold_32; pos 2619567 to 2620333)
tctctctctctctctctctatctatctatactagtgtgagcatcaatcaatcaatgttgataatgatcttaaaatcttttttcatctctttttctttctgctttttgcattcaattcaatgctggtttatatttgccataagtagtagagatcacaaagttattttttgtttttcttctttagttcaaatgtgagttttcttgaacagttagactgatagttaaacagacttcatgaatggtcaaaacaattagctagttagggttacttacttacttagttcaagagttctgaaatcttgctagtagtaacataacattgatgttgttcagtaaaactaagtgatttctggatcttgatttggaatcttttgttttaatttttggttattccatgatttgtttgatttgaagaattaagacttgctttacttgttccaaaactagaaacatttccgtaaatttgcagacattttgtttaatttgaagacgagctgggttgagaagtgtttttgtttgaattattatttttgtgaatatattagaacaaattagtatactagaagatcagcttaaatttgtacagctattagattgtgacaattgatatacccctttttctttttatttatttatattcataaattgagtgataacggcaggtgtgtgtatgtttcttagtttttatgatttcctttttcttcctatacagtatttccatgtatcttctaaacctgaagtacaatgcaggtccattacaaagaacta

SEQ ID NO: 109176 - DNA, 947 bp, Aquilegia coerulea
  Intron number 2 from transcript AcoGoldSmith_v1.002245m (l ocus AcoGoldSmith_v1.002245m.g) derived from phytozome v7. 0 (chr-ID scaffold_2; pos 5521009 to 5521955 reverse stran d)
ggggtctacactcctcttgtaagatacccattttcaagcttcaaattttgaatgttttgttttaagatttctgtttgaggttctacttgcttattgctatttttttgagtttgcgtttttcaagtttatacctgatttttgtttatttgaagtaacaattggtttgggatgattgcaattgattaatttataaatgagaagtaatctattattctggatttggatatgtgtaacatggatgtagagcaattaggctagtaatagtgcaaacttaagggggcttttggggtttctgtagagtattctactaaaattctgaagctgaacttcagaaagcactggaaaagaaatgagggaagtggttccagatgagacattgttagaatgtggaataagtaacaaacacaggatgcagccaacttgaggtggtcctttgtatgtcacttataaccattgtggattttattaatactcctaggaagaggaggaagtggaaaattgctgaaatgtagaatgtaatttaactgttggaaaagaaaaaccaaattaatgtttgatatggaatcacgacattgagcgatgaaactaagcacctggttagtataaggttgcaacgaactgaattttggcttgcagtattagtgtttttaatcttgcaagaaatttgtgttgtctttgatgttacgtcatgtactttgtgtgttaatgatatttcaacaaaacaaaagtgactatatttcagtatatgtttttgtaagcatcacatatgttgtataaaaaatgttggagcttaatcatctgaaaatttcactaacctaaatgagtcacggtgaagatgcataattgcatataatttactcgaaatattattctcatcgtaaaattgtggtgataagttttctttcttgtcagattacgtgtgtcttctgcctctacgtttggtgtgc

SEQ ID NO: 109177 - DNA, 642 bp, Aquilegia coerulea
  Intron number 1 from transcript AcoGoldSmith_v1.005227m (l ocus AcoGoldSmith_v1.005227m.g) derived from phytozome v7. 0 (chr-ID scaffold_34; pos 697784 to 698425)
tgtaagtttcatctctaatctcttgatcaattttgatttcttataatttgaaattctatcaaaaacatcaataaaaatggtttataaatatttaatctgcaatcgattgtattattttgttgatctacttattaatgttatggatttcaatgtgaaagagaattgaaataattgatttcaaacattttgaattgttaaagaaactcttatgcattttatctttcttcttgatgaatgaacagattatataggtgaacggtttgattttatgaaaatgtttctcttagaatcagattggacaaattgtctatgtgtatcattctgaaagtgaaatccatgctcttttgatgttgaattgtttgctcttgatcttatgtagctcaatgttgataaaaattgaaataatcgattatggaaaaggaaataagagaggaaagaaacattaatctgaattttaaccacaagaaataattaagtgaaagttcatggaatgatcaaagaaagtatatgtctgaagaatatttttgtcattgtaatagatttctggtatatattcatagtgaagatgccagttttatcaaatgttcactgagtttctgttcttatctacagctcaattgccccagttattgataactgggc

SEQ ID NO: 109178 - DNA, 821 bp, Aquilegia coerulea
  Intron number 1 from transcript AcoGoldSmith_v1.009620m (l ocus AcoGoldSmith_v1.009147m.g) derived from phytozome v7. 0 (chr-ID scaffold_13; pos 5375628 to 5376448)
attgtccaaaaacaaatcttctgaagagggttagttttcttattctttcttcttgtttttgtttaaagtttgaatctttttgttttaaagtgtgaattacttgatgggtttttttttgtttttttttttgatttttaatattgatttttatgatatttgcaaagtagaactagaaatttaattatatgtaaagtatagcaattgttttgatactgttaagtagttttcaaaagggtttttaatcgggttaggattaaatgtttagtcagtaacataatattaccagtgttctagttgttaacttgttactgtagtatggtggaaatgtggaatgtttgcctcagtcaaaccttgaattggtctcaagcttttgtcaattagacagttgaagccttggtgaagactttcacaagtcgtaactcaaaaatcaaattttagtaattagtttttgcattgtgtcaagtttaaccagtagctttgatcttagtggactaaaaaggtttccattgaactgttgccaagttcaatattttatatatttacatgcgcatacggtgttgtgtgatgtattatattctatggatttacagcaaagacttgggcagaatgtctgcacccgagctcttttccagaatgcaccaaaacctattgtagaactgttaggtcacgtaactatcccagatattgcatctacgtcattatcttttaacgtgcaccaagaagttagtgtgcctgataattattttgaacaaaatggcttctttattttctaaaagggctgattttttttattttttatcttttttccacactaatttcag

SEQ ID NO: 109179 - DNA, 789 bp, Aquilegia coerulea
  Intron number 1 from transcript AcoGoldSmith_v1.006786m (l ocus AcoGoldSmith_v1.006786m.g) derived from phytozome v7. 0 (chr-ID scaffold_13; pos 4844870 to 4845658 reverse stra nd)
taaaccagtaagtggattttcttccttatattgaagcttctaatgtgttctaaagattgtggttttagattctatgggtttatattgatttcatctctgataattagtttgggtttatttttttttaattgcaaagaagacatttttatcaatttgaaattacgagattaaacactggaggtttgaatacagggttgttagctctgaatatagaaatcccagtaaactttttgttgtttgattacacaaggaaataatttagggacgaaaatatcatgatttaattgataattttttttttatatagacaaagaaagggtatgaaaattttcaccactttcatattatttttcttttatcatgaagattaattacttaaaagtggaacttttgctaaaaaatttacttgatacacacacctgctgatttaaattacaagtttcgcgtcgttctttgtagttgtgtaaatcgcaaatgtggttaattggtattgttattttgagtttatttgtcataattgacttttttgcattatcagtttattcctatgaatgattttcagtttgttgtctcttgtggattgtttatttgagattttgctattgatccaattaatgatctcgagtggtttgtatgattaaatcttattagtttgtttgctgatgatatatttctaagttcattatagtgtttgcagaccctagttctaagttgttttcttatactttgtttagtaggtttgcaatcgttcctcaacgcattcacaacactgtaggctcttgtgtgtat

SEQ ID NO: 109180 - DNA, 748 bp, Aquilegia coerulea
  Intron number 5 from transcript AcoGoldSmith_v1.007057m (l ocus AcoGoldSmith_v1.007057m.g) derived from phytozome v7. 0 (chr-ID scaffold_2; pos 8115084 to 8115831)
ggctggtgacaaaagtattctaagaagagtcttcggtatctttcttactcttgcatctattgaccattgcacaatattttggtgcttatacacatctctaaaatttgttcaataaacgcaactcatagacacaaatcactttggatcatccagtgattggcccaccacagctacattttattctgtttcaattattaagcagattcttacgtattagtcaaactgttagatatttccaaaaaaggtgtcaaaattttgcttttctttcctcattatcaacacaataatattgattttagacaattcaaaattatcaaaaaagaaattatccatgctgagtttagcactgcatataggagtcaacataaagtatacatgtccattttttcgagcatatctatttacccctttgactgattgagtctagaattggaacctattgctcaacctcactgaatctgacagtctatgtagatatttgaccctatatgcatgcctatgcaactcaaggagtgattgaccattacttgtttttgtactgaagaaaatctctttttggtctgcaacctgaagtagcatacatatccttgcattttagatatttctcaaatagtttaggtcttaaagtattttggtgtaaagtttccatctcagtatgtgcgctttcaacataatacggtactgccatctcataaacattttgtgttcaacaggacggagcaggcgatttcaaccacaaaaacctgca

SEQ ID NO: 109181 - DNA, 770 bp, Aquilegia coerulea
  Intron number 2 from transcript AcoGoldSmith_v1.003287m (l ocus AcoGoldSmith_v1.003286m.g) derived from phytozome v7. 0 (chr-ID scaffold_22; pos 984123 to 984892 reverse strand )
ttctgtatctgttcctattccagaagaatctcaaggtacaaatcatatatgatcttgaaaatgttgatggtgttaatatatttagtttgtattagtactagtgttttaagtgttatcattcctattattattagcattgtgtttggttagaatgagatatatcttttttgaattactgcaaatagttactactttttattgtcgtggggattgttggtaattggtataatcttcttccgtatagtttcagatttttgtttttatttatgcacaatcattttttctcatagcttgttttttatggggttgtggaaatattatcattcaaaagtatcaaattctgaaacagttcatctattacacacacacccaaaaaagaaaaggaattatgatttttaacgaaagtataccatcaattgaacacatatatacatattaatggcgattgatgggaaaattttgctcaagactatgaaaacttatcacgaaagcaaagcttaggaagaaaaagaatgacatggctcaatctttcttcttttccgtaaagtgtaatattatcggaatatgaaggactagatgagtttgtgaggtgaaaatgataaagctcactgtgtaccaactcctgatatcaacaagaacttcaaatatatttttgtttgctataataaaattttgcatgatataaacaaatggtaatgcttttttattaatgtaactgcatacactgatcggcaggtaataagaaaggttttgtagatcctagtctcaag

SEQ ID NO: 109182 - DNA, 321 bp, Aquilegia coerulea
  Intron number 1 from transcript AcoGoldSmith_v1.003287m (l ocus AcoGoldSmith_v1.003286m.g) derived from phytozome v7. 0 (chr-ID scaffold_22; pos 985083 to 985403 reverse strand )
tacggctgctacttctttctcctgctgctgctactgtaagttctaaattctaattttcttcatcatttttttccatttgtgagatttttttattatcaacatgaacaatttcaatacttcatttgggaattttgggtaatttttattaatcaaaatagttaaaaatgagattttaagaagttttattacaaccccaaatcagttttcatttgttttatagtttcatttttttaaagttttgatttttattgttttttgaatttttgaactatttgacattttacaggaaagcttttataagtgcaaaataagtaaaaaaaa

SEQ ID NO: 109183 - DNA, 980 bp, Aquilegia coerulea
  Intron number 1 from transcript AcoGoldSmith_v1.008761m (l ocus AcoGoldSmith_v1.008691m.g) derived from phytozome v7. 0 (chr-ID scaffold_13; pos 1656029 to 1657008)
tcctctttttttggcagaaatcaattcaattgtcggtaattgatcttcaaaatctctaattctgaatattttttatgttctctttctttcatgaattgaattattgattgctatgatctgaagttttgcgatttgaatctttctgatttgtgtagttttgattaagttttagatctggttatacgaataaactattttagtatgatttgtttgatgttttagttatagagtttacaagttgtttataattactttgcaatttgatcatatgatgaagatcggttctgttttgtggttgaatttctttatgaacatctgatttgactttgtgattagtatttggtgatttagattatatgttcatgaatgatttcttcgttgctgaatgatatgatgttatgttgtggaatcggtttattgatatgttattaggtgttgctgtgccaattgtttcaattgtttaagctcattttgttagaaagattatttttactgactggatggactggcttgcggtgattgttgattgctttgtcttgttatcactactttgatgttagtaagctgcatgaatattaagatgcatgttgccggagaaatatcttgattaaggacaaacttttttatttttggaatgctaaagccgaacataaagaatccatccccaacacataaactagttttgagtagtatgttcactattagtatttaactattaaattactgtaaaaaatagcttgttggcattgttggagtaggcttaacgattctgcaacatttgctatttgggatttgatcatattttagttgtacttccatgcaaaaccacccttattttttttattaatgtttagttcttgttctgatttactctgaccaagaggatctctgatctttgagctctagatttttgtggtaaagttgactctggaactgatgataaggagtttatcatatgtagggaacactagggtttgaaa

SEQ ID NO: 109184 - DNA, 671 bp, Aquilegia coerulea
  Intron number 1 from transcript AcoGoldSmith_v1.024594m (l ocus AcoGoldSmith_v1.024594m.g) derived from phytozome v7. 0 (chr-ID scaffold_26; pos 1241714 to 1242384 reverse stra nd)
atactgctgttagtattgatcaggatctcagtcgggtatgtttcgatatcctttttatggaaaaattgagcttctgaaatttttagaaatattaatgaagtagtaaaggtggaaagagttactatgcttacaaccaatctgtatatttatcttaagagcttttacagacctgaagagataattataaacttcaaagaatggtaaaactggtactgtactttacaattcagttttctctttgcttaatgtgtttttagagtattttccagttcttacattcaaacaaagccacatggcataatttgccacttgatatttatctgaaccctctcaccaccactattagtttcttcgtatcattcaatgtctcgcatcacatctcggtaaacatggtggcaacatgcatgtacctacatgatggatcagttttagctcgaactatatgaggaggccttctacatgtgtgaaaatatttacaaaatagaagaaccatatggtttgtactattattttgtttgatacttagtctcttggggtgtaataatgtcttccaagtagagctagatggctttgtgattgtacataatttgtatttgtaactttcttgtgcttgcaattgaaaagataggttcttgtttcagggcgaaaagcttttgggaagtcttggtggt

SEQ ID NO: 109185 - DNA, 665 bp, Aquilegia coerulea
  Intron number 1 from transcript AcoGoldSmith_v1.017026m (l ocus AcoGoldSmith_v1.017026m.g) derived from phytozome v7. 0 (chr-ID scaffold_58; pos 366237 to 366901 reverse strand )
aggtacgcttgaaaatcataattatttgacgctatagagtagcagatatctaatggccactcaaagaggtgataatgaagttaaacaacatgagtgtaggtctctagcccaataacttagattcattgcattcacttggccatcactagcaattcttgatagatacacaatggcctcaaattctgtagcaggggtaacttctcagttgattcaaacattatagtaagaaatcttcattgcattatttttaagcatcaaagagttgcaatgagatggtacgtgtgacgacatctatagctggtgtagcactttgaataattcaaatacgggttaagactgttctatgatatacaattatctcatcaaaacactataggatttatgactaaaactttctcacttcctttgatacttccatacctgtatatgactttcaagtataataaccccaggatggtttgttaagaagaagctatgatgtgtagcttgaaaaacatgatgttcgagtcataggctccctgtatttgtagattgggtgtcgaattcaatgaggccaactcttagtttaaaaatgtataggccggtaagaggtcaaacatataaagaattatgatatttgtttagactaattatttctgatattggatgcactatccttttgcagg

SEQ ID NO: 109186 - DNA, 445 bp, Aquilegia coerulea
  Intron number 1 from transcript AcoGoldSmith_v1.007756m (l ocus AcoGoldSmith_v1.007756m.g) derived from phytozome v7. 0 (chr-ID scaffold_61; pos 37621 to 38065 reverse strand)
taatctgaaaatttcacttctttaaggtaccctttcattctagatgtgatcatttcttgatatctgtatttttttttcaatttttttggattttttctttttttttttttgattaatggttgaacatgcaatcagttttcttgaatctagatcaacccatttacttttattgagattttctgtttgggatttttattttatttggttttggtggtaattttttattaatatatttgttcaattgaatcaagaatgagtttttttttttttttttttgtttggttgatgttttggtttagttttgaatcttaatctgtatggtttagttttgaatcttaatctgtaattacaatctgttagaagacatgggtattacttgttttgatgtttttgtttgattgttctttcaggttgatttgatctggtaaaacttctttcagaagca

SEQ ID NO: 109187 - DNA, 770 bp, Aquilegia coerulea
  Intron number 1 from transcript AcoGoldSmith_v1.023277m (l ocus AcoGoldSmith_v1.023277m.g) derived from phytozome v7. 0 (chr-ID scaffold_2; pos 6745386 to 6746155)
gaggttagtgatcacactatactatttatataatttctctctctcctttctctccacaatattcttctatagtgtgtctataaatgaatttttagaagtttttagttctgtttatgttagttatgtacttgtggtttgtttcaacttttcacagtactactatatttatttacaaacatttcaattaaagtacccctgtaatcaagtttgaaacatgattcagaatggatcaaaaggttttttgttagttcatatagcagacatgatgattcatatgataatgatggaagatgaaaagaacatatttagttataaaccactccttacttctctctacctagctctctttgtctttctttctctctctcatatttaagaaattgcattgagggactcaaagaattgaatgtgggaattgagacagcacaagaattgaatgtgaagaaaacaactcaaagcagtactcatttatgaagctacagccaatttcccagttgtgcacaacctatatagactatagtgtagtttttcagtttttctcagcctcagttttaatgttattcattagaaaagttcaatatatatcagtactactgcctggaatttcaagtttatatatgcacaactatgttaattaacaaagaataaaaatggacccaccatatgaaatttaagcttgtttccctaatcattttaaggtcatagtaagtggagtactaagttttagataaaaaaatgtgtaacagggcctggttgttcatcaattgcat

SEQ ID NO: 109188 - DNA, 753 bp, Aquilegia coerulea
  Intron number 1 from transcript AcoGoldSmith_v1.010252m (l ocus AcoGoldSmith_v1.010252m.g) derived from phytozome v7. 0 (chr-ID scaffold_19; pos 1089088 to 1089840)
ggtcgaatcatcatcttcttcttcagattcaaaaggtaaattttattcgttaagcttatgtgtttctaataaagttggttaatttgctgttcatccaggaaaataattacccccatctgcgtatttgcaaacattccaaaggaaaccctgttccattgtttgtaaaatattttaaatagaaaactagttaatattatgtaggattgaaattgatatattttgatacatgtacagcctttgattcagctaagtaggaaaaagggatttgttttgttgataccaaagaactctgtcttgtcttgatgattaccatgtttgattctctctcacttttagatcttgtgcattgttctattgtagtttactagttttgttggttaagtatgttatatagatttgttaatgtttgtggggaccccttacttgtaccaattgtaagtgtggatgataattctgtgttgttaccaaaaacagatagtacgtacattgcaatgctttcgttaaccctataggatggaacattggaacatttttatttgtaaacccatgtctttatttcttattaataattgaattcaattgagtttctatttaatttaaatagatttgtaatagtttgatttcttctgtgaattggatgctcaccaagtgcttcagtttatctattcaatttgcttcacttcttctttatgatgtgtgatgcattattgtgttacagggttttgaagaattgctcaaaataaataactacaa

SEQ ID NO: 109189 - DNA, 861 bp, Aquilegia coerulea
  Intron number 3 from transcript AcoGoldSmith_v1.024626m (l ocus AcoGoldSmith_v1.024626m.g) derived from phytozome v7. 0 (chr-ID scaffold_3; pos 3575382 to 3576242 reverse stran d)
ggctttactggtcccaggtaatgttatcatccatcttctgagattggataggtgtattaagaatttttaatgacagatagaacttgaaatatggaatatattctcttgttttggtcacacacacacacagaaaattcaggtgatttttgcttgggtgtaacaatttgattttactgtattaacataaaaaaatttcaattgagcaattttaaatatttgtggcttcgtatactaactaacttttttaaacaaaccccatgtgctaaatgttttacatttgcgtatcagttgagacttgagaatatttagttggataataagattctaaaggactttttttattagttaaattgaattgactttgaacattttgtttaatttttaaccaagaactgtgttaaagtagtttgaagtctgaacccttgttctagagggtttagaaactttccgataagtgagatatgaactggtgaagatgttaataacatcattggttgtttacattcaaatttcttccgtttatgatagtaaactagtattgctcttaggttttctgaaaaaactaaaaagtataggaactttgatcctgtttaattagcttttccattcattataaatctctatttaaggaaataaagactatacgttttcttgataatgtgtgttgttaagtgttattgactactgatatattcgctgcagtagatgtttttagaattctcattttgttatcgtatcaatttcgattaatatgtatactctcagtctcccacgttccattgtgattctatttgctgcttgcatactttcttaggtgcatatttcttgtatgaaaccccaggtctctcattgaagttcgta

SEQ ID NO: 109190 - DNA, 516 bp, Aquilegia coerulea
  Intron number 4 from transcript AcoGoldSmith_v1.010263m (l ocus AcoGoldSmith_v1.010263m.g) derived from phytozome v7. 0 (chr-ID scaffold_8; pos 4136168 to 4136683 reverse stran d)
ctgaaaagatgtaagtgtttttcttagctcattactacattttcgatagactgaattgttttaataaagcatggatttctttttaagaagcattctttttttgtagtttatcgtgaattttctactgaaatagtggaattttaattatttaccatctaaatgcttggagtttgctggggttcagttttattcttcttaatagttgaaagcatttggaaagatcttttcaccttgaagtggaataatctcattctctaaaattttaattgtttaaatatggtagcatatatgtttttgtcaagtgagagtcgaaattgaaaaaataaaaaataactgtttttgttgaagacattggggagaagacgtgtaaaacacattttagtgattaatatttgtttgctagatttatatatggatatttgttagatctttccttgtctgatatatgattgtttgattgtatcgtgtttcttcatggcagtcataagggaagaataattgagaagaatccaaaaa

SEQ ID NO: 109191 - DNA, 679 bp, Aquilegia coerulea
  Intron number 3 from transcript AcoGoldSmith_v1.002930m (l ocus AcoGoldSmith_v1.002930m.g) derived from phytozome v7. 0 (chr-ID scaffold_56; pos 142611 to 143289 reverse strand )
gtggattttcaggtaaatatcaaattatctggaatagacttgcacgttgctatctttcacatgttatatcctaattcatttctatgactcaaaggaaagacttgataaatgagtacaaaatatatgtaatttgagcaattgaagaaaattcttgctggttatgaacttttttaaaagcgagagggtggttgtttaaaattgaatgattcctattgttgtatcccaataagaaaatatacctcctagatttcgagttgcatcccattaagcatgttctcatgagctttctaatggcagtaccaaactcattggagttgagaagagatataagaaaacacagtcacagattttatagaatagtttgaataggtgtaatccaattatgggctacatttcaaatatccatcacaggttggtcagcacaaggagtcgcaaatggaagaatgtgtcaaatgcaagttctctctgtttcgtgtcttaagctttgtcaacccaacccctgcgtgtctcttcaaatattttaattccttatcacttcaaagttcaaacgactaatagaaattgcatcttttgagctagtgttgtgtacaattatgtttatatacgtgtcccttttctcatatattccagtatcactctcataaaatatctttgtcttgtgcagacttacctcctgaga

SEQ ID NO: 109192 - DNA, 756 bp, Aquilegia coerulea
  Intron number 1 from transcript AcoGoldSmith_v1.001270m (l ocus AcoGoldSmith_v1.001270m.g) derived from phytozome v7. 0 (chr-ID scaffold_7; pos 4419712 to 4420467 reverse stran d)
atttgctggattatagaaacatcactcctcgctatgtaattctaccatttctaatttcttactagaagttttgttttctttttttattcaattggattatgttttctttcgattctgattaggtattcaaacataacttgatcatatgttagaaaaattcaattattatgttgtttaggttgtaattagagtgttaattgaagaattattactagtataagttagaattgaagcaaaagtgcatagaaattgatagaaaaaaccacaagaagagttataacttcaaacagaaactcaacctacttttaaagtttctatgatgttgaacttcagaaaagactagttaaggagttaacttccgattgttctgtccagtgaagaaagtataccttaggatgaatatatggatatacaatcaagagtattagttcaataagatgaaatgactataaaaaatgctaaactgtcatcatttgaattttatgatattttgataatgaaggatgagatgagtagcttgattaatataattgcctgtctccaaatgataaaaatagtacagaatagctaattgatggagtatgagaagcgaccttcataaaaattgcttatatttaattttgaactgtgtgaattgtaggggtggttacttgcttgttcaagcttaaagctatttgcttctttgttttgtgtaagagtacctgaactatcacttttatgaatgtttattttcaggaatataatcaaggattgcaa

SEQ ID NO: 109193 - DNA, 690 bp, Aquilegia coerulea
  Intron number 1 from transcript AcoGoldSmith_v1.002618m (l ocus AcoGoldSmith_v1.002618m.g) derived from phytozome v7. 0 (chr-ID scaffold_2; pos 9702529 to 9703218 reverse stran d)
aagtaagattgctattagaaggtagattcgtcgaggtgtgtagattcttccaatcccctcactttgtttgcttttattgcaatttttttttttttttttattgaaattcacttattataaattgttaacaatcttcaactcatgggaagaaataagaatatgcttgttggttaggttaaggttagggttagggttagggttagggttagggttggggttgtcataagaaatactccatatattgttatatagcatagggaactatgaagccctttatgtttttagaccaggtgttagcaattacagtattgcagtttagactacttagaatatatgtgagtggggattttcaattttgagtatctggatgattggaagaaaggggttgtcacaagtgagggtatgattgaatattttttatttgctttatacctaatatatcaatatctaatgggggctgtagcttcccctactcgtatatcgcctggctcctccctgcatatttcgatggtctagttactattaatttttaatcaaatttcactcatttgactatcatttctcccttttagaagaaaaatctagtaatttttttcttaaatggattgagttcctaagtgatactatattttccaaggaggaaatttggataacaacacatttacatttattttggttgggtcttttaga

SEQ ID NO: 109194 - DNA, 484 bp, Aquilegia coerulea
  Intron number 1 from transcript AcoGoldSmith_v1.023433m (l ocus AcoGoldSmith_v1.023433m.g) derived from phytozome v7. 0 (chr-ID scaffold_8; pos 4513636 to 4514119)
acattcacgttcggcaatctgctttcgcttggaaggtttgttttcagctttttaataatactctcttcgacacatctagtttaatgggctcttcgtttctccgtgtcctacttaatgaagggtgcttgaggctttctttgccaatcatctctatctgaatagtattggcaatctaatcattcaaattatggtcattttttttttgttgttgtttgtttgttttgttttgagttttaaatataatggaacttggctcccaggctgcatgttatctgctttttcagttcaatgtatcaataaatcattctactttttgatttattcatttgtttgattgaaaatcttatataggaagccttccccagtatgctgaattattatgttctgtctttttgatttcattttgtcgtgtttttcagatgctaaagttggagtcttttgtatggcagcacagccttcctaataggcccaaaacggcaagtga

SEQ ID NO: 109195 - DNA, 640 bp, Aquilegia coerulea
  Intron number 2 from transcript AcoGoldSmith_v1.023674m (l ocus AcoGoldSmith_v1.023674m.g) derived from phytozome v7. 0 (chr-ID scaffold_26; pos 495698 to 496337 reverse strand )
ggatcaccaaagaacttggactttctttggcagaggtttgtctcgaatccccgttcattactatttataactactactaccactttagtttgttagtcaagcgatatgtaactagaagaaatttataaatatgacagatttgtttgactaaattcatttacgaatcaaaaaggaaattaatattcatttcagtactgaaacttgtctgtgtatgtcagtgtttgtgaacaccactgactagttgagtcatgaatggtgcatataatgttccataagctatatgatctgtttcatatatatcggctttattctatgttttagtagcaaataactctgcgcacgccaaatgcccacaatactgcagtcaaattatgatagagatctttgattaagtttcttttctctattttgttatttcttctgcattttctggtgacaaatgtgggcaccagatacacattcatattgaacccccccccctgctataccgtacccttgattcttttgttttaatatggtttcatcaatacagtatatatagtgcaatcccctttactgagctgtattgtatgtttgaactttcctcatttattaattttctgcagtactcactttttggctcaatattgacaattggagc

SEQ ID NO: 109196 - DNA, 653 bp, Aquilegia coerulea
  Intron number 1 from transcript AcoGoldSmith_v1.012036m (l ocus AcoGoldSmith_v1.012036m.g) derived from phytozome v7. 0 (chr-ID scaffold_3; pos 9805046 to 9805698 reverse stran d)
acaatattggtgtttcaattcataattttcttttggtacatacactactgtattaatgaaatatattctatacctccacacataccctagcttggttgacgttctaattaaaatttctttcaaattttgttgtaggtggagttataactatgcaccattttttgatcaagttcattaaaaaagacaagatggtgtcgacaaatcaatattgtacattccattaccaaattttcatcttcttacaccttggcggatttaagttcagtttccaattgaggatcatgcttggaattttttgtaccagccttataaatcttgcaatgagttgcaaggggcatttgtttggtttctaaagcactatggtttggaaacaatgcctctcttatatttcctgccattactggaggagtggaggtgtcactcttgtcgccaccatctttgtgagcacttttgtggacaagatgaggaggaaacatctgttcgtagcgggtggtgttgatgtctatatgccaggtaacaacttttaacgcgatcatcaaattatgactaataatagaatctgcacggggaccctaacactaacagagtactgtctatttgtttattatgaagattgctgctcatatgataggaactaacgtggggaaagatat

SEQ ID NO: 109197 - DNA, 897 bp, Aquilegia coerulea
  Intron number 2 from transcript AcoGoldSmith_v1.006530m (l ocus AcoGoldSmith_v1.006503m.g) derived from phytozome v7. 0 (chr-ID scaffold_13; pos 208902 to 209798)
ctcagaagcttggtatgtttcacactactgtatttgccttcatatataacttgccttttactttgttcaacttaaaactcatgtttcttgtcttattttgtgtttgattgaaattgatgaatgctctcttcaaggaaggaaataaggttctgttggttggactatccattaatgatcatttgtctaaaatagttgaatgacctcctcttgagaattttttttttgcactattagatttcatttggtgttgtgaatgattgatctcctttgtctagctagcctgtgctaagatgatttatagttgttttcttcaatctcaatggactactttattctcttaagaatcacatctgtattgaaaaaagggactaatttattctttaatggtcacatatttttgctaatggtattcttcactctaaagttgcatacatacttatcgaaaacataaagcatgtgatgaagatttatcgaaaacttatgtactcataacgaaatttggactttcctaaccctaatatattgtgtcattatgacgtgccacattttggaattggtgcaatggtgctcatgtccaagttgtcattttgatcaacagaactttaggtatactgaattgatactaattagttttagacttctagttaattcatgtctgaatatatgaaaattgctctgtgccttatgttttgtttgtctgttgaattcaaacaaagttgcattcagtaatgattacatttttacatctactgttgcctaccacgctatacatgagttaggattctttgtatgctattagattatacagggttaggatttttggtgattggataggcctgataacatcttgttactttggcagtggctgctgtattcagtttggcttataagcttcaa

SEQ ID NO: 109198 - DNA, 1030 bp, Aquilegia coerulea
  Intron number 1 from transcript AcoGoldSmith_v1.000758m (l ocus AcoGoldSmith_v1.000681m.g) derived from phytozome v7. 0 (chr-ID scaffold_16; pos 1635526 to 1636555 reverse stra nd)
tctctttgcattcttcttgtctcagagagaataaggtataaaaatccatcactaatatgataaaaatttgaattcaccaattaactctgacagaattttgatgattggactaattgtttgctgtttgctactctggacaattttgacataatttagaagatcaagaacaaacatggagctttcgaacagcttgaaccaaccaccattagaattttgtgataattagttttaaattattaattatttgtggatacagatatcataggaattgggaaatgtttaatgtttttagtgaaaagatttggaatctggatttaaagtaacgttgtcaaatgaatttgatttttatggttgaagttaatgaattttaatctaaatgatgttttttttcccgtaaaattaaacacataaagatgtacttgtatgagactagtatatgccattagaagggctgagaacattttgagacaatggtttttgccgagggtctaagtttaaactgcagcgtgtacaagtagtattagcttttgtatgcaacttcatagtcttggattatttcatcccactttttttgggcatattgctacgttatatgtaagccagaccgtggtagagtgtgtgtttgtaccaccagtgatctgtaaattttgacacatgtagatgtacttatatgagactagtatatgtcattagaagggctgagaaaatttcgagacaatagtttttgccgatggtttaagtttaaactgcagtgtgtataagtatctttaatgttggattacttcatcccattttttcgggcatattgttacgttatatggaagccagaccatgatagagtgttgtttatagcatcagtcaattgtagctttctcttgttttttttttaattggtgttttgttactttggttgcttaattaaactgactgttcctgtaagatcattttgggtattttttgttactttgaatacatgcacaccttttcaaatgttgaatgtttcttttcttacttcttacagactgcggtg

SEQ ID NO: 109199 - DNA, 775 bp, Aquilegia coerulea
  Intron number 1 from transcript AcoGoldSmith_v1.008774m (l ocus AcoGoldSmith_v1.008774m.g) derived from phytozome v7. 0 (chr-ID scaffold_34; pos 1647317 to 1648091)
ccactactcttcttcaggtaatttgatctatatcgaaatacccttgtttttgtttgctttgattgaagggttttagctttagttttgatttgatttgatttgggtttatttgcatgttcgaatcgggtaaatcgttaatgattaagtttatggtgttatggggtggtgcaatttcgttaatgatattaacaatcagataaaagtgcacagaagattgttagggtattacctgcatcagaaggtagatcaatttccgaggcagaatattgggtgggttggatgaagaaaaatgcaaacagaagggtcttatccagattttgctatacaaaattgtgtgaaatgagatcagttaaaacataagtcccagtaatataaatggtttgatagataatgtacagtgtggaatacaaacattaaggcataatatgggtatacttgttatctcgagattgctttcatgaatgaatttgaattgcttcctgacacactttatttccacgtttatgtaatttttacttgtcaaacttcaaaatattttgttggtggaaattttgatggaattatcaattatgatatcacaaacgtatgaaagcttcaataagatgattgctaataagatgattgcttgtgacagtagccactagcctttgtgttattggtcaaggtctcaaaatagtcggctaccacaaattattgtggaccagattcgttaaattaatttgtaaggttcttttttttaggagaaacgtgtgggagagattgtcttgaaggcaat

SEQ ID NO: 109200 - DNA, 831 bp, Aquilegia coerulea
  Intron number 1 from transcript AcoGoldSmith_v1.005912m (l ocus AcoGoldSmith_v1.005912m.g) derived from phytozome v7. 0 (chr-ID scaffold_13; pos 4134333 to 4135163)
agctcttggattgctttaagaagtaagtttttttttttttttttttttttttttctcttgcattttaatgggtttaattgatataatgtttgtgtttaaatatgatagattgtatagttggggacttgggggtataagtttgagtaacaggtgtttgtgaatattcctgtaaggttggttgatatattttttttgggttgatatattttttttgtgttaaatagcagtatgcaattgtgaaactcggttttatgaggcatgttttgcttctatttgtttcatttatatatctaggacataattgtcaagcttcctgtgttcatttatttgattcattttgtgctgagaagtgataacttgtttttgttagcacatttgacgttgactggtgggttgattgatgattatatccacatgaaatgcaaacttttgccatacagaatacttgcattatgctctggactgcactacattcgttataagaaacaacaaactgttaattttaatggtgtcatattctgcctttggagaggatatattgaactcctagtcttcttaaaactctgtctcctgattagtagtaactagtaagtaggactgttgaaatgctcaaacatcaacaatctaacctgccaaacttatgatgcacgttgataagcctgattagtagcatatctggccttaaatgtcgtgttctgaaaaggattaactttgtctttgtaccccagagcttttatcattaggaatccaatctggttgaatcattcatttttatggtgttggttttgttctgcagatatcgtctgagatcaaaagttgagattgagaatt

SEQ ID NO: 109201 - DNA, 728 bp, Aquilegia coerulea
  Intron number 2 from transcript AcoGoldSmith_v1.018495m (l ocus AcoGoldSmith_v1.018495m.g) derived from phytozome v7. 0 (chr-ID scaffold_34; pos 2013428 to 2014155 reverse stra nd)
tgtttatacaccttcttttccagggtaaactacttcatccatttcatattatatattcttcttaagttcatacttaatactgtatttctttgtttgatcaaatttactgtgcctgattatgatatgtcaatatttattgctacgattcataagtcaattcaaagttctaatcagtccatatatactttattatagtcatcggtggccggttcagtaacatctttactagtaatatagtaatataggacaatgccgttttcctaaagttaatgatttgtttatgcttttgtaactcttgactttggatgattagtttgttcttttagaacttctgatctatattgcgacatctcttgcattatatatgcagcgaccttcatctgctcatgttgcaaaaaatttgtcccttggcatttcatatgattttgctttataattttaattgaaaaaaaaaaaaaaaaattatattagaaagagtagcaaaaacataaccatttgttcatccctttctgttaagacttgaatacaacctttcataatttatttatttgtttaactcttactgtgctcgtaggagctcatcagcattctagtcacattattatggaccaagagctacattgtgtccaccaatttttgtaaaatttatatttgttaaagttaatttgattactcagttcgtaatctcttgctgtagactgacgagaactcacacaacctagcttggg

SEQ ID NO: 109202 - DNA, 826 bp, Aquilegia coerulea
  Intron number 2 from transcript AcoGoldSmith_v1.010541m (l ocus AcoGoldSmith_v1.010535m.g) derived from phytozome v7. 0 (chr-ID scaffold_13; pos 3400255 to 3401080)
ttgttaaaactgaaaaagtaagaacctttactaacatcccatctatattcattttcaatttgaatttcaactacaattaattcaaaaataatctttttttgttctcagtgtattagtttaggcatttgattttatttcgaggaactatttttgagaattcttctctattattgttctggaaactgtagtgatttggggctttttggcattgaatgtacttaataggttcaagtctgtttgatgtcaatctagcattttgtattatatttttattttattttaatttacgtattcttattatttcgagagaggggtggctgacactgaagtttacaaagggatcattatgggtcgtaggctcgattgacattgcttacaattgaagttgttttcctaaaatccatcacttaaaccatgttgtgcggcactatttggctgcttcttctaaccaccttttggacatgtattatacttgtccagaattcatgaaaaagcaaaggattgcaagctctgtaagctacaatcctgaggaagaacagcttataaatttaatatggggctgagttatgagattttggctttaaaacataatttttctgcaatttgttttgctgaattagtcattataacctcttaactacaattacataatgttgttatcactataggcaaaagatgattattcattcctgttgtgtttgatgcatctttctttattgcccttttagtgttcactgaaattattatcatgataaatcctcatcatactatttaatcttcttaacttgatacacatatttatatgtgcagaaatcaaaccttaaag

SEQ ID NO: 109203 - DNA, 860 bp, Aquilegia coerulea
  Intron number 3 from transcript AcoGoldSmith_v1.011327m (l ocus AcoGoldSmith_v1.011327m.g) derived from phytozome v7. 0 (chr-ID scaffold_3; pos 8755821 to 8756680)
aagaatattcagaactgcagctcaaaatcttagaggtgtctgttcttttacagaattgatttagatattcgcttcaaatgaaattttaaaatgtgctccttgtgccttcttttgttcaatttactgctaagatgggatgaatcagtatgaatcggtctcgtcttccaacttattcaatttggtataggtttgttacaatcacagatctgtactgactatctgatataataaagcatctaatgtatgtttcattaagtgattaacagaatgaatttcaagacggtaaagataaattgcagacgagttaaaattaatctatgtaatgattattttgggctttgttgctgactggattattttttgagtcaatgtggagttgttattactgtaccaccaaaactttagtattgagcctagtggaacatcaacgagcctattcatcttggtaaccagaacgcaagaaataaatgactgtaatgaataattgagttatgtaatgatgtacctgaataaacccaattgaagttcatgcggtcatacagtcatacccatctcagaatcttcatttttaagcaaattgctttgtgggatctcatttttgcttgtatatttttatatatgacattgttcatgaaaaaattaaaagagaacaagtctcaattgaaatttagtgcacagattgaaaaggaagcctcaagtgaagtcgtaagtgacattgccttgttaccaatctaatattttccacatgccgatgttcataatccatttattttgtcaaatattgtcttcaatttgaactgagaataaaacaaaataaacatgtaggtgtgggtgctaagattccaaaaagctgcttgctt

SEQ ID NO: 109204 - DNA, 855 bp, Aquilegia coerulea
  Intron number 1 from transcript AcoGoldSmith_v1.022984m (l ocus AcoGoldSmith_v1.022984m.g) derived from phytozome v7. 0 (chr-ID scaffold_8; pos 6234298 to 6235152)
acggagcttgtagggctaactaacatagtttcatcccctttgcatttgacacatttggattgctaggctcaaaagcagttgagctcctcaggagagtgcagaagataatggataacaacgtgatgactgcgggttcgaatgaatatgtatttaggagaatcgggtttgctatccaaaaaggacttgccgcgcagtttgtagtgtgtttgtcctctttgtgtaattcgttgagcttatcaataaaatttagtttttataaaaaaaaaaaatcaaaatttttatttttttatatagccacgtggcaagatctgggggagagtattgttccgcactcttaaagagtgcggaacaaattcgcactcatgttgaatgatgtttttcctgacaataatactaatggaattcctcacactatcttaaagcgtcataatgatattgtatttcttttgtggaaaagtcaatacaaccaccaaaaaataaaaaaaaaaatggaaattcttatccaaagaccaaaagtaaaccacatttatattgagagacccatcgacaaatttttccacagacccatcaataaatttttccacatgatgtggatttctgcagcttcatagaaagtgtatattttactatatagtcacggcttcattgatcgaatttgttgtcttccatctcttatgctgtgtgctcacaattgtgtcaatggattcaagaagacagattttattcctttcttacatccttgcaactttttttatttgtctctccagtgcccagccactgccaaacttccaagcctattactgtaattttggttatacaggcaattacactagtaatagtgtgttccaaacaaat

SEQ ID NO: 109205 - DNA, 804 bp, Aquilegia coerulea
  Intron number 2 from transcript AcoGoldSmith_v1.008647m (l ocus AcoGoldSmith_v1.008647m.g) derived from phytozome v7. 0 (chr-ID scaffold_13; pos 5718042 to 5718845)
gccgttacgattactattggacctctgtcttcaaggtacaactatattcacatttccatctctttcattctttcttgagtttattacatttcttgattatatatacagtaatccataatttgtgtgtgtgtgttcttcatatagtagcttcacaaagacttaataactgctactacgcgtatacagaattacactttatcaattcccggatatactcaacacaactctagggaaattatcttagttattgtggttatatcatagtgtgttaaaacatactttagatacagtggtgttgtcttatatcgtatttcatatggtagcatacaatgactgacttattttgatggtgggagctggaaacctataaatacagtaacgaatagtgtttaaactaattaatttgatatactgtaagggctaatgtaaaaggagactcctcctctaaggctttttctttaattgaggaatgataaaactgttatgatccaggggaactgtatttgcagactataaaacaatcccttctggtttcaccttcttctctctttggtctattatatgttttgtgttttgttccaattttagtaaaaagaactcaacagatataaaaattcaactacattattctatctttgtctatctttttgttttttgacatattagctgcaccaatatactcagaaatatgttgtataagccatatttagggcttcggttttaggaaaaactattccatcctaaattgatgttactatgattgcattaggtagaataccgagaacattcttctgatctaacacg

SEQ ID NO: 109206 - DNA, 644 bp, Aquilegia coerulea
  Intron number 3 from transcript AcoGoldSmith_v1.003102m (l ocus AcoGoldSmith_v1.003102m.g) derived from phytozome v7. 0 (chr-ID scaffold_34; pos 2476533 to 2477176)
tagcaaggttaccaccttgccttcttacactggaggtattgctctttactatctcctgatttgtttgtccagttgaattgctcacaataacacacatgccagaaaaatagaatgaaatttgttctctgcaggcattcattcactattatttctgttttagacgattgattttgctaaagagaggtattcatataatgtgtttctccaaaatctagcacatagcttctctacatagcagctaaatcgtgctatttttctaatgtgaaaagtgtttttatatctagagatttctgaaactgcattatacctctcctatatatagtgtttaatgcatgtaagtcagaatggagaatggagtttaaccagttctaatatcattttggatacaaattaactgatccctgccaatctaaaatttagacaacccttaccttttgcacacaccacaccgtaatatctaatatgtcacttttcacttttctcttgggaatcttaaacagggaatcttttttgttcttcttttataatgtggtctgattcaaaataagcagcagtaatatcttagaatttctcctgtttgtttatttccttttactttgttttttacaggggatcaggggtttctgaattcatatttcactgga

SEQ ID NO: 109207 - DNA, 735 bp, Aquilegia coerulea
  Intron number 2 from transcript AcoGoldSmith_v1.027202m (l ocus AcoGoldSmith_v1.027202m.g) derived from phytozome v7. 0 (chr-ID scaffold_35; pos 2283898 to 2284632)
gtcgttacgtggtgagacaagtacgtacaaatactaatacttctttatcttatgagtaaaattggaaatcactttttctctttcggggtcacccattctgcacgggttgctaaatatagacctaggcgtgggggctttgggaaggaacttatgttttctcagcatgcaacacttgggctgagtatggatttgtctgtctacatgtgaattcaattcactatgtttcttttgatgtgatttcctacatttccctttacatttttctagtgcttgcagtaacttgatcaataagatctcctcttttccaagaaaataaaaataaaaatgtgcttaaaaatatgttcgttggctcagttgggtttccgcagtgagttgtacttttcagttagatatataacaagttaaataccctttgtaagaacccatatttagtgtttattcagattgtgtttgaggtaagatagatgggttaccctccccaaaccatttattctcttcatatccacagaaataaatctgttttttgtcatgctgtacacgggaaaaaaaaatggagaaagagattgttccatcctgcttcgtttgtcttgaatgaattgtcatagtgtatcttttcttatattcaaaatagtgtggacataattacaaactttacacagacgcagatctctatttaaagactattaactgtgcctgcttttataataatataacaggttggaaggacacattcgt

SEQ ID NO: 109208 - DNA, 861 bp, Aquilegia coerulea
  Intron number 2 from transcript AcoGoldSmith_v1.017988m (l ocus AcoGoldSmith_v1.017988m.g) derived from phytozome v7. 0 (chr-ID scaffold_2; pos 9581608 to 9582468 reverse stran d)
gtctggtttgactacaaaggtcttcctttgaagtataattcattttattgattatacgcaatttctttttcaaccagtagattttgttacaggattaggtgagatgaaaacctcttagacagcagatgattaaatactgaaaaacctccacccaatttaagttgccacttttcatgtgtttgtctggagcactcaagtttcactgcattctatgtttactttatttgatcgttcaaatctccgacactgtgaaagtaacatcagacaagtccaatacaagatctcaaccttcctgtcttcatgtttaataagttataaaagccattcaatagtatctaactttttctaaacaactgaactcactggctgctttaaaaccaaacaaattctgtttgagactcgaagtgctaatttagcttaggcttgtctatcaaattcaaactggtttttcatgaagatgatattaatctgggccctagcatgtcacaagggccaagggaccttagaacttattgtaagtcgaaactttataatcaagctctactactgatagttagattcacctcctggacattgattgcaaatatcagtgcattttgcaactagttcttcatcacggatcacccttttaataacttagtttctcaactttgtacagtagaatattgaagtacagaattgcagatacggaatttattgatctgtgacatctttttttctttctctaaccatgactagaattatagaaaaatgctttattcttttgtatacttatactattgttatgaactaagatgtgaaatttcatgtttgtgcgtgtttgcaggtatataccaataggagttctttttgatattctct

SEQ ID NO: 109209 - DNA, 625 bp, Aquilegia coerulea
  Intron number 1 from transcript AcoGoldSmith_v1.017988m (l ocus AcoGoldSmith_v1.017988m.g) derived from phytozome v7. 0 (chr-ID scaffold_2; pos 9582527 to 9583151 reverse stran d)
aaatcacaactctccctgctcctccacctgcactcgtaagtcttctcgtttctcgctctcaatttcaatctctccaaactctttttttttttttttttttttagttttctttcttactcgtaactctgatctgaaaaacttcgatactagttagtgtgaaatccctaaaaagtgttcatctgttctgacttctgagcaatctttataacttcacattgagtttttttgaaatcaaggttttcgaaactaataatttgacaaactagttgcatttgggtgaaatgcaatccaagagcaacataagtaaagctaggttgctttttgtgatcaattgtcggagttaggtcaaagtgctatatatacatgttaaattaactttctattgtattttttttttttttttttgtcatatgtatgctagattgttggcatattgcaaatattgatagtttgatacaaaggtttggtaatgcttagttaaaaaacctataaataaatgtctactgattcgggataattgtataatgttttgtttaccttcttcattttgtataacacatttttgtttttttttgcatgttttgtgtcagattttgggtcctcggattgggtacctgccattgtt

SEQ ID NO: 109210 - DNA, 723 bp, Aquilegia coerulea
  Intron number 2 from transcript AcoGoldSmith_v1.025879m (l ocus AcoGoldSmith_v1.025879m.g) derived from phytozome v7. 0 (chr-ID scaffold_16; pos 3610855 to 3611577 reverse stra nd)
tttgtattgtaagtatccaattaccaacgataagtttctcatagaatcatcagacctttggatgttacttgttaaaaccctactttgtaagtatgtgcactagatatgaggattgtggaaaatgtctttacgagtttccttgggaaaggcagctgtctcgacgtctctgttttatacagaggtttcgtccaaatccatgaaatgatgaaaactgttttgacgagtattatctcattgtccactttatcttttgacctgtaaaacaaagcattgtacaattaccaattagaagaacatataagccgatgggatgtggtggcaagaagtgtagccattacttttactgttcattatcttttaccaaatcttgtctatggagagtttttcaaccatgatatatcctagtgtctttcaatacatatttgctccgtcatctacaaaatcagagatatctgtttcgttaatggtagttagtgtttttttttttcttcttctttttgtttaaattcaagaccctcaaactcattgtatacgacaaacctatatctgtaacactaatcttttacatggtctatcagcgccttgaatcttgatgtattttttagtgtacataagactgagctttaacatgtcgcgatatttgagtttaaggtttagcctcttacttgatgcattgtctggatggcaggatacaacttgttgagtttttgatatcagactata

SEQ ID NO: 109211 - DNA, 317 bp, Aquilegia coerulea
  Intron number 1 from transcript AcoGoldSmith_v1.011816m (l ocus AcoGoldSmith_v1.011816m.g) derived from phytozome v7. 0 (chr-ID scaffold_2; pos 7638295 to 7638611 reverse stran d)
gctttctaagaaaactctcaaactcgttagaaaaggtattaaagttcacatttttgttaaaaatgaatgatttttttatattgggtttcttttatttctatttttcttttatcccaaaatgagtattagcttgaagtttgatttatgttacttttaagaaattaggattcttcgtttgctaaaaagataaaattttgtttgatttgatgtttgtattgatcgatgccatgttattctaagtgttttgtttccttcaaatggtatttagaaacatatattaatacatttttgggtatgattgtagctgctgaatcaaa

SEQ ID NO: 109212 - DNA, 751 bp, Aquilegia coerulea
  Intron number 1 from transcript AcoGoldSmith_v1.000337m (l ocus AcoGoldSmith_v1.000337m.g) derived from phytozome v7. 0 (chr-ID scaffold_57; pos 770219 to 770969)
aagaaacactacttctgatctttcaatttacgaaggtttgaacttgttttctctactttttcagatcaagtgtttttagttcttgaacttcttcttgttactttgaactaaagctagtcttgtttagtaatcaaacaagtttacaacttgaaatgaaacatacggcgatcattttattttgtttaaagaagttgtgaagcttgaagctctatttttttttgttggggtttgagttttctctctgttgatgttccgtacgattttttttttttttttatatagatataccaatttcttttgattttgatctaaacttcatatatcatgcttttgtagtaaaataaacccctttcatttccagtcgcaatgtatatgattaaatgattgatccttaaccaagatcatgtgtatatgattgatcttaaaaatatcacattttcggcttgttttgttttaccgttcaaaattattctgagagatcaaattggaccagaatgcagattatttgttccttgttttttttttttttttttgcattttcttgaatcggaatcaatcttctattaaaaggcttttctttacacaacaaatgcggtctgaggctttttaagtgttaattatttcatcattcccatgaagcacagtaatgttacaattctttatatatactgagttgtatttgcattttgatgatcatttacttgttatttatcttacaggagagtacgtagagtgaggatacgtggaagtc

SEQ ID NO: 109213 - DNA, 559 bp, Aquilegia coerulea
  Intron number 1 from transcript AcoGoldSmith_v1.022919m (l ocus AcoGoldSmith_v1.022919m.g) derived from phytozome v7. 0 (chr-ID scaffold_19; pos 3768535 to 3769093 reverse stra nd)
attttcttctccgttttgaaaagggcttacgaaatgtgatgagagttagaaatgatgttcaacaataatgcaaagggagtgtagtcgttgttgttgttgttgttgagatcgttgtttttgtgttattttgttaagtgctaaaaataatacttatgttcccctcacggtgtttgtgtcaactcagttgttgagatcgttgtttgtgtgttgttttgttagtgtcaaaaaataatagtcatttcctcctcagggtgtttatctcatctcaattgttgagatcattgtttgagtgtttttttttagtgtaaaaaacaatactcatgtccccctcgggtttctatcacttattttttattaaaattctatgtaagagctcctttttgtgtcatgtgatatatgtctgaatcaagaaaacatgtatacaaagaatctgaattgcgattaatggtatttttctcattttaagtaagaattgtatttctgaatcaagaaaacatgtatgcaaagaatctgaataaatgttatctggactataaatttagtcttaacaaatccttaa

SEQ ID NO: 109214 - DNA, 831 bp, Aquilegia coerulea
  Intron number 1 from transcript AcoGoldSmith_v1.009925m (l ocus AcoGoldSmith_v1.009925m.g) derived from phytozome v7. 0 (chr-ID scaffold_3; pos 10256932 to 10257762)
cttcgtccatatcaagaaggaaagaggttcatcaggtacatttttctccttttctttctatatgtttctttgtatatgttgttgttttagaagaattattaattcatgtttgaatagatcagtagttcagtatcagttagttggtgttcttcatcaagattttttttatttagagttgttggttaattacaagaaattcccttcttgattgcttagtttattagtgttttaagttgaagaactagataaagttttgaccttttatggattttgttacaaagaactcaaaagaaataaatcttgcttttaacctatgatgactactttaggaaacttggttttttgggggaaaatggaattgaccatgaaaatcattagtaatcacttgattgctcttcattgtatggttgttgagatttcattagagcttattttggatacaattttaatttcttatttagcaactttttagagatttttttttttttttttttcgaaaaattggacaattaaaactttaaactaggtttggaaggaatatcttttgttattattggattgattataaattcatctcttaccatatcaattaatgttcaatgaacttaccaataattagtagataccaaaccctctgatgtactgaattactcttacattttataccaagagccgaagacatatatacattaacccttgttagggaatcatcacagaaaaaaatttcacatttgttggacatactgtatattcaagagaaatcaagttagtcggttaaaaaatcttctgattagtattttgtttttattgttttggtgaaggtaggtaaaa

SEQ ID NO: 109215 - DNA, 620 bp, Aquilegia coerulea
  Intron number 1 from transcript AcoGoldSmith_v1.009349m (l ocus AcoGoldSmith_v1.009349m.g) derived from phytozome v7. 0 (chr-ID scaffold_78; pos 45038 to 45657)
tgagtttgaaggaatacccttgttgtatttttcaggtttgattatgttttttatgttttaaagatttgggttttttgagaaatttgatttttttttttttatatattatatagagtttagaaggaatgtgaatcattttaagaagaatggtaaaccaaaaccaaaaccaaaaccacccttttcttgaactaggcttaaagctatgagcaaagtgttttgggggttttgtttttagattaaagtaaagcaaaaggaataagaacttgtaattaaaatttaaagagagaaagagagagagagaagaaactggtgtttaaagagtcattttatttttggattttagtttgaggtattatagggatataaatttatctgctgcttctctccctttcaataagagttttatttactatatgttgattttgttgattataattagctgtttttaattgtcaaaatatagaatacctatatacctatttgttctcttctcctcaccattttaaagttacaaatcattagcaaaaaaaaaaaaaattaacaatctctctctctttctccctctaatttttctctatattgtaggtagagagagaagaaaaacaggggttcttcccctt

SEQ ID NO: 109216 - DNA, 927 bp, Aquilegia coerulea
  Intron number 2 from transcript AcoGoldSmith_v1.011454m (l ocus AcoGoldSmith_v1.011454m.g) derived from phytozome v7. 0 (chr-ID scaffold_2; pos 2302138 to 2303064 reverse stran d)
catttcgagactttggtgttcttagaaggtaatttaaagaaatccccttctaatttttcttcaatttgatttgcaatttgtttgatttgttaattgaaagtatgtttgaatgattgaaacttgtatattgcatgggccatgaggaaagttcgaatatttaatcatttttagttgatatttatttaatatataattaaagttttgtttttgtcgtaaaagattggttttttattaattggtattaaagtcccctgttttagctgtaacttattgcaaagagccaaagagtatatcatttgaagtttcccgcttccattgtttttggtgcttatttgggataaagttatttttacaaagtgcattgtgagaaattatagagtagtaactagtaagtatgttttccattagcgtggacatgtggttgtaatactcagtcttttgctttatttttatctacttctggggagcaggggaggctctcctcagtcaaatttgtttttcctatgacgagtcccttaatgctgcttattatccttgatgccataaaagttccatcgaaatgaagttggaacatacattgagccttttagcttgtttgttgtgcatggaggaagttggaaaacttcaacatcagcttccctttaattttctcatgctttaatggcaatgatcttatttggaattaactttgtgttacaaactctaatcaaactcaaaagtataatcacagctgtaatagttaaagcctttgtgattgttttgttgacattttgttacacatattgcttcttgtctttcggtatatatgttccaatgggaaattaatgtatactcacaaattataaactggctcttgtaataaatgtttgaatcttacaatttaagtaatgaattacagtgtctgggttgcacggaagccgccaggtt

SEQ ID NO: 109217 - DNA, 964 bp, Aquilegia coerulea
  Intron number 3 from transcript AcoGoldSmith_v1.011883m (l ocus AcoGoldSmith_v1.011883m.g) derived from phytozome v7. 0 (chr-ID scaffold_16; pos 4712586 to 4713549 reverse stra nd)
attttcctccagattacccatttaagccccctaaggtaatttttctcaatcgttttatctttcacttcaattatcttttgtattgtatacttacatttttctgctccatctttagagattgcataagtccttactatacatgtgtttatgtattgttctaagcacattattgcatgtgttcttatctgcacatgctatctgctctgctaattacatccgtgattgtttcaatttattataattatttgttatcacatgtctttcacacttacagcctataaccattattacacttttaagttgttggtggactatatagtatataacactctgatgtgcgtcttaagcacacttttggcacatatggcgtgtccaaccacacatttgacatatcacatgccagaacagcctcttatggtactcatgaaatttagcgtgcttaaacatgtatctggcatatgtttgaacttgagccgtagggaactcatggcagttggtggcctccggcacccataatgtcttttggaagaaaatgttttttctttctttcgctttggtgtgcttgcatggtatataataagcccctctgtctatgaagcgaagactagatctttttttcccttttattttgacagtaaatctcattcgcaccaactttattaagtccatggagtgaaatgaaaatcaaaacctgcccatttacattggagaggatgctagattgctggctatagatgcttgtattttgaatatttcttttactccttgtgtgccttcttaccatttcttgatgtaagtggtctagctctagcatttgtgacaattatcattgcgggttatacatgcaattgctttgataacaaagtaatattccactttgattcaaaggtatgataattttgttaatttttttgttccaatattgtcaggtcgcattcaggacaaaggtcttccatcccaatat

SEQ ID NO: 109218 - DNA, 785 bp, Aquilegia coerulea
  Intron number 1 from transcript AcoGoldSmith_v1.002987m (l ocus AcoGoldSmith_v1.002981m.g) derived from phytozome v7. 0 (chr-ID scaffold_2; pos 3121025 to 3121809 reverse stran d)
aattgggtatgtttgataatattgttttaataactagaaagttgtaattttgtgttaatttgctcatatcatgaattgggtgtcaacaattgcctatttaattgatctatgatctataaactgtaagaacagaaaagaaatgaattttgtagtagttgatgatttttaattgcacatgggtcttctgtaatagtaattttagaaacctaggaaaataactattaattagtagtagatttatgttcatttactcattatgtgaagtgggtatgtttaaatcttcatgatccaataataatagtaggtttaattttgctttcaaaatcttatcattgttcaacaaccaaaaaaaaccatctaagataaaaaaataatagtgggtattttaatttttttttttcttctattgagatcatctaatgtactataactgcatgagcagaaaggtagtaaatctataaagaagaactagtcactgatgtatgaccattcacatgtggccatttgtagtttagatatgtctacaatttggtcttagatttacaacttttccatattcttgtataattgtttaaatgatgatgagtggggtaaacttatattagtagtagagaaggatcttagactagttaataatagtgaagaaaattgaaagttatatatgaaaggagaccaaagcatgtgcactccccctcttcttcatctgtttcttaattggttatatctctttgttttgtctccactctaatcttcttcacttggactagcaagtggactgggatccc

SEQ ID NO: 109219 - DNA, 818 bp, Aquilegia coerulea
  Intron number 2 from transcript AcoGoldSmith_v1.009240m (l ocus AcoGoldSmith_v1.009240m.g) derived from phytozome v7. 0 (chr-ID scaffold_2; pos 5970757 to 5971574 reverse stran d)
ctgctgatatcgagcaggaccttagtcgagtatgttctctaacctacagttataaatttacaatttacattagtttaaacgacactaatgtagtgaaatcgaacattcattttatgagaagaactatgtgctggagtttagggtttagggtttagggtttagggtggttatctttgatatatacttgaagtgtgagtttgtattccgatagaaaatttagttaaaattgttttcgtatccacaccagatagagaacgagtatcactttacaaatgtgtcggcactccacacacatctatgtttgaacttgtaaatactagattaatgaaatgatagaatttgacatgtatcttttcatctatataatcatagaaattaatttgagatggtcccaaaggcatagaatttcttctagtcaaaacaaaaggaggtggaaaaagtaagtatgcatcgtcacgaaggtaaaatccatgctacctaccagagactcaggctgttaggaatcttaaatgattgtaggcttagtaaaactcattgtaataaaacataatgtatatttgtcagaatgtttacaatcattcgtctgagttaagttttctgtagattatctcgaggcgtcaaattgttgttgtgctttcattttgtgcatgtgtattactgtttgaatgtttgatatagattccgattgtcgcatcttcttatttactcctttatgcagtatccttgttgttgtgctttcatctgcagtttgtaaagttgtgtctggtttcttggtgatttcagggtgaaaaacttcttggaagtcttggtggtttgtt

SEQ ID NO: 109220 - DNA, 465 bp, Aquilegia coerulea
  Intron number 1 from transcript AcoGoldSmith_v1.009240m (l ocus AcoGoldSmith_v1.009240m.g) derived from phytozome v7. 0 (chr-ID scaffold_2; pos 5972073 to 5972537 reverse stran d)
tcttggttcttccaagcttcttcttgcaatctcaggtatcaatttcatctttttttttgtaatgggtattgcagatttacttgtaatttgtactaaacatcaattgttcttcaactctacttacaatttgtttaatgggttttgaactttgattgtttttggattgaaatctatgtgtgtttaattaagaacaaattaacctaaaaaaaaacccttttttggtatttttaataaagaaaaaaacccatctttgtgtttttccagttgttacatttggtaccttttgtgatttctgtatatggggtttttgttcttcatagggtttcacaatctaatgtattgtgatgatttgttttgcttttattgagtttttccatatgatttaagtttcaaagcattatatcttatattaatcttgtatgtattttaggtaccatttctgaatctttgtggagaattgtgaat

SEQ ID NO: 109221 - DNA, 610 bp, Aquilegia coerulea
  Intron number 1 from transcript AcoGoldSmith_v1.009059m (l ocus AcoGoldSmith_v1.009059m.g) derived from phytozome v7. 0 (chr-ID scaffold_58; pos 1148603 to 1149212 reverse stra nd)
acaacagtcccctcatccaacctattctccataaggtacatactgtgttcttttgataatttcttacatcaaatatataatttatcttgtgcaaatgagttaattatactttaagaaaatgttggcttcatctcattcactaagtcaatataaaaagtatattatagataatgtagttgtttacttataacacttgtgttaaatattgtccattatctagttcattatttggtttttagcacataggataagaatgaacaatgctgtggctgcttcccagattaagtcatttgagttatacaattggtcaatttagggacttgagaagacgatttatatgttgctagcagctctgtttgtattttatgtattcctacaaacattagaatacgaagatgataatgaatatggtaatatatatttagacttccattctatatgggaagaatctcaaatctgctctgtgcgctttttgagtaaatcttaccatgatttcatgtgcagtactacaagtgatttacttgcaattactgtacttacactaatatatttgaacaaaatatgaatggaagaaatatacttagaatttgtttttgtcactgcagaaaat

SEQ ID NO: 109222 - DNA, 305 bp, Aquilegia coerulea
  Intron number 3 from transcript AcoGoldSmith_v1.000936m (l ocus AcoGoldSmith_v1.000936m.g) derived from phytozome v7. 0 (chr-ID scaffold_13; pos 5658903 to 5659207 reverse stra nd)
tattagcggcattggttccttcaagtgggaaacgagtatgtgatactttttaagtggcttgaactaatatatgttttgatttataaataattatgaaatgtttttttatggcatctgctccattcttaattaatcccaatttttttatatctgaaagaagtcttctatatcaagggattgtgtttttttttttcacaaaatttttgtctttcttaaatgcgattatcaagctcttagctccaagtcctctttgttgatactaaatctgctgcaggcgatagatactgttgtggctgggattcttc

SEQ ID NO: 109223 - DNA, 775 bp, Aquilegia coerulea
  Intron number 2 from transcript AcoGoldSmith_v1.014999m (l ocus AcoGoldSmith_v1.014999m.g) derived from phytozome v7. 0 (chr-ID scaffold_35; pos 2394209 to 2394983)
acaagtacagagaggaatctaactatcccgttactgtaagtaaagttttttagagtgtttataacagtaattcagttattaggttggaaacaagttttcaagagatagttttttgtcgtcggagctgggtctactctttaagtttcttcttaatgatatctattatgttttgaagaacaattgtgagttgcatatagattacactactaaaagacctaggttaacattatgaggaatgctgacataatttttttgtgaccaaagtagatggtgatgtatgtggttatcatgattgatcctttgacttagaatttgaaaatttcctaatattatttggattttgtaactgatgagaaatatttgtaagtaatgggatatagggatatgaggtaagtaggaatgtgaagtcatgctgcctagaaaaaatgtgaggtaaataggaatgggatagtgctgacaaaattatatgtggaattctgtattttagaacatgcataactttgacggtcatacttcttacttccatccactctcttgatgataaatttaattggtctccttttgttgatgttattttgtgagtatgcatttaagaccgacttactaaacaattaaatacactcaaagaaaattatacagggcgtgatacttttccctactgtgttctgttaattgcaattttcgatgctctcaataactctaaagtcaagccatttgacagttttatttatgtggcacaggttgatcatctgtctggaggttgttattttctttc

SEQ ID NO: 109224 - DNA, 532 bp, Aquilegia coerulea
  Intron number 1 from transcript AcoGoldSmith_v1.013487m (l ocus AcoGoldSmith_v1.013487m.g) derived from phytozome v7. 0 (chr-ID scaffold_61; pos 830721 to 831252)
acacttatctgctcaacagtgtgcaccaacataaggtatttgtttatatctattttgagtttacagtttactgggatctcatgtctaaaagtggagtccttgcaaatagtactatcatagtatcatgtgatgtgacagtccagaaaaatccacacaaggtgtgatgtgacagtaaaaaatttcatctgagaggaacgctcactagtatcatttataactagttaaataataaatttcatctgagaggaaagctatgctatgaagatccggatggtaactagttatgcattaaaacatatattataatagacgaaaaggaaggaaactgataagggaggtagttatctggcagattcatacatgttacataaaaaaaaattgaataaaagtttttttttttttactttggagcaaccgagatgtattgttttttctttgtgaaatttgacctgttctttacccttaacgctgatcttgtgttgttattggttttgtaggatctgctcttctcttacaatattgcaatagatag

SEQ ID NO: 109225 - DNA, 677 bp, Aquilegia coerulea
  Intron number 1 from transcript AcoGoldSmith_v1.022300m (l ocus AcoGoldSmith_v1.022300m.g) derived from phytozome v7. 0 (chr-ID scaffold_2; pos 2717104 to 2717780 reverse stran d)
gtgtacaacctcgaagattacaggtttctctctcctattactagtagctttagttattgtgatttgtgaaacacaattgctactgatttacactttttttgttctggaaatccaaattaatgatttacacaatcgttttgtttgtgtggtttgttattacatattactgaaaactattgtaagtgtgttatctctagtctctaccaagttaggcttattggaatatggaaattatgtaatttgtttgttttattccatttgcttaccacattgttaagagtgttagaagagataatttgaattaaatgcgtgtccttgatatcaacaaaggtcgactggatttatgaattaagacgtctaagtctaaggactgtttgtcacaaggtctaagcaagtgtccgagaaatggacattgtaagtatttggttatatttaactgagttaaatcaatcattggatcaactgagaagctggatatttgctcatccattatataaaatttcccttgcggcatctcatttagctaaatttgaaatcaagattgcagtgggtagattgtcagtttgtcacatattttgaaaaggattgttatatttacaaacgtctgtattctatataaatgcacataattaatctatattcttgtcctttagatttggaaacagaagttggtggta

SEQ ID NO: 109226 - DNA, 308 bp, Aquilegia coerulea
  Intron number 1 from transcript AcoGoldSmith_v1.014894m (l ocus AcoGoldSmith_v1.014894m.g) derived from phytozome v7. 0 (chr-ID scaffold_3; pos 8286909 to 8287216)
gatacttttggaccgattcaagttccttccgataagtatgatttcactcatttaagctcctttgatttcagttggatatgataattttgttctgtaaagttcatctcatctcattcctttgtttcgttttacgttttcttttcgaatccaatttagcggattgtttgattagttctgtaaaactaattttagaagattaataatttgtatatagtgtgtaagtgtaatggtgttgatcaacatataatgatgaaaatttgattttgtatttaggttgtggggtgctcagacacaaagatcattgcaga

SEQ ID NO: 109227 - DNA, 573 bp, Aquilegia coerulea
  Intron number 3 from transcript AcoGoldSmith_v1.000425m (l ocus AcoGoldSmith_v1.000425m.g) derived from phytozome v7. 0 (chr-ID scaffold_2; pos 8798167 to 8798739 reverse stran d)
acaagagaccacagagagaggtattttgtttttactttttccacattattcattacacatgctattatgttaagtttataagcttcttcgagtttgtaaatagcaccctgcttgcaaaatgataatataagaacagtgaattttgtttacaagagtgacattgatgggcttgttagccacaaccacaatgatttctctgacttgtatatttctactggtataatatatgtaaggaagcggacaacagagggagttggtctgacacgataacaggagtctatcctcttgtctgactagctatttctcagaataatgaagtatagtcttactgctctgagacactaaaaaatgtgctttgtttgaattgatcaaataaactacctttagtgaaatttttttgcaaagcattaaaatacaatggcttcattcttagtttcttactactcctaaaaaatgaagaattagacagattagtgttatcacctttctttgtccctagacttcggtacattgtattgatgttctcagagatttacaggtatcgatacattttaatttgcaaagaaaagtgga

SEQ ID NO: 109228 - DNA, 945 bp, Aquilegia coerulea
  Intron number 1 from transcript AcoGoldSmith_v1.004581m (l ocus AcoGoldSmith_v1.004581m.g) derived from phytozome v7. 0 (chr-ID scaffold_3; pos 1026011 to 1026955 reverse stran d)
ctcttctttttcttctagggttttttcaagttgaggtagaggtttatgtttgattccaatccttaattatcttttatgtatattttcttgtttgatgatttgtttggggtttcattgattttttttttattttttcttttgctttctagtatttttggattgcatttggggttttaaaattattattatggtttgaaaattttgggagagattaggatccaagcagttccttctttctcttttcacatgtattcttatcaaaaccaacttcgcttaggaataataacaaacaccttccactcactgaacatccaatctcaaatacaatgcccaataatttctcttaccaattcatcgcgtagatattcatttctaccacattcaaccaaccccatcacttgtttttcaacttctcaatgcacaattttgaatttgcattaatgggttttaacaacaataatgtgattgaatcgttattcatttttaaacaactgaacaatttgaagagttgtctttcaaattgatctagaggaaaagtgaaaaaataatgtgttaaaattgagatgaaaggaagcttttatcagagagatttactggcggaatgcttgatgataatattaataatggttttcaagtctgcttgcttctgagaccatgtgatgataataatttcaaataacgaaatgggtatatgaaacaagttgcaactgatatcattcacaatctaggttatagtgcttcatttgtacaagtaacatttcaacacccatttaggtataagcattagaaagacctttttgctgctgctgaaggaatgtataccgaacaatttggttatcaatgcagaattgctttttttttttccagtttctcccactaaattttgaatgtatgttgttattctttacaggtttgcaacctctagttagtcctccttacaagtat

SEQ ID NO: 109229 - DNA, 720 bp, Aquilegia coerulea
  Intron number 3 from transcript AcoGoldSmith_v1.000536m (l ocus AcoGoldSmith_v1.000536m.g) derived from phytozome v7. 0 (chr-ID scaffold_58; pos 569815 to 570534)
aaaagcttctcggcgatatattcccaaaatctcaggtaatatttactactggaaattgcagttattaatatgataatagtgaatttgacatggtttgttgtcggatatttccatagaagaatctgctacaataggaacagtggtatattaagcaagttgtttgtgacagtatgaatcattgatagatatgtcaaatacattggtctgatagtactagaatctaacacttccctactagttaatccttagcttcagaatgtgagtaaactaagataatgcatgattgtatttgtaagagtgagtatgatctagtgtctagactgaccacaggaggcgtgcgacctcatggattgagagtgttgtgacttgtaagttatagtttgtttgagtgtttcctgaggtagttgttttgtttaaatttgctatgcattcgtgttcgaggtaatatgccatcttttatatatattttgagattggttgttaatgaaactaccttcaattatatgtaaacaaaaaacgttgaagcaaaatcttcttaatgtaacaggtccatatttacaagttagaagtaacatatgaattatattggaagtgagtctgagaacatctcttggtatttacaataattgatggtttagggaagatattggtgatgtgctgtttgtaaagttccgaaagggttctggtttgctcacttttgtttattactgcttttgtagg

SEQ ID NO: 109230 - DNA, 753 bp, Aquilegia coerulea
  Intron number 3 from transcript AcoGoldSmith_v1.004589m (l ocus AcoGoldSmith_v1.004589m.g) derived from phytozome v7. 0 (chr-ID scaffold_2; pos 2376917 to 2377669)
taatctctataagatctcacagccattatcgctatgtaagttggtaattaagtaaattatgttgaaattgttattgattgggtcttgttgatgggaatatctcgatttgtttgttatgcaactacctagttttcagtaatttgatacctaatttcttgtttatgaactcagttgggacaaatctactttgtttgtatactaagactttaagttaaagttactgcaaaacccaactctagattctttatatgtctggtctttttctcttttctgctgaagctaagattctccaaccaccaattttattagtttgcacttttggtctatcactctattatccttactttatctcttttaagttgaacctagcttcaattgaagtaataaaggaaggactgtgtttattggcattgtgacttatgttaagcttctgtatatctgcaacaagcctgaagcctggccacactttgattttatataataatagcttgatttaacatatttgattctcttcatgaatttctttttattgaagctttctctatgacacttgaatataagctcctctaagtgcatttttgttataaatggttctatgatgagacgatcttatcattatctgcatctttggttcaatttagtttctctttttgttgttctttgctcgatttactttactagtcccagtcacttttcactgaattgctagcgtgagcagatagtagaccaaaattggttgctggctcaccagaa

SEQ ID NO: 109231 - DNA, 1044 bp, Aquilegia coerulea
  Intron number 5 from transcript AcoGoldSmith_v1.010686m (l ocus AcoGoldSmith_v1.008917m.g) derived from phytozome v7. 0 (chr-ID scaffold_2; pos 8644135 to 8645178 reverse stran d)
ccaatccactgtgggttgttaagaccagactccaagtatgtcatatcttattactgtgtgcttttcttgattcggttttctcatcttcctggcctgtaaggaacttatacctttttgtatcacttaaatttttgaatagattgattaaatgtatataatatacccatgacattatgacgtcttagggttagaaagtttttggggccgtttggcaactagaatttttatgaaaggaatttcgttgatttctaggaaaggagaaagtattaaatccgaagcttaagacagaaacgtctgttaaaattccttttctagctttttaagaattactatctaattttagttttctagttaccgaacatacttctgactttcctactttctaaaagttagataatgcatttcatgggtttgccgaacgggcccattgttctcattgctgaagaaggtttcattacattattctttatttttccccattgagttcctcaatgatgcgtataaatttatgcttaattgactgtcatatgagaacaacagtttgttaatgatgtttgaaatgcaagaaggcttatttaagtatatcaaaggaagagagaaacataggcaggatgaacctttccaatttgtatttgtccattcatcaatcatataaatgtgaaataaatattagcatcagaccaaaggcctaaatatcattatatagaatacattagctctaaaatgccagtcaattaagtatgaaactcgcctgtgctgactttctcctgtttgccaaatgtcatttgcttttcttagtttgatatcagtgaatgcatataaattcaaatctatgtgatgcattattcctttactttttatcctttcacgagccaatagtttccataaactctgcaaatccctgacatcctaccgttttctttaattcctttttgcattgtaatccctgatatagttccattatctttatcttgtctgatcgctctgatgttgtcctatttataattcttttttttttttttttttctactgtagacacaggga

SEQ ID NO: 109232 - DNA, 487 bp, Aquilegia coerulea
  Intron number 1 from transcript AcoGoldSmith_v1.010686m (l ocus AcoGoldSmith_v1.008917m.g) derived from phytozome v7. 0 (chr-ID scaffold_2; pos 8646794 to 8647280 reverse stran d)
gtcaaacacgaaggaagattcaagaaacgagtcaggttaggtttagagcttcaaagacgcattccgagtttctctttttctcaaatgagatttcaacgatttgaattattatcaaacagatttaaatggatttcggtctaatcacgaacaagtctgcaacttctctttatatatatatttgaatcaaatctctaaaaccccatgatttcttttatttttttttagctgaaatctaggttttttttctttgtaatttttgaaaatgagtggagaaggaaaagaatcaaaacgcaaagatcttttctgcaatgcttgtgctggtgcttctgcaggtttttttttttggcttatgttagggttttatttgtaaattataagagtggttagctagctttgattgtttatttataatgaaattattttgaatttctctaacaggaattctactgcaggagctatttctgcgacttttgtttgccccttggat

SEQ ID NO: 109233 - DNA, 628 bp, Aquilegia coerulea
  Intron number 2 from transcript AcoGoldSmith_v1.026598m (l ocus AcoGoldSmith_v1.026598m.g) derived from phytozome v7. 0 (chr-ID scaffold_34; pos 1958219 to 1958846)
gcatgtaagttttgtctaaaagaagaaaaattgttaaagaatgatcttcctttttttgaataaagtgttggctaatggctactaccttgttaattgttatttatgttgctcaacttaatacagtagtttttaagttgaattgtgtatcttggtttcgttttagggacaatttgtcgtgaattgacttgaattgtcaggtatttactaaagcatgaatttgattaatttagtaagatggctttacaattatgatgaattgctaattaaggtgaggaaaattgtctatggagatgggaaaaagacaattatagataagaataaggaggagaagaaattgaactaggaacttccggcattggaaatgtttaagaaataatgacagaaattgaactaggaccaccagattgatctggtgtgaactagccttggtgcacagtttaatatctttgttgttgtttcttttgcaaatctgtatatgtattttgctttgtctaatcaccaacatctttttattgctagtgagtgccaatgtatgaatgtttagaaagtaagttttgtgttatcaaatgaaatctttaaaactaaatgcaccatctgagtatgaattcttgacccttgttgctgcagc

SEQ ID NO: 109234 - DNA, 783 bp, Aquilegia coerulea
  Intron number 1 from transcript AcoGoldSmith_v1.008918m (l ocus AcoGoldSmith_v1.008918m.g) derived from phytozome v7. 0 (chr-ID scaffold_13; pos 5851611 to 5852393)
ctgggttacctcaaggtagggacaagactattcaaataagagctaaattgttgaaagtaaatagaagcgaatttttgtataggacagaggttcgctaaagtttgagctcttatttttatttttatatagaaattgaaaaacaaaatcttcttgttacttgtatggttctttgctgtgagagttggagcattttagagaagtatgaattactccttcagagttcaaaattttcacctcttttagtctcgttttttatttcctctgttaaggctggaattatagatgatcaacaattcaacatgttagccgagacaacacatgtgggccgaaaagcccctgtttgtgattagacacaaagctagctccctgttgtgatctttagagtatacactagtttttttctgcaagattgagtagtcttcacaaataacaatagatcttgtttcttattttattttgtgtccgaattcttattaggattagtagaagttaatttgagtccaaatggtttccaacccattagcattctattcagaattttttttcctaatttagtaatgctatattgccatttcaattgcaataatttcacaatgttatttaaatttttgaacatgttatttgtgaggattttgtgttgttttatgtgtgtcagtaaaatacctcattcttcaatgtagttttgggttttctttaataatagagcataattattgtttatattttgagagaaaaagtgatgttcactctccccattattctgttgttgcagggttgatcgaa

SEQ ID NO: 109235 - DNA, 324 bp, Aquilegia coerulea
  Intron number 2 from transcript AcoGoldSmith_v1.007689m (l ocus AcoGoldSmith_v1.007689m.g) derived from phytozome v7. 0 (chr-ID scaffold_2; pos 3136661 to 3136984 reverse stran d)
gctttctcaaggtttgtgaattcatttttatgttaattttgtttatgagattgtttttgaatttctttctcccccctcttgtttactctgttcttgtctttttgttatatttatattttatttttttaataattatgaatgattttgaatagttacacatgtttttagaggaattttgtatgaaatctttcatccaaactggatatttttttagtttattaatgaaaatggtttgtttggtggatttggtgagttttgattgattttgcatgttgggatattaatttaatgcagcaaagaataaagggagcaagggggatttga

SEQ ID NO: 109236 - DNA, 981 bp, Aquilegia coerulea
  Intron number 1 from transcript AcoGoldSmith_v1.012713m (l ocus AcoGoldSmith_v1.012713m.g) derived from phytozome v7. 0 (chr-ID scaffold_2; pos 9771635 to 9772615 reverse stran d)
ggatttaccaggtaaccctgttcttacaacctttttctctacattaatgtcatggtgtttatgttgtgtataaacttcagctttttagccaaaaacaatcatcattgaaaacaagaagctatataaacttcaccacatcaaaattttaggaaaataagtaaaatcttgagcagtggcattatattgtctgtttgatcaaatagcgccttttgtcattttcataaaaaaattatgagataattaaattagataacacaattattctgacaatttcctctgaagacaattggttagttattgaattgtccttttcttgttccttattttgatttatgcttattcttatcttaagaacaaacgcattagactcacttgcactctacttgaagccgcaacagaacctactcttgacatatacaagacacattggtaaaatatacaaagaaatttacttaggttcccaattatattctaacttaatattgagtcgaagcattattaattcggttaaaagacacaaaagttggtggctgatcattcatttacaatatttgatcccataaaaagaacggaaatgacatcgaatgcgttaactatatcccactacctgcaccatgggatgtggactcatatacgagagataccaagagggagaaagaagtcaaaaagcaaacaagaaagggattgcattgtcttcaagagatatgagttcgtccacataacgtgctgcttttctgttgagaatatatgtagggcttcaagttttatctacctttatctacttgtatcaataggttataggtatgagcactaaagttctatctacctaataagaaatacattagttagaaacataatgcacaagatattgtttatggttttaattatttacgtgtcagcataacaggattgttgttctaatgtggtttaatacattttttttattgcagagaaatcattcttaccaagcaaagatcttga

SEQ ID NO: 109237 - DNA, 535 bp, Aquilegia coerulea
  Intron number 1 from transcript AcoGoldSmith_v1.003377m (l ocus AcoGoldSmith_v1.003377m.g) derived from phytozome v7. 0 (chr-ID scaffold_26; pos 2495246 to 2495780)
agctaaaaggagaaggaattcagaatcaggtagatttaggttactttcttttcttttcttcaactgttttctgccattttaatggtaagaaatcagtttggttggttttctttcaatataaaatttgcatgttgaactctaccacatgaaatgagattgttttaatgaaacaaacatccccttagcttatttttctagttaatgatttaatgagttggttttggtatatatgtcgtacaaatactgttcatggttgcatcaagtttccaaagatgggatgttttcaaaagttttaattatacaagtaattttgacttttttatttttttatttatttattttctttttatagtcttgtgatgctgatttcagattagagaatttcttgctttcacaaacatggttgataagatgatgctttacaataatatatatatatatatatatataacttttatttgttttcttgtgatacccaattgtttatttcttttttttcttcttcttgtagtatagatttagctgttgtaacttg

SEQ ID NO: 109238 - DNA, 1027 bp, Aquilegia coerulea
  Intron number 1 from transcript AcoGoldSmith_v1.018669m (l ocus AcoGoldSmith_v1.018669m.g) derived from phytozome v7. 0 (chr-ID scaffold_16; pos 4321075 to 4322101)
gtcacttgcctttccttgaaaaagcccctaaattggtatgattttttctttttttttagtactaattagtattcagttctttatgattcttgttgggtttcatttgaatcaatttgaagagattgattgattgattttgataaaaaaaatttcaactttgggattattgaatttttctttgactgatagtgaaaatgctggtcactgatagtgatactatattgtaagatttcgttgagggtgtgaaagatcaaatttttcatttttagtctttttgattggtaggagaagtaggaattataataatattaagcgtttagccctaaaatgtgagggttgatttcaagaaaacatttatccctaccctttgagttatttgtaaggaattaatgtcttttaataattgaagttcatgtgaaggagtagattgattgaggggttttttcttgttaatttcgtgatgtacttcggcatttgttcatagtggtcagagagaccaatagcattatctgcagaagcaaattcctggatatagtgctttatgttataatcaaagctaaattttaaagaaacccatcgcaatatagaaatgctcaccttacaatatttttgaaagcattatttgtaaaggactaaatcaaaagaacgattctatagaatgagtacaagacttgcagtcttccaccaggttttgttttgagttgagtaaaaataacgtgctactttctgtcttgctatgaatattagtacatgcagtctctaaattttgttcagagtgaaaggacatgtttgtttgataccgtattagacaatgcagccattttttctcagaacttatgcttttctatgagtattctagacaatttttctgaatgaatgatttttgtagttatgaaattatcattaatttttcatggttgatacttttcgtgtcagaaaacatattggttttatatctagtgttttttgtttttgctgcaaacttaccataggtgttgttttgtaatttctttcaggtagaagtaga

SEQ ID NO: 109239 - DNA, 552 bp, Aquilegia coerulea
  Intron number 1 from transcript AcoGoldSmith_v1.024773m (l ocus AcoGoldSmith_v1.024773m.g) derived from phytozome v7. 0 (chr-ID scaffold_3; pos 9106600 to 9107151)
aaaaggactagaacaggaattgtacagtaagtcccttgttatatcattaaaaatgcttatttataagataaataggacttgaactgattgtacacagtctagtactttataaaattagcaaaatgatattttacctgtaaactaatttcaaaaattattaaattatataaactgataacatctatttaaacctgtatgttccttttgttttagactggtttctttgtctacaaaaaactgatagtatcctccatagaagctatgtgacttagatgcatgctttcttttctttttctttatttgtttgtttttgttatttttttgaattagtgcgtaggttttctagttgggtccttgttttatgttgggaaaatcccttgtgattattttattggttttctctagatgttattttgccgcaaattgttttgtagaatgcagtatgtttctgattcttctttagcactttttatagttagctaaacaaggttttttttccatttcttcaactacgtagtcgtcatcctgagttgaagtgggcacaaagggagg

SEQ ID NO: 109240 - DNA, 712 bp, Aquilegia coerulea
  Intron number 1 from transcript AcoGoldSmith_v1.007846m (l ocus AcoGoldSmith_v1.007846m.g) derived from phytozome v7. 0 (chr-ID scaffold_26; pos 1152940 to 1153651)
atcatttcaaacgcaagttctaccaacgttacatcgttaagtctccttctcgctctttctctctttttagcctaaattcacaaaccccatctgtgttttttgcactttgatttttttgattttggttaattatttattgtggggttttggtttgtagtttttatttaattataattgaaattcatgaaaccccatgtcagttttatgtgattttgcataatgggtgtttgttaaaatgaccttcaagaactcaatgtatgctgttctcttctttggtgtttttaatctaatgcatctgtttaactttgagtttagaatttttactgtttaaattgaaaaaccccatctgggttttatgtgtttgcgcatttggatatgatttttgatctgtttgtttcttttgctttagggatgatttctgaagcttattattgaactttatttttgagttgtgctttagagatggactagggatgccgtatgttaagtatttttgaaatcctatattcttggaattggacaaggaattaattcttgttatgatgatgagtataggcttcagataatctcgtaattatgtctcatgattgcatttgtttgctctttcgatctgtgaattattaagtctctatgcgtttacaaccatttacaaattggatatgttgtctaatgtaatctacttggacaggatcctgagcttgtagttgggcca

SEQ ID NO: 109241 - DNA, 1003 bp, Aquilegia coerulea
  Intron number 1 from transcript AcoGoldSmith_v1.001752m (l ocus AcoGoldSmith_v1.001752m.g) derived from phytozome v7. 0 (chr-ID scaffold_2; pos 10019678 to 10020680)
caaactcgaaactaaggttagttcgtccaactgttcttcatttagtagtagaagaagaagatattgacacttattaattttatttttgataatattcaaaaatttataattaattttagaaatgttgtattagtaatgtgttagaaactgatcaggttatatcactagactagaccagttttacacttaattgaatgtgtttccgccattagttagtcgtactaaatacaaacaatattaggtgaaaattatgtggttttttggttttcatgtggtctagtgctataacctgatcgatttagttatataattgtaggccatatagaacttttatcacatgtttcactgttaagcaactttgtggatcatttgaagcgcaaaaattttcacctaatattgtttgtgctgtttacctgctcgatttacaggtctgtcttgttgaatagattttttccgtagtgtgaattgcagacgaatcaattttggagatgatttggattgctattagaaattaattactgttatgtgacttatgtctacctggtgtattacttttcagtgatttttttttagaaaaattaagaaaaaaaagaataaaaacgtcaacaataaacgtcggtccccaccggttctatatttctttcttcttgttttcattatatacttttgtttcaagatggattatctctccacgatttggggttgttttagattttcataaaagtgattattttggtgtgcgtgtgtgtgttagtacatagctatttgacaacacttctgaactgattgcaagcatacccatttgggaattttttttttccacgctcagataaggagttaaaatccattgcttgcattattcaaattaaatatttgccgccctaacgaacatctttctttctctctctctctccatgcattaaccatcttccaataaaccctagcaaataacaagtcattgtttgctttaattccaagctcgcagacttcattctcacatcac

SEQ ID NO: 109242 - DNA, 633 bp, Aquilegia coerulea
  Intron number 1 from transcript AcoGoldSmith_v1.009579m (l ocus AcoGoldSmith_v1.009579m.g) derived from phytozome v7. 0 (chr-ID scaffold_7; pos 615072 to 615704 reverse strand)
ttaaagactgatcttctacaagttctcatctataagtattctagctatacttacatctttctttatttctcatatttaagtttgctgtttcattagttcttgatatctcaagtttaatgaaattgtttttcttgatttaatatgaatataagctaatttttaatatttggtatgatttgattagagaatattattaccacttcatttgttcatctttctagtttcttttgatcttctatatggtaattattcaaaattataatcacagttcttataattagcatttcttcatcatttcatttaaagtccatcagactttcaattatgtaaatggaataatattggaatatattctatggatatagatatagctttttggtccaaccaattctgataagccatggcaacagtttttgcatccccttcctttttcttttcttttcttctgttgagtatgatttagggtagagatatttggcactttggctagtttggtttaatatgtttttctttaatcaaatcataacatatggttcaaaacagatcatatctatgtcatattgtcatcccatctttatactggttagtaggcctaatatatgagattttcttctgatgatttttaggttcata

SEQ ID NO: 109243 - DNA, 1066 bp, Aquilegia coerulea
  Intron number 2 from transcript AcoGoldSmith_v1.005386m (l ocus AcoGoldSmith_v1.005386m.g) derived from phytozome v7. 0 (chr-ID scaffold_2; pos 4410089 to 4411154 reverse stran d)
tcgaattgcaaattgggttctgtcaagtttctgcggtctgttgctggattgaaaaacattatgaagtttgtagtagtattttttttttttaatgaagactcttcatttatgagtttgattgtgtttcaatatgaatatatcttatgtggtcagttttttttttttttttttttttttgtgtttaattatgttttgatgttttttttttccaagtcaattagtcaagtaaaatgaaaattggttttctgcatgtcgcaattcctttttatttctaattatgaaatgtttgcaactggagttttggtttagggtttcaattttcaaatacatgttacatgtaagtaagtaactctttccattttttttttccggttaatggtaactttattcagataatgttgtgggctaattaatgagctattatcttgttggctaaatatagatagcagttaatcagttattatctatttatgcaattctgcaacggaattctggttttatcatcttcctacattaggctggaggtagtaggattgggttttatattttaatcgacaatccttatgggttaacatgtcattagaatagtagaatcatgaatgatttgcggtttatggatctaaggcatatccaatatttgttctattagctttgattctcagagaattttcttaaatgggataagtatatcactaagttggtgtcatcagttaactaatcaattggaaattagtgccgttatttttgcgtaaatactttttgttatttaatctgtagctgtttttagcttagaatgactttggaccacatagcaaacagctcttacacagttacaaggttgttgtgctgatagttttaagtttgctatcttttgtatttctatacatgacggcatagttcatttatactttgatcctttattcattacactgatttaacctcttaagcatacacagtaaataaaaatatttactggtctctacttttacttgtctgtgccaacactaaaatcaattttacatttaaatcagggcaatcaaaatttacgaatacaacaagtcgatct

SEQ ID NO: 109244 - DNA, 735 bp, Aquilegia coerulea
  Intron number 1 from transcript AcoGoldSmith_v1.020227m (l ocus AcoGoldSmith_v1.020227m.g) derived from phytozome v7. 0 (chr-ID scaffold_2; pos 5700269 to 5701003 reverse stran d)
tttgcaggtagaataactggtctgatgaattttttcatacatattttacgaaataaattagtgaattgtaacaattttaatgagaagacttagatttgagtattgtagggggttatgacaagtttggatgcctgccaatatggcaatatcaaatcatacagagtcaaacttgattggcatttgggatccatacttggttacagttacactaataattgttggcatatttgataagaacgtgtgtctgtacctagggtttcaaagctggataatgtctggtattttattgtgtgtgatatactaggtctaaaccaattattggttcatgaatgggacaattttagcttacaaagccgtagtccatgaccaatcaactttgtttatcatttgtatgtatttctttttctgttcaaatctataagttcattaagatgtgtaagtactgttggttcatccaacgttcttcaaaacatttgaaaatgatgtagaagcttttcgagtaattaggagattatcattgagcttgctgtggagaaaattgcactggttgtgagcttattactttagaagttctttctttgtacttgccaaggtaatcagatacaagataaataaataatgtgtaatcaaatcatataatgattaatgtgccattgcacaaaaggagttgtttctgttacacacaaaaagctgacaaatattctgtcttgtaggtgctctctaagagaatccatt

SEQ ID NO: 109245 - DNA, 748 bp, Aquilegia coerulea
  Intron number 1 from transcript AcoGoldSmith_v1.015367m (l ocus AcoGoldSmith_v1.015367m.g) derived from phytozome v7. 0 (chr-ID scaffold_86; pos 540711 to 541458)
tctccttgggtacctgaaaaagatattagatcgtggtttgttcaagaaagatactcgtgtcgtgacgcgcttgttgatccaatggcaagggcattcacctgaggaggctacttgggaggattattctcaattttgttctcattttccagatttttcagcttgaggacaagctgtgtttgaaggcgggaaggatgttaggaaaccgactctactgatatagtttgctattgttagtagtattctagtacgtatatgatttatattattgtcagttaggaatttaagttagattaggattagttattatttgcctatataaaggacaagttgtaacctggatatttattgattagtaatataaagaattttaggtggtttttggtctccaaatcaaaatatcaaactagggttcttgatttattggttaaggatcctatcagaaggagattttgggttttggaggatgttgtaagggtggaagattttgaagtggagaagggtttataatttgagtagggtaagttgatttcatcactttgattttgatgtttttggttgattgcttaataatgcatttgtcttgctttatggaaaaataacattataagaaggattggggagatgttaatagaaatacatcaaaacattctgtttgttagaaatcgcaatgctaaagtccattctatttgtgtttatgttcttctgttttatagaaacaatccagctcggttcaggttggagtgttgat

SEQ ID NO: 109246 - DNA, 1037 bp, Aquilegia coerulea
  Intron number 1 from transcript AcoGoldSmith_v1.026508m (l ocus AcoGoldSmith_v1.026508m.g) derived from phytozome v7. 0 (chr-ID scaffold_22; pos 2912547 to 2913583)
agatctctacaagtttgctccttgggatcttcctggtaaacagagtttcttaattatgttatggttcatgttatgtattagaggcttcttttagttgatgattattgctccattatttcagactttatggaatagtttttcatttttatttttttcccatttcttatgactgaggttttttaaccagagggttagggaaatatgaaatagaaaactactaagccattgggtgttgttgataaattacatgcctatagctcaccactgcctcttctgctgcatctagagaatgaagtgggatttggatgaatgtacacttacagacagtgcttatttagaggagatggacataagctcctttccatcttacttttactgaaaaaatagcaaaaccaaatgttgtgagtttacattcacactagaaaaaaatagggtaaagggcaaaagctcctagagaaccagccaaacaacatgccttcccaaacttcaccttaaagcactcccctgggttttgtgaaggacggtttatcatgattgtttttaattaacatttttgttggtacaaatattatgcagaaccatgactgctgaataagtgaaagtaggaattgatctcacgactttgcaacccattccccaagacctgaccattgggccactgcaccttcaacatgatttaattccataccggttcaagtatttggttttcttctagaaagaattatggctatagcttagtactagactactagtcttctagttttagttaaaagttgtgataaataaaagtgttgacttgttacagaagtaaagtttttgctaaaaattgtgataatcaaaagtacttaaagatattattaatgaactcagcatatacttaagccagaggttatgtgcagggattgcatttaacacataattgcatagtttggtaatttgagtgcatttatgtgattcctatacgaatttatttgctggacctcattttactcttttatgcagacaaatcttgtttgcggagcaaagaccttgagtgg

SEQ ID NO: 109247 - DNA, 795 bp, Aquilegia coerulea
  Intron number 2 from transcript AcoGoldSmith_v1.005913m (l ocus AcoGoldSmith_v1.005913m.g) derived from phytozome v7. 0 (chr-ID scaffold_34; pos 1189409 to 1190203)
cgtactaagttcatgtaagccacattcttagcttgaaatttgtttttaggtgtattaatgtttaattacttaaatccattatctaaaccaggatatgagaatgtatattggtgggtcttaagttgtccaacttttctttatctgtttttctttgttaaaattggttgagtatactatgtatgagtgtctacagtctacaccacttgtgagttgtgaagtccacatgaaaagaggacacagaactcattgttcaacataagtagaattgaagtggtatactagttgccaggaatgaaatttatttgtttggtaaataatgttgagatgtcaataaaactttttgatttcgaataatagcagcatccagattttttgttactagtggaaatcgttaaattaagatttggggctaaaattttagactgcttgaagattgccatatattttgtttggtaagattaatttgattttccatgtttttctttaagtttggaaatttctttttactctaggtatttatcatttcagctaaatacattgtttctaggaaaaaaaaactatttttctttaccaacttcatctcttgcacaatgacggcaattaatgatgaggtgattaaaaatttgaagcattatactctattattaggtataattgcaaccaacatgcttactggggctatagaaatccgacctaatagtttaaatttcgacattttccagcattctgttatatgttttgacttgagcatatggtttaggatcccgattataggtggaaaggagctagacttac

SEQ ID NO: 109248 - DNA, 556 bp, Aquilegia coerulea
  Intron number 3 from transcript AcoGoldSmith_v1.003003m (l ocus AcoGoldSmith_v1.003003m.g) derived from phytozome v7. 0 (chr-ID scaffold_2; pos 9417063 to 9417618 reverse stran d)
tttcaaggagattgacgaagactcataattggacggtttgtttgttaatcttaatttgaaactatttagatgcaattagggtttgtttgttcacattacaatctatagtatgtgtagtgcacttgtgtgcttagtagttgctagtgactattcacagtgcttacaacacattgtaattggtttgatccactgcaaattcggattacaatgtacgtttgtttgcaatgtggtcttaaaatgtgcttttattaagtgaaattaatttggggaaaatggctttctaactctagtggttgtggttgagacttgagagatgttaaggaatgttgccaactatctgtttttgacattttaaatacttgaaatttgtgcatttagagttgcaaaaagggattgaataaacttacgatttatcggagaattgtccctaaaatgacaggataaacttttttttgatttagaacattcttctacttgactttattgtagattttcttatttgtatttgttgtctttctcaggtagcgttgaaagttctcatagttattcataggaa

SEQ ID NO: 109249 - DNA, 996 bp, Aquilegia coerulea
  Intron number 1 from transcript AcoGoldSmith_v1.003564m (l ocus AcoGoldSmith_v1.002948m.g) derived from phytozome v7. 0 (chr-ID scaffold_35; pos 199698 to 200693)
cctaattcttcatccacaacgcaatacaacttcaggtttctcaatagcttacttccttttttttttttttttcttttatatattatttttagtttaatttacaatttctcagtgtgtatcgcttgacctaaaattaacgaagactggatgtattccttcaattacagatttgttgtgcttgctattcaataaatccatcccaaccccaatttctgttagggtttttgaaaaccccaattttaacgaagactgcaacttatatttattctaccatttttttttttttttcaaacattttgttaaaattgcaagtaattgtagtggagtggtggtggctaatggtggtacaatttcaaattttaggttgcactttcaaatattttttaatattactaattttgtgataaatagaaatttttaatttgaagtggccctattgtgaaccaatggattctatttaagtacttgacccccccccccctctttttttttgagattacatgctactctggtgttttttcataggtaatatttcatcattcttgttaccatttctcataattgtatgccaagctagtaaactacaaatatctgtaaatgtgtatcaagtaatatgcatactatgttggtggtctgaaaaggaatacttttgatatggtcatcgacaatgtaatgcactttacaaattttgataatgatgatgaaaatcaaaacttgaagatttagccaaagcaaaactaccacaatagtattcccatagcacatccaaggtggtccccggacatttttagctgccaatatccatccataaaatttataagagctcgtcgtgtcatacacgtgtcccacaccgacacacacacacctttatattgttatttaggttggtaatcaaattttactgctattcatttggctatatttaagtattactgactccattatttgatgttcattccagttctgggcgtttggcttgttgtttgttttggcgcc

SEQ ID NO: 109250 - DNA, 723 bp, Aquilegia coerulea
  Intron number 1 from transcript AcoGoldSmith_v1.012127m (l ocus AcoGoldSmith_v1.012127m.g) derived from phytozome v7. 0 (chr-ID scaffold_13; pos 5525000 to 5525722 reverse stra nd)
ctgagagagcgcgattgacatacatttgttttcaggttggttaatggttcatcgttcgttcgtttattttgattccgttctatcaacaatcttcttctaactcaattgatttgaattgaattgaaacctttgaggtagatcaatctcttattaatcttgctgtgtgttgtgtttgtgttcatactaaaacgagattgattgttgtttacgttatcaaaatcaacattgttgttgttgttgggaagatttgtttttctcttggatctagctctcatttactatgaaatgaattacaccagatcagatatatattaactagtaataatgataatgatatacattctgtttgaagattctgaaaatcaccgctgcatttgcgaaaattggtcaactagagccaaatatacgtcttttgcttttgcgagagaaactattttgtttttaagtagtgaaggatgatttttacatcaggcaggggtaacatttcggtaaaatcattttaatcgcttcatttattctcttgttaagatttgtatttggctatattcaatacaatagcattcgtaaatcgtaatccctgccactagcttcttccttttagttgtcgtatattggggaattatcttttttttttttattactggatagacatttaatggtattccttatacagccaatgtttatgtcattgcagttgctatattattcaagcacgttttaagc

SEQ ID NO: 109251 - DNA, 786 bp, Aquilegia coerulea
  Intron number 1 from transcript AcoGoldSmith_v1.003919m (l ocus AcoGoldSmith_v1.003919m.g) derived from phytozome v7. 0 (chr-ID scaffold_3; pos 6737662 to 6738447 reverse stran d)
ctctagctccacttccaccatcaaaggtgacactcacaaatcacaatggtcatatgatgttaattactgttatcatatatatacttataattattcacacccattactgcccatctgaatgtttgtaactgagtttattaatctatgttcgactttttttcatgcatcttactgcaatagcatcccacaattttcagaggtttgattttccattaaaaaaaccgagtaatgtcaacacaatggacttttgttctgactaccacagcaagtggcctaggcaggactgaccatgtgacaccagtgtgcatggttgaaattgttgttaatttgcagtcacagactcatagagatgttcaaatctagtaagcaaagcccaaattgcacctttttatgggctttagcaatacgaagtttgctcagtgcattcctttgcacatatctgaaattaatgtactttcattttcttcacaatcactaggaaattaggaatagtggcttatgattccaccatccttccgatttcgtagcaaccatgccaaagttaatttctctctttgcacttgcaaaattttttttttttgtacatgcatatatggtgtccagctagttgtgaaatcgcagtactactagctaaaattttctaaaagcagatttttgatgaactagagaaactcgtctttctaatttgtgttcttgtaccttgggttcaacctaattacttactcattaaaatcatcctcatttctgctagatctgaaaaataagcagccatccctgaatatcgtt

SEQ ID NO: 109252 - DNA, 944 bp, Aquilegia coerulea
  Intron number 2 from transcript AcoGoldSmith_v1.027452m (l ocus AcoGoldSmith_v1.027452m.g) derived from phytozome v7. 0 (chr-ID scaffold_93; pos 422687 to 423630 reverse strand )
ggcaggtaaaatatcatgacatgatttaattaaaggctaaatagattatattatacattgaaatagaacacctactaaagttgcattacatcgtgagaattatctgttttcaataagaacttctttccaaattgattttggtccatatatgttttcaattgttagtctaaggtggttgaaaactataaggattttttattaaaaaaaaaaaactataaagatttgacttacaattactatttttttttatgaatgatttactattttagttagttggaattttcatcattatgtaaaatcatgtaagtgattggtttattaaatgaaattagaattcaaatattattagatacctggttgtagattctagatgtgcaacacctgatttcattaacaatacaacatgggtctggtaaaccatgatatgaataaacattattcagtgaagtccaacgtactaccatctttaccaatggcctgagcattaacatccacaataggggtgccaagtttaaaatgtaatcagaggagctaaccaagctagctaattagtaacatatatttgttcaggcaaattctcttccctagaaacgtttttgtcctttgaaataggatatgatacatgtacctacagacaatatgttaacgttgatgttgagaggtagatgttacataccatcactgtattattattattattattttcatgtattaatttctgttaatatagatgttgacaggctcttaattatctgtgcaagtgtgggtgttatatttttagattcttgacatcttcgactaatattatctattggttatttgattttgcatattcagccatttacacgatagagttccagaaaagaggcttaccgcatgcacatatactaatctttctggatggagcagacaagccagatacttcagtgaaggtaaacaagatt

SEQ ID NO: 109253 - DNA, 424 bp, Aquilegia coerulea
  Intron number 1 from transcript AcoGoldSmith_v1.007784m (l ocus AcoGoldSmith_v1.007784m.g) derived from phytozome v7. 0 (chr-ID scaffold_58; pos 986091 to 986514)
cctttaggtggaactggtagtcctgttggtactgggtttgttctttcttcatcatctcttcaattttaattaaattttcatatatttttctcttaattaattggttttttaatacccctttatctaaaaattgaaacttgaaaaacaaatttagtcaattagcaagaaaatgaaataatgtgttgttgggacttgggtggagtgataattgatgcaacatgcaagtccctttcaaagtagatgaaagagttctatctatattaagagacactctttttgtgattttttattaggaatttgacaaagtcaacttgaaaaggctttttgacaaaagtttgcgatttttttctttttgtttaattggttgctttttgaatgttgtgttgtaggctttattttacgaaaattgggattggttctcctt

SEQ ID NO: 109254 - DNA, 436 bp, Aquilegia coerulea
  Intron number 1 from transcript AcoGoldSmith_v1.003986m (l ocus AcoGoldSmith_v1.003986m.g) derived from phytozome v7. 0 (chr-ID scaffold_2; pos 7729816 to 7730251)
taaagttgcgttctttagaagcgaaactatcagaggtatgctaatgtatttcattattgatcattatagttatagacgtcttgtatatagaaatttagaagattgagatgatattgaattcactatgaacaattcatctgagaagattttaattgtgaattagattgatttttctttaaaatcccattttagatattttgatttaaatactttccatgaatggtttggttttctgtgaaaaaaaaaagatattattttgaaacttttgatgcaatatccaagtaattatattttttgttattaattgcttggaagatgtttaagtatttattttcagtttcagctgaagtttaggagctttcttatgtatgtttgtgtgaatagtttaagttaattttcaggttttgttattattggcagatttagtgattgtgga

SEQ ID NO: 109255 - DNA, 305 bp, Aquilegia coerulea
  Intron number 3 from transcript AcoGoldSmith_v1.003986m (l ocus AcoGoldSmith_v1.003986m.g) derived from phytozome v7. 0 (chr-ID scaffold_2; pos 7730850 to 7731154)
aagtcagagtcaggtgcagcactttactaatagtgaatacactgtgattttcaaagtagacttgccacttattgtcatcgccatgacgccatagtacaaagcttaatgtaaagtagaaacgcttagtgtaattttcaaatatatctacatatatttgaaattttgagacattgctggtttatgttgaatagtactacaatgatttggctgttaagatgatcaagttgtttatttgttttgtatatattgcttcaagctttcaaaattacggtattaagttcaaaagtatgtcttctccctcagat

SEQ ID NO: 109256 - DNA, 881 bp, Aquilegia coerulea
  Intron number 1 from transcript AcoGoldSmith_v1.014309m (l ocus AcoGoldSmith_v1.014309m.g) derived from phytozome v7. 0 (chr-ID scaffold_3; pos 6498581 to 6499461 reverse stran d)
gccaaggttcttgacccagcaagatagtattttggccctagagtaattgcgcgggatagctatggtcaagaatatggaaaaagtgttgatgcgagttcttatgctagaaaatcattagccacaagttttccaatggggatgtttcaactctggttatccctccttttacattgtgcttcccaggccactagcgagaatttagtggtgtgatagccagaagatgacaaacatagaatatagtttcccggcactttaaactgacattaatgttgccatgttggtgtgtgttccgtaaaacagatgggctttcacgctatctactctcagaaaacttggacttcgctacgtactaaaggtttggtactttgctgtcctgtaattaaacattgcaggctgcagtacgagatgagttgaatgtgtactgtgtgaatcatgaagtcacaatcaaacatcatatatagagagtgaaaggagatggatgtgcagcattagtttacattaagattacagcagcattttattttacagtaggccaagccgagtctcgagataaaatgttttccaggtctaacaatcattttattcagcattatgtgcagaccattgatgctttatctgcattaacatgtggatatttgcacaaggattttagggttagcactgaagaaagggatagaatacgtgctcatacgcttaagaacatgttagacatgaaaaagttgtacttgatattagatttggacgagctgctgaggaaacagattctatatgaaagatataagcaaagtaccaaacctgcaatgtttaattacaggacagcaaagtaccaaacctgtagtactttggtagaagaggtgtttctccttctaaatcaatgaagg

SEQ ID NO: 109257 - DNA, 413 bp, Aquilegia coerulea
  Intron number 1 from transcript AcoGoldSmith_v1.004133m (l ocus AcoGoldSmith_v1.004133m.g) derived from phytozome v7. 0 (chr-ID scaffold_58; pos 482093 to 482505 reverse strand )
ggagtttcagaaagaagccaatagactaattcgaggtttgcttcttttacttctgttatgatgcattagtacagtccactttttgtagctttctatttgccatatagatgatagtgcacttgcaaacgtatgagagacaaaaatttcatatcacaaatattcaatcaagaccctccaatttttgtgttcatgcttggaaaaactattaaaattgtttgtgtaaatgttccttatccacacttttcattaatatattcaaagtcttctttgttgttgtttgatctttattcttttgtttttgttttgtaggtaaaaatgtaaaatagcatctctttaattctgaaacaattttattgtcatactcgtacatatcttcctcaaatctggacttatcaaattgatttccagcaatc

SEQ ID NO: 109258 - DNA, 655 bp, Aquilegia coerulea
  Intron number 1 from transcript AcoGoldSmith_v1.009966m (l ocus AcoGoldSmith_v1.007972m.g) derived from phytozome v7. 0 (chr-ID scaffold_24; pos 2874834 to 2875488 reverse stra nd)
ttgtattacgtgaagttcgaggaagttctgctgaggtttgtttattcatctttatcagtcgatcgatcatcttgatttgttttttcttgatttgaatcaatgaattctgttcaattctgtttgatcttctctttctttctttcgtttcttggatctgattgttgttttgatgattttgatgattaattgtatgttttattcaagaatttcgtgttttatgtttgaaatttcttgaagattgattgaactgttcaatcggtagagatgattgattctagttaatgaagtatggaattcgttgagtctttttacaagattcttcatctttattcttgatttttctgctcttgatccaaacatctgtatactcgtttataatcaacttgtttttaaagaaatggatctagtttcagaattatgctttttgttgcagagatttcttgatctaactattgttggtgttcatactgtagtattaggaacctgactaactagagaaacacattcattttagcttattcatcgtgacaagaacagttactgcttattggattgatgtttattaagtcataaaattctgttgagtcaatcatggtagcaggactattcttcaagcacatctcctgacatattcttcttctgcaggtgtacttgc

SEQ ID NO: 109259 - DNA, 663 bp, Aquilegia coerulea
  Intron number 1 from transcript AcoGoldSmith_v1.021301m (l ocus AcoGoldSmith_v1.021301m.g) derived from phytozome v7. 0 (chr-ID scaffold_8; pos 4244398 to 4245060 reverse stran d)
acacaactcctcaatcgtctttctttctctcagaggtaagcattaagcaatgcatctttctctctctatttcttgtattcaaactattgaacagatttagattgattgaagaaactggggtgtttaaaatgtatgtgtttttctttgagattttgtattttttatatgaaatttgactattggtgatattggattctatactctagagtgatttttccaaaatgggtatttttttctacttatttgattgcattcagcaatgggtctatttggaattttgggggaggtgaggtttgggtttgtttacagtctggagaacttttatgtcaagtgatgaaatttgattcaaaacttcacttttttgttttttgatgttgaatgtaataacttatttcattgcaaaatttacatttaatgttaattttatgcccctttgattttgtttgcaggttggactattgtgttaatctcatccagttgcattgtataattcctaatccacatcattggtaccctacgctatccatatcaaatggtggtatgaattgtttagaccccctttgagtttcttcttttcgtttttttacaatgtcacacaaatttcactagtttctaaattctaatcgaaaattttataatttttttgttagtccatagttgcga

SEQ ID NO: 109260 - DNA, 666 bp, Aquilegia coerulea
  Intron number 1 from transcript AcoGoldSmith_v1.001747m (l ocus AcoGoldSmith_v1.001747m.g) derived from phytozome v7. 0 (chr-ID scaffold_26; pos 1383818 to 1384483)
ccgcctggtgtgtctggtaagcaatgattattttgtgaatttggacataagtttatgtagaaatcaaattttaggatttttgttgtagtttctagggttcgaaattaatgcatgtagattaaaccgttatgcccatgtgttgtctggtactttggtattcttattttgtaggttagatttttgatataggttgtggcatacatacatacatagaatggtatcgacattgattcgcttaaatggtttgttgtgatattactactctgcttattgatactgttttggagacatgtcaaggtttttagactctaggataacgctaaaagctatttgtagttctggtttattgggcatattcgagacaatgaatataaggcaatattatgttttggaaaccagccaacaaacttggaagattttagaacaagataccgagcaaccgcctttacagaatgtggttaccgaattctgttttgttggattcggtattctgctcttctattgttctagcatgactttcttaccatatgttgttctctaacttctttaattggtcatgtcatatattcagaaaattccttctttgctgtttttacttatcattactgatatgagttttttttccttgtagaaaaagctggtggaggcttgatagaggtgcaaaat

SEQ ID NO: 109261 - DNA, 836 bp, Aquilegia coerulea
  Intron number 1 from transcript AcoGoldSmith_v1.004834m (l ocus AcoGoldSmith_v1.004834m.g) derived from phytozome v7. 0 (chr-ID scaffold_31; pos 2140762 to 2141597)
tcttattcgcgacactgttggaattgatcctactggtatgaatataattctttcacttagatataaattagttttgttcatagaaatatatatgttttgtgtcaattttcaggctcaaattagaaatatgtttttgagtaaatttggcaaatggcaagacctttttgtgtttaaaaaaaaaaacagagaaactatagaaaaaaaaaaataaaaaaatccaccccttgttcaaattctggccttaaaggcattgaagaatctactgtttggtttattggttaattaaggtttcacctgtatcatcaatagattcatgacatttatgtaaatatgaagataacttcagcaagaacagagaagaatttatgagtgaaaatgtgatgacatttcattaccaaattacaagttgaggccacctacttaattataatttcgatttatcatgtttccgcataaatttttgaagaagctcctctgtcaaattgttaagaactttgttttaaacatttaaatcttgtcaataagaagctattacgcccaacctagtagctaagatcgtggttggtaacttggtatgtagatgatctcatctttattatgtgtactaggtcacatcattttaactacacaaaatcaatatcgttggctaattgcaggactatattataccatctgtatctgtttacggtttaccttcatatttcactgacgacacttattcagtaatccataacaacaattaattaaaaagcttaccatgatagagaaagtattttgattgtataactttaatgcgcgcagaactgcaagaggaacctctcaattttcttccagga

SEQ ID NO: 109262 - DNA, 655 bp, Aquilegia coerulea
  Intron number 1 from transcript AcoGoldSmith_v1.003388m (l ocus AcoGoldSmith_v1.003388m.g) derived from phytozome v7. 0 (chr-ID scaffold_2; pos 4668455 to 4669109)
attgctgatcgcatttggttcttctctgatctaaggtattaaactagctcattcgatcttataagtagattgatgattttagtctttattgaagattttttaattataatttgattaagttgacagttggcagtgagatgttttatatgaaactttccttcattctgtttattagattagattagatttggtttggtttgatttactacttataagtttactttgttatattctaaagtggatagattgtgtgattatggagattttaaattttaattgaattattcatgtttggtttgattttatatgaatatatgtttgtttcttaaaacatctcgcaatgtaacaatgttgttgaataaaatatattttagaagcctatgatgcgtgaaatttggtgaataacttggccttgctaattattttctgtgtcactttgtgttttgatacctattagatttttattcttctcaagtgtttattatagtaggagattagtaaaaattgcttttagatttactgaataattaggtatcggtaatgtgctcattccaaatttatgattgttgaggtgcagtaaatgattgtttattaagtgatatatgtacttttgttaccaggcatttggctgatagtttctttaggccattttaag

SEQ ID NO: 109263 - DNA, 842 bp, Aquilegia coerulea
  Intron number 2 from transcript AcoGoldSmith_v1.004893m (l ocus AcoGoldSmith_v1.004893m.g) derived from phytozome v7. 0 (chr-ID scaffold_35; pos 1185028 to 1185869)
cgaaatctctattactatcagtagaaggtattcaggtatggtttatgaaccaccttatttagatgacaaaatctctaatactatcataagtacttttcatttttaatagttgtatcatttagtttagacaccatgataatatatgtataatgtggctggtctcatggtcattaagtgtgtcttaaggaatgtctacgggatgaacaaactaatgcctaatggttgcgagcaactgccctctatagtttacttgtataggaaatgtttgttgtaatggcctaaaaataagcacagtttgggaggttgggtccaatgtcttgggatcaagtccacaattatccccttctatcttgcatcgtgttcgaactgtagttcaaaacatcaattaaagaaaaagacaattttttgcatttcatttccccattttttttatgaaactagtattgctgaagcaatggggataatttcgacttgggtgtaaagttgtaaactatcaattcaagtcaaaagcaattaagactgtaagggctgcaaaatggaacattgtttgcctctctttttttttatatatattcaacgttttatatacaagatcatgtttggtaagtggtaattcagtaaactgcagggtgaaaacttagttctgacatttttttctctctcgtattatgttgatatatacaagaaaatcgtatgcactctcacaacatcgttttctggttgaattaaactggaagcaggtgttaaagcgttttatgttcttatctgtaagagtaacttgtaattttttttcccatttattgccagacttttgcagacttacaaaccctgttcaaacctgt

SEQ ID NO: 109264 - DNA, 1006 bp, Aquilegia coerulea
  Intron number 1 from transcript AcoGoldSmith_v1.000931m (l ocus AcoGoldSmith_v1.000931m.g) derived from phytozome v7. 0 (chr-ID scaffold_83; pos 69218 to 70223 reverse strand)
gggtggtgttgctactgagacattgcagctcagtaattctttgtttttctttgaaatgctgcttgtagtcaatgaaatcatagtatagtttttttttttttttttgtcagattttatagctaaactttattaaatagatgacgcatttgacgttacattgttaatcaacatttgtttgatctcgtagtacatgatcttaaacatcggcagttttgagatttcgctaagtatacataatactcttagcaattttgacactaaactgctcagtgtttttaatgattgtagggtcgaaatggaaggttaaccatgtttcgaaattctttgtttttctttgcaatgaaatcatagtatagttctttcagatttcacagctatattttgttgaatatttgtgcgcaattgatgctacattgttaatcaccatttgtttgatataatctgcattgcttgttttcaatgatactcttggcaattttgacactaaagtgctcagtgtttgtaaattgtaatgtttatagggtcggaattgcagtttaaccatgttttgaaattttgggcgtactgagatttcaattatcagatacgtcacaattgctattactggcaatttgaattggtttatgaatgagtaatcagatttattcttagactagccaaacaatttgcttcactagtcgcccgctttcaagcaatggatgagtgcctgcatgcgaaacttgtgaattttattttggtggcttactcttgttctaaatgtgtaacgccatttctcttatgttaaagccaactgtctattttgttaggtttcattaaatattcaaattcaattattaaatgtagtgttagtttcaaattttcagtaaataattagcttagcttctcttaatttatcaaattgtttaaatacctattttattatgaaactttgccgtaaatattagtcattgaccacatttaatttttttcagaggacactctttggactggagtgccagggaattac

SEQ ID NO: 109265 - DNA, 537 bp, Aquilegia coerulea
  Intron number 1 from transcript AcoGoldSmith_v1.008571m (l ocus AcoGoldSmith_v1.007038m.g) derived from phytozome v7. 0 (chr-ID scaffold_13; pos 769497 to 770033)
tctatctttcccgctgcgaaagccattataaccaggtaaatagaaagcttatctctcttcattcaatcttctctttctcatctctttaatacgttttaattaggttaattcaaacttttttttttttattgcttcttgctgtctcgaaaccctagttgaaaattttgctagtgcaagtttcatgataaataaattatttgattttctaattatattgtcgaaaccctagagaatgttgcaaattggttcaaagatttgttaattttataattagttttagaaagttgcattatttttaaaatatattctattcgaacaataccgaaaaacctttacgttttcttacgctttattctttccttttgaaaaaagctactcaattttgaatatggaatttttttttttttattggatttgaattaaaccctattttagtttttttaagttgaggagagaaatcttgtaagatctgaatttatttaatttaaattgttgtgtttgattagagactggagacagtgaagggaaaaagaatct

SEQ ID NO: 109266 - DNA, 688 bp, Aquilegia coerulea
  Intron number 1 from transcript AcoGoldSmith_v1.015642m (l ocus AcoGoldSmith_v1.015642m.g) derived from phytozome v7. 0 (chr-ID scaffold_86; pos 614756 to 615443)
tcgaaccacgttaaatcttgtgttgtgagtacttgaatttcttttatcgtgttctactttatagttacatatacttgattgttattctagtagttagttcttcatactattgtctacaagttagtttcttcaaggtattatcttcgataaaggttacacctttattggtgtagatcacgttgtgaacaaatcgcttccgcattattgcattattggcattattctcaacaaattggtatcaaaagcagaaggttagtcatttgggttgtagaagggattgcataacattgtttgtagggttttgttcggttttaggaatctgtccagattcgacaccctgtggtaaaatggccatctttgtactcagatatcaaaacttcgatccgttttttgggttggaaagtagactcttcaggctttctaacagtatatggtacgttctctggttcaaagtattctgttctcagtaattctttgacgttgacggttctgtttttctagatttgttgaaaatccaattttgggttttcttgagctttggttacaatcttggagattaagtttgttttaaggtttaaagttgttgaagataaggtgtttgaagaaagtcccaagagagatttttgggttgtagacaaggtgtttaaagaaattactcaaagagtgttttgagtatttgtttgataga

SEQ ID NO: 109267 - DNA, 476 bp, Aquilegia coerulea
  Intron number 1 from transcript AcoGoldSmith_v1.019719m (l ocus AcoGoldSmith_v1.019719m.g) derived from phytozome v7. 0 (chr-ID scaffold_13; pos 4690753 to 4691228 reverse stra nd)
tggagaaatagaacgaatatatctgtcacctgaaagtaagaaatgaaagtttatgttgcttcgttttagttatttggatttgtggtaatcctatatggattttggtgattaatcaagttttcattgcattactatatcaggagccaaaaaattatttactttgccgaacatcatctggatttaatgcatgtaaaattcttttattatttcagtcttcacaaaattcttcgaacttttcccccaattgatccaaatttagcaaatcttcttctctctgagctatttattaatctaaactttgtttctatgcatttttatttttgagtttttgtttctcttgcaaatcctttatttaaaattttaaacccatttatattgctatataatatattatgtttggtggttttaccatttaattgtacttcttcgtgatcgtaacagatcctgcagctcaagtacatcgaaaacgagcaggt

SEQ ID NO: 109268 - DNA, 566 bp, Aquilegia coerulea
  Intron number 1 from transcript AcoGoldSmith_v1.011771m (l ocus AcoGoldSmith_v1.011771m.g) derived from phytozome v7. 0 (chr-ID scaffold_22; pos 2733728 to 2734293)
ggtttatgagttcttatatcttgagctttttgtgacagtaggttgtaaatccaccaaagaaaacttaaaataaaggacagaagaagaaaaacgtgtccacagtagacatcacaaaacacacacacaaacacaaaaagttagaaattactcaatgaatagtgattgtctaagttgagaaggatttaattgaaaagttgtccactggtcaacgcttgggaggtgggcccaaggtcttgggatcggtctgcatcttcgcagggagaaagggattgagggggataattgtaactataaaaaaggatttaatcactttctatcttgaattcttcaaaatatgccttttttaatagagctaactaaagcaatgtcaatatctttgtgattatccagaaaattataattgtccttagaatttatttgtttatttgattcccagtttccagtttgtatgcacattgacagtagtgacacacagtctcctacctcagaaacagacgcatcattcaggtatggagctgatgcatcaagattacatgtagaaggggcagtgaaatcatatccaggac

SEQ ID NO: 109269 - DNA, 533 bp, Aquilegia coerulea
  Intron number 2 from transcript AcoGoldSmith_v1.025572m (l ocus AcoGoldSmith_v1.025572m.g) derived from phytozome v7. 0 (chr-ID scaffold_13; pos 3224656 to 3225188 reverse stra nd)
agtgtcgccataggatctgcagagggcttagcgtaagtacacacaattagttcatttacatccattgatgaatgtttttatacatgtgatattgattgatatttggtgttttagaaaggctaatttggtagtgattgaaatcatcttccttcaaaatcttggaagaacattaggtgtgttatattgcatgaaaaattggtgttcaagaaaaatgtgttcgtgggaaactatttttattctttattattttcttgaaagcaaacaattacataattcaaatgtcaaactaaactcatctgccatgccaaacatcatgaattacattatttaaaattggttgtagttgttgtcctatttggtttggttttgcttatgattccaagttctggaatgtatatgtttgtattggataacttctaaaaccttgaatcttatatatatctagttcttatcatcaaaaaaaaaaaaaaatctagttcttgagtatcattcagaaatttgttttatttgcttgttttgaaggtatttgcacc

SEQ ID NO: 109270 - DNA, 798 bp, Aquilegia coerulea
  Intron number 1 from transcript AcoGoldSmith_v1.008130m (l ocus AcoGoldSmith_v1.008140m.g) derived from phytozome v7. 0 (chr-ID scaffold_35; pos 56723 to 57520 reverse strand)
ttcacttcttctactgattctttcatcttgaatcggtaatttaattttaattttcagatcttcaatgaatcaaatcaattgtttgttgtttgtttgtttgtttagtttagatctatctatctatctatctatctatctattaatcaacgattctttcttaattttatctttttagtatttcgttttttcgttagatctggtgaacgtcaaatcaaatctcatctcattaatattgtttcaacataatatgtatttcgagattattttattattattttttttaatatatatgggattttgccaacttaaatatgtaattagcttatcttttcattcatctgtgtatttcttctacagttttaccttacttgctttacacaacacaacagttagttagatgcccatcaccttactgccatatcatatgagcaccaaatttgaacttctgtctttcaactgtcaatttctgagatccctcaccaactaaaagaggacatgttactgtatacaccaacattgctacaatatacataacagctcaatctattgtatgtattgtaagatgataacatcacatctacaaggtggactcgcaacttagcctagcctaatcacattgccacttgctttttaatagaaaacaaacactactcaatttcacttgtatacatttcactaatcattttctttaatataaaattttattgcaaggtacaaattatctttaatgttttctcagagtggtgctaaagtttatgaattttatattttgattgtagaagcttaatattaagtttc

SEQ ID NO: 109271 - DNA, 755 bp, Aquilegia coerulea
  Intron number 4 from transcript AcoGoldSmith_v1.005490m (l ocus AcoGoldSmith_v1.005490m.g) derived from phytozome v7. 0 (chr-ID scaffold_13; pos 1987969 to 1988723)
gcttcaattgaaacgtttcgattactttagctacggttagtttatcaaaataatttttttattgaaagaaattctgttttataattttggtcctaaaacataatttgcataacaaaaatagtgttttagttgtaagccaatctaaacttaatttggatgataaattatgtttcacaatgttgatagaccaagttgtagaattggattcctattaaggaaccacgttggatatcagaatatagaacaaataggatttctacaaggaatagaattccttttgaattgtgacatagaaaattggatattggttttgatagaaaaattggatgtgtaagagaaaaaactttgacggttcttgtatcgtaatcttctatttctctagcaattaagttgattctctttgtgccgtggacataggcaattgccgaaccacgtaagttctcttgatttttttttttttgtttattttgcatcggtttattttactcaattatgttgtgtgttgttttattcttcaattatcaacgggttctgtggttaagcttgtgcgaggcgcaacacaagtgtcataatatataagaatctccccagaaatcacatgacctcaacattattatcatctttacctgcagtactcaaaagatccttgtaatgcttatgccaatgccgatgatgcgttttgtattcctttgtttttgtttataattttctgaattaatgatttgtaggtaccataacttctgttcacgaggcag

SEQ ID NO: 109272 - DNA, 1026 bp, Aquilegia coerulea
  Intron number 3 from transcript AcoGoldSmith_v1.006083m (l ocus AcoGoldSmith_v1.006083m.g) derived from phytozome v7. 0 (chr-ID scaffold_58; pos 489516 to 490541 reverse strand )
cttttgttccaggtacactcaattctctgatttaaacacatcaaactgctttataattttatgcattactagaggaagcagaattcttgtatcagggatatctctctttgtgtggtaattgcagatatggcaattaccttagaaatgtgcatgcaattatgatgccaacagtgccatattttttaattcgacaaagctacaattaagttcttttacaccaaaagcttgtggggatatctctagcctactcctcaaaacatttaggattcccacccaactaaatgccaaatcataggaaactgaacaatacattattttaggatggacactccagtttgtcgaaaagagtgacggtgtctaaattttgcctcgatgtttggcattggagtattaggaatgctagaaataagttgcatacttgcattttatggaagggcatgttccaagaggaatggatgcaaatggtctgcccctattgtctgtaagtgatccagtatatgcaagagctacatatttctatgttttaccttcttttggtgatatcctccaaattgtgcgatcgggctattggtttgacagcttatccaagattggtcttctaggattctgttttgagaaaaattgagccttgattttgcatccaatagccatttagttccaactcaacggtgttgttctttgctacctccagtgttgtcagtggtttcgtaattgattaagttgcggcttcagttagctgacagtgtatacgtttctcacgattgttgcttgattgtaagaggacatcaaatttatcactttaaagatgatgaagaaacagcattgccatgttctcggtctccatcattgaactaaaaatcatcatcaaggtccttaccatatctgtccagctgtatattgtttcgagagtccttcattatctcataattttctgcatttttgctgcatccactaacctaatccatgttgacgggtttcattaattttacaggcccgacatcagaaggttggagagaaacctcttct

SEQ ID NO: 109273 - DNA, 350 bp, Aquilegia coerulea
  Intron number 2 from transcript AcoGoldSmith_v1.006083m (l ocus AcoGoldSmith_v1.006083m.g) derived from phytozome v7. 0 (chr-ID scaffold_58; pos 490632 to 490981 reverse strand )
tggtcgtgggagattgcgtcttggttgggctacaggtgacagacacagcttaatctcatttgcttttctctgccaatttgaatagcacttaatgagctgattattattctcttataattggatatagtgtatgatcttaagccaaagtaatcttacaaattatcagacacatgaatggtcctaaaatttcagtcaagcatctgaaaactctgtatttataattcacatcacgtctgtcatagcttcacattgtaaaagagtctgcaattttgattttttttcttttccattagcactctcaaccttgtgacttcttgtttgttgttttcccacagcctattcttgttttt

SEQ ID NO: 109274 - DNA, 337 bp, Aquilegia coerulea
  Intron number 2 from transcript AcoGoldSmith_v1.021390m (l ocus AcoGoldSmith_v1.021390m.g) derived from phytozome v7. 0 (chr-ID scaffold_34; pos 2384769 to 2385105 reverse stra nd)
ttaatacttattgtcctggtaaggcttattttctactattgtattatctggaatttaaatttatatcttcaatgtgtttgcgtgagcactagtctgtgcgatttttgtgattaaaattatattccatccaaacaatgtggtatagatgcaattaagaagtcaatgtgcttgatttttgtaattttgttttttgtacgacacattcttgagaatatattgatacattttttggaaagtggcatcttctacattttctcatcactatatgattcctattgcttcattttctgtttctgttattttaccttaggaactcaagcgggaacaccattacatc

SEQ ID NO: 109275 - DNA, 444 bp, Aquilegia coerulea
  Intron number 1 from transcript AcoGoldSmith_v1.016896m (l ocus AcoGoldSmith_v1.016896m.g) derived from phytozome v7. 0 (chr-ID scaffold_34; pos 1210285 to 1210728)
gatttgctttggtcctctttactctactgctggtggtagatttttcaatggtgagcttcaactttctgtttctcatttctcattaatatatatatggtttctgactattgaaatgtttctcaattgacactttgattataaaactttaaatttgattaaaaaaataaaaatgtttcagactattattcagttcgatatattcttcaaataaaatgatttaacattcctttaatttgttttaatttgaatagatttccagtagctgatgacaaacagctttgtaatatgctccattggattctaatttttttatttttatttttttgcaattttctcttatgttaactttaacatatactccgtatttacttattatctgattaaatttttatttgatgaaaaatttcaggcaggcggagaaggatctgtccaggctgcaggtat

SEQ ID NO: 109276 - DNA, 681 bp, Aquilegia coerulea
  Intron number 2 from transcript AcoGoldSmith_v1.009228m (l ocus AcoGoldSmith_v1.009228m.g) derived from phytozome v7. 0 (chr-ID scaffold_2; pos 3498653 to 3499333 reverse stran d)
gccaagctactgatagccacagcctagctgaaagagtaatccatctcttctcttatttcagtttttgatgtgaaatccgtgccattttcgcatgtttgttgcaatgttcgtatcaaatttacagttgatcatatagtataatgataaatgaaaataggaaagggcattcaaaacaattcttgatattgtaaagcaaaagaataagagaagactgagaaggaaacaatcctaaaccgaagtgattctaatgaaaagtgaactgatgttgtaacacttgacataatttcttataaaggaaatgtttgtattttatatttcaaaacagataatatataatattttaaggaaacagaaacaaagagggaaacaacggttacaatttagaaggctatcatacagtaagttgtttaaaatttttagaaaaaactaagaaatgtttttattgtatacatatgcatgttgttatgaattcttagtgtattatttatatatgcactccaaatttcatccttaatgtagcaaaggatgaaagcacaaagaacttgttttgtggatgtgatatttttgtgagaaaaggtagctcatgttcaaacagattacagtgcgatgtagctcaaaaaaagttttaatcccgtggaatgtggttttgaacaggctaggagagaaaagatcagtgaaagg

SEQ ID NO: 109277 - DNA, 432 bp, Aquilegia coerulea
  Intron number 1 from transcript AcoGoldSmith_v1.009228m (l ocus AcoGoldSmith_v1.009228m.g) derived from phytozome v7. 0 (chr-ID scaffold_2; pos 3499502 to 3499933 reverse stran d)
acttggtatatcactactaaatttctactaaatcagtatttccaattcatgtttttgaatcattttcaaattccccaattattttgatttgcttttcgagtacactgattttttttattattttttttttttgtggtgtagaatttgttaataaaaaataaaataaacactagtgtttgatggttaataagaagtatattttcttgtctctgatcttgaaagtattaacccctttcatctcctttttaagagacacttaaactatgctattcaacatggtttgtttgttgtgaaataccagaatttgggagataaattttagtatttgttaaacactaatgtcatctgtctttacagtgatgattaatattgtcattcaccaatctagtatttcagttattttttaattcatgcaatgattttggtaccaga

SEQ ID NO: 109278 - DNA, 1017 bp, Aquilegia coerulea
  Intron number 2 from transcript AcoGoldSmith_v1.008586m (l ocus AcoGoldSmith_v1.008397m.g) derived from phytozome v7. 0 (chr-ID scaffold_35; pos 128814 to 129830)
ctcaaagcttttgttgacaagtaagtagttactactaccactagtatatttaccttgtactttattttatctaattcaatacatattcatatttcttttcaatcatacaatttgttctaaccatttttctatctacactctactacattataagcttcgcttcgattctacgtaactaaattacaaccttgtctgttttctctataatgttttctgttgccagactagtacttgtttatcaccaaactacacttcttatttctctgtaaattatcatgtgcccgtggatttcatatatatatatatattcttcattcattccaccatagtcctattcattttggaaaatatatatgtacactacttttatgtgacaattttcaggttaaactaattcaattatattgtttttggaaatggtaaatttcatgtctcgggaatcaggactatagtaggacacactaacttgagctgatggcccatctgttctttcgcaggaagccaagaacattctagtaatctgcgtttctccaaatattgtcagccacctttactcttcctcactaactggaattaacttcatttgcatttattgaaagctaccagtatctatttggtgaaaagagacatcaaaatattttaatcaaagatcatgcaagtaaaaaaaaaactagaaaccctcgctactgtgagtaaactacaaaacaatgattgaattttgtatccatggcgactttgaataaggtactgaccacacttccatgccccaatccaccatttatcaatatcagtcaagagttttgctgcggctttttttgtatcctaagttgcacacagtatttgacgtctggatttaaaattcctttattaagagttcaaagtgatgccgcagattgagcttttgaataatggttttcatttgggaattgggcaagtgtctattaaagtttcttaactgatttattttccacttaccttgtagatacagggcctccaatcagggaaagtaccccaccc

SEQ ID NO: 109279 - DNA, 651 bp, Aquilegia coerulea
  Intron number 1 from transcript AcoGoldSmith_v1.001524m (l ocus AcoGoldSmith_v1.001524m.g) derived from phytozome v7. 0 (chr-ID scaffold_36; pos 2143056 to 2143706 reverse stra nd)
cacgccgggcagattcttttgagaaacttgacaaagtaagcacctcctttgaccctggttacttcaatacattgggttattttgttgagagatgctatgtagtcaatagttaattttcagcattatcatccttgaatcccttaatattgtttaatataggtttaatatatgcaaacacagcactttcgtatatcagtatatgttgcctggaaatgtaatgtttgagtttacattttgcataaacactgaacacttacaatatatcttcaacaacaagatgtttctgaatgtgatatggttgtggtattgtactgggagttaattgttgattttaacattctgtacatgacttgcttttctttattcatgtattcaacaaaatgtagcttagtgtttgtaatctgtgcattttccattccatcctttcgactgagaaatggaatacgaggtcctaggacataactttataaaatactcatattacggtgttccttagatgttcatatatttggaatgttgcaatagttattgaatggttttagttaatatggtatcctatgtcaggtctatctgtttttgctaggtttgtgttttgtcctggtcttaatgatagtgtcttacctttgcagataggtcaaggcacatacagta

SEQ ID NO: 109280 - DNA, 822 bp, Aquilegia coerulea
  Intron number 1 from transcript AcoGoldSmith_v1.003591m (l ocus AcoGoldSmith_v1.003591m.g) derived from phytozome v7. 0 (chr-ID scaffold_86; pos 471550 to 472371)
ccttttgttgatcaaacggttcagaaatttggtatgatttatttttttgaatttatttagattaattaatttcattttatttggtgttattaacttattattattcaaattttgataaatttttaatatgattcgaacgaaaaccccattttacccatttgaaatgtagagacaaaaggaagaccatgatgaacacaatagtgtattagtggtaccagatgtccagatacgagataggctatgggtttgaaccttgccagcattattgaattagtgatctcctgaaaaacaggcttgcggccaatggccaaaataatgtccaaaaaatcttacgcaattttcccacttgaaactgcaaatacaagtattttcagtagtaaaaaaacatttacatcctttaaaacaatcaaatacagttactcaacaagatctcaatgaataccctcataacctgaaaatttgctcgtaattctttactatgcagaacatgtcatgtacaccttgcatttcatctagaaattgcttttacatgtcatagtccgtaaatgatgatcacattatcttcctgaatggacaagagcatttatattattctgcctaatttaacatatttcctagtcttttactctgttttattcaaatatacagcatggtttgtgcatttttttttttgatagatgtataataccaataagtcattacacccctggtttgtgcatttgttagtcctcaattaatatctccttcattcatgtgtttgtatactaatttcgcttggaaatcgcaggtaagttatctttaatttggtttggaccaattcct

SEQ ID NO: 109281 - DNA, 598 bp, Aquilegia coerulea
  Intron number 1 from transcript AcoGoldSmith_v1.004365m (l ocus AcoGoldSmith_v1.004365m.g) derived from phytozome v7. 0 (chr-ID scaffold_2; pos 8039041 to 8039638 reverse stran d)
tctttcctgacccttgtggttggactccaatacaggtttgcttctatatatctctaaaaatttcaacatcaaaacagttatattagaaacttgtataaaatgacttctgctattcaagggttttcatttgactattgatttgacaacttttaaccaaagtatgatgtaccacaaatttgattctgtgaaagctttggccttttagttcataggggttttcttcatcaaaatgttcaccgcaaagatgatttaatagcttattgcataaaacaaaatgaaacaataatttgagaaacatattccttccaatgccaaaatatagtttatctgtacagtggtgtatgctgatgaatgatatatattctaatgtgatgtacaattttccatttacaagatttctgcaactattgatgtaggccatttttcatgttgaagtagctgaacatgaagcttatacttaaccatgactgtcaatcactattgtgaaaattcattctacattatttgcgtaataattgataaggtggccaccttaatatcatggctcttgagcttaattttcaatattgtttacagggagtctcgtgtgacctcttcg

SEQ ID NO: 109282 - DNA, 270 bp, Aquilegia coerulea
  Intron number 2 from transcript AcoGoldSmith_v1.013805m (l ocus AcoGoldSmith_v1.013805m.g) derived from phytozome v7. 0 (chr-ID scaffold_8; pos 4127731 to 4128000)
aagaggtgtaaatttacagaatgctttcatatgttcttcctccattattcaatatcagctgtattttcatttttgtttgtccatcctcactttactttgaataatacattgacatattgtggtcttctgacagcttcaaacaagtatgttgtatttgatctttgggcacgtgctttccaatatatccttcttttagcttaatatctgatgactcagattttcatggatatatcaggttcttgaaatattggagttgtaccgtaggatata

SEQ ID NO: 109283 - DNA, 389 bp, Aquilegia coerulea
  Intron number 1 from transcript AcoGoldSmith_v1.012098m (l ocus AcoGoldSmith_v1.012098m.g) derived from phytozome v7. 0 (chr-ID scaffold_2; pos 5915245 to 5915633 reverse stran d)
tgcttagattttgagaaaaaaacactttacaacaagtaagacaccttttattcattttcaatatttttctttttttaactgtttgattggtttgtagaatacccttttcttgattttcataatatttttctgaagtaataagtttttagagattttagtgcaagtttttgcagtaatcagtgttttttagtttacaaattttttttttttttttgtgttgaaatatgtcatgaagtattatatattgaacttctttttgtgtaatatctatcacaaagatttttattcatatggtttgggtgttgttttaatcttgctgaagatctaattcaataggagttttattggtcacagggaactctgttcagatattggagttttactacttt

SEQ ID NO: 109284 - DNA, 671 bp, Aquilegia coerulea
  Intron number 1 from transcript AcoGoldSmith_v1.014257m (l ocus AcoGoldSmith_v1.014257m.g) derived from phytozome v7. 0 (chr-ID scaffold_2; pos 3806763 to 3807433 reverse stran d)
aaggtatttttttttcctgttaattcaaacttgcattaacaatgttgtgttgaaaacttagaatgttgtatgaggaattatgcttctttataaagtaatttggtgtgtttaatcaccaaaatgtaaatttttagccttaatcgtcaaaattttaacatgctgcatgatgggaattttgctcgtcagtacttattgtagaggataacattttctgttgtaacattcaagtatttgatcacacataggtagtattgaatgttatttagtataagacatagtatttagcaatactagaattaaaaattatattcatgtaactgttattactagacagtaatgttgaatgtttaggttttacaaacactataagaacagttaattctattctctgaaccactgatcaactgttaaatgtctgagtctctgagcgtgtattagttattatacaattgggtatgcaaaaataagaaacatgtctgcaccttggatatttgttgaagtgctacttcatatatacatgcttgttgatgctgtcacttgtacttcattattattattattatcttaggctcctttgaggggatttttgagcattaattttattttttcctttgtctttcccccctcttcttccagggatttcttgggcttagtggtggaatacttattca

SEQ ID NO: 109285 - DNA, 339 bp, Aquilegia coerulea
  Intron number 2 from transcript AcoGoldSmith_v1.006149m (l ocus AcoGoldSmith_v1.006149m.g) derived from phytozome v7. 0 (chr-ID scaffold_58; pos 140530 to 140868)
gtatttcaaaggcatgttcttttctcttttttcccttcccactctgaaaatatttgtgcctactaatacttgcaccgccaatatttatacaaatcctatatcatctgaataaaattttacgaaattcattatccatctacgtatgtctgttattgtatcacttgacccaatgtgtatcttttttggtaacaaacatgccacatacatcactatcattgctcagttatcacaattgttagtgagagaatatatttgattcagtgttgcattcccaaatcatattcattttatcaatgggtttggattttctcctttacagggatcatatcaagttgctaa

SEQ ID NO: 109286 - DNA, 690 bp, Aquilegia coerulea
  Intron number 1 from transcript AcoGoldSmith_v1.011995m (l ocus AcoGoldSmith_v1.011995m.g) derived from phytozome v7. 0 (chr-ID scaffold_3; pos 2927391 to 2928080)
tgtgcgtgtttcagaatgaaaggtgaagggtaaagcttccgaaagagtttcagagtgctattaatgtggatgctttcttctcattgaatagtgttgatcttcttcaccaacataaaacaggacatctttaacgatgttttttcctttcttgtatgtgttggaagctcatctcataacctcgtagtctgaaagatattatagattttcaacaaaatgaaatcccttttgtcttgcacatatgacaagtgtgcaacaaaggcaaaaaatttgtatactaacgtttcttttataaaatgtacaatgcatatttgatatatactaatatttcttcatattgtaaccatgtccttgatttcttaaagttttgaatatcatgaccgtgaactatgttttttttattttggaaactgttttttgtttctgtactttaaatagttttccttgtttcaagtattgttctacaaataaaatttctttggatatttttgaaatcctaacctacatgatagttggaaaggcggtataatcaaaagattaacttgttctgacctaatttactgtataagaggatgccttcttttctttctttcttctctatctttcttgttctcctgatccttcttgaagacttgaagttgtgatatgctagtaattaagtgttccttttgtagtgtggacaaggaagtacag

SEQ ID NO: 109287 - DNA, 440 bp, Aquilegia coerulea
  Intron number 2 from transcript AcoGoldSmith_v1.009369m (l ocus AcoGoldSmith_v1.009369m.g) derived from phytozome v7. 0 (chr-ID scaffold_7; pos 3886819 to 3887258)
tcaaaattttggtagaggatttcgagcaaaagctggtaaatattcttatctttttgttctaattttcatatattttgtttatctcttttaaaactgttaagttttagctatcttaataattaagagagactttatgcgtatctgcaattatatgttcaattatatatactaagttactagccctccaatatcctatgcgcgcacacacgcaagagaaaacgaaatgaaatgtatgtttgacagtttgagtttatgcagattgttctataattttataatggtattgcatgtccttggatttaagctttccagtcacaatgttatttctttttttttttttcgtttgaatattttctaatgtttggtttaattgatggtaaaacttgttatagttctcatgtttcactgattgtatattgcagcagattccaaaagccttt

SEQ ID NO: 109288 - DNA, 382 bp, Aquilegia coerulea
  Intron number 1 from transcript AcoGoldSmith_v1.009448m (l ocus AcoGoldSmith_v1.007141m.g) derived from phytozome v7. 0 (chr-ID scaffold_3; pos 8316521 to 8316902 reverse stran d)
aacaacacctccacactttccaaacaaacaaagaggtctttcttttctttatctcttttttatcaaatttcttcttaatgatgaagtagatatagatgagatgagacaagttgttcaatatctaatcatttctctctctttctttttttttaaacaaaaagggtgtaaaactatgaaccttttgattctctgatgacaatttttagtaaaaatagcaactagtaatgaatattcttctatgattcttcctagtattgaatacatgtacttgtttttttataataatgattcagttttgatctatttttgtttgtttgaaactattctgacaatcttatttttatcagaagttgaagagagtgaagatttgagtggtgggtat

SEQ ID NO: 109289 - DNA, 441 bp, Aquilegia coerulea
  Intron number 1 from transcript AcoGoldSmith_v1.025882m (l ocus AcoGoldSmith_v1.025882m.g) derived from phytozome v7. 0 (chr-ID scaffold_64; pos 277749 to 278189 reverse strand )
cattcactgcttctgaagtaagttctggtaggtggaggttgtccaacaagtcaatagaacaagttgcttgtgagggtacaccaagaagttcagtgtatgtagatcataaaaataatctgttttgagctttgaagacatttgtacccactgactgttacatctgtttctgctgcgaacttgcttaaggggttcaatatatgtaagagtaagaagaaacttggataagaaatagataaaagttttgatactctgaattattcacaactgtgccatcttttttcatcattgcattatttatttatttgtttttcatgttcctgttgtttcaggttgctcattattgtacaaagtattcatttcagtaagatctaggtagttatatatgatgtaactctcaaattgacaggtggaaattaatattccagagctaaacccagaaat

SEQ ID NO: 109290 - DNA, 632 bp, Aquilegia coerulea
  Intron number 1 from transcript AcoGoldSmith_v1.022500m (l ocus AcoGoldSmith_v1.022500m.g) derived from phytozome v7. 0 (chr-ID scaffold_2; pos 8911679 to 8912310 reverse stran d)
aatttctacttcaattgctccaaaattcaggtttgttgcaccttttttaatcttttgattgttctgtttttttttatgaagttttaattaaattcatttagggattaagcaaatgaagatattgtttgatgtggtttttctctattaataactaaattaacaaattgcgattttgtcagagtttctaatattagggttaatttgctttgagtcaattattaatagtaggagaaagctactatagaaggtgtatttattcaacaggagtcgcgaaaaggcttcgctactagattttgtaacttcattctttgccatatcagtctagactgaaataataaatagattatcgtgccaaagtaatttgacattgattatctatctcttcatgttttgcgcatataggattaatgtattaaattaattctcgtttaaatatttgcttgttcaaattcgcgttaagaatttttataagattgacgtaagtcttcactgtggagtgctcacgctcaggatttcaatggtagatattttatcttgcatatactgattcaaacatggccttaagttgttaagcattgatatatcattaattctaggttttgctgtctttatttttcagacctataaaaaca

SEQ ID NO: 109291 - DNA, 692 bp, Aquilegia coerulea
  Intron number 1 from transcript AcoGoldSmith_v1.019585m (l ocus AcoGoldSmith_v1.019585m.g) derived from phytozome v7. 0 (chr-ID scaffold_3; pos 9962553 to 9963244)
cattacgccagccaagagttatttctgagataattgtaagttgcacattactttttatttttatcgttgacattataataaaacattttttcaaaagctaaaatatgtagtttaagagacagataattctgatttatgttacagaatgcagatatgtcttttatttttttcgcaataaatttcaaaaaataaaactgttcattggaatgaaaacaacaacaatatcaaaccaaccatcttagatcatagcaactactcgtctactctaacatcacaggtcacacacacacacacacacacacacaaaacacactactgaattgagcgagcaataatctttacacgaaaaaacaactaaacacaacatctgaattttacatttctataacatcatagttgcaatgtgttcaatttgcaaaagtgagcttggagaaatgagtatgggaaaattaagaaagaatactgaaggctagttaagtcacttggttgtataccctgttgttgtgctccaacatctatatatattttaaatcgtttgatttcgtatatataaccaattggaatttcttgtttattatttaacattgtgtggactgtggtattcttagaagaaatgcatgaattaatcttaagatctgcatatatcaatgttaacagggcggtatcctgttgggtccttctgtgctgggtaa

SEQ ID NO: 109292 - DNA, 567 bp, Aquilegia coerulea
  Intron number 1 from transcript AcoGoldSmith_v1.004625m (l ocus AcoGoldSmith_v1.004625m.g) derived from phytozome v7. 0 (chr-ID scaffold_3; pos 4486330 to 4486896 reverse stran d)
aggagatctgtaattgtaagtaaaatctaattaactgaccccccaattttgtttttcttttgtttttcatgttttgaggaagattggatctccaattttatttcattttgatgttattattattagtatgaattcattggtttgtttggaacccaaccaatgttaattaggatctaatgcagggaaaaatggcttttacttttgcactttttctttatggattgtagtgaagaagaactaggatgtgaaatacagtagtttatttagtttcttcttccccttttttatgttactctttctttatttatactttgtttgacaaaatgtagttcagatgaccagctttttcttcttgatccatgagtgctcttatttagaattatgtgaaactttgtaatggtttctttggttttgggatccaaattctagaaatctggtgtgtgtgtttgtgttgtgacttcagttgaccaaaatccttccttagtaacacatttgttttggtactaattcaaaatttaaattctcttcttaggtagtagaagtgttactattattattcatatcaat

SEQ ID NO: 109293 - DNA, 385 bp, Aquilegia coerulea
  Intron number 2 from transcript AcoGoldSmith_v1.003297m (l ocus AcoGoldSmith_v1.003019m.g) derived from phytozome v7. 0 (chr-ID scaffold_44; pos 976671 to 977055)
gtttctagaaaccgcgagagatttacccactattagtaagtgtccacgcctctgttaatgaccccttaattttacgttcatgcatgtttctttactatagtccccaccattttatagaataatcaaaatcaattgttatttattttccttggctcttgcgttagtttcttgcatctcgccttataaaatagcttttgtactgtccttacaagagtttattaaaacctgagagtattcaatgatatcacaactttctgtaaagtgaaggatgaaacaaagaacagtatttgtgattgctaagaacaagagatgaagatatgtcttataaactaatttggttaatgaatgttatgttaatgcatgttgcagtgatttcaaacatcca

SEQ ID NO: 109294 - DNA, 1031 bp, Aquilegia coerulea
  Intron number 3 from transcript AcoGoldSmith_v1.000201m (l ocus AcoGoldSmith_v1.000201m.g) derived from phytozome v7. 0 (chr-ID scaffold_3; pos 4616784 to 4617814 reverse stran d)
ggtgaaaaggtataaactctaccacagctaaaattatttatgatctgtatcataggaagcataaacaacctctattaatagaagagtataaaatccacttagacctattaaaaacatctcaagttggaatattacctgcttcaagctttaaacagtagcttcatccatgaatggtacaacctgaaagttgcgaacacatgcgaaacaatcatgggaaacacaactaaaatcacacactagagcaccgaattagtattgcaaagtagaaaaaaacactactaaagctgtactatgttatgaaagacacaaataggcagaaagcagagtaccctggatcgaggtttgatattcaagaacttttacatggtgggttaggtacaagaaacacaatccagcagcttattgggttggactttgagcaacaacaagcacacataaaacaaagattcaataaacaacttctaacttcttatgggggtttgggcgaattcaaccacattaggaacaactcttcaagagagaggtcacgtcagattcaaattggtgcgtatatatatcagtcattcaaaccagacctatactgacacatttttcagagatctttgtagtttagattgtatggtgaagaaacccaatgagttgagaaggagctggactttagacaggagcatggaatgtagagagactagaacaagtacagtagatagataatgttgccaactgcaagcgaaacctccaagaagaaaaacgaaataccaagttaagaaacagaacaaaacaaacttggtttcttcagagatgcaattaacgttctacaagtttagataggaaaccgggcttagtcaagttaagaagcaaaacaaatgacaattggtagaaaagtaaatcaaattttaaataggaaaccaggcagaaaccaggatgagtgtgtgtgtcttaaatcctacagtttatacctcaaagattgaatcaaaatatatgtttgaatttttacaggttggcaagtttatccagctcttgtcaacatttat

SEQ ID NO: 109295 - DNA, 802 bp, Aquilegia coerulea
  Intron number 1 from transcript AcoGoldSmith_v1.005588m (l ocus AcoGoldSmith_v1.005588m.g) derived from phytozome v7. 0 (chr-ID scaffold_44; pos 570466 to 571267)
cttcctaaaacaaaaggtgcacattccctcaaaactctcaaaggtttattatgaattattctcttatatgtaaattcaaactactgtatatatttctatacgcatagaattactgaaatagctactacccattaattctaatctctctataagtatatatatcacttacccatttctccattttctcttcacatccccttgcttttatttttttattttttatttttcctgtaatatttttgttctgtatacctatttattatatataaaatgctttaagtgagttattgtttggaatttgactaggcatatggaatataaatgcatttgagtatcttggaaaagaatttagattgaacaaggttttcaatagggcaatgttgtacaacggttttgagggtttaaacagtttggtcgatgttggtgatggaattagttctacttctaagttctaacatgattgtttccagacactcctttgttaaagccattcacttttacttgtctcatgtgattgcaaatgcaccagaatatcctggtaaactatattatgttcaaattgattaacaaacaaattgcctaattgtaaaattagtacgtacattaagttaaatgcataaattgggtgatgaaagttgtagtggtaatagtggaagattgatgtcatacttcaatatttcatcttaatttcatatctgatagtttgccagtagtttacacataagaaattttcaattattttggaaactaattttgacacggtgcaggtttgtttccggaagctagaaaacaagtcaacgct

SEQ ID NO: 109296 - DNA, 462 bp, Aquilegia coerulea
  Intron number 1 from transcript AcoGoldSmith_v1.010726m (l ocus AcoGoldSmith_v1.010726m.g) derived from phytozome v7. 0 (chr-ID scaffold_13; pos 1566744 to 1567205)
atatcaagtgttatctgaagtaattcaatcaggtatttgtgtttttcaagtttatttgatgtttgttgttttggatatatctttctatcattttgtttatgtttaagatcaaatagttttttaaggattgtttgctcttctgtttatagcaaagcttgtaagtttttttttttttttactaaattgatgattatgtttaagttttaatggtttcaaggattttgaagaagttgaagtttgttttttttttttttaatttaacatgcagaatggttgaaaaatgctatttttatgatgacaagttcttcatttattactgacaaacctaacccgtgaatcatgaaatttgaactcatgtagttgaaatatcctttgagtgatgatgatttatcaattaattgaacaaatttgtcctttttcttttcaggattttctattggagatcacttcatctgttctgtt

SEQ ID NO: 109297 - DNA, 793 bp, Aquilegia coerulea
  Intron number 2 from transcript AcoGoldSmith_v1.010726m (l ocus AcoGoldSmith_v1.010726m.g) derived from phytozome v7. 0 (chr-ID scaffold_13; pos 1567643 to 1568435)
agaaggctgttggccttggtggctggcattggctggtaaatttttcactcctcaacttattttggaatttggattgcttcatatttaggaaccacagagatatgtgttgccaaaatcatgatatttgattttgctttgctggatgaattaataatttcttaatataactgttattagtatgctaaaaaagatttacctagaatgactttccatctagagttcaaattagattaggaagctacatagaattcttgtcaaaggagttttattgttttagaaggtgtagaagtcttttagttaaggttatttgcaagtgtaaaggcataaacaaaagtcactcaattctcaatcaaaatcaagaagtagaattatcagttcaaaactcaacttttgttttcttctgtacaatgaagagatctgcccctgaagaagtggttagcttctgctatgttatcttgtcaaattaacctaacttgataattaatcaagtcctgtgtcgaattatcttcatttgactctttatgattttgagaacccttaattgtgatttgcaaaattacaactttgactaggtctagatctgaaatcttttacaagggttattcaattagctttttattcctcctcaatgtttgatttctaaaactcatatcattgaattaaatagatattgacatcgtgtttatgcttacataataatgaatgcggttttggtgttttacagctttcttctcattagattggtactagtggcctaatatatctgtttgtttgggatttaaggttctgaaga

SEQ ID NO: 109298 - DNA, 857 bp, Aquilegia coerulea
  Intron number 1 from transcript AcoGoldSmith_v1.011510m (l ocus AcoGoldSmith_v1.011260m.g) derived from phytozome v7. 0 (chr-ID scaffold_8; pos 2723426 to 2724282 reverse stran d)
ataaggctcgtcgtctcggttacaaggctaaacaagtacaatttttagactttgttgttattatttcaattacttagtttaccagattttattgatttgttgctatccttgaattcgtgattagatttgttgtattgatgaatagtttacatgttgtctaaaatactaaacctatacattaggttggtttgtgacatcattaatatcacattatgttgcataaattgaatctatgatgtttgatcaaataaccaacactaaactgtgagtggatacattatctttgacaaatagaaaaataaatgtgctactgtttactatgacacttcaacataaaaagtatgcatttccaagtgtagttttaatttccataatcttgtttggtgtaattgttattgtttgttttgttaagtttgtttggaactagattgatttatgtgtaattcttaattcttgtcataagccatgtccccatgcccttcattttgtcaataccttgcttgccacaacatgggtgtgtgtatttaggtgttgaagtttatgcttagaattatcagttctttgaatttttcaactattttgcttttgtttataatatttagaactaagataatttctgcatctttactctgtcatgggatgtaatatcgccagatttcaatttgtattgagtcgaattcgtttcttatattaaatactattatcattgttatctccagttgtggcttcattcatttgttttttatatgtatttgagtgcttcttaatagtcctggtgattcaatgcaagttttaattttttaagttttcttctgacaataagtttgaattaatctgcttttatatgtggcagggct

SEQ ID NO: 109299 - DNA, 975 bp, Aquilegia coerulea
  Intron number 2 from transcript AcoGoldSmith_v1.002137m (l ocus AcoGoldSmith_v1.002136m.g) derived from phytozome v7. 0 (chr-ID scaffold_34; pos 2392989 to 2393963)
taacacaggtttatactttaaggtaggttgtctacttttttgctactggcagtctaacttacatttttgctggttctgttcaataatttaaaacgggaattttggtagtattaatataacctgggagagatttattgaatttcttcactagattggaactataagatttcctgtgtttaataatttaataggggatgatatggcagaaaatcctcgctccatagcgcttaggagcatacagtctcctaagcatccattgtaaagatctatgcaagtctcaaggattcgatatatcgatggttctcgggatttgcatatatggctaacatgtacggtggattgatgcttaggacaacactttgctcctaagcactgaggagcagaggttttctctatgatatgggcctgagggaaacaattataatatttcatgtgacatatgacatggttcgcttgtcaaaaagctttaatgtttaggaaggcttcttggctcattcaactacgcactcgatgtaaagctttgttatggtccctcagttttgagggaaacatctaaattcgctttgttatggtctctatgatatgagcctgaggggaacgattataatatttcatgtgtcatatgacatggttcgcgtgtcaaaaagtttaatgtttaggaaggcttcttggctcattcaaaaaggcactcgatgtaaagctttgttatgtcctttctggcaagtgaatttagatgtttccttacctcctaaacacatggtcttggcatcccctgattgatatttgtctgtattaatgtagaatttaatctcgcatatttgtttttttggtgtatttttctttaaaatgaaaagatgtttgaaatgcattacattatcaaatatgctctcgaacattggtctccaagtgttattttcaaataagtggagtgaatttttactcatcacttgttgcaggtagctgaattgatcttga

SEQ ID NO: 109300 - DNA, 896 bp, Aquilegia coerulea
  Intron number 1 from transcript AcoGoldSmith_v1.004501m (l ocus AcoGoldSmith_v1.004501m.g) derived from phytozome v7. 0 (chr-ID scaffold_24; pos 2432933 to 2433828)
aagaagagataacatttgtccatttcatcagtcaggtttgtttgatcattcttctctttcgattcaatcaagtttctttcaaattactgattttctcaattaatttgattttgatccgaaattttagatctgttttgtacttttgttttgagaaaaagtttttcttgttattctttagtttgaacacaagtaacttttctcggtttctgtgttagtggagcagcagaaggtgaaatcatgcttattgtattgcattttctgcctttttcggtttgtctttcttctttttcatatttccaaatagattagagatccaagttacagaaagatctacgatccgatttctttgccttttgctttaaaaaagttcaaaaattataagtgctttaagacattaagcagaatcatggtttttttaagagattcttcacattgaatatttcattttatttgtttacgcctgcttaatgactgttaatctagttgcatttggtatttctttaatagtttattagtgtcgtttggactttggactagttttctcgttttctggtttgttcttgggagatttgtatcagattgcgcaatgttttgtcttttaaggaatcaaggatttttttttttattatttcataatttccatggtcacaggttatggtttagcttgcggtttgcctgtaaaatactatacaatatagattgttgatttacttaagtccatcttggattatagtattaattaaataattaataaactaatctatcctcatcttgtttagctggtttacttatcgtgttcccgggttcatgttgtttacttacatttgactataatattaaacccttagttgaacatgtttttatccatatccctaggttggaagcacattgattgc

SEQ ID NO: 109301 - DNA, 726 bp, Aquilegia coerulea
  Intron number 1 from transcript AcoGoldSmith_v1.009912m (l ocus AcoGoldSmith_v1.009912m.g) derived from phytozome v7. 0 (chr-ID scaffold_31; pos 1299944 to 1300669)
aaacttatatcaagaagagtttatctcctcttcaggtatttttttttttcagatctggatctgtttttcattttcttatttatttgactttgagtataaaaaaccctaatttgattcatttttttttttttttttttggggaaaaagttggttaactttttgaaatctttttacaaattcttaactgatctggttgtttcttttagggttttttaatttacaaattgttttttttttttttataaaatatgtttaataatatgttgaaatttataattgggtgaagtttatacaaaattgtaagaatcaaatggtttgttgctattatgtttttgaagaatttgtattctgtacttgattatgctttgtttttatagaaattgttatatttactgcgacatagcctgtttaaaacagtttatgagatctgaatacaattaatttgctaaatcagtatttaaattgattttatagatatgtattagtaccactaccatattgatgatttggatgtggacagtttatcacaagaattgtttattggaaagttaaggttatgtgttttatgacaactatgttaagaaggattgaatgtattggttgctagtgataattacagtaataagcatggttattgcttaatagtttatttaagttgaggctgtttctcaatctctgttttcttttatgttgaatgcagtctgggtgctgcaaaccgccatcaga

SEQ ID NO: 109302 - DNA, 890 bp, Aquilegia coerulea
  Intron number 2 from transcript AcoGoldSmith_v1.008251m (l ocus AcoGoldSmith_v1.008251m.g) derived from phytozome v7. 0 (chr-ID scaffold_2; pos 2676525 to 2677414 reverse stran d)
gatttcttgcttctcgttgcttgccaactttgctggtaagcaataagctaactatttctgtcattgctgccagtttcctagttcacagttcacactatatttgctctaaagcttaccaacttttagtttcaacgttactcacatggctggtaaatctagtgattttcacacggttgtgtacttgcttttgttttaaaggaatgatattgttttccaaagtgaaactttggattagtactactagttaattaggatctattgttaaataattactacaataagagtgcacatttcttaaatagttcccaccagttatggtagttcgttttgtgtgtagagatttgcgctaatgaatagttgaataccacatggtgtggggaagaatatttcatgcctaagggctacaatcgaacttttcttcgcaaccagtattatggtatttatttgtgtagctttgatcaggcccacatataatgttggttgtgtgagttgtgacttgtgacatgcactatgcaataattttttgtcttgttttcgaggggcattctggaaaatgtaatatgctttgtattttaaaacacctttttttttttttgtctttctaagtgtattatttttggtagcaaaatatggagcctcgtataataacggtaaggccctcgataatttattatcaaacaaaatgtctttatgataaagttgatttgaaatatactaacagtaatatacgattgatgtttttgttttttgtacttgtactatgtaaacatatgtattatgtgacatcccccacatagaaacatgaaactttagttcatgcaagacttaataattagaagtcttaattatatgtatgatttctcattaacttatctgtcgacagcaatcaa

SEQ ID NO: 109303 - DNA, 959 bp, Aquilegia coerulea
  Intron number 2 from transcript AcoGoldSmith_v1.001192m (l ocus AcoGoldSmith_v1.001192m.g) derived from phytozome v7. 0 (chr-ID scaffold_26; pos 2286907 to 2287865)
aggcagcctcgtgtaatcgcagaagtcattgtaagtacattctgtcacatttacattttatctgctgttcactttgatttttcgcttattacatatccttaaatccctaatgaccaagagatacatgtacaggggatagaaaaactgcagtaaacatgttgaaatatacatgtttaccttgattaagtccttaattaagtgcccatctggaaatatagagaaagttggttcataccctctgaatgccaaaagtatatgcttgcttacatctttacaaacttacttctgaaaactgttttattcaaagttcaaatagaaagtaaactttttattctttcaatcagttatctttccagttcaagaaaatgggaacttaaattcaccgttgggtaagtggcacgccttaaaccacactgcttggcttccaggttcacctgggaggagtttcttcagtaatgacaccaaagaagtaggcgaggtagaaaaacgttaagtacgctcctatgccccagggggcagaagcccgaacaagccttctggaatggaatgagatttagtctgcactgagattatcacagttttctaaacattcttgcttctcaaaaagtaaacagtctatattaagatctgacatccagacaagctaacagaatattactgtaataatttgagagtttctttcttttttagggggttggtgtgagaattcaaaatgataactacaatattggggagataaattcaaaaaaaaaataaagaccagattgattattttcaagcacgattcatctacgctttctctataacttctgtttgctatcaatatgtgttctgtaattaactctacataggtgatgaaacgttacttagatggctggcttccttatgttattgaaattttagttcttttctatgtatttccagggagggatattacttggaccatctgctctaggtcg

SEQ ID NO: 109304 - DNA, 779 bp, Aquilegia coerulea
  Intron number 1 from transcript AcoGoldSmith_v1.006678m (l ocus AcoGoldSmith_v1.006678m.g) derived from phytozome v7. 0 (chr-ID scaffold_36; pos 1765444 to 1766222 reverse stra nd)
agagggttttaattagcagcaacaaggtgtttaaggtgttctctctctctctctctctttctctttcttggttttttttatctcttttttacagttgagtgtatagttgattattattagttgttataatttggactttggattatatgctcttctgtacgtactagtatttaattttctgttgttgttgttgttcattttcttgatctgtgatttcatcagtgttgattacttgtcagtttattattctagtgagcagatagatagatagatcacacttattacttgcatatatacttaaaattattttgcatagttttcttttagagatttgtgttgttcaccaattataaaagtaggttatgatatcatgaatttcattaaaattgctgaatgggttgtgaaagtaaactaaactcaaaaaggggttgtttcctctgccacaaataatgagttttttcaatgtcaattgattatgataaaaatttgtgtttaaattttttcaaatgttaatatgtttgaatgtatctgtacttctcttgctgttgcgcgcatacaaccacttcacagatgacattttttttttttttttttggaatctatagtgtcttttgtcttaaagagaaccttggggtgactgtgctttagtttccaaatttatttcatatagaacattgttgtatgtttataatttgatttgagttaaaaagaacgtttactttctcttcatttctgaacttttgtatgtttccattttaggttttgtatttagctacaaa

SEQ ID NO: 109305 - DNA, 458 bp, Aquilegia coerulea
  Intron number 1 from transcript AcoGoldSmith_v1.026375m (l ocus AcoGoldSmith_v1.026375m.g) derived from phytozome v7. 0 (chr-ID scaffold_26; pos 390963 to 391420)
tcgagttcctgtccagccaagtcgttgttgatgtaagccccatgaacattattataagcaaaagaatcaaaatagtcttagcttttcaatctttgtttttatattctgctgttatcttctcacggaatcacccaaaactatgtgaatgtaactactttgtagagtttattgtgatcatttcaaaccattatcgttgctagcaaatcccttactagtagaaaatacccttcttttccttttccctgaacttgatttcttagtaggttgtctgctatatttagcagattgtattcattaagaattcatgatcatgaacctcaattcttaagacatgtctattctgggtgggattaacctttctagatcgttctcgtgtttcggttactattgcttggatattcataacctttaagctacatatatctcctcactgtttctttttcatttttacctaggtg

SEQ ID NO: 109306 - DNA, 666 bp, Aquilegia coerulea
  Intron number 1 from transcript AcoGoldSmith_v1.005436m (l ocus AcoGoldSmith_v1.005436m.g) derived from phytozome v7. 0 (chr-ID scaffold_13; pos 734739 to 735404)
cagagagaaaaggataaagacgaagaacttgaaacgtaagaaacaatctctcatttgttaccttgtctttttggatttttctctatatagttggcaacttggggtttcttgtgatcttattcatttctgaagtaaggttcgtttttttagggtttatattcacacgagttatttatgtataattaactttccaaatgacaatttggatctcttatttgatccctacacattaaccttaaggctattgttcaattgtgcatttgagattattgctggatatagaggcagatcagtttagctgtctaaaccgtttgaaggtttttgtccaaaaatgactactgtcagaattggtcaggtagagaattcaattgttaggcttgaaattatggtccccaatcactcttcattacaatgtagcaattctgcatataggttctacacatacttatttgattaaacatagcaatgcatcaatttcatagaatgacacatctgttgccctgacctagtgccctagtggacacattatcagacaagacgcaggcatttattagtcgttacggtggaactacaaatactttttgttaaaatcgaatttcaatctgtcatcatctttgtaacctgttctgtttatttaatttgattgagcagaaatcaagtttaagc

SEQ ID NO: 109307 - DNA, 959 bp, Aquilegia coerulea
  Intron number 2 from transcript AcoGoldSmith_v1.005436m (l ocus AcoGoldSmith_v1.005436m.g) derived from phytozome v7. 0 (chr-ID scaffold_13; pos 735853 to 736811)
gtgttcattcctttacaggattgaattggtatgatcccacaatttcctccttactttgttggaagctttcacgtgtgttcttgtttgggagactagaatgaaatgatctattgaaacgaagaccgcagtttaataatggccttgaagtactttaggtggggttaggatatgcttgcttcattttgtcacgttcaatttctatcggaaaatattactttccaaaagaaatagcccatatataagggtttattattttatttgttgttaaataagtaccttcagtacatagtttactatgctaactacattgttggggatgttgaaaagaagtcagaggtatgagtagcttagaaaccatggaatttcaaagtaactatctagccatgagttctgcaaggcatatttgcggaattcagtataattcttctagagttcagagtgttattttgttttttatatgcagattatattttatgaagtttaggttggcaagcatgcaatctttccgattccaacatcagtcatgctctatgttatatatggaattaatgagcaaactgatggttcaaaagcgagaatggggaagggctaattcatgttcatgaaatatatcgctagttcataggtctaaacagttgctacattttcatggactctctaattttaaaatttggtttttggacgtatacacgtaaagcaagcaagcatcttgtttcaccgcaaagaaaaacgccacggacagtacatagagcaatcaaatgtttgatggggtatataatgaagaagacttaaagcatgaatgtgctattaattccctagtcgttgaattactaagggttgacatactgtagattttctttttgaacaaaagtactgtgttttctcatttttatttcagtggctaaatgaagtttgcttttccaggtgggcttccatagctttaaccactattataatcc

SEQ ID NO: 109308 - DNA, 705 bp, Aquilegia coerulea
  Intron number 1 from transcript AcoGoldSmith_v1.005999m (l ocus AcoGoldSmith_v1.005999m.g) derived from phytozome v7. 0 (chr-ID scaffold_61; pos 14810 to 15514 reverse strand)
tattcaatatctacttcaatatctataacaaacaggtttgtttctttgatttgatctattttgtttcgtttgttttgagatcttttgatttttttcattaatctgtgttttcttctttagtagaattgtgaatgtagagttttagaacaattgaaattcattactagtttgcaatttgatttcctaacttgttaaatcactttctcaaacaatcaaaactagaactgataccatatgttaaatgttgcaattgtattatactttgtttggatatcaaacttaaactaataatgacaaggttttgcttgtgtcattaagaaagtaaagatgaatgtactgtttcagttcatgaaagcatctgatccatcaacttgtgtctcgtaaacaccatctcttttagtttgaactgaataaactgactaggtctttgtttgaacattgatatttgaaagaatgtttggaagcaagattagtttaaaaatgttgtttgtctttctttttgaatttcatgatgcgactttaaaattttaatgcctggttactggactaaaatctcctgcttctggtgaagttgtatgtcaggtggattttaatcatgtttaatattaaaatgttggaaatcatatttagatttccattggtcaatattaataatgatttttctttgcaggtattgaaagtttttccgttccctgtaaccatcac

SEQ ID NO: 109309 - DNA, 924 bp, Aquilegia coerulea
  Intron number 1 from transcript AcoGoldSmith_v1.005411m (l ocus AcoGoldSmith_v1.005411m.g) derived from phytozome v7. 0 (chr-ID scaffold_55; pos 152405 to 153328)
tagttcctttgaagtttagtcttatttgtacccaagtaagttttgatcatgtttaatctcttttgatatgttcttctatcttattctgcatcattataattattctgaagtgggttttttgttttattttgtattttttttttataatattttgtgtaggaaattgtgagggggggttatttatgttttattaagttgtattagttttgattttgtgattctgaagtgggtttttggttgttaatttgattgcatgtttctcttgtgaagtgaggatttttcacaaattttattcaattttgggtagttaggattttcttattttatctgtaaaacatattgtgaattttttgttgaatgagtagttaatttttttttttttatatatttatagatgtagtgtggtttatatgcttatttggtaacttgaaacatatgattttgggctagtattaatgtttagcttttatagtgtttatctgcgagagagattatataatgggcgagtttctgattgtaacatctatttggaatgatctcctgttactgctgtgttcctggggtttatagttgacaatcggtctgttatgattcataatgtttgtttattaatctttagtactagataaaaatacttcagctggtccatctttgttaaaagtcgtcattgaagcttacatcatattaactttttatttaattgtgtctcagcatatgcattatgtgcattgtctacctgcggaaggattgttgtcttgcattgatttgggtcccttttactgtctctctgtattttctgttttttgtcagtgtatgggtctcatagttgtattaggcatctgccaaattaaatagagctgatctgtgttgataatccatgtgtatgcagaggagcaacaaactttggaagtgggggcttttaga

SEQ ID NO: 109310 - DNA, 475 bp, Aquilegia coerulea
  Intron number 2 from transcript AcoGoldSmith_v1.005411m (l ocus AcoGoldSmith_v1.005411m.g) derived from phytozome v7. 0 (chr-ID scaffold_55; pos 153458 to 153932)
ccaggtatgtgtttcatctcaaaggccttttcaggttcttaagttttcttgtttctattgctatttatttgtatgaaaagatctcgcattaggtgcctacaacaaacctatgtatatgattatgatattaaactctagtttgtagcaagcatatatccatgctaaaatcacttaactagatcacgctaataatgtattttctgctaaagaaagaagaacatgttaaaacgtatttgagggatttagatttctctcttactaaaaccaaaaataaaggaatgtagtattggccttaagagcctctggaattcaatgacttgttggcacaaatgtgatgggaacaatgcatacattcaaaagtcagcatatgtatggtatagtgtgtacatgtgtgtgtctttattttatggagccggatctgatataaattcgtctttgttttgtcttgaacaggaagctaaataccttgaaaacc

SEQ ID NO: 109311 - DNA, 157 bp, Aquilegia coerulea
  Intron number 1 from transcript AcoGoldSmith_v1.003409m (l ocus AcoGoldSmith_v1.003409m.g) derived from phytozome v7. 0 (chr-ID scaffold_8; pos 3314569 to 3314725)
gcaaacagttctcaacaccgttgtgttttcggttagtttttctttgcccctttatcgaatttgtatgatttcaattcaaagttcatatttttatattgattatagattgaattttgtatgtttttttggtaattatttgcagttggaaacataccat

SEQ ID NO: 109312 - DNA, 385 bp, Aquilegia coerulea
  Intron number 1 from transcript AcoGoldSmith_v1.009848m (l ocus AcoGoldSmith_v1.009657m.g) derived from phytozome v7. 0 (chr-ID scaffold_61; pos 526334 to 526718 reverse strand )
cgttggtggtcggtgtttcttagaagcaaaacgtaatctgtcggcgcctgatttgaaattcgctcttcatcgatttgttaggatcacttgcgaaaatcaaaaatttattatgttcacatatgtactactacaaatttggttttactttttcatcacttaattagattattaacttgttagttgtgcgtttctgaatattactgcgggttttttcctataatctaaacaaacaacttaaaattctaaaaactgatttttcttaaggtcttgaaacgtacattgaaaaatatactgttatagatttgtcttcttggaaaataaaacatctaacagtgaattttcttttgcaggaatatatctggaaagatctcttcgtttttggatc

SEQ ID NO: 109313 - DNA, 628 bp, Aquilegia coerulea
  Intron number 1 from transcript AcoGoldSmith_v1.008196m (l ocus AcoGoldSmith_v1.008210m.g) derived from phytozome v7. 0 (chr-ID scaffold_2; pos 1401984 to 1402611 reverse stran d)
tctcagatcctgaaagattctgattgattcagcttgtaagtgaataatattaattattatattttggcattttaattacttctaacaattctgtttaatttgtttagtaatcaaaatggtttgggtagtttttttttttcagtgattaaggtttaatatggtttctttttagaaatttggcaatttttttttagcacactttggtattaattttaagtattttttgttttataaattgcgcgtttatatgatggatatgttattgaatccttgaagaggtttatctgaatatcagtccagatgaggttgttttttcagaccaccgaccacctgcaagtagagatgcattgacaatggattcccttaaaacttctgatgactcgcattatgcgccctgcgtaacgtgggtgttttttcaagccctggttgtacaagtatgctatcacagtggtgaatttgagttcttatgtttttgttggttgtttttatattcttttggtcaggactcgatcttggttgacaatgcaatagtttgtttatgttttgagtatcacagacgcctgtaatgctgttgagtgtttctgattgcttcttatcaattaattctcagattaattactattggaag

SEQ ID NO: 109314 - DNA, 610 bp, Aquilegia coerulea
  Intron number 1 from transcript AcoGoldSmith_v1.007254m (l ocus AcoGoldSmith_v1.007254m.g) derived from phytozome v7. 0 (chr-ID scaffold_2; pos 554742 to 555351 reverse strand)
cattctttaaggtaaataatttcagttttagtttgaatctttaaaattacttcaatgtaatagtatagttttaatttgatttatcaaattttagaattggtgtaattttttttctataattaggtgattacacttgacagcttatgtatgtttgaatgataagaaatttcttttaatggtattgtcatttatgatttattcaacattttgtagcttgagagtttacttttactttatgcttgcacccatgatccaaaggtgtacgactcactcattaaacttaagtttgtagtatttcgctttggtatgccttcctagtgagtctaaaacagataatgcccatcttttcttttttaatgtaagcactttaatagataatgacacaattgtttgggttcatgtaatctttgttctcattaaatagtgtgatttagacctttttgacttaattttttttttactcaatgatgatactagaattgctttcatttgcttatattaaaaaaagccgaagatctgaatatcatcgattgatttgattttagaaagcaattttatgcatctctatgttacagggagacgaggagcagaaattttcgattttcattca

SEQ ID NO: 109315 - DNA, 944 bp, Aquilegia coerulea
  Intron number 1 from transcript AcoGoldSmith_v1.006611m (l ocus AcoGoldSmith_v1.006611m.g) derived from phytozome v7. 0 (chr-ID scaffold_3; pos 8263881 to 8264824)
aagattacaagtaagtattcattagttttatctttagctagggtttatgtgttttgatgaattaaaaggaagaaattagaataattggctcgggttcgagtttaattggaatggtttttagggctagagcttataagtttgcatagaaagtacaatgtcttgaattgaaagacgagggaaagcaatttgtataatgtaatggtttttatttgaatatgtcaaaattatggcatgattatgattaaaatatcgcaattagtgagataaattaaattaatattctgtttaaataccaaacaccaatattattggaatctgtgagctagaaatctagtaaatatggagccatggagaatagatgatatctaaataatttcattcggatagctcatggactctgttgaagctgaagaacatcgctacaactgacatggtcataattttagtctaagtaataaaagattgaaggtacaaggtaacactctgcccttttgtttttttatcgaattaagtgaccctagggcttaggcttatcactcacccaggctcatgtctagacttgcctagctgctcctaaacttttggaaattgtgaaaggtcatttccggggtttattcattcattaaatgaagcacaatgacatgggatgttgtcatatagaagcaaagatagttcaaatacaattacattttttgctcttctttgcgggtcttgtcaagttgtcaacacgttaaaaaaacataatgcgcaaaagggaatttctcatctcctaaaaagctttgatcacaaagataataatggcttaagaatgtacgacttgattatatcatgcactttcaaccagaattatattttgctcactttttatcgaaatgcatgattttttttaatcacatatgttggtttatatatattttctcttaatttgatgtctatgtgcagat

SEQ ID NO: 109316 - DNA, 973 bp, Aquilegia coerulea
  Intron number 1 from transcript AcoGoldSmith_v1.003113m (l ocus AcoGoldSmith_v1.003113m.g) derived from phytozome v7. 0 (chr-ID scaffold_55; pos 226169 to 227141 reverse strand )
gctccactaccttcaattcagcaacttttggtaaggaacaagtacatgagtttgtattgttttaatagaactacatacatctaaccatttactgtgttctgttttattacctaaaggactatgaatgaaaccccgtaacactgaaacataatatacagcacattcacaaactgcggacgaattgcccgtaggttgtgaatgtactgtctatggagaaaattgtgtctcacaaacaaaggtctcaccatttcattttcacggtttacagtaacattaacgacgaattatatcatgtcagtggtcaatatgttcatgatgttgttttttacctaaaaactgttggtgtttgatgtatatgctttgctgccattacaatatccaacagagtgacagactacgtaaaccttcagtaattgacttttaagataaagtgtattattgatttgaagttaccaaacaccatcactttctgcggcagtgaacttcggtgaaagctatacatatcagtatattcctgtaagactatctgtttggaatatatgtattgtgttacattaggcagttggcggattagaaaatgcgcaaagaaattattagcttaaagtctataagggatcaaactaaatttttttttataattttgtgctaaaaaatcctcgtacgattagactgaattgacgtaatccctaacgccaaggtaaaaaaaactttaatttattcggaaaaatatcagtatcaacaaaaataaaaattcacaagtcttgaatatgaaagtgccttttaacaatgacttttgactcaataaaacaatagcttggtgtcaatataaccatttatatatttgaattcttcaatagattctattgaattgacttcaaggaagccaaagaatattactccacagtcatatgattaatcaattgaatattatctacttattgtttataatgtgtgtaattaggtgttgccggcg

SEQ ID NO: 109317 - DNA, 730 bp, Aquilegia coerulea
  Intron number 1 from transcript AcoGoldSmith_v1.008653m (l ocus AcoGoldSmith_v1.008683m.g) derived from phytozome v7. 0 (chr-ID scaffold_7; pos 3243875 to 3244604 reverse stran d)
tgcaaactgcaatttatattctttttgcacttaaggttagctcaatttatctgaatcgagagttctttgttctctcttaaacaagttttctgaattcctgcgtttctgtacatatactctttatttaaactttaagactttaatgaatttacttttttgttcaaagttagccagttagggtttttaaaatggatatgagtttaattggattgttttaacttcttttctcatgttaataacattgagtttgctttggcaatattcatcaagatcattgtaattgaatgagttcaagttttcttatttgatttgaattagggtttcttaagtagatatgagtttaattgaaatattttatctattttttatgttaatcacactggttctacacttcgtaagtgatgaattctatttggaattgggttggtttcccttgatattgaagttaatgagattgcttaagctatttgttatatcaatttatattgattctatgatgttgaattagggttctggagtttatacaaagtgaatcagaatcaaattatttgaaactgtctgtttttaatatatgcccacttgatactttatgttgtatttttgttgttatatgttgcgtttgaataaaaaaaaattattttctgaagtgattattttgatcttgggtcctttatgcagtccttgtcttctttcaggaatcctctttgaagggtgatcgatctggtttgtc

SEQ ID NO: 109318 - DNA, 679 bp, Aquilegia coerulea
  Intron number 2 from transcript AcoGoldSmith_v1.019551m (l ocus AcoGoldSmith_v1.019551m.g) derived from phytozome v7. 0 (chr-ID scaffold_2; pos 7304506 to 7305184)
cagctggcattcttcctgaatctggaacagtaatagtgagagacttttcataataatataccgcataatgtttataatatcatgcatgcttaatactacttcatgaagtcctttatgagtctactaattgaaatttctgagatcgatgcaaaccaaattgtatattgatcttcaaaattatcagtttacttcaaaaatggcgttctgacttctaaatggaaaatactttgaaggaacctacctccatctccatcaagtggtggataaaacccctctcaccttgcagtacattaaattagtcaaagtcaaatttgtttttaacttgttttttattagcacaaatttattaaacctcaattcagcttctgtcttctccatctctactaaaaccaagtgaagcagacttcatgatattttccttaatttctatgccaaaattatgtatagtatagttggtgaaggggattatggggtataattctattattagataattataattattgatatggatgttacatcaacagctccaggaaatggtgaacacgttttaagatccaagtagagcttgggtgcacaaaacttaatgagaattagacagtaaggctgacaaattatcgtgtttaattatgtcaattatgcagggcgataacttgtccttggacgaacaggttgagta

SEQ ID NO: 109319 - DNA, 567 bp, Aquilegia coerulea
  Intron number 1 from transcript AcoGoldSmith_v1.013056m (l ocus AcoGoldSmith_v1.013056m.g) derived from phytozome v7. 0 (chr-ID scaffold_24; pos 1310007 to 1310573 reverse stra nd)
gattcctaagcgggctagtatgtttctatttatatgtgattctttaactgagtagaatgttttcggtgcttcttcccttggaaccggtgataaaacaatcattgctttattattggagttgtatatttattttgctttttggatgctcttttatgtcatcttgatgtggacaactgttgtgcttttgtaaatatccgaaccttggtttttggttttaatgtcgtacatggctacgtcacctgtagcttcttatgttacctgagcttcaatttttgaatcttgtttacatgtcatagagcacatagtaacttatgttttaccttcaatatctagttcctaaagtttaaatttagaattttttctgtcaaaatttctcaattgtatatgcatatgttgtttaaataactttaggaataagatttagcatgttgaatgaggttggatttgccagattttttgttcaagtgattaatatcttgggttcaccgatgatgctcacttacaattttttttttttttgtttgtttgtttttgcagtcgttcgtgttgttctggacgtatccttct

SEQ ID NO: 109320 - DNA, 856 bp, Aquilegia coerulea
  Intron number 2 from transcript AcoGoldSmith_v1.005618m (l ocus AcoGoldSmith_v1.005618m.g) derived from phytozome v7. 0 (chr-ID scaffold_13; pos 3680152 to 3681007)
ttccttacaacgactcaaggttaattctctagaaggtgcgcattttaataaagagttttcttttatgttgttttctcttagtttaaatgtaattcaatctaccatgaatgttcaaatcacaatatcttgtgatttctataatggggtgtttttattttgagtcggttgtctagaaaatcctttttggtaattaaaaattgaatctttccagatttctgggaattgagctagatcacaatgaagtaactagtaagattagtttagatttgattctattttgattaatttgtcttaaaattaaaatagattaaagtgttttctttatgtcgttttctcttagtttagatgtaaatcaatctaccataattgatcgaatcactttatcatgtggtttctttaatggggtgtttttatttttatggatctctgtttctctttaacatctttgcatctctatcagtgttgttaattttttatttttttttcaattattccacatttatttattaattttttggtgtggaatagatttcatgttggagcacataatgtaggtttgcaataattgatcttggataaagtttattaaacactatggtccctttattcacatttttatatcaattttttgttaaatagatttctggttatggcgcataagcaataactgatctgttatctgattctcataaatcaaacaatattgctgtaaactctacgtgtttgttatttattttgtgattacgagttttctattacatgcttttataagatattagtctagatagatttacgttcttccgtgttatttaaggtttactaatgctttgcttaggtacagctaaagctcttcctg

SEQ ID NO: 109321 - DNA, 985 bp, Aquilegia coerulea
  Intron number 2 from transcript AcoGoldSmith_v1.005829m (l ocus AcoGoldSmith_v1.005820m.g) derived from phytozome v7. 0 (chr-ID scaffold_31; pos 1071660 to 1072644)
agaggttgctgcacctcttttggagaaaatcccatgtaacaatcaatcactttccccttccaatttcataattttcagtcttgatcatcatgccctaattccttccctccatggcattttatttattattttaatctcaattgtaggactagattctgatgatggacaaattgttgattacaaatttaccatgatatggatttatatggaattttatttgttatcttcattatgttcaagcagatggcatttgctggacactcgtcttttaaattaacataagctgataaatagtaaacgaaatattgattattgaatttgcgtcttctttgaaagcgagacatgaattttaaccatagtagaataaatttatgaattgcatccttgtaacagaattggtttattttggctcaaaatatgtttcttaatttccagtatgtctttgttaaaaatagatagatcatttgcaggagatgtgtgataagttttatataacatgcttggtttattgtcatgtttcttaagaggatacatggtgtgtatgacccaacaaagagtcattggtgttttcaacaggaaatggtatctttgagtcacttaaatgtcatcctttaaattactaacttaccttttctattaaatatcttcttaattcacagcttatgttgataataaaacaaaaacaccaaatgtcgttgcaaagcttcgtgcttcgaacaccagttcatagattgtataaatactttgtgattaaaggttaggcgaaaacactctcatttttcactgttgactacattggcttggaacaccagttctctcattgtatgtgtatagatataaatacttcgatatgacaatattattacatcctgtatcagatttccggaagcatacttacctaatatgtaaaatacgattttacttaaacatgtcctaattttttttcgtagggattaatcactttcagcatactcccaatagggag

SEQ ID NO: 109322 - DNA, 617 bp, Aquilegia coerulea
  Intron number 4 from transcript AcoGoldSmith_v1.007930m (l ocus AcoGoldSmith_v1.007930m.g) derived from phytozome v7. 0 (chr-ID scaffold_3; pos 1145626 to 1146242 reverse stran d)
ggaaagatgtaagctcttttttcgtaataattagtcaatatggtgatcgtaactaacacactaagctgacttcaaacaaattggattagtctgaaaatatgaatattttctataaactgaatgtcagagttgacctaattttcaagtccgtaaggaacagtttgatttgattcttacctacagttacagtgttttttccaaataaatttgatgattcaaacataaaatcttgtacaatggaatcagtatcatagagtatatgtaaaatgcttacagccagtgtgcaaaagaattgtatatatgctatctcaatacaagacacacttcatgtatcaggatcctatttgttaagtatttcttgaacctcaagccaaaaagtgtgtcttgagcgaggttacatgtacacaactcatttgtgtgttgaggtcctcgtgcagttcatatttttaggtttggcaatattttatttggttaggcctcgatatcccactgatattttgtatcaatgatctttgcaatatgaaaaatatgtatgggttttcaatgtgatcttctttgacccttataactagtgtactgaacggatactaacaccccttttgtgggcttacaggttt

SEQ ID NO: 109323 - DNA, 991 bp, Aquilegia coerulea
  Intron number 4 from transcript AcoGoldSmith_v1.006923m (l ocus AcoGoldSmith_v1.006923m.g) derived from phytozome v7. 0 (chr-ID scaffold_34; pos 2186451 to 2187441 reverse stra nd)
ctattgaagctggtaacaccctcttcctccaatgcttaatcacatacatttaaatgcacgcatttatacgcatatgtaccaatctttcttgaaaacatttcctggaattatagtcagcaagaaagttaactgtcagttgatgaatcaggcatatatactatagtgatgactgaagagtgatgtcctttggatatactatataataacatgctgcattacaaatgatgagtttgtacttttttgttccattacgcctacattcttagattatttggatgtgcaacctggtttgcctttgttttgagcttgtgttctgacaaggattatcctatgatatgtgatctgacatggttatgtaggatgcataatcaaaatacattggttacagagaaagatttagctgtaagagactgtttacatgaccgtcgtacagaagatttaatctagttcccgcagaagatttaatctagttcccttttttaatgaagcacaaaacatacaatcacaacgcattgaagtaactctaacaccacactatgactatggtacaaacttctcaagcagctacaattaccttcaaaaactgcctggctggcattgactagagtgaagagttcagacttcttcaggggagaaagaataccttgattattccctattataattcattgcattattgtaacgtatccatagatcatatggttgatatatctatattttatatataacaatgcaatattttggtcggaggtttaagtctagtagtttctttttctcgagttaatttctggatagagtggttaaggtccagttaacctaacaaacttatctaaataataataaataatgatgaaaaaataagagcttaaggtaaccttctagtacaaagaagaaaagagaacacagcccagcaacaaaaagtgcaaaccctcattgaatattccattaaatctctttatatataatgcaggttttgacggggttgagatcc

SEQ ID NO: 109324 - DNA, 888 bp, Aquilegia coerulea
  Intron number 4 from transcript AcoGoldSmith_v1.007051m (l ocus AcoGoldSmith_v1.007051m.g) derived from phytozome v7. 0 (chr-ID scaffold_2; pos 4396375 to 4397262)
gtgaacaaggtaacattgggttcctgtcttttatttcaaattttcaagtactaatatattttaactggtttggttgtttaattacttaatctaaggtagcagcatttgtgaagttaatgtagcttgtttacggtagcataaaacctttgtgtttgagcttctaacaaaatttactgatcatatacttgtcaataattctgtgggagcttctgacttgcacccttttcatggtccctatgtgtgttgcttttccatcgtatcatcaatcatatctcctgttcttcacagttcgtatgaccagtatagtacagtatatatatcttggcaacagattctatattattttttctaaacctgttatttgatcgttatacatttcatggcatagatcaaaaagtatatttcatactttatcattaaaatcgttgttagtaattcttttctgcttgaagaatatagaggagttctacaaagatgaaattaccagcaagtgagagggagaagatctatgagggtacacaatatggaaaaaaaaatcaaactgtaattgtaataattatgttcgactccttccagacttgcagaacggcagtgtactctaaactaagtaggtagttgagtagttcacaggctcgccattaattagaatcatattgtagagtggaatttatttatggaattagaaaagagaggtttagtctgtttgatagctggatgtagggattgtaggccaaaataccgatggattcacggttctgttttccttttaactgttctgttttggttgatgataagcttctctgatttatataaacctggcagatgatcatgtatatttctaattccttcaactatctaacacaggattccctggtgacctttctgttt

SEQ ID NO: 109325 - DNA, 349 bp, Aquilegia coerulea
  Intron number 2 from transcript AcoGoldSmith_v1.001963m (l ocus AcoGoldSmith_v1.001963m.g) derived from phytozome v7. 0 (chr-ID scaffold_34; pos 1633435 to 1633783 reverse stra nd)
tcaagaagaagaagaacaacaaaaacaacaagaaggtgagttttttttttcaagacttgtgcttttgttttcttctcgattcaaatcggctctggttccattgtttgtgggttctttttgttttcttctaaaatgggtctttatcatcatctctgttgatgattttgagatttgggttttgtttgttttgattaaatttgagatttttgtgaataattgagttgtgggtatatgttacattctgtgattgtagctgtcggttagggtatttggtgataatttggattttgttctgaagtttatttgttaattagattggctttggaagtgctacgagggttctgggatt

SEQ ID NO: 109326 - DNA, 760 bp, Aquilegia coerulea
  Intron number 1 from transcript AcoGoldSmith_v1.001895m (l ocus AcoGoldSmith_v1.001895m.g) derived from phytozome v7. 0 (chr-ID scaffold_2; pos 1209661 to 1210420 reverse stran d)
gtcaatacagttccattccatcaacgttgagtgagactgttagagagagagagagaaaccaaaagctcagtcactagtataaatacacgattctctccagttgtctgtcaataacgcctctctctctctctctctacttactatacttctcttctgctgctcgctctggtgttggtgtttgtgtttgtgtgtgtgtggagtgtgcgaagccaacaaccaaaacaaaacccattttcttccacatttctctctaaacaaaggtatcacctttattcctcatttttagggttttatttctttttaatttcaaatgtcgatttcgattcttcatctaaaccctaaaaaactacttgggattttgtttgatttttgtatattttttttaagatttatttgttaaaatggtgatctttttgttgaaaatagaatttattagtgaaatgtagttcatctacattgcaccttttttgcttgttttttagggtttttttcaactttacttttgttaagatatcacttattgagcttcactatagatttctgttgttgcatgtttggtttgttgatttttttttagctgatttcatcttctttttttttttggatttttccttgttttgtttagattaagtttgatgtatgattgatttgtttttgttggtttcttcacttgtttttatttgatcaaatgaaaccccctttttttttggatctgttttgattggtgatctgattgaatggttttgatgttcaacagagt

SEQ ID NO: 109327 - DNA, 387 bp, Aquilegia coerulea
  Intron number 1 from transcript AcoGoldSmith_v1.001535m (l ocus AcoGoldSmith_v1.001535m.g) derived from phytozome v7. 0 (chr-ID scaffold_91; pos 625899 to 626285 reverse strand )
cgtcacaccgctcgtcaaattcaagagcttgaaaggtatatatatatatattccattaattaatctcattatatatatatatatatatagattcaagatgttttttttcttctctctctttccctgtctatctctagaatatatattatacatatgatatgatgcagcagccaacaggtgcttaccaacatcaaacaccacctcttttgttgtcggacccatttcttccttttaaggggttttatttttatttttgacctctgcttacctttttcctcttctggacattttttttttctcaaagtagactcttgtttttttctatgttttaaatcattcaactgttgttcttgttgttgctttatttgtggggttataaatcaaagg

SEQ ID NO: 109328 - DNA, 851 bp, Aquilegia coerulea
  Intron number 1 from transcript AcoGoldSmith_v1.006578m (l ocus AcoGoldSmith_v1.006349m.g) derived from phytozome v7. 0 (chr-ID scaffold_22; pos 2075111 to 2075961 reverse stra nd)
cctactcgttggtcatttcaggtatcacttcttcactactacctcttcagtcttcttcattgactctaatgtcttcgtcttgattttgattcagattagattttgattcggattgaaattgttgtactatagttgcacatttctttgctccaactacaatatgccaaacgtgattttattattgattgttggaacagttttcactgaattggatagtttctttctttttatattggattcaatgtttgaatctgaatagaatttgaaccagtgaaatcagcagtgttagactgaactaattttctagtacttaaattgaattggatgatttcaaacactttctgaagaggtaatttcggaattatctatacattgaccgttaattgatagttggtgagttatcaagctaagaaataattaattagtgtcagttctgaattatcttctgaatgcagattcgattcaatgttggaatctaaatagaatttgaaccagtgaaattaccagtgttagactgaactggtttactagtacttgttttgaattggatgtttattcaacactttttcaagtgttaaattacagaatatctatataatgtccgttgattaataattggtgagttatcaagctaagaaataaataattagtgttagttttgaattatggtctcgttttttttttttttttatttcatcggtgctttgagttatagtctgaatgcagattttataacactttcgtgtaatatatctcaatgaaattacatgttagtgattatatcttttctgattcttttaaggattttaagatgttttatgatgcaaagtttggaagaaaaaaggagccag

SEQ ID NO: 109329 - DNA, 859 bp, Aquilegia coerulea
  Intron number 4 from transcript AcoGoldSmith_v1.020232m (l ocus AcoGoldSmith_v1.020232m.g) derived from phytozome v7. 0 (chr-ID scaffold_2; pos 9257532 to 9258390)
gggttggaaggctcctccttgtggattttgaccaggtttcttctctttgttagtttaccatgtacaactgtttcctgtgtttgcattagtttctttgaattccatttcttagtttctcatctgtattttattcattcttggaacacgagtggttattatcaagttagtttgaactatgtagcttcttgatgttcagagttagctaattttctcactcatatctttgataaagctaagagcctctgtgtgaagccattactctaacttgaatagagtgttagatatcatcaagaattcaagagtgagtaaatgacagagtaacggaagggtgtcattacctccaaccaaaactataaggtgcgtgatatattagtaggttcatgcataccagctcagcaataattttaaaccgaataaactaatactgataatccagttctttcaactttgaaatcatgactatgtccccgccctttccaaattaaactagtgatacttatggcaatatattcttcaaagctttggatgctaaaaaaattctaactctcctgatttattttgttatgcttaactttgaagctgatagtatggagatgctcttaagccaattttaacaatcttgaagtatgtaatccgtgtgtaattcagttctgggggtacaacaaccagtagaaacttccaaatacttattttttcgagaatgttttaacttttaacttatataaatacttttctttttggtcgataatacttgctctcacattcttgcacaatatgggtttaccaaaaaacaaatagtttactgtttactcattttaaaaattacttgagaaggtgtcactttcgtcgctgaataggc

SEQ ID NO: 109330 - DNA, 350 bp, Aquilegia coerulea
  Intron number 1 from transcript AcoGoldSmith_v1.023518m (l ocus AcoGoldSmith_v1.023518m.g) derived from phytozome v7. 0 (chr-ID scaffold_3; pos 10378735 to 10379084)
acagggaaacattgactcagaaagtatgtaaattgcttctttttgttttctctttactgtgaacatggatgcggtaatgttgacattgtcttgttcatggttctgggcacagttggaactcctagaagcccataaaatggactaaaagttatctgcaaatttgtgacacttctaaattatcgaaaatctggtttctaacaaacatggctccatcttcaaaattgtaggcatcattggatatatattctgcctatttatatgaataatattatcccatctataatagtgtgagcgctcaggctgtgtgtgtgtttgcactttgcaggttggtgttgctcaacagtggtttg

SEQ ID NO: 109331 - DNA, 624 bp, Aquilegia coerulea
  Intron number 1 from transcript AcoGoldSmith_v1.010118m (l ocus AcoGoldSmith_v1.010118m.g) derived from phytozome v7. 0 (chr-ID scaffold_26; pos 1571471 to 1572094 reverse stra nd)
taccaaggcaccagacacaacgtatgttatttacttttttgtattgattttcttattggcattttaacaaacacataagctacgtttattgagttttactgatttttatctcattagtctataaattgatatgggtatctttagatatagcttattggtccaaataatgttgccccttttgtttttttggtgggcaattttgttccaataatctgttttgtttgtgtatatttgatattcttttgaaactgtgttgatttttgaagatgaagtcattaatgagttaacaattataagatgctgcctggcctgtgataaattgtgagatttgcaataacattaacccctttcggaaatacctttcaagttttaaggtttgacagctatttctcgacaattagctgtgccaaccaatgagttttacatacaatcataatatgatattatgtgatatataccgaagtcctaataccatataatgatatgtcttttgacaagtgttacatacgtatgcatgattcataatgtgtttccatgcatgattcataatgtgtttccgttacaatactgttttcttattctgaaagtgctatcaaattacttgtgttccaggtgggttttgaa

SEQ ID NO: 109332 - DNA, 728 bp, Aquilegia coerulea
  Intron number 1 from transcript AcoGoldSmith_v1.010926m (l ocus AcoGoldSmith_v1.010926m.g) derived from phytozome v7. 0 (chr-ID scaffold_16; pos 2623535 to 2624262)
ttctagtactgctactgctacttctactgcatcaggttcgaatttttaaatttaataagattttaattaaatttttattatgtgattttgaataaaaattagttttttttttttaagaagtttcggaagattttatatgtatggattttaaagattaaagaattaattaattgttagatttcttagtgaaaagtttaagaatttgaaagagttagattgaagttatttattttattttttttagactcattaattgtgtttgcatgaactttaatatagttttgtattagaagtagaaaggggtgccattagcaagtcgaagcaaaagggatatatttagggtttagagcatcgtgataattgaggagattttttttttttttttcattattgataattgagatgacatagcaattttatcctaggactcactaatgccaggttcgtggttgttaatatttattgtttggagtagttaattgttttgaggttggtgaattctgaaagggtttagtttagtagcaaatatataattaggcaaagtgttctaatgcctggggaaattggaatgagtttagtctttgtttactgaatggtaatttggttttattctttctgtaccagtcttttaactttagttaatttatttatctttttccatattaatttactggttgttatcacattttttagcatcaagcaaagctgttaccaaagagcttgagcgg

SEQ ID NO: 109333 - DNA, 560 bp, Aquilegia coerulea
  Intron number 2 from transcript AcoGoldSmith_v1.022035m (l ocus AcoGoldSmith_v1.022035m.g) derived from phytozome v7. 0 (chr-ID scaffold_87; pos 602183 to 602742)
gtcaagctgtaataaacggtacgtggagtaattatgtgtgtcgggctagattatgcaatgacagttagtggtgtaagttatttagaaattaaggtgaattcaatgagaattcctaattatatatattaggtagagcagagtagggaggacatcaaaattaagtttcacttcgtgtttttacacgtgaggatgaactgctgaaccagatccagccagtcaagattgtctctttctcaatccaatgacttatcttctaatcttctatgtattcgtcttacatcacatggtgtacttcagcgggattctctacatgttcatttttatgcatggtgaagtatttaactaaaaaaaaaaaaaaaaaaaaaaaaaaactggttatgaaaccttttcttttttagggtatggctatgttacaatttggtctcctggtgcactttagtgtacagtatcttgatcatttacaaagcacagtctcatgtataaattattttagcaacaaaaaacgggcagtagcaggtatagaaatgatcttgtttataaactatgaaatgcaggtataa

SEQ ID NO: 109334 - DNA, 874 bp, Aquilegia coerulea
  Intron number 2 from transcript AcoGoldSmith_v1.002550m (l ocus AcoGoldSmith_v1.002550m.g) derived from phytozome v7. 0 (chr-ID scaffold_57; pos 839757 to 840630)
atttccttggtaatactctagcctcagtctgttaaaataataacttgttcagcgtccgagctattttcttactagttctgatttcttgttcatcatttgcttttgttccatagtggcctgcttcaaacaacaatgagccatggttatcagccaaattttatgaatcgtagaatatgaatgcatatatagatgaaagttttgtgatgtatagatgcatgcatgtgtttgttctagaaaaagtctggggaaaacagtgcatccaaacaaaatgaaaaatgaaattattgtaaatttgtaatcgaggtcgagacatacacatttgtggttttcccaacattcgcaattttgtccaaacacaaaatcttcatctgagtctgtatctatgttatgatgtaagatgtgatatgtaggatgtggtatattatgcgggcctcaattaaaacacatagacgttagcctgagtgaatatttgaatataaataagatgataagtttgtgatacttatacagctcctagtaatctgcgcctaacttgtgcccaatctttaaactaaccatgtaaatgaaccctatttaaaattagccacacatgaaatttccgcaacattaaaattgttttgcatttgaataaatgtggacgtttcctttgaccataatttggggttacatgtggtagagttgaaagctatggagggctaaagttagagatggtctatataatataatataataagagctcatccacacaaaaagaaagattcaaaaaatagaaagatgtgtcaaaagaccctgatcatgttcgtgtctgtttctgtatttataacaagttgtgtctgttatgaaactccatcttacgtacttttactaggtgata

SEQ ID NO: 109335 - DNA, 634 bp, Aquilegia coerulea
  Intron number 3 from transcript AcoGoldSmith_v1.003302m (l ocus AcoGoldSmith_v1.003302m.g) derived from phytozome v7. 0 (chr-ID scaffold_84; pos 610637 to 611270)
cccttctacacctagctgtgtttggaattcttggggtaattcataaagctcatctactaagtcataaagtgtaatgatgtggatattgtgactatcagatccttcctgtttggtgtgttaatatgattcctatgatttattatatcaattcaattaattatccaatttcaccaatggatggttcctacgagggagctcccaaagtggaatgtagataaccatgtgttgttgtttaattagttgagtttttttttttggctaagtagttaagatttgacctacatgtcataatagaatcaaatgcttactgtgttcagggtgcggcttcataactacatgtcatggtagatgtgtttagtaacagtggaactggaatctactttgataaagaaatcataagaaatggttattaaaaggaaaccgttgtcatgatagatgaattacaaccttgtgttagtaaattgaatttcaaagagtgtcttctatgtgttttcttatctttaattttgttcctagtcttttttttttcaattaatgactgaaatctgttgttcattggtatgcaatgaaacctaatccctacctgaaatatgaaccaggttttcactcgttatctacttcaaaagctatttgg

SEQ ID NO: 109336 - DNA, 816 bp, Aquilegia coerulea
  Intron number 1 from transcript AcoGoldSmith_v1.025341m (l ocus AcoGoldSmith_v1.025341m.g) derived from phytozome v7. 0 (chr-ID scaffold_13; pos 1547438 to 1548253 reverse stra nd)
agcaggttggggctttaacttcagatattgttaaaatagattttagttcggaatgatggaaaaataaataatactggtcctcttagccccatcactacaaattttatcagaaacattactgatgtagctcatgtccgatctttgtactgatgtcgaacactggcccttctgtctgtttcctctgttacacagtctccatactattggactgatattatcattaaaacacatatctaagctacgtatatcctagtcaaatagctcctataaatttaagcatactatcattattggctgtgtcgatctatgatggtagcttaaccatgtagtttagtgcacttgtgttgctcattctgcctgataaagggacagtaggattagggcatctctaatggttcatcaaatctatcatcaaatttcaaaaaaactccatctaatggaccatcaaaactttttcgaatttgatattttagcaaaaatcatcaaaagttcatcaaatttgatgaaattttgatgaaaagcttaaggtttgatactgggtgaggcgggcaagagaagaccgcttcacttaaagcggctaatgaagtgccgcttaaagtggcacttcaaagcccgctttaactaagtggcacttcaaagcccgctttagttgatgaaccattagatggagcacattttcaaagcaaaattttcatcaaactatcatcaaatgtgtatacgtggaccatcaaatttgcccaaccattagagatgccctaatgtttaaaagtactttctgcagatatcctctggagtctggtatattggagtattcaa

SEQ ID NO: 109337 - DNA, 231 bp, Aquilegia coerulea
  Intron number 1 from transcript AcoGoldSmith_v1.025992m (l ocus AcoGoldSmith_v1.025992m.g) derived from phytozome v7. 0 (chr-ID scaffold_58; pos 1187776 to 1188006)
acttcccttttccattcatttgagggattatacatgtgaagctattgagcaattgtaccaaaagaaatcaaagattttattatttaatggtcatccagagaaaggttttcttcttttatctcttctttgtgtcatgctttatgattgtatttgtacatgaatctttttcctttgaaacaaacaatatatttatttaaatccaacaacccttttaacatcttgattatatag

SEQ ID NO: 109338 - DNA, 789 bp, Aquilegia coerulea
  Intron number 2 from transcript AcoGoldSmith_v1.022540m (l ocus AcoGoldSmith_v1.022540m.g) derived from phytozome v7. 0 (chr-ID scaffold_35; pos 1721165 to 1721953 reverse stra nd)
tccacattgaaggatttcattaagactggctgcaggttggttttggttttttaggttttatgttttgtatacgtatttcccaaattattcatcattgtcagtaaattacaaaatacgccagcagtgaagaccgactttaggttgtgagggagatatggagatgtcgagaaagaagatagaggagttgagcgagagaggatgagttggggaagaataagaagaggaggaggagagccaaaaattgggaagggcatggacagacatgatttctatctcacccgattctaaagggactcctaaagtcggttgaatatacaaacttcgtaagaaatttattagcttaaataaaatcttgaattttgataaaactcagaattatttgtagcttggattttgatggagttggctttaatttgatctaattgtaatataatatttttgtgctgaaaatatgttgcaattctcaggctctatatatttaattttggagtacttttgtaattgaaatatgcaaagaaaaagcttactgttgaaacttggaagcattaatgtttatacatgtagtcatgtggattggagttttattattaaccctcaaagttgcagactacatctagtttgacgatttacgagctgtctgttttgccaatattctctacatggatgcttgttaagttgtatattagtgttaagtgaatcaccttctttgttttagacactacagaactttttgaagctaaataatagtctgtattaatatgtaaattgtgctgtgtactgtatgcagtt

SEQ ID NO: 109339 - DNA, 669 bp, Aquilegia coerulea
  Intron number 2 from transcript AcoGoldSmith_v1.024013m (l ocus AcoGoldSmith_v1.024013m.g) derived from phytozome v7. 0 (chr-ID scaffold_55; pos 65014 to 65682 reverse strand)
agcagagaaccatagaggctctgaaagaccccaaggtgaagtcatgtaagaatcaaacagtttgatagaattcatctcgttttagttggtcatatttatcaatgcttcctttaagggtaacatagtaagccattattactaaaaatatatgcagaagaagcaaattatattgaagccttctcctttaagctcgttattttcttgcagacattgcccattattcatgtgtgattgaagtttctttattttgtttctcaatttgggtatgtgcacttttaaaattccaatagtttttatctaccaggtgaggaagaagatgtcaagcagtcaccatcctcataggtacgcacatttcctttaaaagtagatcgcttatactaataatggttcgaccttacttcctatatcattagtcaaagaatccaaatgccatctgataacggtcaatctaaatagtctgaaacatgttttgactcatgactccaaggctttataggctttcagcaaaaaaaaaaaaaaaaaactccggtgactgctcagccatgtacaatttccttagtaccgtaaagtcttatgatgacttgctggttgctaactactccagtccacagtaactcttctgcataatgtggagaatgtaaaaacataatttaatttgctcatagtgtt

SEQ ID NO: 109340 - DNA, 950 bp, Aquilegia coerulea
  Intron number 2 from transcript AcoGoldSmith_v1.009617m (l ocus AcoGoldSmith_v1.009617m.g) derived from phytozome v7. 0 (chr-ID scaffold_58; pos 1161414 to 1162363 reverse stra nd)
caagccttgtagctgcagctgttccgactttatatgtgagtttctcttaccttgatgacatttttttttgtaacatttgacttttgtggttagagacgcaaagcattagaataagaatcattagcgtttctcacatgatgattgacgtgattgaattatgtgttttttttttatctgttctttgttgttgtcatacaagactgacaaattgacaaggctcagtgctactaggattgacctttgcacaacctttggtatctcttggggtactttatcaccaagtaatgatgattgtcgtcttaatccacacatgccctgacaaaattttgaattctgagttctaccttatgaacgaaaggcatggacacatgctgacacctgacatttgtaacacaccaattctagtaatcctaaaatccaacacattatcacatccacatagccatacaatttattgagcatgtttaaacagtttttgcgatgctctaatctctgagctaagcgggttcattcaacaaagaatatgtaccttcaaacatacaagagatgagattatttcaaaatctgtatcatgattcttcacatttatcagttcagcatgaattattttgagtactgcagagactcaaggatttttttgatcttgggagttgggacctccatgtgtacaactatctgccagagaagaagcaagatagtgtaaagagtgaaaggatgactcatgttcctgaaattcatatctttttttcttactactctaggtctctaggaacagttacaaagcttgatggttttggtgcatttgtacgaagtgatattcatttggatattattgcttttatattccagtaaaactgcataaactcaaagggttttaatgacagctttttgattgagctcaaagcttaaggattaggattccttttgatgtctttgtctttttataggca

SEQ ID NO: 109341 - DNA, 912 bp, Aquilegia coerulea
  Intron number 1 from transcript AcoGoldSmith_v1.003370m (l ocus AcoGoldSmith_v1.002571m.g) derived from phytozome v7. 0 (chr-ID scaffold_8; pos 1319089 to 1320000)
ttagccaagctcattatcttcaccttcactgtcaggtacgctgttttttttttgttttttctcttttcatttataccttgatagataattaaattactaatatatatatatatatatatattgatctcgctgttattctatttatgattttgattctttactgatgaaatctagctacctagctagctgttcttgcatttcaattgtgcaaccttccatataaactcccgatagattgagattctctatcattacttggcattgttctatgtttcatcactagatcttatattaattatgagactaattattgaattacaataacctgatttattgattttttagtatggacaattggacaaatggtttgtggtttaattagaaatttaagatagttataaaaaaatacaagtaatgtttaatttttagacttacaatacttgtgtttttgtgggttaagtttgtttcttaattaattattaagtctagtaagctttattaaatgccctgaaacttttcaagtgataaatataagaggtcattttgaacaaaaaattaactagaagtttggtagtataatttttctgaaatgtaaacatttgtcgcaataatgttctggagtatacgcatgctgttcctctttttagtgttcaataaatatatgtgttgaacatgtcaggttctatactagtcgactgtaacaacaacttttaaaagaattttttaattttcttcacaactctaacccactccagtggaaaacaaaagtatggtctttgtacattattgtcctaaaaaattttatttattatattgtcgtcttaatttcttattccctgactttgactctccttgttgattttttttttttttacagtagtggcggtcttgtggcatactctgattccaaag

SEQ ID NO: 109342 - DNA, 345 bp, Aquilegia coerulea
  Intron number 1 from transcript AcoGoldSmith_v1.011810m (l ocus AcoGoldSmith_v1.011810m.g) derived from phytozome v7. 0 (chr-ID scaffold_2; pos 9462262 to 9462606)
actcaccttgagttacacaactctatcaatataaggtatttttcttttctttcaaggatctatttgtagcttatagttgttgtttttttttttttttttgggtacaaattatatataaccatgattaagatgaaaataggtaggtttgtgttatgggttttgtaaaaaattgatggtttgacatgtttggtggggacattgtgattttattttatttttatttttttgaatgtgttcatggttattttaaggtatatgctcaatttctccatttttgttgctttttgagtaccaaagactaataatatatctatataattacttgcagttttgggtgcccttatc

SEQ ID NO: 109343 - DNA, 363 bp, Aquilegia coerulea
  Intron number 2 from transcript AcoGoldSmith_v1.014092m (l ocus AcoGoldSmith_v1.014092m.g) derived from phytozome v7. 0 (chr-ID scaffold_7; pos 110406 to 110768)
tgacaaagaaaagaagtaagaaaaactagaccataacaaagaaaagaaaagaagagaagaataaaacatgttaacaagaaataaatattgaacagaagatatagaacaaacttttgtcaacacaatacaaacaccatcaatatgagaaaaaaaaaatccttaactaaaacaacttcacaaaccttaacaagaaaataaagagaaaagaacatatgtaccataaaactgaagaggaatgcatcacgaaattcccaaaataatagccaatcccaacccgtacaaaaataagagacaatatatggggataaacaaaagattgaacaaataagagaattgaagtgcatcataaactcaaaatccaag

SEQ ID NO: 109344 - DNA, 859 bp, Aquilegia coerulea
  Intron number 6 from transcript AcoGoldSmith_v1.014092m (l ocus AcoGoldSmith_v1.014092m.g) derived from phytozome v7. 0 (chr-ID scaffold_7; pos 111198 to 112056)
ctcattcaccttcagttttccacctgtacatagaggtgattactaaagcttttgtctcaatttcgaaaacaggttcaatatttttgttaactaaacttagtatgtgagatgtctcaagaatctttttgtttttgttcatggacttgttctaaattagtttattaattttttcaaaatttccaaaatttgtagtaatttacatagtttcagcgatgaattggtgagttaagacaactattaattgtgtagcgggcagatgcacatcacaacttttatcctcatttaaattatagaatggttcacgagacatgtgttagatctaaaactctttttttttttccagtatgctaaatgtttaaatttaatgtcataactcatgtgttgcataccttgaatatactgtcaaaggtatacagcatttttttttttttttttttgaaatttcaccatcttttgaagtctatagaaatatctcatttcaaaagttgtgatataaaaattgcacatatcgtgatatactgcaaaattttgtctcagatatgggcatagctgcataggttgttttttcatatctttgtcaggcttggaatattctctttgttctggattatcagtttcttataatttgcgttgtttggaagaaattactacacatataatgacacttaagagcttatttcgttcaaatttatcactcgacatctataaaactgctgtggatatatctactgctatgctatttggtgatagaaatgcatcatataataaagaaattagatagaaaaagaaaaaaaattcttgattatggaatcaaaattttcaagtaatgttattcaggtcttatcaagtccaatactca

SEQ ID NO: 109345 - DNA, 1041 bp, Aquilegia coerulea
  Intron number 1 from transcript AcoGoldSmith_v1.002326m (l ocus AcoGoldSmith_v1.002326m.g) derived from phytozome v7. 0 (chr-ID scaffold_44; pos 961079 to 962119)
ctaagctagaatctgatctttctttctctagctaggtaagcactagcttattgattattgatcttgatcgatctatctgtatatatctttctttaatttctctctgattctttgtatatattgcaatagtttaattattttgtgatttactactaatcttgagttagatttaaaagaagaatattatttgtagtactagtgatgattttcaattgtgttaaatattgatttactggttaatgttgttatttatttatataaagtttcaacatctaaacagttagtaatcaaatgaactaataaattggatatagttgaaattaaatctcatgtactgtagtttatttgattcggtgtattatgtgtaccttatcgataaggatcatgagatcaacaaggatgttgactaagtgatcaaggtgaagattaatttgctaccaatgctacagtaactaattggaactaacgatattaatattgcatcactaaaatgtatggtatgttgcaacttaataaattaaacaattttactatactaattggatcagagtagatttttagtgtggtgtttatacaaacttatttctagtttacttttgaaataacttattaggaaatagtgcaatgttggaaaatatatgtgttgtgctataattggtctctcatgcagacaaattttctgcaccatacatattttgacaagtacagtatctattctaaaggagaactgtcttttattaatcacaaacaagttgtgagttctctacaacctctacattgtcagatcgcagtcacaacatcttggtgtccaagttcatgaccctaactgatacattgatactcaaatcctacagagttttggcatgtatataatatcgcggttggaataaaagtctagaaattggagtgtccttgctactgaacccacataggattccaacatgcattcttgttttccttttttttaagaagttatggtcgttattcaaataaatggttttattatgattacaggtagttcgaaaatctttcaagcataac

SEQ ID NO: 109346 - DNA, 655 bp, Aquilegia coerulea
  Intron number 1 from transcript AcoGoldSmith_v1.025492m (l ocus AcoGoldSmith_v1.025492m.g) derived from phytozome v7. 0 (chr-ID scaffold_19; pos 1211035 to 1211689 reverse stra nd)
tcatccttatattgagcagtggagaaggcagtgtatgtttgttcttatcttatcagtactctttgaatttctttagatttttggccaatttgagtactttgcatatttgcttcacccttgttgagttgagtacccttgggtcttggccaatttcagtacccttgttgagttgttggtggtcaaaaaatttctgttttgggtctgaccattaaagcttcaattataatttagaaaaattgttgacaacttcacatacatgatacaagttgtgtgtgtgtgtgtgtgtgtgtgttgtgtgggggtgggggttgtcgcatcatgcaggggagctagactagttaaacttttgatatgttaggctgccatgctctccaaccaaattaagaaacaaattatcctttaagaaagacaattggtgctcgagttctaatcgtgtgatgaagatttcatcccatttcttaattggttgagtagtaatgccacgcatacatggctcatgcgggctacgtgctacattgttaaacatggcaaatatatatatatttttttttattttttattttttacatgttatattgacaatggcaactttgatcaagatacattattattttaaaaaaattacactgtttcaatactgacaggtgacatattt

SEQ ID NO: 109347 - DNA, 990 bp, Aquilegia coerulea
  Intron number 2 from transcript AcoGoldSmith_v1.010538m (l ocus AcoGoldSmith_v1.010538m.g) derived from phytozome v7. 0 (chr-ID scaffold_57; pos 508701 to 509690 reverse strand )
gaagcaattagaagaggttagtgcttcatatagtattggaatgttctggtttcgttacttgttttgagtttggggctttttgccgaataacaagaacttcgatatgttttatttcgtttggttggatttagaattttatgatgtaagtttttgaagttttgatatattttgggattatattccacaatgacagttctcgtcatttgccaaaaaatccttacatatgtgttttttgttatagtgatgacggcttagtatttcttgtaatgggaatgtgatgatcgtgcatgtcatccctgcattaggtgtttagcaaccactataatggttgtactcttaggttactttttagctagatttgtatagttgaaggtaaaagcatgtatataattgtagtgatggatcatgaggttagatagtagatgtgtagctgttgataaatagtacagcttaatatggatgttagataattgtattgaaaaaccaggaagaacttggtaccaaaaaaaaaaaaaacaaaaaaacgaggaagaactgtggaggagagaaattaagcttgaaaggaagtagtagggcactaggacgtagttagattgtcataataaaccaagtatagacctcactatgttgaccaatatgcttgaaagggaacacctcactattacatgttctgccaaggtatgtagggaacacctataccgactgtttatgattgcttgtctcactgcattagtcattctaagcactactgtcttgatcttttaaccgtatcatgacgtacacaatttgaattatatgttcattgaagtgcatgatgactttctgcatactctctttaaatcaatggcattacttcccgtttaaattagtttagataatttttaaaggttgggcatgaacctctagttggttgaatcacattagcagttgtacatctttgtcactagcaagctctcttatatgttggcacaggggttgtacttttgacct

SEQ ID NO: 109348 - DNA, 717 bp, Aquilegia coerulea
  Intron number 1 from transcript AcoGoldSmith_v1.000210m (l ocus AcoGoldSmith_v1.000210m.g) derived from phytozome v7. 0 (chr-ID scaffold_13; pos 4436002 to 4436718)
ttgattcttctgctgttaataagattcgttcaatcgtaagttcttcttcttcttcttcttcttcttcttcttcttcttctctctttttgtcgattgttaaactgaaattgatttgaattagtgaagttgaacctaaagattattataatacgatttactttaaaaccgaaactgagatcagatcaaagatactggtttcatagaatgattaaatccactagtagtatttaagcgtcacttagaaatttcgattaagtatagtagataggtggaatacaatgtattgttgaatacaagaatatcaagtttcaatgctagtgcacttgttgagttagattagctctgaaagttgtggagaactaccaattcgatgagtttatttgagttaaatccttctatgaagtgtgtccagccacctgggaatcttgttcatgtgaaggatatgttgcaattttttgtgagaggtattcactatgttgtattgtctgatgatctgctatacttccccgattagttataacatttaaatttgttttaacgagtgtagctattataaaatatcatagcatatgtatgaaattcgatgtatatatctttattattctcacttgttgattattccatcaatcaaattctcgagatatccgaatgttttttgtgttttgttttttctttcatgcagcttgataagtatcaacaacagggccaattgttaga

SEQ ID NO: 109349 - DNA, 794 bp, Aquilegia coerulea
  Intron number 1 from transcript AcoGoldSmith_v1.027184m (l ocus AcoGoldSmith_v1.027184m.g) derived from phytozome v7. 0 (chr-ID scaffold_2; pos 7364317 to 7365110)
ccgcctgtgagtatttatatttctgtatcctcgacacgttctgtccttttcctagaacaactgaagattaattttgcagtctagtttgtaagcatatttgtttgaaatttatttatgcaagcatgtgcttattaaagaacaatgattagctgtggacttcatattatactcaaaataatttgctgttttggacaccatgttacgtgcaccacactttgacgaggctactatctcgtttgtagtatcagcatgatcatgactgggtttaaaggatctgttatgacataggtattcttcttatgttagatggtatagcaattccagaagatgcttaacgtattttgggagtatggtgtactatgtgaagtatatcatatgggactggttgctgtctatgtaaagtctcttatcaaatgtgttcttgtggacttactttcataaataactgaaaaaggtagaggtgtgtagtgtgtacttaattagaccagtacaatagacaacagtattgctgcgaaatatctgacacacttactgcaataaacaggaaaaaccaatcctacaaatttggtccttgtttctaatatgtgttgtccagtaatgaatccttagtaaagaagttttcgagttacataagactacaagagcatcttaagaacaaaaacaaaacaaaaacctataaatatgttattttaggtccgttgcaaacagctattccccgttgaaaatatgtacttactattaattgcttcaatgatgtaggaaggcgacttgaggaagattagaagtgcgaagat

SEQ ID NO: 109350 - DNA, 471 bp, Aquilegia coerulea
  Intron number 2 from transcript AcoGoldSmith_v1.027184m (l ocus AcoGoldSmith_v1.027184m.g) derived from phytozome v7. 0 (chr-ID scaffold_2; pos 7365206 to 7365676)
caattgaagaagctgaggtttgtcagattgtctcatcactttgctttttgtatttctgtggtggtgaggttctctccccaccaaccccattctttgctgttgcaaagctttgctttcatttttgccctcaaattgggagttcatttgtgtgggagagagacttcatggaaagctggatgcataagcagtttatccacctttggacattcttcatagcattttgccagttttgttttgctgtaccgcaattttgtctattatgaagatttactatattagaacctagccaaatctcctaattctgttttaatattgatatttttttctagttttagataagctaatatttatttctacaaattatttccattattaatattcttatgttcatttaatttctgcacttccaaattttgaactgcgttgaaatatatgtttttctaaccaatggagttggtttgaacttctagg

SEQ ID NO: 109351 - DNA, 527 bp, Aquilegia coerulea
  Intron number 4 from transcript AcoGoldSmith_v1.006106m (l ocus AcoGoldSmith_v1.006107m.g) derived from phytozome v7. 0 (chr-ID scaffold_13; pos 4455755 to 4456281 reverse stra nd)
gacagggtaggtgttcaactctctctttgctgggtcatcattattctagcgcagtaacccatcatgcatattttaatatggctgaaatccaagtttgccatctaaattttttcatgcatgcccaaggccctaactgaggagttagataaccaaatttgactatagtacaatatatacactacaaatgaaaatgatattcgggaaccacacttagtaatgcaatttgtgtgttgcctaaataggaataaaatttgccatgatgcctcgtaaaaattgtcagggatatgaaatcttagatccttgtatagttgtatggtacgttggtcaagattgcactgtttgtgattcttgtttgtttgttcttgttcaatttgattttatcaaaatattacacgtatttatttaattttctgagatattaacctggcatatgtttgttaatgcttatttctcttgataatataatagttttacgaaagaatttcttttctttgcgcaggacactgcggccttatcctatatcgagt

SEQ ID NO: 109352 - DNA, 599 bp, Aquilegia coerulea
  Intron number 1 from transcript AcoGoldSmith_v1.023341m (l ocus AcoGoldSmith_v1.023341m.g) derived from phytozome v7. 0 (chr-ID scaffold_26; pos 890306 to 890904)
tgcttcactttgtatccttttttggtctaatccaggttattttcattcaacttttcctttcttgtttgtatatatgcctgcaattatcatcttgttaagctgcagaaatcatagatcatatgtggttcatttttgcgccttttcgtcaatgcacaagttctggtggtgggctgctcaccaatcaactgaagcaatatctgttagtgtaccgctattaacgaactaataactaggcaattagtcatagtggttgccatactagtagtcctacaaactaagggtccccagttcctggccaatatcattacctgccttcgtttgagttcttaggataactttagctagcattcaacaaaataagcttttagcttgcagaatttctgagggttgtcgacttgatattagagtcatgaaccttaactatgtcacccttacaatgtagtcccagaatttaaatcttattttcatccatgcttcacccttacaaaataagattatctctattatattgattattaatagatacttccaatgactgtatatgacagtttattcttcttgcagtcaacgcaggaattctgtcagggtctacgggacta

SEQ ID NO: 109353 - DNA, 887 bp, Aquilegia coerulea
  Intron number 1 from transcript AcoGoldSmith_v1.000003m (l ocus AcoGoldSmith_v1.000003m.g) derived from phytozome v7. 0 (chr-ID scaffold_2; pos 10377262 to 10378148 reverse str and)
aagcattcacaagcttggaaaaccggacgttttgggtaattcttatttttcccggctactttattgttgttgttgttagaatgtcaataaagtgtaatgcagtttggctctagcaatgttctattattttgagttctttttgttcaattggtctatagaaaggtcttttgggtagagaaattaagactcatggcttggacttagtagaaaacaaacaatatgtcagaggagttagattgtggttttcacatggtttagttttttcgatttgaagtcatgctatggacgctatatacttattaatttctgtggcatcaaagacaaccataatatgattgaatttgcactttcttcggatgaaagtattggtactgcaagctattaagacaactaaaacctcaaaaaacactagtttacttctttgttgactagctaagtagctaactttgattaatctgctggtacaacagttgcagcttataaaacaaaggatctcaagaatttctaaatttaggtgttgtcatgtgctggtagatattcattcattgcatgaagataaatttggactaaattttgtaatttgaaaggggtgtctctctctgtgtgtgttatcaccatcattattactgaatttcgtgatgggactaactatcaagattcatccaagtcccccaaattgatgttagtctattttatcggcaagtaacttttgctaaatttgctttatatatagcaccgccggaaaacatttacatatttgttcaaaagttacatttcttctttgatttatttgaatgtaggtacgtcattataactattcacaactacttttagactagtcagttttgctctttctttgcagggttgggtttaattcggtctaccac

SEQ ID NO: 109354 - DNA, 480 bp, Aquilegia coerulea
  Intron number 3 from transcript AcoGoldSmith_v1.008859m (l ocus AcoGoldSmith_v1.008859m.g) derived from phytozome v7. 0 (chr-ID scaffold_26; pos 1995403 to 1995882)
aatcgccatcgccaaggcaagctacttcaacctcccccctccccttctttttttttccttttgtaacaagatttttgagcaaatgaagtgatcaaatgtgttgtttttcaaatacccattttgattaattttgagaaaaatgttcatttgactaagattgtaaaatagagcaaaactgtatgaagtgaaatgggaatattatttgtggtacaggaagagaaaagcaattattttgactgttttgacatgtaaatctgtgaaaaccactatgagttagtcatgtcaacttgtttttctcctttttaaagcaaaagcaaaagcaaaggggactactttctttgttattgttgttgttgtttgctgaaattcttgttgtggtgagtgggtttttttatttgatatgttgatttgagggatttgatttacattttatgggattggtcagaaagagagactgaaacactgaaccgagctcgtcag

SEQ ID NO: 109355 - DNA, 756 bp, Aquilegia coerulea
  Intron number 1 from transcript AcoGoldSmith_v1.002374m (l ocus AcoGoldSmith_v1.002374m.g) derived from phytozome v7. 0 (chr-ID scaffold_13; pos 2240341 to 2241096)
atccttggttcaataaggttagttagatcgaaacacttctctgttttattcacttttacttagattagatgtagttgattttgatctaagttttaagtcaaaacgaagagaaggtaagttcagctagctgttcatttaagtataagttcaaagtcaagataattatttctagtttagagtttatgatctgaaattcaagattccattagtatgctatgaacatttgattgggtttggtttgaccattggtacacaatgtgaggtttctaagttctatattatggaccatcgcgcagagaaccctagatttatttttttgattcaagatgaaaaatccaattctggctgtagcaatagcttagctctaatgctctatagtttaagggatcccctctgacgattcgaaaacctggtcaccaacgaaacttaaatactagaaaacactgtcgttttgtttctgcacatctcttcaagctttacaagttagtccattcaagtcatgaagcactgcaagcatataggtactgtttgagtgtgcagaatcatggatacgaatgtgtgtgatgtggttgtcattagtcaatatgcttttgatatttatgtttatggtgaatggtgattaacaatgtttgtttaactttgaccataactttagattttaaaatctttttcgtgctgtgttttaaacttaggtttttctttatttgttgtttgagaataggataccggttttcctctgacagaaagagatcggct

SEQ ID NO: 109356 - DNA, 626 bp, Aquilegia coerulea
  Intron number 1 from transcript AcoGoldSmith_v1.004961m (l ocus AcoGoldSmith_v1.004961m.g) derived from phytozome v7. 0 (chr-ID scaffold_56; pos 384751 to 385376)
agaagagaaactcttctgtttctgtttcttgaaaggtaagcaaacaagaaaactacttattagaaaaattcattcgatcgagattataatttcggagtttctgtttctatctttaacattaattaattaatttatgatttttttttttttttttttgctaataaccgaactacacttgaatttaatgaaagaaaagaaaatgctgagaaatttcgattgataactttgatctgaagctttagattgagaaacttcttggaaagtagtaataatggcggtttgatatgaaaagataagaaaagagagtttgtttgatttggttttagttacttatttgttaagtgtcgtcgttgatttggcttctttcacaattgcgtgttggttatttgaaaagccatctggcaactatagtctataaaccctagttttggtgaaattaaaagtgagaaacaaaaacacaaatcttcaacaatacaacacaagtttgccttcattactagtctactagttgaattattcaggtttggttggctttcttaattattattattattattattattagttgtgtacttgtgtttgtttacaaaggtaattagaagtttggagattgaagagattataga

SEQ ID NO: 109357 - DNA, 761 bp, Aquilegia coerulea
  Intron number 3 from transcript AcoGoldSmith_v1.009607m (l ocus AcoGoldSmith_v1.009607m.g) derived from phytozome v7. 0 (chr-ID scaffold_22; pos 1802981 to 1803741)
gaaggttagatatctatatgccaatttgtacaaacaatttactttcttgtatacatatgatgatgccaattggaaggttaggtatcctttcgactataggctataggaacagaattttatctggaatctatactgtgtcactgaaactcctcttatattctaaatacttagttttttccgctaaattgaaccactcattttgtagtcctggcagtggcagcatttctgcatcacttttcatagtgaatttggtagtaggtgttcttcactaagacatcactaaaacctcaacttctgtgttatacaaaagtcaaaacactgcttgggtttcagcacttcacaaactccatcgcaaagctcacattgcttcatacttttcttgtttcaaaattttaattataaaccctaccatttgcaattggaatatgttcttgggcaaggcatactagatatggttgctattatgcaatagatatctcatcataatccgaaggatgtcttataacagaacccttaaagttttgaggatcacgttcaacttgtaagtatttgaagtctgtagtggaactaaacgtggttactttgtttttatttggtcttgtcttaatgttaaaacttagaactgttttagttttttaaaaacaaacttcatcaacccttctaatttttagaggaacttcccaaatccaagcattgctcatgttcttttgttttctgcattttcaggtggataatttgggaacagtgaaccttgttgaagc

SEQ ID NO: 109358 - DNA, 638 bp, Aquilegia coerulea
  Intron number 1 from transcript AcoGoldSmith_v1.005718m (l ocus AcoGoldSmith_v1.003325m.g) derived from phytozome v7. 0 (chr-ID scaffold_3; pos 8960502 to 8961139)
gacacccagtgtttgggatacctttgctcactctggtttgtttttcttctactgtacttgtttccaatttcttcttctgctatataatactgcaaaaactataccaaaaactggaaatcttgatggaatctatcaagaaatacatgttaatgtgtccattaattgatgggcatcaagaacaaatgtatgtctatctccacttaatcacttgatggttcatatcctctgcccttagataccatcttctaatcctcaatccccaattagggattttctttgttgcgttataatgggaatgtttaatttaggtcacaatacattatgtctgcaagcattaggggaataagttgtttacagacctttaatttttacttagtgttgttttttcttctccatttatataattgatttacacaaaaaaatactgtaataaaagtatattatgttggttcttagtttgaattctcttaaaggcgcaactttggctgccaacttacaaattaatggaaatttattgcactcaaagaactgaacaaaccttctgaaagaaggtgattttcagtttatactttatacaatccatttggtgtctcacttttcaaaattttgcattacaggccgtttgagggacaaaagca

SEQ ID NO: 109359 - DNA, 517 bp, Aquilegia coerulea
  Intron number 1 from transcript AcoGoldSmith_v1.017061m (l ocus AcoGoldSmith_v1.017061m.g) derived from phytozome v7. 0 (chr-ID scaffold_24; pos 2030587 to 2031103)
aaagaattgaacaatttactcaacaggtacacaaacaatcagttcattgtgaattattatggattgcagaaaggaaaaactcttttgtgcatgatgaagtttagactgcctaggttaaagtatctttataattttccattgaagtagccatgtttttagcaaaccaggtccttgtttatctacaggcatatctagttggttttgacatgtttggttttcagctgaaatgaacttcttctctgttgcataaacgatctggcttagtggcgtaacaataacatttttgagcaactgttttgattgcaaggattatctgcagtttctaaaatttcttgtccatttgattagcattaaacaattatcgttctcttgcttgttcactcgttgatttatgacattccatgctgctctagattgtctcctttctttctctgattgaaatcccttaaataagttgataaattctgaatgcattgcactaggtagtagagctcctggataagggaaaaacactctt

SEQ ID NO: 109360 - DNA, 716 bp, Aquilegia coerulea
  Intron number 1 from transcript AcoGoldSmith_v1.018223m (l ocus AcoGoldSmith_v1.018223m.g) derived from phytozome v7. 0 (chr-ID scaffold_22; pos 939097 to 939812 reverse strand )
caagctgcttcttcttcaagtatagcacataacaggtgtgtgcattttatttttgaaaacacggtcacttgtagtcattaatatatatatatatatatatatatatattcacaactttccatcacttgcatgtgttggaaccaacaggattgaattggctattctgagcttgaagatgcactgcagactattgaagcttacgaagagacaaaaatggtgtaaatctcatccttttatctttatttacaataatgagtaatattttcttatttcatttatgttattttcatacttacctattacctatctcaatctctgaaatccatgatttcgaaaatataaacacagtttcatgagagttcttctaattgggtttgattttaattaattagttctgatgtgtatcttttgttgattttaattaattagttctgatataataaggtaataactaatgcatttgtgtagttgtgttgtgtaagtttattttattatcatcattttgcgatttttttaacctatgcttacaccccctaagtgtattatcattattagatggtccaatttagtagaaaccaacaaggttgggatgttgcgagtctgacagttacacataaatatatatgactaacatgacaagagaaaacacaaaccaaaaaggcatagaaatcatgcataaagggtcttaaaaattctaagcactactctaccttgta

SEQ ID NO: 109361 - DNA, 1033 bp, Aquilegia coerulea
  Intron number 2 from transcript AcoGoldSmith_v1.006804m (l ocus AcoGoldSmith_v1.006804m.g) derived from phytozome v7. 0 (chr-ID scaffold_7; pos 1756353 to 1757385 reverse stran d)
ctgtcgaacattgcaaggacacacaggaaaggtacagtctctcatttttaattgaattaggttaagttcagtttcttctattgaagaatatttgagtaatgcagttgccagaatcttgcctaaccttgatgattgagtaactgtcatgtacagtatatgagttcgagatgccattgatattacgttggttactgacactttaaaagtagatgttgtacctaataaattgatactgagttatgatatctttgattttttttgtgtaatttgctgtgacaatcaatgatagataacaagttgtaacttgaaccaaaacaattgatgcgtttctgcataacctgatgttggaccaatatgacgacccgaaataagcagctcttttacatttttcaaacacagctgagagacgttggtaccataaaactattgattatggggacttctgtgggatacttttagagatctgagtcttatctcgtatgtatggctatggatgggctgcaaaacatataattcaaacaagtttaagacatttttgaacatgaagatatgtcatcaatgtaaatgtcatacatattttaggacaaaatttggggtttttaaaattaatttgtatatctgcttgtgattttatttctgcacttgtattttccctaagaagatggtaaaacatggtcttttagctctgagtttcaaatgaattcatgttcctaatgtttcactatattgtctttatctttattagcaaggacattaatccttctcccagatacttatttaaatcatccacagattgtagatgaccaatctaactctttcatgtaaatgaaaattgtgtgtccaaattcctggaatcaatgaagaatatcccacatgaaacgtcaacattaataatggattgagaaatattgttgctttattggatcatctaccttgtaacttcatttactaaattttatcctattagaaatcttcatgttacaatattgtatggccaggtgtattccttggattggactcctgaaaagaatcg

SEQ ID NO: 109362 - DNA, 874 bp, Aquilegia coerulea
  Intron number 1 from transcript AcoGoldSmith_v1.011418m (l ocus AcoGoldSmith_v1.010302m.g) derived from phytozome v7. 0 (chr-ID scaffold_32; pos 2402161 to 2403034)
gttcatcagcaaacaaggtaaaatttcaccttgatttcgatctagggtttataacttaaaacccctgtgttggttctttgatgattcgttgaagagttctgttaaatttgaattgttagtttgaatagaagaaaccggggataatttttcagacatgaatatcaatctgagagctatgtttgagcttcttcttacttctttgtgtaactttattatattactaatagattggggttttgtttaagatgtacgtatgccttgtttatatgtgtttgtttggtttatgggaaattcaatgtgtttataaaccatctgaaaatgagttggtcttgccagcccttcgcctttggtgttgaaatttgtgtttgaatagaagaagctgtggggttttttggggataatatttccatttcagaggtgactgtcattggatcttataaaccaaagcttcaaaatatttcaatatttcattatatcagtttgtgagagatatgtttgagcttcgaaacacacttagttctgtgtgtaactattaatcgattggggttctatttaagatgtatgcattgtatgtatttgcttggtttattggaaagtgtatgttcataaagcatgacaataagttggtcttgccatccctctatgtattaattgtcaatttcaaatcctactcttgtaactgaaatagaatgaatgtgatgtttagaagctcaaatttaaattgttataactttattccaacttgagctcagtttgattcgctttttgtttgttgattttccatatactatatatactgaactcagattagtctacatagttgttttacaagcataatgccttatgattatttcgtatcttgcaggtggtgaat

SEQ ID NO: 109363 - DNA, 1010 bp, Aquilegia coerulea
  Intron number 1 from transcript AcoGoldSmith_v1.001322m (l ocus AcoGoldSmith_v1.001322m.g) derived from phytozome v7. 0 (chr-ID scaffold_13; pos 1132378 to 1133387)
ctcgttctcaagacagtcaatcgccatcacctcaggtatgtatgcactttttcttgtaaaataggcaatccatcctgagtttttaaatctaaattttccaccacttcaggtatatatgatcatacagattctattgatcaaaatattctggattgctccctagtggcaccagttggacactaataaatttttggttgggtggtttgtgctctacccaatgcacccgaaccacacgtctcaagtttacccgttacctgctaacatgtctgttttttgtttgcaaaattgattttatgtgtcagaatcaagtctcctgcacttttatgttgtgcttgaaaattgtatgccaatttgttgctccctgttaaatccggttaaatgaaaatttcagtttcattgtagttctcggttggtttttgttgttttacatttttagctccttgctaaggaagctactacacaatcaaagggatttaatagggagctatatcataatattgattgagttaagttgaattggaaatgaaatacaactcttactgataatgagacccattagtttggggctttgatcaactttaaaataagtgacagcatgccatgcaatttttgggttataataatgtacagtgtgattttggtcatttttcatcttttgagtaagattaaagcaggtgataaacttcatagaagccaaaacatgcaaaataccttgcataaagtgaagtttgcatacaaaaatcccaggctatatatataagagactatccgaagtttgatttattcttaaaaaatgtctaaagttcagtttacatggaattgtacataacacaaaagagaatttctgtaaagacatgccagcatacacatgtgaccatacggtctaacatgtgttttaactgagggttgtacttttcttgcttattccagcatgtacgttgagacttgtggatcattgtcttgaagataacctgctgaatcttgctcattttattgccaggttcctgtca

SEQ ID NO: 109364 - DNA, 456 bp, Aquilegia coerulea
  Intron number 3 from transcript AcoGoldSmith_v1.020983m (l ocus AcoGoldSmith_v1.020983m.g) derived from phytozome v7. 0 (chr-ID scaffold_13; pos 5899871 to 5900326)
gaaaacattcaattcccagaagaaaacgaagcggagttttaatgagaaaggatgatgggatagtttatgtacattaaaaatgagctgtaaagatgatactataaatgtgttcatattttcatgatactacaagagttgtaaaatacattgatgaaaacggaagacaaaaactaatgcaaattattgggggttctgacagctaaaagtcttcgttgtattgtttttgcccatggtgaaacataaacgtgaataataatggaggcatccacaatagacttaaagaagacggactaaccttgtgtggggaaagttgtcataaaggattcatgtcgtctaggggttaaaacagctgtggaaagctaacttgcattgatgttggagtaaagatcaaaatagttaccggaaataatgttttcactgctagagctataactactgaataagaaatactaaacc

SEQ ID NO: 109365 - DNA, 852 bp, Aquilegia coerulea
  Intron number 1 from transcript AcoGoldSmith_v1.000751m (l ocus AcoGoldSmith_v1.000751m.g) derived from phytozome v7. 0 (chr-ID scaffold_13; pos 3729998 to 3730849)
tggtgtcggtagtggagtcaaaggtgattctggaggtcagtttttttttttttttttgcttaatttctttatgcctatgaactacaatttgaaatttctggtttatttgattttaaatagttgtaagattcgttttcaactattgatctgtggcttgaatttgttgtttgttagtattcttagtgtaaacttgttgatgattgaagattacattgtgtttggagcttgatagatgaaattaggaatgaaaaattaggtcttgaagagtttggatcgaagtttgtgtttttttcatttgttttcaaatttagaaactggttgtgcctgttgctcagttggacgatgcatatattgttttatgatgtaattgcaatgtgtaatgagcacatggagagctcaaagagcgtcttgtattttttgtgccaccagtgttgttggaatcggagcaagagtaggtactctaggatcatatagaggaccgagaagttaatgtttgaatagcttctattaattttatagggtttgaaatgctatctttaaacctggactttctgaagtctgttgcaaataattttgaatgagatcatgttcaaaaggacaattttgaagcaaaagtctatacaatagcgccactggtaaatttcatctctaggcttcattttgatcaacatggtgccttaaataatataaaccacacattcttcaatgatgccaatgaaagattgtccatttcactgagcttgtgccttcaatttttcgtccattgcactcaataacatgagacatgatatcttgatcctacggtttcttgtttcagcagtgcctggaagagttcgagtcgctgttaggttg

SEQ ID NO: 109366 - DNA, 397 bp, Aquilegia coerulea
  Intron number 3 from transcript AcoGoldSmith_v1.008807m (l ocus AcoGoldSmith_v1.008807m.g) derived from phytozome v7. 0 (chr-ID scaffold_26; pos 3122720 to 3123116 reverse stra nd)
atattccctagagttttaggacacgaaggcgttgggtacgttctctattttctctaattctatgtttccagttttaatttatttttcagataattgtaaattcacactagacatagaggcataacttgccgaggaaagtttagaagtccactattcttttgcaatcataaatacttgctatcatatcacttctctagaaaaaaaaacttaacaaatatactgtaccttctttgaatatgaaaagttgaaaactacattttgaaatttgaatatttactctatgaccttatttcttagctagtgttttttttaaagtcaaatcaattaaatccccctatttttttatgtgttgggtgtcgtagggttgtggagagtattggggagggagttatagacc

SEQ ID NO: 109367 - DNA, 969 bp, Aquilegia coerulea
  Intron number 2 from transcript AcoGoldSmith_v1.008807m (l ocus AcoGoldSmith_v1.008807m.g) derived from phytozome v7. 0 (chr-ID scaffold_26; pos 3123085 to 3124053 reverse stra nd)
acacagatatcgtcacttggaaaaatcctttacttgtaagtgcatatcaataataatatctgtaacgtttacaagttattcaaactaattaagacatacattagtatatactgtattagtgtattagcataatgcccaatcatagaagcaatttaagctcctaatacagtaatattacttcttcacagagttcctaaaacactgccacatagagaggtgagaaagggagaaggtcttagttggtttgattcaagaaggaaagaagagagaaagataaaataggagtaaaaatacaaataataggtgccagttgggctcaactggtaaaacctttgggtgatgatactagaggtctggggttcgaatcctgccagcattacagagttactgatctcattaaaaacaggcttaccacaccattttttccttgcttgccaaccaaaaaaaatatacaaataataataataataaacgctttcttattttctcaaactctgcatcttcttgtacaccacctttttctctgcaaccatagatgcaaatcatacaaccatgatgaaaatctcgttgtacaccttttgacattttcttttatttttttggatgaaatgtaaattttattgaattcaagtaccatagatttccttaaaaaagaaaaaaaaatcacagtccatagatcaacatgtacaacacgtacatcatctttgagcccttacaaagaaaacagataaagagtggaagaccagggaactaagaggtgtgactttatattgacatgtttttgaatatcccttttttaaaatgttgttgatataattaaatgtttctaaagaatcaaagcaaacggcctgcaagttttgcatgtttttatctatttatgtttaattattactagctacaaggaaatctaacttatgccacaatatttttacagcgaatattccctagagttttaggacacgaaggcgt

SEQ ID NO: 109368 - DNA, 670 bp, Aquilegia coerulea
  Intron number 1 from transcript AcoGoldSmith_v1.017626m (l ocus AcoGoldSmith_v1.017626m.g) derived from phytozome v7. 0 (chr-ID scaffold_86; pos 146396 to 147065)
gttgccttattatcatcaagtggttcagcaatgtataattctatcattttatatttcagatttttttttatatagattaaatggctttagaaattagctttgattttgctgtttttccataatcattttaattatgttctgtactactttatttgtatatcattttctttttcttggtttcgaatttagatcattctctcaattttacgcgacaaaaatattttttgtgattatgttattgtcggtgaatctttccctagcagtaacatttatcttgacagttttactcttctccatgttgtaatagtgtaataccgacgatgttgaagagtaaattatgtgacagactgacagaggaaataaaattttcaacaggttcatgttgtttcaagaaaaatgttttggtggaaaatagttatgtttctacaaatgtggtcgatagatttattgttgactattggtggatctaccccatgtttggttaggactgtgggcctaactgtttgtacggccctgtgacccagttgagagagtggcaaagtccacctccgtgtttggttaggcatgtgcctaccagtttatccggtattccgattgatattcattgtggtagcctccctttacaagttcgagctttttacaacattgacattttaatcatacaggtaaa

SEQ ID NO: 109369 - DNA, 995 bp, Aquilegia coerulea
  Intron number 1 from transcript AcoGoldSmith_v1.001646m (l ocus AcoGoldSmith_v1.001646m.g) derived from phytozome v7. 0 (chr-ID scaffold_2; pos 5588791 to 5589785 reverse stran d)
ctctcagagctgactcttttgaaaaattggagaaggtagttgggttttttcttatatccaatctttgtttctttcgaatttctgcgtgttttatgttcaattttattaacttagaaatgccttatcagctatgctacatattttggatatgttaagagtttgtgctcttgcattgggtttttattgttttaacagaagactagtcatttcacatatataaaagtttgtttttagtacttgttttgcgaggaatgcatcagctttgtttaaaatgttatgctgtgatcgagtataaatttattaacaagttttgtacattatagtgaaattcattaataaatatatatcattagtacaggagtttcttactcacctgtttccaaagctcatacctatatgaaagaattttaagttccggactacactaaaaggaattgctctctctttgttagaatgaactgatttctaccactttagatgtttctgaatgctcacatgacgttgaattagggattgttgtattgttgcccacataattaactgcctgttttaacttgggtcatttgcaacttataaaggttagagcagttactataaattggacaaatatggcttagaatttgtaatcgctgttagttatgtatagtcttgtgctacagatttgatcctaataagaaaagcatttctgtttagccatccagtttagtattcagctcattggtttaatcactatatggagtaacggcattactccagagtagcttcatacagtactagagtattattttgttttgagtagtatttcccttttcagaaagcatgcgcttagagacttcaattatataacagtttactgtcttacgtatatattttgtatgtggtatctaatttgttgcatccactgtactctattgtgtgttttgtatgtggtatgttatttagtgtgatatgcaattgtagatcggacaagggacatatagcagtgtgttcagagc

SEQ ID NO: 109370 - DNA, 430 bp, Aquilegia coerulea
  Intron number 1 from transcript AcoGoldSmith_v1.005780m (l ocus AcoGoldSmith_v1.005780m.g) derived from phytozome v7. 0 (chr-ID scaffold_2; pos 9475721 to 9476150)
tttgcattccttctctattctctctttctttccaggtatctttctttctgattctcttttgattttggtttgtcagatcgattgatcaatcgatctgactgtttctttctttctttcacattgaattcttcgttaatttgtaagaattttcgttttttcggtttcttctcaatctgttttattttgttgtttttatttgtttgttttttaaatggaatttgtctcttatctacctttttattataagagaaaatatatttttgtttgatggtgtttagttctgtttttattatggaaattttgatctatttatggtgaaagaaaattatttttaattttgatttgaaattggatagtttttgggggagaatttttcttattttgattcattattataatgatcaagtgcagcagtattgattggttgtcg

SEQ ID NO: 109371 - DNA, 731 bp, Aquilegia coerulea
  Intron number 1 from transcript AcoGoldSmith_v1.005937m (l ocus AcoGoldSmith_v1.005937m.g) derived from phytozome v7. 0 (chr-ID scaffold_34; pos 2754157 to 2754887 reverse stra nd)
aattgggctgttttggtctgcacttctcgcttctggtacaatttctctctctaatgctcgattttgaacaatacccatttcattattttataccatattgcattaatcagaagttaatttggattttttttcttgataattgagatcccaaatgtgtatatgagcattagtgataaacaaattaagttactcaaaggctttgtttacattaagaaatgcgaggagctacccctttttggctgaagcgttgagctagacgatgcttttgttgttagaagatctacatataaaaaaaacaacaacttgtctttcgattggtagcttagtgcttttacttgaaaacatacagttgcttcttgttataaatggttgtcttactatatgttataaaatatgcaaaatgaattatcttagcttatattttcttttaggtttgatactaaatattcctaacggaattcttcagacaagctattaaattgactcttgttaacgagggcttttagtggctaaacctgtcaaaccttattgtatacatccattgtgttatgaacttatgatccagtacgataagtgtttagcatggatttttccatgtctaagctcaaataaatgaggcacttgctaaacatagcattattagtgtacccctctactgtgtttgcaactttgcattttatgccgggtttttaatatttctgttgttcttgaacaggtttaattatcgacat

SEQ ID NO: 109372 - DNA, 619 bp, Aquilegia coerulea
  Intron number 1 from transcript AcoGoldSmith_v1.019130m (l ocus AcoGoldSmith_v1.019130m.g) derived from phytozome v7. 0 (chr-ID scaffold_22; pos 796959 to 797577)
ttgggaaaacaccgcggtttccttttgttactgatgttattgatatgagacttcaagctgaagataattggccttgagaggatttattgtttagaagaagaaaaaaaagtggaatggagcttacagtgtaggaagatgattattaagagttttggaggttggttcagagagttagaacgaagttattgatgtaaactttagatctgaaagatcaaaagatgagatattttctctttagttaaatgataatcaacaaatttatatgtattgtttttgtaagagacatattttatttaatggatatcttcaaatttatgcagttgcattatcttgccttgttctacattttgattgtagttctagtagtttacattcgtgtccaaagaatttcctgtatgtattcttgttctttttccttttcaatgttctgcatgcggatttgtgtgttcatgaatcaaattgaaaaggaattgtacacatcaggggtcgctgaatgcaattcttttcttcttccgtgtttactacaagcataggcaagccgaaactttctagttttagcaagaaagacatgacaaacagattatacttgtcagatcaccagcacacacttgatagatca

SEQ ID NO: 109373 - DNA, 933 bp, Aquilegia coerulea
  Intron number 2 from transcript AcoGoldSmith_v1.008226m (l ocus AcoGoldSmith_v1.008226m.g) derived from phytozome v7. 0 (chr-ID scaffold_32; pos 1737765 to 1738697 reverse stra nd)
ctaaatttgaagttcgaagtcctactcgtgttcaggtaactgcttttgatcgaattttagcaccgtgatgatttaggaaccaaggattaatatgatcatgcttttactgtaatattcatgcctgaacgtccacttctttatgatagaccaacagttttgatggtactaaaacacatgttattgaccacactaggaggtgattatataataacttttccaaggtacatacaatttcaactagaccttggtgaaaaagggcttgttagaatggtactagtatattcttccatgttgaagagtcatttattgtcaagattgtcctgttttcagacactgcgatagtacattatttctgccatacatggaggatagaaatttcagttaccattggagaagctcttagttcttcaaagtaattatcttcatgacatggaggttaattttttttattggtcgtatcatggaggttaactttactgaagccatgttaaccatgtttgggcagttccacacacagcccacaccttgttggacacaaagaacatcactggaaaaattactcttttctcgcctttggcttctttgtttctgtccacaaatatatttgacatcaaatattttagttgtagtctattttgtttttctctacattgttgttctctgattttctagtagactagtactagatggttggaaagaaggcatataagatgagtatcttccaatctttttgtggcctttggacaaccatgtaaaatttcccgattttctgaaataagtttgtatgccacaaaatatgtgattaaactggttggtcatcttatctaatttgatgtgttgttgttactaaataagtagcaattggtggatctgaaaatttgaatttatttgcatgcagatcaaatttgaacaaggcataatcggaactccaca

SEQ ID NO: 109374 - DNA, 859 bp, Aquilegia coerulea
  Intron number 1 from transcript AcoGoldSmith_v1.007645m (l ocus AcoGoldSmith_v1.007645m.g) derived from phytozome v7. 0 (chr-ID scaffold_2; pos 5041451 to 5042309)
tattagtttattacaataacaacaacaacaaagaggtaagagaatctccgtttattatgggtttttagacaaatatacctctcaattctccatgtttataggaagagaaagagaactttgaaactttctttgtcctaaaaacatggactttgattgagttgagagagagaaagaagtaagatttcaataccaacagctatttcaaaatttgtttcaacatgaatggtagagattctaactcccgggacttaatcccaaacactatcttacatatatataaatttctttcctttttgttatttttgatgattttctattttcctggtattttctaattcccttttttcatctttttttggaagctgggtagtgtttttttttttttttttaatctgcttttgtgttttttttatgatttgggtattctttatttagtgcccttttatctgttttggtatttgggttttgttacagaagtggaattttgaagtgggttttggttagttttaatttattctaattctatctttggaggttgattgatttttttgtatgtttttcaatggggttgtgtttcattgcttgcaagtaaggtgtagtagttcaggaatttagtcgaaaattaatgtttcaaggttatattttgattggagattgagttgttaatgatttcatatggtactataatgtgccaagaagaaaaaaaaatacgttggatttattcagagcattgtgttaatgcaatttcaaaataggtgaatgagaaatggaggggcaaaaagaataaagttgaggacatgaagagtgtgatgatcagaaggaggtagtggaattaaagttttgccaatgattctgcagg

SEQ ID NO: 109375 - DNA, 329 bp, Aquilegia coerulea
  Intron number 3 from transcript AcoGoldSmith_v1.008971m (l ocus AcoGoldSmith_v1.008971m.g) derived from phytozome v7. 0 (chr-ID scaffold_13; pos 4681113 to 4681441 reverse stra nd)
tgaagtggatcagggggctcaccattccatttcaggtcatctttcttcttaatgcctgatttgattaatgtgttcaattcctcagcatttgtttattgtttttcttttgcaaaaaacgatttatgtcgagtagttcattttttctgtcatttgtaatgtccaactgtcttcatgggaggaggaactgccttaccagcagaagcctatgtccaaaagtatccaaagatatatttcttgtttgttgtattgttacttaaatgagtgtatgtaaatagaattatagatatcaaccttttttgcctgttttataggtgacacagtcagctcat

SEQ ID NO: 109376 - DNA, 889 bp, Aquilegia coerulea
  Intron number 1 from transcript AcoGoldSmith_v1.027614m (l ocus AcoGoldSmith_v1.027614m.g) derived from phytozome v7. 0 (chr-ID scaffold_26; pos 2453454 to 2454342)
aaatatcggccgatattttacaaaaacattaaagggtaactatcgggaatatatcgtatcattttataaaaaaaaatgatatatatcgcgatattttgtactatgatgaccaccaccaccaccattggcgccaaatattttacaaaaacattaaagggtaactatcgggaatatatcgtatcgttttatcataaaaacgatatatatcgcgatatttcgcgaaatatcgcgatattttgtactatgatgaccaccaccaccaccatcggcgccaaagaacatattaatatattattgcctagaatctccaacatgatcaaaagattatgatctctgtatatgatgagtagaagaagtttaacagattgtgattcgatgattaggtttctaatctaatatatatatatagcaatatagcatgcatgcatggtataaaaaaactcgaaactgttcgtcgtttaggactctcattatgaagttattgggctttgggtctaattatgagcattatagggcccaaaacttaagtccgacccatcaggcctcaggtccattttacattgcgatgtttttttttcttccaactaaaattaccgatacggcgatacggcaatagagaaacaatacacagcagattagcagcacatcaactatatgataaaatgtctaagagaaattcttttcaccaaaaccaaatcaagctacatttatacaagcttttccaccaaaacccaccaccaaaaccaccctattattcctctcttacaacatttccatcaccaacaactagatttcagaatactccatgcatatactgtaacctcaggtttatttcatgaccattttatatctagtcgtttaattgagttttgttttgattccaaatcat

SEQ ID NO: 109377 - DNA, 494 bp, Aquilegia coerulea
  Intron number 1 from transcript AcoGoldSmith_v1.004865m (l ocus AcoGoldSmith_v1.004865m.g) derived from phytozome v7. 0 (chr-ID scaffold_57; pos 1096224 to 1096717 reverse stra nd)
attggtcaggtaaatttttcttctctaactatattttttcaatgaattatttgatggtaaattatgtattgtattccacggacaagaaatttcacaagttggatttatatgtatgaaggtatctaggattagcgagtgtagggaagtagaagtattcaaatcaagtcgagtgggagtaaaattaatatttagcttcaagtggtcaattagatttttcagtagtttggatctgctgtgatagttactactaatcatgcggacagcattcgaaactagtctttaacgaaatttaacaaactacgtagtggtattttgtttaaatcttgtcatcttgtccagtgatactacccccatttgtgtttatgaaatcacctatgccacttatgtaagtcgcttgggtttgtaaaacttgcatgtgtatgtttgatttatgatcttcttgtggtgataggcttgttatttgctctttacagataaaacgtgaaatttcaaca

SEQ ID NO: 109378 - DNA, 660 bp, Aquilegia coerulea
  Intron number 1 from transcript AcoGoldSmith_v1.006885m (l ocus AcoGoldSmith_v1.006885m.g) derived from phytozome v7. 0 (chr-ID scaffold_22; pos 742412 to 743071 reverse strand )
ttattggtgagctctcactttttctcccttaagttctgtgtatataaagttaatgtgcttatgttataaccatataatttgtttgcctcatttaatttgtaatcatataatcaataacatttacgaaaaatattgcagcctaggcaaatagttatgttacactttaacaaaacaaggccatgaaaggccaaccagagttctgaaatcaaatttcatttgttgaataaagaataattctgcttgtttgttttcttatatatcaagaacaaagcaaaccctgcaactggcaatattagaaagagtgctctaactagtaatgtttcaatgtttgttactagccattcaaagcatttaattgctcttgttcttcctttggttgaacatggcccatggggataaatgttcaactggacctacttactggtttttgtctagatcgatcattagtgttagcacgaacccctcaattttggtaaattggaatattggacaaatttgttcatgtgtttgtactaaaatatgttatatgttgattacattgaatagtgcttctatgaattttagtacaccttcttcatggacatagacagcataaaatgaatgtggtattttttcactgttgcagctcaactcttgggttttaacaattttatcccacca

SEQ ID NO: 109379 - DNA, 442 bp, Aquilegia coerulea
  Intron number 1 from transcript AcoGoldSmith_v1.000548m (l ocus AcoGoldSmith_v1.000548m.g) derived from phytozome v7. 0 (chr-ID scaffold_58; pos 1311239 to 1311680)
tcttaaaccattgcaaggttctgaatctatcgaaggtttgttcaaatacaacttttttttttttccttttctgatttgaattttggttttaagttagttgaaatgattgttctcaattctcataactaatttaaaattttgaattggaaaaataaaataaaaattgtgttctgttgctattgtttgtaatgaagtttatcttgaacttgaattagaggttatcagcttattaggactttgtattatgatcaaatatttagtctgtatgtttcaacaattaagctgtcatttgaatggattcaggatgatgaagagagttcgtttcgtgacaatattgataaaaaaaaaaatctatttacaagtgtatatatacttaggctatttgtttgatctttaccccagctgacttttgtatttttttgtcttttcatttttgaagttg

SEQ ID NO: 109380 - DNA, 920 bp, Aquilegia coerulea
  Intron number 2 from transcript AcoGoldSmith_v1.013295m (l ocus AcoGoldSmith_v1.013295m.g) derived from phytozome v7. 0 (chr-ID scaffold_35; pos 145077 to 145996 reverse strand )
gttgccaaggttagcaattccgctttcccccctttcccttccttactttctctatacataatacactcacaaccaccttcatacagtacctacttatttactcacttccttactattctaaattaatttaaacaaacacactataaatacaagaattaatttaaacaatctcactcattgcttgctcaattacttttattaacataaaaacccctcatttcaatcatgcttatcttcttccacccatgtaatatggattcatcaaatattcaatagctctttaccttgtcaacatactgcatttaagggattcatatttaaccaatttcacattccacaacattacttcaaattagcaggcctaaaccctactcacaataccagtgggatttccgtacaaaagattgaacattgcttcaaagttttatctttttctaatccattacacaactaactcattaatttttagaggagtttaggttaaacattttatgttttgattttcctaagagaagagcaccactttttaggtaaaaggacaacatcagcaatttcagataatcatccgtctttggacttttagacacaccactttcttgcatatgttaaagacttcattctggcttcacctgacaaatcattcttctctgtttatttttattatgtaatcatttgttttggcctggtttatattgggggaaatcttctgataacatgccctgacagggaccttggcttattttattggggctattgatgcaagcagatgcaagaggttgcaggagagcgtggtggttatcttcatggacgtggcggtaccctcttcttctttttttttcttagttatttgtttcttctttattcttttggaatagaatgggtctcattttctaccacttttgttaatttttagttaaata

SEQ ID NO: 109381 - DNA, 775 bp, Aquilegia coerulea
  Intron number 1 from transcript AcoGoldSmith_v1.006635m (l ocus AcoGoldSmith_v1.006635m.g) derived from phytozome v7. 0 (chr-ID scaffold_22; pos 3852805 to 3853579 reverse stra nd)
tagcaatactactggtcagatcattcgttgcaaaggtatccactatctaacccccaacattttttttacttgtttttattttaattactaaaaccaagtaactaatgtgatttcaatatgaattgttatcattttgttctttatagtagagactagagactggaaattttatgagcttgcaccatgcacttttccatgataattgggagttggtatattatacattattgcatttctgaattttttttttgtacaatgaaacaatttttatacttatagttctgtgttctctttaattggattgaaacatttagagatgcatttgatgatttatattcttgattatcaagcaagaaatgtattattggctctagtagggtgattgtttttgtatgtaggacaattttgagagtaagagatgatgctattatgggtttttcgggtttttaatgttgtttaattgagatatgagtttgctgttgaagacattctaaagttattgaagagtgttttccaagttgggaacctctagttatgtgatccatttgcagtaattttttcaatgaaaatactggattattttaccattggaaatttatgtgagaaaatgtttcctattttgtgttgaaaacatttaaagtatatttcataacattttcattttgtttcccaaactttggttttggcctttatactctgccagggtttcttttattcaagtggtttattgtgaattctaaaggtgattaaatttttatgttgtagctgcggtagc

SEQ ID NO: 109382 - DNA, 990 bp, Aquilegia coerulea
  Intron number 1 from transcript AcoGoldSmith_v1.018263m (l ocus AcoGoldSmith_v1.018263m.g) derived from phytozome v7. 0 (chr-ID scaffold_22; pos 1273453 to 1274442)
gcgatagtaaacagctaggtagtgattttgagaggaagaattgtgttgtgatttggggcagaggtcttgatttggattgactgttgctatatttgttttttttcttacaaattgatgaaattcgagaaacttttggttaatggggacagggtggaatacgttaattgaagaagatcttgacatcaagcttgctcacacaaagggcgttttagcacacaagctccaccattgaatttaactgttgaatgaatcaatttgacagttcaagcatgaacaattcaatccacatacatcaagattccaataaagccagaggtgctatagaattcataccctcgttactagtcggacttcaatgtcatatctatgttggtggaaaacaatgtaacaacaaaaaactcatattaggattttctaccaacaggactaatcctcccaacctacctaccctctgctctctgctctctgccattcaaagaccgaactacaaatttatttgggccccatttagatctatatacataatttgggatgcggtagccctgtttcaggtaatttcattgcatgtttgtattgcaagttaggtgctatatctttacatgatgatgttatccatgtatactaggataaaggtataatgctttgataaacatggattttacttgtaaacttaaattctaggttcaagttagagagatttctaggatttgccttcttattatgtgtgaagctattggcgacataaattactgcccaacacagagagttcaggtggcagtgtggcaaccatctctctgacagtcccttggagaagtgttttaaacttttgttccacaaaattatagatgaccataaaatttatatctctacaataactgactcctcgagtttatatgcgtgttttttacttgatggaaacttctaatttgcatgctatatctatgtttgcctcgccgaatcatttgatcttttgtttgtttcacagatagc

SEQ ID NO: 109383 - DNA, 977 bp, Aquilegia coerulea
  Intron number 2 from transcript AcoGoldSmith_v1.000742m (l ocus AcoGoldSmith_v1.000742m.g) derived from phytozome v7. 0 (chr-ID scaffold_22; pos 1080092 to 1081068 reverse stra nd)
ttcgaaggtaagtaatcccatgaaatttaaaagtcctctaaagtaagattgatctcctgaaaggctgaaattgatatgactgcccattgcttatgaaatatgaactaatatagaactgcagacagtgaggaccaactttaggggagaggagttggcgaaggagggagagagagagagggcgggcggggtgggggggggggggagaaagaaataatttgagaataggtcacagagcgaaaaaaaaaaaggggagagagatgagttgggagaggcaaaaggggaaaggaaaaaaagagagaaaggggacggacagacacaatcctccccccccccccccccaacacacacacacacacacacactcaccctcgcctgatgcataagagacctcctacagttggtcaatgattatagagagatatgaggaggtaaagatccagaattctatgcattgggaacgacaagactgttttaaatgtgtatataatccttactaaaaggcatatggaattatattttatacatagaacaacattaatgaatccaacaaagacagacataatgttttgaactaaatctgaatccttcaacatgcattggcttaagcaatgcaactgtgctttcttgtcagcagaacagtaaaagagtagtttcataaattcaaactgtaacttttctactttttttggcaaaagtagttacttctttagttgtttgatgtgtagagtctttccatactgttgttagcttgagatttcttcgaattcataaaatctaagaaaatgcacattcagtactgcatatgagagaattgtaatcagaaacgccttttgtgaataagtttgttatattatctcttgtcttgtagcaccaaataggcataactttctttcgtacataacttggacagatattgatagtttttcttgattttatgggcaggttatttgaaagagggatatcctctgttggaaagg

SEQ ID NO: 109384 - DNA, 468 bp, Aquilegia coerulea
  Intron number 3 from transcript AcoGoldSmith_v1.006003m (l ocus AcoGoldSmith_v1.005804m.g) derived from phytozome v7. 0 (chr-ID scaffold_58; pos 1169438 to 1169905)
ttggaattttgactcattgagacctgaagaactaggtaagtattctatttggatcttcacacttctttacttaatacatatagtagaataccaagtgtttgatgaaatgcttgtaagagattgtttaggaggttggaaatgccttcggacaatatcacagactgttttaagaaaattgataagagtctcaaaatctggtttcctggtcttgtttgcgtagtattttgtacccattattacttagctacaaacttccaccagtaaaaagccttttgtttttttggttggcaagcctgtttttaacgagatcagtaactcaaagatgcactgcctgggatcaaaccccagaccttgaaaagcctgagattagtaaaaacttagaagccttgaattgacataagatataagacgagctttaaaattttgtgtgatatgttactaatctcgttgttttcaatactgacgtag

SEQ ID NO: 109385 - DNA, 538 bp, Aquilegia coerulea
  Intron number 1 from transcript AcoGoldSmith_v1.003016m (l ocus AcoGoldSmith_v1.003016m.g) derived from phytozome v7. 0 (chr-ID scaffold_7; pos 6852927 to 6853464)
aagctaaaccaacaactgggtcaagctaatttcaggtaaacattgaatccctatactcaatttatgttgtttcacagaaaatttccaaaaggggattttttttttttttttttttttttcttcttgaaattgtggaatttgttctatctcaactctgcatttcgtgaaagttaatttgggtttacatgtttttaagattctgaaaaatgggttagttttagattcttagataaagtttgaatttatgggatttgctctatttggggaatagataattatgactagtagataattgaaatcaaggggttttggttgggtttttagatctgggtttggttgatttcatggtattttcaatagggtttaatttgtatagtagagagcttggatttatcaattattcacattattgaagctacgattttggtggtactgccttaaattagacccacgagagatttttaagtttggagttttgtaattttgtagaagtgaatgtttatttgtttttgtgtggattgcagagtgtttggttgaa

SEQ ID NO: 109386 - DNA, 689 bp, Aquilegia coerulea
  Intron number 1 from transcript AcoGoldSmith_v1.003847m (l ocus AcoGoldSmith_v1.003847m.g) derived from phytozome v7. 0 (chr-ID scaffold_13; pos 3270738 to 3271426 reverse stra nd)
cgttatcgaagcactaaacgtatctctaaggtacctacactaactaacactctcttgatttccaattttggttttggtttgctgtgcgattttggaccaaaaacctagtttgttaattatttatttgattacttgtaatttcgtttgtgtttaggaatttggcttaaacctgaaacaatttgggtttttttctgttaattatggagtgcaaattgattccgatccatggggttttttgaacatttctgttgaattgagcaatttattaatgtatggaattcaacacttggaatcgtcaatgcaagtatttttagttgtagagtataataaaaaaaacctagaaaatgtatttggtgaattaatataaaagaaactcttcagtgacaatgtcaatgataatgttaagatttgtctagatttttatgccatgtaatgtctggaaagactagatatgtttgtcttgaagtcgacagtataaactgtctctcccttgaagtcaatagcttacatttcagtttatatatctcaataaatacaggtgataatgtccatattgaagtcatttaaagtatttcgaataagtatctgaaacccaaccagttattgtactgcatatatgcattttttaactattaatactgctattttctacaggcagttgacataaaacttcttggttcccttagccg

SEQ ID NO: 109387 - DNA, 874 bp, Aquilegia coerulea
  Intron number 1 from transcript AcoGoldSmith_v1.009281m (l ocus AcoGoldSmith_v1.009281m.g) derived from phytozome v7. 0 (chr-ID scaffold_16; pos 4476712 to 4477585)
tagaattctgggacatctggatctttgtagtggtggtgggtactttttatttttttgatttattgattttttttttgttttaaattttcatttttagcttaatttgcaatttaaaatagacttgatttcgattttctgatatggatgatgtatatgaaatgttgttgatgagtagtcatttacaggttttggggtttttttttttttttttttgagtgaaaataattagtatgctcaccaattcaatatgttataaggaaaattatcattgctagataaaatgactttttggtatgtaccattgaattggtcatacatgattggataattgtgagtataaaccaaaatcgattgggtcaaatccactcagtgttgtactgttgttgttgttgaaattttgcgcattctgcaatttatctttttggcaagtccagtattgtgtttagtgatgactgatgactagtatgcaactgttttactaggggagaacagaaaagtttggaaggaagaagatgtctattgttcttgatttaaaaacttaatatcaggaactagatgattaaatccaattggtatggattcaaagtcagggtcttaaaactatcttcttaatcttgaacattatctaatgtctggctaggtagtatatagtaggtaaccataattaagagagttgattgagaaacacccaacacgttaaattaatgaagtgatttattgagatctcagttgcacattcatgactgcatggctaagtttaaacgtcagtattgctgcccaatttgtcgggaaggagaatgaaaaaaagctaaatcaaattgttcgttcatataaactagaaaacgaggagttgcagagttaaagtcgggccaac

SEQ ID NO: 109388 - DNA, 254 bp, Aquilegia coerulea
  Intron number 1 from transcript AcoGoldSmith_v1.022679m (l ocus AcoGoldSmith_v1.022679m.g) derived from phytozome v7. 0 (chr-ID scaffold_13; pos 2188121 to 2188374 reverse stra nd)
caactcaggtaacattttactttgattttaatcgaaatctcattttgcatttttaattctaaaatgggcatcttttagttttgatgggaaattgaatttcaaagagaactaaatcgaaaatggtgtttctaggtttaatagtccattaaaactggtaatgtgattgaagagttcaagatctatgcaattattcattttcatggattccttcctcttattcttcacaggtgcctcagcttgcaaaggattcttta

SEQ ID NO: 109389 - DNA, 784 bp, Aquilegia coerulea
  Intron number 1 from transcript AcoGoldSmith_v1.016818m (l ocus AcoGoldSmith_v1.016818m.g) derived from phytozome v7. 0 (chr-ID scaffold_8; pos 2557573 to 2558356)
ccggattgctcaggtacattacatgtttaggtattttgcgtcgttaaattttcactagtccagtgattatggcattcaaaggtgctcataacagtagaaagtcttcaaacatttgtatatgtaggttaaccaatgcattatcatttattcattttagcactcttttagtgtttttacatgattctaaacattcacaagtctataaaaccagttccagattgaggacctattcatccgggaaaaaaaacaaaacaaaaaaaaattttgctcgtcaactttttatgattcctggaatttttatcaataaaatttgcttttgttagaaaaaaaaataaaaataaaaattgaggacctatcaacatataggcaatgaaaaacatgttgcaaacttgcaatggtctttatcaaaaaaaaaaataataataataataataaaaacttgcaatggtcaacgtaagatatcaaaaaaaaaaatatgcccaaacccctttccaagctactattttactttaggtgtccagtggtctactcgctgcatggcaccaaatttgagcccaaccctaagtactagcgcggaagaacaagtatgaccaactggactactcgctgttttgaaagtttttaggcaattcggtgttaaaaaacccgaataagttgtgatacatcagcatttctgcactgattttattttgcaccaacacccaaacaaatttttttagatatatgcatacccggcactctcacaaacactgatttttatattgtcaggcactccttgagccgc

SEQ ID NO: 109390 - DNA, 630 bp, Aquilegia coerulea
  Intron number 1 from transcript AcoGoldSmith_v1.004950m (l ocus AcoGoldSmith_v1.004824m.g) derived from phytozome v7. 0 (chr-ID scaffold_58; pos 562775 to 563404)
cataccccaaccctgctgccactgtcatgctttctctctctctcttctctttttctcaactcaaatgcaaaaaaattgtgaattttttcagacaaatgtcgatgagcaactccatgtttaagagttgcagtgttgcaccgtgcattcttagaagacgactaaatatacttgggcttctttgaaaacataaaacggacccaagtccatatatttgggccttctatttgggctttgtaatgggttaacagaaaaaacaaattgataccagatacaaaagaatatccaaccaggcggtttttttgtcatttccattgtgctctattcatagaaagtaattcttgtattcttctattggttcaagtttgctgtcattcaggtaaatagccaatagaaacgctcctccacctcacttcacacttctccactagtctgaaatgacaattatacccttagaattaggactaatcctgtaaatatcataaagaacaaggctattttgtacgataattatggatatgtaaccctaattaaatccaaattcacagctggaaatttggagaaatgctcgtctatattactacccatttgtaaacagagttgttggagttcagttcagttgagttctcgagt

SEQ ID NO: 109391 - DNA, 430 bp, Aquilegia coerulea
  Intron number 1 from transcript AcoGoldSmith_v1.002552m (l ocus AcoGoldSmith_v1.002552m.g) derived from phytozome v7. 0 (chr-ID scaffold_13; pos 4747613 to 4748042)
ccattaataaaaagcttcatttcagctccaattcggtaagaatcaatttccttcatattgttgtttttctttcagtggttttctctatagttttggatgatttgattgattcacgcaattccaattcactttacttttgaattttattaatattagggtttatgattgttcgaattcattatctatctttctattgatgtttttttaacgaaattcttccaaattaggtttcatttcaacaacaaaagtcaatttcatttcaaaattgagtacattttgttttgtttatgtttatagaatgatcgctttttaaaaagtacacgtggacaggtttgatttcatattttcatatgctcatttatattgaataagttactgacaaatatatatgttaactttgattcaggtttgatatataaattaaagcgtc

SEQ ID NO: 109392 - DNA, 502 bp, Aquilegia coerulea
  Intron number 2 from transcript AcoGoldSmith_v1.019212m (l ocus AcoGoldSmith_v1.019212m.g) derived from phytozome v7. 0 (chr-ID scaffold_22; pos 2327251 to 2327752)
ctacagtttttaattctttgattaacatcgcagaggtagtttacctttatataaattatggttggttcaatcatcattattttgttaattactgttgcacaatatgactctaggggttattggggctcctacactttcttcctggtagaaagagaccatttccagtccttcaagatgttagtggtatcatcaagccaagcaggtacagtaggattgttccactttcgcacatgaatattggtagatactactgatttatcgcatgactcatatatctctgggacatacatttggttcacctctcaacaagctctgacttgcagagaaagtggtcttggatatgggatcaaagtagtttgttttcttttcttgcatatttaagtgtgtgcctgtgactctgggatctcactgggggattgtggagcaacaaacttcattatgcctcgttgaatcacaaatctgtgtttcgtagttatattttcttatattcaaaatcaacaga

SEQ ID NO: 109393 - DNA, 892 bp, Aquilegia coerulea
  Intron number 1 from transcript AcoGoldSmith_v1.005643m (l ocus AcoGoldSmith_v1.005604m.g) derived from phytozome v7. 0 (chr-ID scaffold_13; pos 3088656 to 3089547 reverse stra nd)
actaattctccaccaggtgcgcattttagcatttcttattactctctgttcatcatttttttttttttttttgattcttaatgcagattcttaattctgaacaatgggtttatcttacattttgagtctgttgtctagaaaatcttttttgctaattaaaaatggaatcttgaatgatgaattacgaagaaattggagttttcgttttgagtttgtgacgtaatgagatcttacttagttttccagatttgtgggaattgagctagatcacaatgaagtaactagtaagattagtttagatttgattctattttgattaatttgtcttaaaattaaaatagattaaagtgttttctttatgtcgttttctcttagtttagatgtaaatcaatctaccataattgatcgaatcactttatcatgtggtttctttaatggggtgtttttatttttatggatctctgtttctctttaacatctttgcatctctatcagtgttgttaattttttattttttttttcaattattccacatttatttattaattttttggtgtggaatagatttcatgttggagcacataatgtaggtttgcaataattgatcttggataaagtttattaaacactatggtccctttattcacatttttatatcaattttttgttaaatagatttctggttatggcccataagcaataactgatctgttatctgattctcataaatcaaacaatattgctgtaaactctacgtgtttgttatttattttgtgattacgagttttctattacatgcttttataaaatattagtctagatagatttacgttcttccgtgttatttaaggtttactaatgctttgcttaggtacagctaaagctcttcctg

SEQ ID NO: 109394 - DNA, 511 bp, Aquilegia coerulea
  Intron number 1 from transcript AcoGoldSmith_v1.017754m (l ocus AcoGoldSmith_v1.017754m.g) derived from phytozome v7. 0 (chr-ID scaffold_2; pos 7643435 to 7643945)
accagctgcagtccttgatttgcctcttgtccagagtaagccttccatctgcaatttttgatttagcggtcctttcacttgttactgtctaaagaggtttattacatacattatctttttagtgaagtttaccaaactgatcgaagactacttaagtagtcttaatgtagttgtaagttgagcagtaggccaattcattgtgatgtgttttcttttggagttgaagacaacttggatgtcgacccattaacttaatttcaaatccatggcaggctaacatatagaccaaaataactagtatttagatgtggatggtgccagcttaggtacaatgtttttttatgtgaatatattctatgctttagtgataaaaacgtagggatgttagatgtcttaattatgtattctaactttaaattaaggagtccggtgtaggtgctctgtattaagaagtcctgtttcctccgttttttcaggtggaatatccagttgatctttcaaactcaccaga

SEQ ID NO: 109395 - DNA, 379 bp, Aquilegia coerulea
  Intron number 1 from transcript AcoGoldSmith_v1.025398m (l ocus AcoGoldSmith_v1.025398m.g) derived from phytozome v7. 0 (chr-ID scaffold_13; pos 3854986 to 3855364)
aacaccccaaggtttgttttatcttccctttgttaatttctgggtttttttttttttttttccttcttcttcttcttctttttgtcagtttgattattgttgagttttagttgaaatttctacagtgcaatttgttcaaaaaagggtcttgttgagattttccttaaaacgttattaggttgatctacaaacctaatttccaactgttttgatttgaattttatttatttaatatatattttatgacttttctttcaataattttccatttgtttccagagtttctctctaggtagtcaattcatagacttttcaaagaccgtgttttctctaattcacactcttgtttgaaatttgaattacagggttgtaattgaca

SEQ ID NO: 109396 - DNA, 618 bp, Aquilegia coerulea
  Intron number 2 from transcript AcoGoldSmith_v1.003285m (l ocus AcoGoldSmith_v1.003285m.g) derived from phytozome v7. 0 (chr-ID scaffold_3; pos 8955654 to 8956271)
gactcccagtgtttgggatacttttgctcactctggtttgtgttttttttttttctacttggttccaatttcttcttctgctatataatactgcaaaaactataccaacacttgaaagcttgatgggatcaataaaaataccaacacttgaaagcttgatgtgtccattaattgatgggcatcaagaacaaatgtatgtctgtctccacttaatcacttgatggttcatatctctacccttagatacctactttgaatcatcaatcctcaattagggattttgtttgttggattacaatgggaatgtttaatttaggtctgtctacaagcattagcggaataatttgtttacagaatttcttcggtggcctttaatctttacacaaaagatcaatttacacaaaagatattgtactataagtattctatgttggttctttagtttgaatttataaactagagttcccattttatcatttaattaacaagttactggaaacctactgcactgtaggaacaataaaaaacttcttaaaaaattggaattttcagtttatatccatttggtggctcacttttcaaagttttgcattgcaggccatttgagggacaaaagca

SEQ ID NO: 109397 - DNA, 867 bp, Aquilegia coerulea
  Intron number 1 from transcript AcoGoldSmith_v1.000921m (l ocus AcoGoldSmith_v1.000921m.g) derived from phytozome v7. 0 (chr-ID scaffold_68; pos 387074 to 387940)
cagggtttttcttacgactctttgggtaagtaataaaatgcagaatatttttcatatcggtgtcttaagattccgctttcagagatataatataataatttcaactacgaatgtttggttattgtcagcaagaaacacaccacatgacaggataattggttcatatcttccaacacgcatcagtctcactccaataaatatccacaatattgaacaccttcaagtgtatattctactagtataacatttttcaaaattgtagtccagacttcaggtatgtatgcaatcaagagaaagcaagaatcacacaagctcaaaataattaattgaggaagataatgcatgaaaaagaggatcaatcccttctacatagagttcatcaggaaaaaaaaaaaacaggggttcaaaacattaatcaagggttggtgatggtcaactattagcttcatgcaacttgtggatttttgtaaagttaaatgacctgtacaatttatacagtaggttttgtttactatatcaatcaatgtcaatctgatcaaagcaccattcaaatcaacacgggagaggaagcaaacatatttttatgccacccgttcaaagtcttcttgattacctaaaccaccaagcaacaagcgtttactttgttactagtacaaagaattttcttccattctcaaggtcgacagacgagaggacaattttgaaagctccaattttatgaggctcaacaatcagcttttgaaacctcacaaaattgtttcccgctcgaaatgaagattcatgacattgtacatcttgttctcgttgtctttgtagtactagtggtatgtatacaacttgtagtggctcaagttacaaacgctattc

SEQ ID NO: 109398 - DNA, 342 bp, Aquilegia coerulea
  Intron number 1 from transcript AcoGoldSmith_v1.023190m (l ocus AcoGoldSmith_v1.023190m.g) derived from phytozome v7. 0 (chr-ID scaffold_44; pos 372282 to 372623 reverse strand )
aagtgacaaatttgtttggtgaagtaagtcatggaatctcactcagtgtagtacaaatttataatattttgattaagttttagtgtaaagaaggtaacaaacatgaatgaaatgaagcacatcaaatttatgagatgatggcagaaaagtgcgagaaactcaacatattcacacacatacagtacaacactttgatgaatggatattgtttgcaagggcaaatggaagaggaacaacttgttttttgattcaatggctattgcaagggtaggagaatggatgatgtagtccatattttttatgatatgagatccaagggattaaacctgacactatttgtct

SEQ ID NO: 109399 - DNA, 557 bp, Aquilegia coerulea
  Intron number 3 from transcript AcoGoldSmith_v1.024327m (l ocus AcoGoldSmith_v1.024327m.g) derived from phytozome v7. 0 (chr-ID scaffold_166; pos 50536 to 51092 reverse strand)
ggattttcatcctcgtcaacaaactttacttctaggtaagtgtttctgtttgtgttgctatttaattttttcagcaagcattcatctttatcagaagacccgttcagtattttgatagagtcacattcttgttttgtgctgatgagttaattacaagtgttattactgtgatgcttcagttggtacaaatgtcggggacatagcactgtgggaagttggttctagggagagattatttctgaggaatttcaaggtttgggatcttggggcatgttcgatgccactccaggtattatccctttccatttagctacctttttggaagtgagttgtaatacaatcgggctaaggtgtatctgaaaccaatttgaatttgatccaggcgtctttggtcaaggatccaagtgttgttgttaatcgtataatatggaaccctgatggttctttgttcggtaagcttataaaaatagcactaaaacatatgaacctaattgatggtgttgcttttctctattgctaaagtcaattttgttgcaattttacatcacttaacagga

SEQ ID NO: 109400 - DNA, 1032 bp, Aquilegia coerulea
  Intron number 1 from transcript AcoGoldSmith_v1.004888m (l ocus AcoGoldSmith_v1.004888m.g) derived from phytozome v7. 0 (chr-ID scaffold_7; pos 2876727 to 2877758 reverse stran d)
agctgttactcctgttaaagatcaatctagttgtggtatgtttcatttcgttgattgattcactggtcagattaatttatttattttttcgcatttattccataaactgtagataggtaaatgtgcaatatgcaatttcactgttcatttgattgaatttttaggttgatacattttgttgatgattgcgcacattgggtcaactttgattatgaacaatagaaagaattagctatgaatatcttaccgtattcgaatttagtattcacttacagcaacaatcgcttatgttttccaatgaaactgtctttatgccctgtactttggtgatctaaattcagatacccaatttcatacaaactatgtaagtaaagaaacattctgacaaattaattcagtgacattcgtgatgtttatcctaggtttcgaatgagccaccctcgagaagtaataagtttactaggttactatgctctggggaactgaagttatatatcctaccttatccccctggccctggggaacggaagttatatatcctaccttatcccccctggcccctgcaacttggctctggtgaaaaccgtatacttcaattatcaaaatgagtagcagtaacagacaattatgatgtccgtttcgattgtatttgttgcttataccatatctaactaggaacataaattttgaggaatatttggtaaattttacttctatatcacttgaatcatcactttgtaaattttgtgactcgtcagtaatactaactgaaattgatgaacctacttattactggagctgcaagatgtcagaattttgcaatgaactaatataatttaattgactatttaccccctttttcttctcttccttcattacacatgttttatggcaaagctcttggtaaaaccgaatttccgtggttttgtggtcgtgctcccttggttattcaaattcattttccagagaaagtcatctttttagcttttctctccaggtgcgtgttgggctttctcatcaaccggttccatc

SEQ ID NO: 109401 - DNA, 472 bp, Aquilegia coerulea
  Intron number 1 from transcript AcoGoldSmith_v1.002929m (l ocus AcoGoldSmith_v1.002929m.g) derived from phytozome v7. 0 (chr-ID scaffold_2; pos 10426041 to 10426512 reverse str and)
ttcgaaaaaagactgcaaagagaaataatgtgaataatggtgatatctattggattagaggaaaaagacatgagagaaaacaaagggtatttgtatggagaaaaggtagaagagttgtggtggaaaagagtgtttttaagattagaagaagtttaaatgtcaagcatcagaagaagaaatctgatgatagcaatgaaaatctatataggaaacctatgttgaaagattggatatcggtgaaacttgcgagtatcaaagagaaacaacaaataagggagaaaaagaagaagaaacaacaaataagggagatgaaggaagcgaatgcaggggagaagaaaactccaagaaataagagagtaatggatgtggagctgacgaaggcccttcaaaggtatcgagcagaagcaactaaaattgagagccttggtatcaaagagaagcaacaaaaaaggaagaagaagaagaagaagga

SEQ ID NO: 109402 - DNA, 862 bp, Aquilegia coerulea
  Intron number 1 from transcript AcoGoldSmith_v1.001809m (l ocus AcoGoldSmith_v1.001809m.g) derived from phytozome v7. 0 (chr-ID scaffold_2; pos 8428652 to 8429513 reverse stran d)
ttctcctactttagttgtatctaacttctggagaggtaaacctattcattggattcaaattgtctttgatcatcgtgttgttgtttgatgtttcaacagtttacgtatttatgatgcatttcgtttctttctgcattgaatttgttcaaattggtgttgcaaatagtaattaaaacaagttcggatctatgtaattataaacttgagattttgagattgtatatgatttgatctatttcaatacttgttaggttgagctagagagttgaacctaagtatgcattatagagtttccaaatactgtatgcaattctctgtagagttaagatagaactgctcattatttaaattcttccttattgttgtgcattgcatatgattatcattatttaaattcttcctaaacctaaaaggagtcgatattggaatgtgatagaacttgattgacacttgaaattttggtcattgttagttatgctaacaggttatcaacagtaacaaacaatgttgtaatagcttttaggattcgctattcattgtttctttttattatgttgaaaaacatatactccatatattatggttgagtggttcttattgttgctcaatattccaaatacagagtagataaggaatttcttccaaccgcattttacagagtagaatatttgttaccttacattccttcttgtagctacaaatacttaataccctgggtttgtgtaactttgaaattcccccagaaacatatactttttattttatgtaaaccaaatatgagtttatatatattttggtatgcttacccttcctcgggttgcatgcagacttcaatttagagagggaaaagagtgttttggat

SEQ ID NO: 109403 - DNA, 473 bp, Aquilegia coerulea
  Intron number 1 from transcript AcoGoldSmith_v1.006996m (l ocus AcoGoldSmith_v1.006996m.g) derived from phytozome v7. 0 (chr-ID scaffold_34; pos 1399148 to 1399620 reverse stra nd)
gtgctatcatcgtaaacgttggagaccttcttcaggtataatataattagttctcaattttcttacaagttacaatcaaatgcctttcaagttgtatgtatgtatactttctgtatagtagttcttcaatgctgcatgagatgccattcagttttttggttctagttgactgcctgattcaatgctgcacatctggttgatacactatattcgtatgttgctttgttgtgtaagtatatcattatatgaatttttcttttatttcgtttattactttccaataaatgaaaacaacgagtattatatattatcgattaaagaattgcccatgccattgccatgcacacatacacaatatatctaacacttataattgctaagatttctaaaatttcctttgttttttcaatttgttggagtaatttatggatgtaacagattatctcaaacgaccaatttaagagcgtagaaca

SEQ ID NO: 109404 - DNA, 743 bp, Aquilegia coerulea
  Intron number 1 from transcript AcoGoldSmith_v1.026182m (l ocus AcoGoldSmith_v1.026182m.g) derived from phytozome v7. 0 (chr-ID scaffold_31; pos 2792279 to 2793021 reverse stra nd)
aagttgcctgaaagacctgttacggtttgttttccctcgatcgatcgatctcttcttgaatcttgcttattaaattttcgaattgaaccatacaacaaaattccttggattttttgagcttatatggaaccaattcaatgattctcaagattttctgaaatttgggtgcatttttatttagtctttatgtttggtgtggtgtacttgtttgaacttttctatgatttcttcaaccaaacacattttggcataatagttttaagcaaaataaaataattattactggtggaaatggtagcctttgtaagttgctgcaatttatggttctaaactcatcttcttttggttttgaatttcttgtaggaactttaatttgtctctgttctgaagtctgaaccatgaaatctcgttaattataaatgcctaaattgacgatcattatattggttaatgttagataaatcaaaagaataaagttatgtgttaattagtagcaattgtaggatcttgatgaacctagttgattatatagtctttaatattgcaagaacaatacacagacaaagtcggtgagatgacattgttgtttcttaatcagtatgatgttcaagaagtttatctaaatttgtgatgtgtagttttggatcagtttctatgaaggatggtgacatatcatatctgtgcctgatgacttatatttgtatcttgattcagactccgtgtgggcacaatttctgcctcaa

SEQ ID NO: 109405 - DNA, 895 bp, Aquilegia coerulea
  Intron number 3 from transcript AcoGoldSmith_v1.011767m (l ocus AcoGoldSmith_v1.011767m.g) derived from phytozome v7. 0 (chr-ID scaffold_16; pos 2000609 to 2001503)
attgggatttaagactccaagagaagcgatcgaaggtaataggtttggttttagttattacatttgattctgatatgttgtgctagttagaaatgatctttgtttgagatgttgtagaaggaaattgttgagtgaataagtttggaaactggaaatgatattgaaccagactatacagtgttttatatgatttaatgaggatattttatgagttggatttataatttgacattcgggatatggtttgtgttgaattgcttgttattccctagtgatacgtgaacctgcttatgatacaacgagaaaatgaaacaattgctattacattgttgttatgcataccaattaataccatgccatgagaaaggtttattcgtatatatctttatttttgtctttgcacatccattatatgtaatggttctttgtttatacatagtatgatatccacattgtatgcagttatatccagcattatcttacttcaaattctaaaaggattaatggaattattatatactgatatgctaagatgttgaagaattaaagacttttatggttgtccaaaaaatttctgggtaataaaaccattttaaattactctcaataatgagagatgtaagaacttgtttgggtgcacacactaggacaagagaagtgttgactttcattaatgtaagttagataggtctgtgtgattgatgttctattgtacattatatagtggcaactaaagttaatctgtataagaaacatgattataaggaaatcaataaaattgaatcaagtggttattatcatttttaatacattcaggttatacattcgaaatatttcttgctttataatgattgcattctcattttttgtatgcagggacatatattgacaagaa

SEQ ID NO: 109406 - DNA, 720 bp, Aquilegia coerulea
  Intron number 4 from transcript AcoGoldSmith_v1.003599m (l ocus AcoGoldSmith_v1.003599m.g) derived from phytozome v7. 0 (chr-ID scaffold_26; pos 737695 to 738414 reverse strand )
acattgacactaaatatcacaagttgcctgtgaaggtaatgtgcacttgtttctcttgctgttcagttttcattgagtgtgtattttgaataaactaggtgaggttgttagaattggaaattatttgcttcaagaatattgttcacattgtgtatagtgaaaatgatatacaagtttctacagtacagtctttgattttctgaagaaaaaccatggaaatccagttcaaattactacagtttgtagtgtagggactataaagctcaattgttgtgtacctatgtgtgactggatcttattgcttatcatcaaagtttttgtgattcccaatggttatattttaggactttgcttccttttatgtttaattctatcattaatgcctatagtgtgaggactcatgacgtacaaaaatacaaaattatgatgtatggtatgtgaaagaaagcagatatttttttcccaatcatctgatctcggtttatctgttctttgtggaaagattcatcttatttcaaatttgactgcactataattttgagagatttggtgtatatgggttacttttgtgtttagaaggatattgtaggagaattgacagagttaaattctgatggaagttggagagacatagttcttcaggtgtaaagatggtggatactcataaacttttgaattgttgcagagcctgaagttggaagagcaagaatatcttggaga

SEQ ID NO: 109407 - DNA, 860 bp, Aquilegia coerulea
  Intron number 1 from transcript AcoGoldSmith_v1.003599m (l ocus AcoGoldSmith_v1.003599m.g) derived from phytozome v7. 0 (chr-ID scaffold_26; pos 738878 to 739737 reverse strand )
ctctatttactcaactagaggtacatatatgtatcttctttgttgcattcatcatcataatataatcctgaaccctcacccttactttgtttgataaccctttattgataagtagataatttcgacattttcagttgactaactataagggattgagttgagtatttagcaatttcaatttaaattcaagtgtgattaatgcactaaagagattctattcctagtgttagtgcacactagctcactacctgctccatataatttctcaaagagatttaagcaattaaatcatcacagttatcaattgattccattccaaatttgtgcagatttgtctatcaatgcaaattaaattcgagtattattttatagtttacaatgaggaatataacctctttggacgaaaatggttgatcacaatatctaaatatctaatagactccatgaaaaaaaaatgaatactaatgcaagtttattcataacatagtacaaaaaagttttgattttggcgagtgggatttcacaaacacaaagtattatgcttaatagaacaaatgaagtagtggattattttatgagcttaccattacacgatttactcacttcttagtgaatggaatttgtgacaaacttgccctggggctcgggctgcagcctgagtgagcctacctttagatctgctcctgcgtttacattgccctgattatctacatcaaaatttaactctcagtagaaaattttgagattttttattccaacgcgttgattagattctactttagtatagttcagttgaattcgatcttccatccatgtagtgttttcacttttgtgtgttttattccgtcaaagatatactg

SEQ ID NO: 109408 - DNA, 571 bp, Aquilegia coerulea
  Intron number 2 from transcript AcoGoldSmith_v1.002427m (l ocus AcoGoldSmith_v1.002430m.g) derived from phytozome v7. 0 (chr-ID scaffold_16; pos 4811236 to 4811806)
tagctggtggtgctttcatttggctttgtaagaaggtgatgaccaacttctcttttcaaagcagcaacctcttttctgcatttttcattttaactgtagaatatgaagaccatttcttactacttacgtgacttattctctgaaatccagacattttagcttaagattttttacaacctcgcctactaatagtctatatattttcccatttaatgtactttgatgtgttttattattaatctttcatacttatctctatttatatttataagtgaactctcttattaatccttattacttattttgccagtggatagtaattgccgaagttgggaggcagtatcacatttatgatttagtttatctgaattattactatttcactattttggcattgattgcattttgattatgttctgtaaacatcatgacattagaaacactaatacttggtatgatattttgcattttgtatgatggcgctcctattcttggtttcttgtttcatatatatttgcattattggtaaaaacactaatatttcgtatttgtgtacagtttcttgaacaat

SEQ ID NO: 109409 - DNA, 960 bp, Aquilegia coerulea
  Intron number 3 from transcript AcoGoldSmith_v1.022032m (l ocus AcoGoldSmith_v1.022032m.g) derived from phytozome v7. 0 (chr-ID scaffold_92; pos 28628 to 29587)
gttgactgaactccacaataaatacaaggacaaaggtcattttcttcttcttcttcttctttattgctggttttatatttatgttaagaaccattatgaattcggctgagtagatgaactttttagagaatagagactctcatgtattttgtttggatattttgctattaattgcaatactcatgacagttgacagtgtttgttatacgagtttagacaactacccaaagcattagttcatggataatgagaaaacctttaattcactctgcttagtaaggcactttagtggagcttgtattaggctagaggccatgagctagtcaatcgatgccattttgcaaacatacctgatggctcatgacaggtctttttattactagcgtacaactgtcaaggaaaagggacttgcactttcctgattttgaaattcaattaactatattaaggtcccactaatctgaattctgaaattaaggtgataataggtgatcccctgctacaaattttgattgttgaaatgataacaaactcttaaaagtatttggatgttggtgtatagcacctattaagaccttgaaccaccttagtctagggataatcttttggcaaaatttgctggaaacaaggcacaacctttgtctacttggtaacagctaatcctttttctctgagagttgagtctgactgtctgagttatcttatctagcaatcttggtttttcccttccctccaaggctccaaagtccatacccaatgtgtcatgcctggtgattgatttttgtggaagtaattttgaagtgttggtcatgtttatgtttccttgctttaaaaaaaaatccctgtaaagatcttcatataagagtttctttcgtttgatctctcattgtttaaacaaaatttggagggccttatgcatatatagttttttatagcaggtttcgaagtcttagcgtttcc

SEQ ID NO: 109410 - DNA, 644 bp, Aquilegia coerulea
  Intron number 2 from transcript AcoGoldSmith_v1.006015m (l ocus AcoGoldSmith_v1.006015m.g) derived from phytozome v7. 0 (chr-ID scaffold_16; pos 4715472 to 4716115)
gaacaaagcaagtaagtttgtatcatctagtgcctcctctttttttaccaatcctgatactaattctattacatgacatttacaattataatagtatacaacatgagacggtcgatgaactagtatagaacatgacacacacacacacaagtgactacataaaacgtatgggaatattaaacaatcataactagttaatgactagacagatgtaaggcttgtttccgatgaaatacataccctcgtcaactagaaaattgtgtacattatcaaacgataaaattaacctatcaattgtcgatgattttttttgaaatctaactcgacagaatgagaaaacattaacttctatgccaattggttgtcatagtctattgtttgcccaaattacacagtccattcagtatatgtaagtatagttctcctgaagttttttgacattattgtagcactttggcttttgaagtttgaacagtcttatgttattctgctggttctttgatctattagttttcttaagaataccaaaggttataaaatttagtcttgtaacattggtattggatacttatgttctggtttcttcttgtctttgttgccattcattgacgataacttcatttttattcaacaggctaatttag

SEQ ID NO: 109411 - DNA, 935 bp, Aquilegia coerulea
  Intron number 2 from transcript AcoGoldSmith_v1.015667m (l ocus AcoGoldSmith_v1.015667m.g) derived from phytozome v7. 0 (chr-ID scaffold_68; pos 104899 to 105833)
ggcaggtaaaatatcatgactttggcaaagtatggctaaatagattatattatacattgaaatagaacacctactaaagttgcattacatcgtgaaaattatctgttttcaataagaacttctttccaaattgattttggtccatatatgttttcaattgttagtctaaggtggttgaaaactataaggattttttattagaaaaaaaaactataaagatttgacttacaattactatttttttttatgaatgatttactattttagtcagttggaattttcatcaatatgtaaaatcatgtaagtgattggtttattaagtgaaattagaattcaaatattattagatacctggttgtagattctagatgtgcaacacctgatttcattaacaatacaacatgggtctggtaaaccatgatatgaataaacattattcagtgaagtccaacgtactaccatctttaccaatggcctgagcattaacatccacaataggggtgccaagtttaaaatgtaatcagaggagctaaccaagctagctaattagtaacatatatttgttcaggcaaattctcttccctagaaacgtttttgtcctttgaaataggatatgatacatgtacctacagacaatatgttaacgttgatgttgagaggtagatgttacataccatcactgtattattattattattttcatgtattaatttctgttaatatagatgttgacaggctcttaattatctgtgcaagtgtgggtgttatatttttagattcttgacatcttcgactaatattatctattggttatttgattttgcatagccatttacacgatagagttccagaaaagaggcttaccgcatgcacatatactgatctttctggatggagcagacaagccagatacttcagtgaaggtaaacaagatt

SEQ ID NO: 109412 - DNA, 1002 bp, Aquilegia coerulea
  Intron number 1 from transcript AcoGoldSmith_v1.007327m (l ocus AcoGoldSmith_v1.007337m.g) derived from phytozome v7. 0 (chr-ID scaffold_34; pos 2735415 to 2736416 reverse stra nd)
agagcgaacaagcatcacagtgagattttcttctggttcgttcgttttctctctctttcacaccgttggatttgattacagttttgttttggtgtttcgattgtttaatatatatatgtttttcttttgaaatctagggttttattaatgttgttcgatgtaacatatttgatttcttaacttatttaagttttttagaaatggtgttttcttgttgattgaagcatttgaaaatggaaaaagattaaaaaccctaacaacctatagagtttagagatacttgtttcttaattgttaaagtgaagagggaaggaaatagagtcttgaaggtgtctcaaaccctttgaactgttagagacatgtttataaccatttcgaagatttgaattatttattttgataccagaccatgagactatatagagtatacttccaattacatgatcatacacttttaatccatcttctgtcataattttacatttctatatatagtcttccacaagaggggaggggttttagtttgatttatatatatattttaatggaacgggagccaataagaaaggttttgtgagttcattatgctagaagcaagttattgagaattttacttgtgaaatgaagtctaagatagatattttgacgaagtatccaattttgcaggtttggtaatgactaatgagggtatggaagttcgatcgtagcaagaaatatgagtttaaaattccattactctacggtgtaggctgtttaacgaacatgtacatagggtgttcagattatttatatattattactggtgtattacaacagtttatggatgacaaagtgcacaccacacagtgagatatcatgtcattaataactgaaagaaagtgctatgactgatataattaacgttttatttctaatgatatgtcactgactcatctattaacgtttgtacattcagtgaagttcattctgacgctgtttacttatgaaatgtatttagtgcat

SEQ ID NO: 109413 - DNA, 891 bp, Aquilegia coerulea
  Intron number 2 from transcript AcoGoldSmith_v1.004522m (l ocus AcoGoldSmith_v1.004516m.g) derived from phytozome v7. 0 (chr-ID scaffold_19; pos 3454708 to 3455598)
actttctttcccaagatagaaacaagcagcatcaggtttgtgaaattaatttcgtttgaagttcttgtagagtttcacatctgagaaaatttaatcgaaggcatgatctcatggacataattttagctttggttatttagctattgacattattactttactcttaacttggattgttgtcctattcacatgatttcaacattggtgacaatccgttagcctccatggacagagttactccttcgtttaggtttgaagcctgatgctgctgagatttatttttattttataggctaattaattttgcgaaatctgtaaactctactgtagtacctgactctcagcggcacctcatcattaaccaaaagaattaagaagcataaattttgcccaaaatttaggtaaattcagatagccatgaaccttttcccattcgccattttggctctttcaaaattttgccaaacaaatgtcattggagcagagattcagaagtctgaactctgaactaatgatatagttctaactaatcattttatcgcctcatcaaaacaatactgtcgatactaacaagtaacaccaacttcatggcttcgccaccttactgaaaaacttgacagccttttgatccaaatagacaggataggcaatattctgtaatgagacagatttgactaacaagaagagttcaaacaggctgtcataaatttcttcccaatacatagctactaagaacagaaaactgtatcctaaagagtaaagtgaaagtacaaaatgtagcatatgctagtttctcatttttcttgctttgtttttgtgcatcatgctgtgcaacaccatagttactaatgttgtttatggtttgtctttcaagttgtagatttctcgtca

SEQ ID NO: 109414 - DNA, 982 bp, Aquilegia coerulea
  Intron number 1 from transcript AcoGoldSmith_v1.008659m (l ocus AcoGoldSmith_v1.008659m.g) derived from phytozome v7. 0 (chr-ID scaffold_34; pos 1670755 to 1671736)
gcgcattattcgtcgagtatggtttttagaccattctattttttttttgcttttaattgattgtggttgtagacttcattaatataagaacccatgctctatgtgtacaattttgaacttctagttcttgatctgctgggtgagcattgaacctagagctagatacatagtgcagagaatgattgcttcacaactgtgtgtataatgataatagtagtaatggctacattcttgtatgagcatgatggcttcaaatttgagaaaggttgaaactgaagtataaaagttccaacatttctgttcttgttactactattacttaacttatgcattttgcataaatattacataaatcatcaacttgacaatcacctgtgatcatgcctacataaacacacactctgtcacttcgtttatagatatagaaaattaaggacttttatattttgctaaccattttaagtctgaaagccggctaccagatctgtcagtgtagactgtagacagtagaagtctcaaagacttgagtttaaatatctgcaaaggcgtcttaaattgttacatctgctaaattagtaccctttcagattacgatatcaacatctgtttcctatgaaaagggtgttatcgcaaatttgccattatctcctaatgtttttgagttttttatacatttggagtaggttctgtcaaattttattttgatcaataaccttggtcttcctctccagtctgcacttcttaaatctgatctgatatgtgcagacttttttccttgccaatttattgtgtgtgcatactattccataaattttagcttcccaacgtgttctcgctagttcttattttcaccatacgattgagttgtgctcattactgtgtatttgaaaacttgaacagtgtcctacaacttttaagtaagtggatggtataacttagctggttttgtatgctcaggtcagggatctcgattttgcagtgc

SEQ ID NO: 109415 - DNA, 964 bp, Aquilegia coerulea
  Intron number 1 from transcript AcoGoldSmith_v1.000527m (l ocus AcoGoldSmith_v1.000527m.g) derived from phytozome v7. 0 (chr-ID scaffold_16; pos 4003222 to 4004185)
tttcaactaatcctagacccgaggattatcttacggtatttttttttttttttttttttattaattgtacattgagttgacatgttttaatgatattaaccttaactgatgtataattctggggagtttatgtttctttaatgtaggatcagatattagcgcgagcaataacactgaacattataacagctttgaaccctagttacttgaaattttatgcaatttcacattttcacctcaaaatgaagtcagttattgcttttatctttccaattatttctttctcatttacaattagtaagtgaaggttaagtataggcaaagtaaatatgagtagagaaaaaaggtaacagtgggaaatatatttaaactcttaataagaccatatttagtcgaggacttgaggtattcatcttaccattcaccagtcttcaaattaagaggctgacatcattatagagatatctgttattaaaaaatcctttaatgaatggaaattctttttgaacctttgttcttgctaagttgatattagaccaaagtcgagctcccccctcacccactttacctaactttaaaaatgaattgttctgttcaatcaacacaaactcttgaaagtgttttgtagttcttgatatgggtccttgcaaaggaggggtccctcttaatagatggcaaaggcaaagctcacatgagtgatatgttcttgaaatagcaagatgtactatattttttggacaactaatttatagtcatttcgaaggatgagtgagagctttaaatctacatgagggtgcacttgtgcaatagagttcccagtcctttaaaagttctttgaaattcaaagttatgtccatcataaatatatgaactttcacaattttttttcgctttcaagacaagtataaatgtatgtgtttatgtggcaggtcttagcactacccttgccgcatcggccattgtt

SEQ ID NO: 109416 - DNA, 974 bp, Aquilegia coerulea
  Intron number 2 from transcript AcoGoldSmith_v1.017131m (l ocus AcoGoldSmith_v1.017131m.g) derived from phytozome v7. 0 (chr-ID scaffold_34; pos 1836415 to 1837388)
gcctccagccagtcccgatcgcactaatagtagaaatgctctctctctctctctctctctctctctctctctctctctctctctctctctttctctcctcacctttgatttttctttcttttaatctatgctggtagtctggtactgatgttattatggcctcttattttttcatacagtatttgcagaaatggattgttctttgttatctgcatgtgttgtgttaaatctgtttgtatgtccagtattttgtgcttgagcttgtatctctcttatacgttcagtttcttttcatttggatttgttcggaagctgtggaatatgtagtacatttcatatgcgtttgtccttccacttttgcacctctcactttatagtttcataatttactattcttcgaattacgttgtacatcatagtttaaatcttaaatggagggttaaattgagatgagttgttcaagtttgagacgtcatgtaccaaaccattattttattgatctctgaatgcaccaattgactacaaggccatatgctttgataagtacaggtgatggtctttcactggggcaaaatatagcgtgcggtggtccttattctgtgtctttgcatcctttctgcgttttgctatgggaccaagttagggctacaatctatactatgttaaagagtgatataatagtgtccctctttaatacaaaatgtgatcgaaatcatttgatctgcccctctctatttttgcatgagaattgggtaatgaatttgtatttttttttcttacttaaatggaaaaatacaaacaaaacaattctttcaattagaagtatgactttcacaacatccttctaaatactataaacccaaagataaaggaaatatatgcatttaatttgatagttcattgatatctttaataaaatgttgtatgctttattaagtgattgtctcgtgttcttgtagatttattacggacag

SEQ ID NO: 109417 - DNA, 873 bp, Aquilegia coerulea
  Intron number 2 from transcript AcoGoldSmith_v1.019382m (l ocus AcoGoldSmith_v1.019382m.g) derived from phytozome v7. 0 (chr-ID scaffold_92; pos 577418 to 578290 reverse strand )
ctgactgtaagatatatcctcctttctttaaataatttacttttcatgagtttagtgttttgtatcattctacatatatacagactccttctctgttttcatagacctgaaggtctaaattgtggctagaaatatgcactatttctcaaaaagaagaagtttttatctttccttgatattagtgtataatttcttctgattgcatcatgtagttcaaatacactaaaaagctgtgttcctttgctgaattataattcattgtgtttcgctttgagcagtgagcaactcttggaatcactggcaaaccatattgatattttcaaagctctgtcctttatgtatatgtctagggttgcatcattgactcatgttttacttggtggatcattttcaatgcatttatagagttgtcaggcagtaagttgatgtaaatgtgtccatggtcaatgaaggatttacatactagcaccatggcccttcaaatgtagaggcgcatgtagagcatgttgcctctgtattgtggctagaaagaaataaaagattttttgaggataatttgttgggcatattggtgggcctttcgatttttagttgggactctgtcaagctttatgcatgtactttggtctagaggctaaagatatcatgaggtaatgtgtctatgtgagttctgtcttacttaataacgtaagttagtaaacgtaggaaatggtctataacgtggttggagacttagagttagtaaactattggtgtggttcttggcttagttggaacactgtatttgagcttggatttttatgagttggtatttgcatagagcttctatattctctattaaattatctctatgttgtttgtttgacaggcagg

SEQ ID NO: 109418 - DNA, 762 bp, Aquilegia coerulea
  Intron number 2 from transcript AcoGoldSmith_v1.000625m (l ocus AcoGoldSmith_v1.000625m.g) derived from phytozome v7. 0 (chr-ID scaffold_13; pos 5896149 to 5896910 reverse stra nd)
cagtaagccattttccttctcattgtcatagttagtaatagtatggaggtacatactacatatactttgttgtagactacatataacatacacttatcataaaacaaagatactacatatactttgttatagacttattgttaggtcatttgatacaaaccttgtaagcaacccaccgtttgtgtgaagtttagtttggagaatccatgtgaacgctgtgagttggtcatcttggatgctattacgtggttttcaaaatcagttagctgtgatggactggaaaaaaaattaaatgccatctatctggtcttgactcttgagtggtctaccacttggttatataggatttcttgaggcttgaagcatggaatttcttgtctacttttgtcttgtttgttttacattaatctttaaatgggaacacaaggtagggctgattatacctacaaatacaattgaaatctgatctccatcatgtgctcctgttcatgcacaactaaaattctggtaagaagtagctccatttcatggattacttcagggtgggaagggcgaacaatgggatggaagagataactttttagttatatgcattagggatatattgttttgcctcttatcttatatttttagtctagtagtgactagttaccatttcctctcttatggaatactaaataaggtatgtttgatgctgatgttatagagactattatacatggaagaagagtttaacttacctcttttttcatttatatgtag

SEQ ID NO: 109419 - DNA, 345 bp, Aquilegia coerulea
  Intron number 1 from transcript AcoGoldSmith_v1.000625m (l ocus AcoGoldSmith_v1.000625m.g) derived from phytozome v7. 0 (chr-ID scaffold_13; pos 5897356 to 5897700 reverse stra nd)
tgcgaagcctgaaaacgctctgaagcgtgctggtaagtgatttgattgctggatttctatttcttattaaataagtgttattttctgtccacaatatttgattagagatctttgtttggctctatgattttctgactgaaaaatatattgaagccagatcagatttcactgtttgtttcaaaatattgtgtaatttgttttgcttgttcttttcaaagatggaataatttgttgagtattaccttgcaagttgatcatctgaaactgtacttatatatatatatatatattcatgtacacatggttgcagagttgattcaggttggacagaagcaagcagccttg

SEQ ID NO: 109420 - DNA, 295 bp, Aquilegia coerulea
  Intron number 1 from transcript AcoGoldSmith_v1.008985m (l ocus AcoGoldSmith_v1.008985m.g) derived from phytozome v7. 0 (chr-ID scaffold_22; pos 1206228 to 1206522 reverse stra nd)
ttaaggtatgtctctgcacaaattctactattatattcttaaaagaatgtaatttcaagtgccataataaacttatcagacagaaccaatcaaaataaaaagagtatttgaagacatcaaacgcatatcagcccagaagttcatgtttgatataaatcttcaaattctccaaaacatcaaacttttaggcaattagtttctactagtagaccacacacaataatatataatttgtcaaaataaatgatttaaactttttttttttttccagcgttttctgccatcagaatttgga

SEQ ID NO: 109421 - DNA, 1048 bp, Aquilegia coerulea
  Intron number 1 from transcript AcoGoldSmith_v1.007987m (l ocus AcoGoldSmith_v1.007987m.g) derived from phytozome v7. 0 (chr-ID scaffold_13; pos 2090624 to 2091671)
agggaccggaagaaagcaacaattggcttcccttggtgagtttttcgtggtctttgcttttttttaagcatgaacttatccagtttaattttgatcaaagtgctatgagtactcatctttcaaaaccgcatttcattgtaaatccttgcagtctggaaatagaaatatgtattctaaaatgtgaatacttttaaatggtaatattcatttatttttttcaactagttctactatgaggttctgctgattcctggtaaaggatatttataattctggtgacattagatgattcttgttcttctcacatcgttgtttatagtactggattttattggccgtggttaactcatccctaccttactcatagctatgcaactaaaacaggattgtgtatctattggctatggatctttcacaccatacacattgttttgggtttcgagcttaagttattccatattgctatccattttgtgattcattatcgaccatgatgtttagctttatatattgttccgttcatgtttgtgttaaaaaattactgccactaattccaattgctctgtaaaatgaaagaagcctgaggctctcatgttgattatgcacatttatgttgatcattatgttgcgaccagtaagaagcccttgaagaagttttaattcgtttgtatgttggaattggagatcatagttgtcgtacttattagaccattgggcaaggcatagctgttttagattaagatgtctgactttggaagtctgaatgaccatctgattgaatgattctgtttgttaccctatctggatttgtacatgccctttgcatctgtatgttgtaggaccatatgcttttatcagttggttggtagttgtctgtttattatcttcatgttgttgacatatgtattaatcttatcacttttaagttttcttcttcatcatttgtgtgtgtatgtgctttattgttgtacattttcttgagtagttaattactcctgctaatggctttacttttatcccaggtgaattggtctctggttctgctgga

SEQ ID NO: 109422 - DNA, 751 bp, Aquilegia coerulea
  Intron number 2 from transcript AcoGoldSmith_v1.006551m (l ocus AcoGoldSmith_v1.006551m.g) derived from phytozome v7. 0 (chr-ID scaffold_34; pos 2617147 to 2617897 reverse stra nd)
cttttcccaccggtatgtttctcttagtgtatttatgttcagtgatgcaacttcttttctcggtacatgtgatgtgcataatcattagctaaatactcgctcggttagttactctagtattgaaaacatttcttagaaccagtttggaattagaagtggtagtatgtgaagttgtgaacaaatttagacacatattgaatgcaatatgaatgatggctacaaactagccttatgtaatcctattgttatactagtgggttcagttatatatgagatggagagactctgttgttaccaatgattggaagttgagatatttttcaaagttgtgttatagctattttcttggtctgtcatgtgttgtgggttatagaatgtctatcatatgtgttgaatatctgttttgccacttggatcccctgtacagtcctatgaaagtgaacaaacaagcaaccctagggatgatgttgtgtttagaagtattccctcttcctctgctaagtacatgtttattaaacagaagttagggaatttttccacaacatacttcacattaatgtctcaggagcgctaaagttactatttccacattttgtactaaatcaaaataacagctgaagcctgactatttaacttcttgaagtgtaagtatactattccagtgagtgatatatctgcagtttaagtatctgatttattgattatattgattacagacacctttacaaacaccaatacagacgccattacc

SEQ ID NO: 109423 - DNA, 480 bp, Aquilegia coerulea
  Intron number 1 from transcript AcoGoldSmith_v1.001664m (l ocus AcoGoldSmith_v1.001664m.g) derived from phytozome v7. 0 (chr-ID scaffold_93; pos 53370 to 53849 reverse strand)
tcttcttcttcttctctaattatcaggtcaggtgtgttgtttcatgtttgtgttatttatttattttataataattatactgtatattgatgattgaatgaatgaagaatccatggatttattgattaattttgattcatgttcatattatctccatcatcagttttaaaccatttttttttatatatctgattctgtattttatttcattcatgggctacctagatcatcgatccatcttttttttatttaaaataccaactttagctatcattttctccatttttagagatgaagaaatgatgaaatattattacacacccacaacccacaccctacactctctttgttgattttaatataagcttattccttctgtacccaatttctaattctagtttaaattctaacatatctatgtgtttttttttcattctttcatcaggaactcagtctcaccactcacatatttttacaatc

SEQ ID NO: 109424 - DNA, 791 bp, Aquilegia coerulea
  Intron number 2 from transcript AcoGoldSmith_v1.008123m (l ocus AcoGoldSmith_v1.006189m.g) derived from phytozome v7. 0 (chr-ID scaffold_83; pos 804580 to 805370)
tttactgggagcaatctggcaatccatctggtcatgtatgtgctacactacttcaattccttccatcacttttaattttattgaattgtttcgatttctaatgtttttagaattttaatttcgctactataatcaactagtaaagaatctaaatatataaacccttgttgatattgtatttcccttgtttaccattgtttatatatatgcctagtacgtatatattttcttgggttattctgattttgatgcctattagattatctttcaaggaaaaataaaattttaatctagttaaaattttaattgtttgatattctagttaattttaagaaatcgatgttttagttttaatctaatttatttcgttaagccaacaatctttagaggctagctgttagtctgttagtgtagtgcatgttgtaaatgcaactgtagaaagatgtaagtaactcagatgtattctttttggaagatagaggtacatataaaataacaagatggcttgataaacaagtaattacacgcaagacatgtaccgttaagaaaagtataaaatacataaactcaaaagaggtgcttgtaaaattatagtacatgtttgtaaaattatagtacatgtatgtgggtaatgcataactagattatgaattaatgtgcttgtatctgttatctatgctctggcatgctttgcaaaataattgcagtcattgtataattctatattctttcaatcttttaaaataagacatttgctatttgggtatcctggcagccagttttgtttctcc

SEQ ID NO: 109425 - DNA, 947 bp, Aquilegia coerulea
  Intron number 1 from transcript AcoGoldSmith_v1.010052m (l ocus AcoGoldSmith_v1.010052m.g) derived from phytozome v7. 0 (chr-ID scaffold_8; pos 6061248 to 6062194 reverse stran d)
aagtttctctgaatcattctttcaattaactgctggtaagagatccaatacccacttctttttttttcgaatttctgtttttattgattcgatctaaatgaataatagatcttgtatgaattttttcttttttaatgatttttttgatttttttttttattttgaatgttgttttgagaaaatttaatgatggggtttgagaaaaatcattcctttttaagttttgatagatggtttagaagaaatttatattgaaaatggtagttgtatgaggttttgtggtggggatagattagatctttgccgatggtactgcgataaagttgatcattttgaactaattaataataagaaagcaaaaggtagatgattttaatttttacatagtttacaaaatgcgaaatttaagagaacaagagcgaaaactgaatttgaagtcttgattttgatacaatttagaaagaagaaatcaaacaagcaattaagcaaacataccacttgcaatgactgaaactttagggtttgtttcactgtcaagaaacctaaagaaggaaagcgaacaaaccttttgcaatgatagacctgtatattttatcgctgaccccctgccgccccataggagacctttttgaatatcgtaaatacctaccatttggatctgcccaatactctcatttgatttgtgaaatattagttttccagatattgaaaattcatggaaaacggccacctacatttttcagtgggtaggtattgtggtggtagcaatagccacctacatgataaattaatgctatgatcaggaataattgttaattaaggtgcatagttagaatatgtaatttgttggtttttgatatatattgacagatagagttttgggatttgctgtaaacagtttgatctgatatcacattgtatttattgtcacagttcagctgtcagat

SEQ ID NO: 109426 - DNA, 632 bp, Aquilegia coerulea
  Intron number 1 from transcript AcoGoldSmith_v1.026040m (l ocus AcoGoldSmith_v1.026040m.g) derived from phytozome v7. 0 (chr-ID scaffold_2; pos 8881368 to 8881999)
caaatgtagcttagtcacatagcaataatcctgattagaattatcatgtaccttagggaaaaaaaatccagtggcgaaaattcgaataatctaaattagtacgagtttaaaagtttgtgaacattgactaatgtgacatcccaaccaaaattaacaaaaacaatctacatccaataataatttttactcaaaacttatcattttgaaagagaaaagcaaccacttattccactcggcgtatttaccatgcatattgcctaatgtccaaatcttaatgccaactgtacctcatcatccaggctccagctataccttcactctccaatttccttaaaccatttgttgtttacttttgattctcttagtctataaaatttcaatactactacctctctcctatatatgtatcccaccaactcctctacactcctaacttaatacttcgatcatcagtttctgaaaatgttcatcatgaagttgcttttttgcttcttgttctttttctacctgcaagtgaatgcagatttgagatcggaattggtagaagtttttggtggaaaccgattcagattgtctgaagatggttctcaagttcagctttcacttgataaagaatcgggttcaggatttaa

SEQ ID NO: 109427 - DNA, 883 bp, Aquilegia coerulea
  Intron number 1 from transcript AcoGoldSmith_v1.007130m (l ocus AcoGoldSmith_v1.007141m.g) derived from phytozome v7. 0 (chr-ID scaffold_3; pos 8316521 to 8317403 reverse stran d)
ggcaaaataaagactcttcctcaccaagactaacggtaattttaattttatagataactatagtaatgaaaaatgtattctgatggatcggtgcattagtattgatatgatcgtataaaaaaaatattttttttaaatattgtattatattttttattgtttttaaaaaatgatcataaatatccacatagatattatagtatgtttataattaaaagctaattttctatggctttgggagacttggagttaaacgtacacctcatttacctcaatacaaaacaggggagaaacagagaagcatttgttttcttgtctctcatcacactcatacaagaagaaacagataaaacttacatattatgatggattctaacatatttcttcaagcttctaccacttatcaaccttctttccttacttcttccatttgccggaattttctcggaatccggcagattgttatcatttcccgccaaatccatcattttccggctatttaacaacacctccacactttccaaacaaacaaagaggtctttcttttctttatctcttttttatcaaatttcttcttaatgatgaagtagatatagatgagatgagacaagttgttcaatatctaatcatttctctctctttctttttttttaaacaaaaagggtgtaaaactatgaaccttttgattctctgatgacaatttttagtaaaaatagcaactagtaatgaatattcttctatgattcttcctagtattgaatacatgtacttgtttttttataataatgattcagttttgatctatttttgtttgtttgaaactattctgacaatcttatttttatcagaagttgaagagagtgaagatttgagtggtgggtat

SEQ ID NO: 109428 - DNA, 795 bp, Aquilegia coerulea
  Intron number 2 from transcript AcoGoldSmith_v1.017290m (l ocus AcoGoldSmith_v1.017290m.g) derived from phytozome v7. 0 (chr-ID scaffold_2; pos 1854436 to 1855230 reverse stran d)
gagatcattgcctctgtgaatactgtaaatcgcaggtactcaactttctgtcaagtggtgaacttattttgcttctagtttagctgatatttatcaagaaaggggggattttgctgtacttggaaaactatgctattgatgactctgaatagccaacaagagagagaagagaaaaaaaataggaattgcttaggaatgcaaatgatgtgttgtgtcaatagtggataatatctctcttgccactataatagttgtgtgttggtagactgcaatacatacgtcaagcttgacattacaataggatcatgtttaattcgatgagaacaaggctctcgagatagccactatgtacctagaaaggtatatgtggctgttattgcagtcaccacatagagaaatccattaaagagaaactaaggtttgattagtcaggatccgaaacttgggagatatattggaaccatacctgggagccccaaacccctagttgcctgcggtagaaccatacctggcgattttaccatttcttgaatttgtgcatactggaagtttgatccctagtttggggactggagttatatgtagtgccattggcttcaaagcttcgagtgcgtcaaaatttaattacttgaaatttctttagtcaataccttccaacaacaagtgacacaattgtttgctattgaaaaagtcgctttattcttgtgttgatcatttccagctttactcacgtcttcttgtatttttttcacatattctcttacagtcgtatagtcccggagtacagctttttgg

SEQ ID NO: 109429 - DNA, 558 bp, Aquilegia coerulea
  Intron number 1 from transcript AcoGoldSmith_v1.003639m (l ocus AcoGoldSmith_v1.003617m.g) derived from phytozome v7. 0 (chr-ID scaffold_35; pos 1735872 to 1736429)
ttgggtttcgatttgtccaattaaactactgattcgtaagatttctcaacacaagattcattttctttcataatttgatataatttgaatttctatattttaattttaacatgttagctcgaattatgatctatgattcaatttacatgaattaaacaaaactgtatatacttaagatacaattgtggttcattagatggaatgatacaagtatatataggttggaagttatgttagtattgatttattttcaaataagttattagtgattgagtgtggtgcagaagatggaagtaggtttagaaatgttttttaatccttatattttgactaagggggttaggattattatcttgtactggaataatctctactgacatatatgttaattagatcaccaatattgaattatcatggtcatatgtataatttcgagagattaaattttgtaatttttaattgaaaattggatgtatgagtagttaatgaatagtttgatgcactattgaatatttactttcgtacttcttttcttaactgtttgtgttttaggtaaaa

SEQ ID NO: 109430 - DNA, 779 bp, Aquilegia coerulea
  Intron number 1 from transcript AcoGoldSmith_v1.004770m (l ocus AcoGoldSmith_v1.004770m.g) derived from phytozome v7. 0 (chr-ID scaffold_34; pos 1541538 to 1542316)
cttcttcttcttcttcttctgaatcagctctctctgtaagttttttttatcttttgatctactttctccgatgaatttgatgattaggattttgtctgttttctttgaattttcaatttttctatttacttggatctctttctatgtgattggtatgtaattgagtattgattgatgatctaataagatttatagatatagtgtaattaaggtgtgagatttggaatttttttcctatgattgaagagattgaatttgattgaatatgtttccttctttatgtgaggaaagaagattaataagatacatgactaagatcagagctactcatgtttagtacatatgatgagttatgcttcagagcgtttaataataatacagtataatcaacaaggcatctaaatgattcaagaactggatttaaataataaaaatattgaatagaaagaagaaaagcaatggtgtgtatgtcacatgaaaggaaggtagaacactagaacgaatctcttttatccaacacatcctcaattatttacctattaacatgcaaaccaaaatccagacacgtaattcattgttcttcagactggatgtaagatgaaagaaagggtttaatacgtaattaactgtgtttcaaatctatgcttctttttgttggataattacttctataatttttttggtataatatcagagcgcctttttacagtttaccaattgttttttacttttgtggttgtgaaggcttctatctgtttggctggggatagtgctgcata

SEQ ID NO: 109431 - DNA, 397 bp, Aquilegia coerulea
  Intron number 1 from transcript AcoGoldSmith_v1.012965m (l ocus AcoGoldSmith_v1.012965m.g) derived from phytozome v7. 0 (chr-ID scaffold_7; pos 5289282 to 5289678 reverse stran d)
agcttcttccaacattaccttggaacactctcgtatgtttcttcttcagaatctttctgttcatgtgttgcgttaatatagtatatgttcagttcacttcttttcttagttttcacctttttgatgaatttcttagtatatgtccaccttaagtctggtttggttcttatgttattaaataagactggttttgtttttgatattacgccattaggggttgtgccagcttcttgtatacttttgtttagaagaaacacgggctagatgcccttaggttttaggccaaaccctaaggaaaggaggctagcttgtatagtttatgtcaatatattttgatacggtttttgagataactgtttatactaatttgttccattactttgttcatcaggataca

SEQ ID NO: 109432 - DNA, 626 bp, Aquilegia coerulea
  Intron number 2 from transcript AcoGoldSmith_v1.004982m (l ocus AcoGoldSmith_v1.004982m.g) derived from phytozome v7. 0 (chr-ID scaffold_34; pos 1470378 to 1471003 reverse stra nd)
gcagaaaggtaatctaacgtttttcacttaaaaatcttcttcttctccctcttttttagtttaatggatctgagccgtttattttccttttacattggaatctaacggttttagatacatttaacctcaaacgaatcttaaccgtttaaagttttaagatctgaatctggatcgtttaatctgttatgttcgttttcttcctgaatccataacaatgctctatgcactgcggcgcttcgttctatatgaatagagagtgcttcagtggagaatataatttgactagaatctcctcaatgctttatctaatttcaacttttatccaactaattgaaactactttttgagaataacgcaagggtaggttagtcattttataaatctggtttacggttttactggaaaacatggttacctcgagcagtgtacgtagttcgtttttctgttttgcagaataatttgtacggcatttgctctttgtttttatccactagaaatttcttttcaacccttggcgtagaaaagactttgaccgtattctttttctaacatgcaccgaatgtgtagctttatgaaaaagtaaaaaataaaaataaaaaaaatggtggttttatttaattgcagat

SEQ ID NO: 109433 - DNA, 559 bp, Aquilegia coerulea
  Intron number 1 from transcript AcoGoldSmith_v1.004982m (l ocus AcoGoldSmith_v1.004982m.g) derived from phytozome v7. 0 (chr-ID scaffold_34; pos 1471015 to 1471573 reverse stra nd)
gcaacagtacagaaagagaaggtgtttggttcaaggtatattataatatatctatactggtttgtttttctgcattttgattgaaggaaaatggttttaggtgaaacagagaaagaaagaacaataagaagtttctgttttagtttccacattatctgtttttagtctattgagggcttgaggctatttcagtgaaagtttctcaaatgcaaaaagagaaacaaagagatgttctatttcggtttctcttatctgcttgatttcagattttaatttgtttttttagctgaaattgagcgtttcttcactgaaaccaactggtttctgaaaatttcagttacattttcggttttcttaacaaaatgtagatgaattagaacaaaaacacaccgaatttcgttttctaactgttcatctttttccagatctctgtatcttcttttgcttttagtactaatttgagctagattcattcaatttcttcttatttcttacatctttgtttctttactttgcctttctagtgttgagaaaacagaggagttgcagagcttgaaga

SEQ ID NO: 109434 - DNA, 690 bp, Aquilegia coerulea
  Intron number 1 from transcript AcoGoldSmith_v1.008120m (l ocus AcoGoldSmith_v1.008120m.g) derived from phytozome v7. 0 (chr-ID scaffold_16; pos 2367764 to 2368453 reverse stra nd)
ttcatctcgaaagagtttttaaagtgaaatataacgtaagtttctttatattcttattcttgtctagctcttgtagttctaatttttctttttttgcgaatttgtttatattgatgaaaccctagaatagaagagaagagattaggaatttggtgtgttttgagaagcttcattcattcatctatacaaagagatatgcttttatgcaattagtttctctacttgagattgtgtgtgtaagtgtaagtatgtgcaaaggatgttagctgagcctatttgtttttgatattattatttacaatagaatctgtagtgggtatgttgcaaatatttgtttctgtgtaatttggatttattgtgacaaggggttttgtttcagtttagtatcggcttgtcagaagttcaaataaaattgggccgaactttaaatcatttatctacttcaatttgtttgtttctctatttgagaggaagaatccccaaaaccatatgttattgtatgagcctttcattttaagtgtcagctaagatgcctgcattttctgttggtgtcatggattcatagcacatttttttgggatatcatttttgtttcttcgtgtttttattgtctctttattatgattattatttttcatccaaactatattcttttttttttatgctttgcagcttcgaaatcttctcgtc

SEQ ID NO: 109435 - DNA, 734 bp, Aquilegia coerulea
  Intron number 1 from transcript AcoGoldSmith_v1.023556m (l ocus AcoGoldSmith_v1.023556m.g) derived from phytozome v7. 0 (chr-ID scaffold_2; pos 7648405 to 7649138)
ggttggacggaatttgctgtcacagctcgtaataggtaatgacatcacaccttttattattatttaataatcatatattcgtaattttattttccactacaaatattagagatcatgtgaagcttttgtttatgatttgatttataatttaaagtttttgttttgatatataataaatataaaaaaaatgtgtgaagcataatacaaagagtcgataataagaatctacatttttttaatctcaaattgtaatatttagatatcttcttgatctgctctgaaatttttgcaaattcgattttcttatttaaaaatcaatttcaatagattcttatatttaaacagatctgattagaaaaggaatgtgccgggtgggagaacatgatcatgggcctactgctttctaggatttgggccggctgttggttggctacctggatcgcctaataaacctctttgaaacccggccctcctagatcactttattctacattcctatggttccatgacttgtagtcccacttttgaggacccttcttaacttgctttttgctaaaaaaaatctgattataaaagaaaatttgataaaagtttctttacggcttgaatttgcatattttgttgatttacttatttttactgttgtttgaaattttaatttacttattttttaatatgaattttgttaattatcatcaggagaagatatttgtgtgacggttcaactaatcctt

SEQ ID NO: 109436 - DNA, 978 bp, Aquilegia coerulea
  Intron number 1 from transcript AcoGoldSmith_v1.011693m (l ocus AcoGoldSmith_v1.011693m.g) derived from phytozome v7. 0 (chr-ID scaffold_26; pos 1051074 to 1052051)
gagcgtgtttcgcttcttctctcgtcttcgaaaaggtaaaaaatttcttaacttgaatcttcaatctttactagaatttgaaatttttaattacttaacttgaaactgtttgttttgtattagttattattaaagaaattgtttgttgattgtttcatggtgattgattgttaattgatgtaattgtgaaaccctaaggttaaacattgagttcagttcagtttttcagttcttgatagtgatattttaaatagaaaatttcaaaaccctaatttagagatcaattctaaattgatactttgatagataagaaatgtagaatcaattcacttttgtttcttcttttacttttacaaatgtacacgaatgtgttaattgatgatttgcaattgtgttcacaattaatcaaaaatttattgtaaattgaattttgaaatagaaatgttactagtttgattgtgtcagttatattactagttcaagagtcactgaaatcaagtgcatgtagtgcaattcgattgagttcagttgttaaaagaaagttgattcagtagttcttgataagttagtactgtatcttgataagaaagttaaacatcattgaattgctgaaatgtttgagctaatttgagggttaattgtaagttactgtagaaattattactattataatgcacattagttaaggagaagtgtcacgattcgtgagtgatgctgtgaactttgtaactgatttgttgctttgatgaaaaaacaataaaagttaaggttttgaattgagattatgcatatgtcagacgtactttaatatacgtatgttataatttctaatgaattctagactcacgacaatccccgatttctctagagtgattagatgatggtattcataggataactttgttaaactacattctttatagtatgcattatctacttactgacttgttatgtctcatacagagtggtttctgtttg

SEQ ID NO: 109437 - DNA, 1007 bp, Aquilegia coerulea
  Intron number 4 from transcript AcoGoldSmith_v1.016503m (l ocus AcoGoldSmith_v1.016503m.g) derived from phytozome v7. 0 (chr-ID scaffold_32; pos 1580348 to 1581354 reverse stra nd)
tgctgcacaattgttgtctacagagcctgcagatagttagtttcttacttaaaaatcctttagttataaaaatctcacattctcacttaaagaaaattattatcatcaagtattcagttatccattttcttttgggcatgagttagaatgtaatgtattccaaaaattgtctacagggccaacttgagagttcactgagttctttgtcaatgagtacttgtagctcagtaaatcttctatttttttgtcttgttacttattagttatgtcatcaatggtgttgtcagagatacaatttagacacgtcctgacatgttctatcatgataattctgtagaatggtgaatttattaaacaatgagaggatggtaactgcattgtttgtcttctattaatacactaatgtggtggttaaatatttaaatttacttataaattataatgtttttttttttttaatttcaataaaggaggttaaagtgttaaaccacctcacacctgccctctgaataatacatatgttacatagttttctgttttcatgactccttggagatggtgtgtcagcatttttacacgcattgatctatgcaatcttcttttgcgtttgaattgcatgaaaattaatgtagaaggaaacttcttgtcattcacatccagtcagcaatgaaactttgattgtataaccctgaagtacaggaaatgggtggcttttgtgctcaacatgtctatttattttcatgtctgatttttgtacatgatagtttatatgcagtgaatgtgtattcttccacaatgatgcattctcagttcttcaatcgtattgttaaagaaagtcatacatggttgtgtttttatagtattatttttctccagtaggtgaaaatttagggaagtatacttctattcatgtgctacactgtcctgatcaacaccaatgatactgtcatcatcttcgctgtttttgttttcccaatatagtcaaacttggcattggaggcttcagt

SEQ ID NO: 109438 - DNA, 945 bp, Aquilegia coerulea
  Intron number 1 from transcript AcoGoldSmith_v1.027205m (l ocus AcoGoldSmith_v1.027205m.g) derived from phytozome v7. 0 (chr-ID scaffold_16; pos 3893580 to 3894524 reverse stra nd)
gggaagcaaacaaatgtgccgatactcttgcaaattttgcttcatcttatgcttctgggtttcagagttaaaaagttggtgattactctatgcaatattggggcactgcacacatatcgataagaatgttttggcctaaaaatcttattattaataaaaaaatggacccaaatctaaatacagtacatatttgattaaattttatttatttattttttaatttatatttaaattaaaaaaacttaaaaatatttgactgctgaccacaccgttttataagtgaaggcaaaagttttatacaatattgcgatctgtgttgatttctgctgcacatcaatccaacggtgataacatctgaaacttgggttttgtcttcttcaacaaaaagtgaggggttttagcttctggtggaaagttgaagaaaggatttcattcttttatgtgcaacattgagaataatatttgcttaattctcaacaaaagaaggtatttatgaggtttttttcattactactttattaatatgtaatttttttttcaccacatttcattattatatctttgggtattttgttacatggctttgtttatcattgttttcaaaacttgggttttgtttatttttgttttccaagcttgggttttgtttatttaaggctataagcatcagaaccatggcattttgtgatttgggttttgttccattagctttggttttgtttatttttgttttccaagcttgggttttgtgcatttagagatcaaaaacatttttctttgtacatttcttaagcttttggttgtttttttattttgttcttctgaagtaaactggggttatttaggcagacccctcaactgttattgcatacagtatttgatttgtgttggtctatgatcattattattacagaaaataaatttattatcaagaaggaagtagca

SEQ ID NO: 109439 - DNA, 1056 bp, Aquilegia coerulea
  Intron number 1 from transcript AcoGoldSmith_v1.010922m (l ocus AcoGoldSmith_v1.010790m.g) derived from phytozome v7. 0 (chr-ID scaffold_13; pos 255205 to 256260 reverse strand )
tcctattccgttgaaacgtcctcgttctgactacggtaaacaaacactcacacctcacaccactttagggtttagtttatttctaattttctacttttgatttgattgagtattttaggtgaataggtaataacattttataatccagctcaattgttttgttattgttacactttccttcaatcgatccatgtgattatgatttttgttactgttaggtattaattggatattggtttgtgattttagtcaattgcttcaagtgttgggggtaaaatactctagtaaggactttggtagagcagtaattaagagtcacacattctagctatctcaaggtccacacccacataattgctcatttccatttcaacatcaagctaaggtctgaatatgtaaatgatggcaccatccactttttaccagagtgggatcttgttcaaactaatgtgcgataagtgtttgcagttaacaaaggttaaatctttcctctttcaaatctaaacatgtaaaacaagtagaaaaaggtccgtaataactgataaattattcgtttacttactttaactctatgttcacagtgatggtggatagaaagatcataaatgcttagctgttaattaaattgccacaatcttaatctcttaaaataccgcacaattttgaataaaaatacaagttttttgccaccgacagaagataaatgatttgaatgtttccaaaatcgacatagaggtcaaacatggtctattacctttttttctatttagagactaattcccttgtgagtttttttcttattaggatttaccagtagaaatcaaattagaaacaaactactttgggttggtgttgaatgtattcatgtttcacctaaagataaaacaataatatggagtagtccctggtttgcattatgggtcagcattgttgaatcacttaacattgatatttctggacataaactatctttcattaaattgatgcttcttttgatcttgctcatcttcacttttcatagatattcctgttggtcacgaattacctggttattat

SEQ ID NO: 109440 - DNA, 946 bp, Aquilegia coerulea
  Intron number 1 from transcript AcoGoldSmith_v1.025494m (l ocus AcoGoldSmith_v1.025494m.g) derived from phytozome v7. 0 (chr-ID scaffold_64; pos 36843 to 37788 reverse strand)
gaattggacctgagatcgctgaatctgttaagaaggtttctattttatcacaccatcttctctttatctgtactgatgatctgattaaattttttttttttttttttttttttttattattgattgattgattgattgtagggttagtagactttttttttctttctctctctgttctttctgtgtgtttttatttatttatgtctgttaatttttatatgagggatttataaagaagttggaatcatgttcattgggtgcaattcatttatttgataaaattgttcaaacaacacataggccatcatatcatatcatgtggactatattttgaattcttaataaagctttttacttgggatatttattctagtttttagagtctaggaatacattagtggatgtatcttttgatgaaaattaaacttgttgtcataattcatcgtgaatgtctttggtggtgggtgtgggtttcaaaagtaggtaacgtactatagctacttgttatatacatacccattacaaaactactactactacttcccattaattacaccttcagttcggttcttaaatagaataatttaactacctttctgctttattggtttaatgtgttgtaatatcgtctttgttccaaactctaattgatggatcacttaatttggttgttgtggtaaatttgacccttttgtggatttatttaaatcaccttaaatcttctagcctgcttttcatctctttacaacattggtttgtgtatgtactatgtattcaaggaaacttgctatcagtctataaatacaagccacacatcttggaggataaaattgttctcttttacggttgagttctacttttcaaattatacgaatatctggctatccttaatattttctatatgatattgtttttaggtactggccacggctgaagtgcccataga

SEQ ID NO: 109441 - DNA, 743 bp, Aquilegia coerulea
  Intron number 1 from transcript AcoGoldSmith_v1.015563m (l ocus AcoGoldSmith_v1.015563m.g) derived from phytozome v7. 0 (chr-ID scaffold_7; pos 578799 to 579541 reverse strand)
gttgaaatccaacccctccacttgttgttaaaccccatacgaactaaggtatagtctaagaaagaccacaaaacattatcgtacgccttcatgagatcaacctgtcctaggttgcctccttttatttttgctcaattgatcttactccttgacctgacagtacttagatactttgatcagggatgtaattttttggttttctggttatgagtatataatactatacatatttttttatttttatttttaatcaaagcaaatttcatttttaaaaattccaaattataatttggtccaaacaaactaacaagtaaacaaacagttattttgcacaaatgacctcgctctgacgacttttcatgtgataaatcgcggctggacaattttcatccaaccgcattatacaactgtaaaaatatacatactagtctttgtagagcagcttttctggtaagcgctggccaccacatttgattccctccttccttccttccttccttccttctttcaataaaatctcatttgcttgctaaacaagacaatttcttgcttttcgtttcgaatcttcgatcatctcattcaagttagcaatggtaattcgaagataaaactttttaaataaactgaaataagaaaaagaatgaaaaaatagactcgaatctaataaaaattatcttttttttttttttttttttgttttaatggcagatccgatttatactgttacaaaacagacaaggcaa

SEQ ID NO: 109442 - DNA, 794 bp, Aquilegia coerulea
  Intron number 1 from transcript AcoGoldSmith_v1.022179m (l ocus AcoGoldSmith_v1.022179m.g) derived from phytozome v7. 0 (chr-ID scaffold_2; pos 7735057 to 7735850 reverse stran d)
ttgcttattttttgagcaattctcttgcaattgaggttagtatagtgataattttgctttattttatcattaattagaagtaattctgcattatttggtttcattttcagattttttttatatacaaattgcgtaattttgtgtttagttgtgaagtttaaaaactgcagaattcaattagaggtaatagaaagaataaattttcattaataaagcaatgtgtcccacattagtaacaataatttaacgacacaatgcagtgtaatgaaattcctgcttctaatgacctttgaaacatacaagggaacctgaaaacgaaatcaacatagatacatgaatccttatcttcacattcactgaaaacttacagtggaagcgcctgttttaaggtctatgaggagttagtgttcttgacctgaatgtagtcatgggcatagctagggcctaccgggctaccccttgtagcaatctgtgcgaggaaaaaataaaatcaacatgattgctggccaaattaccaggattgtttttttcagcatatctctcctaaactgaaataaaccaccccttctactttggtttgagaagcgagactgcaagtttcaatttagttaattgaattttatgtttgtatatccatgaacaaataaaaactctggtgcaagcgaaggtttttatagttcttaataaaattttctttctgtgttaattatcttagtcacttactgagacagacattgtattggtgtgtatttttcgcagaactattttggttgtttctttgcgttgcctatagt

SEQ ID NO: 109443 - DNA, 693 bp, Aquilegia coerulea
  Intron number 1 from transcript AcoGoldSmith_v1.008399m (l ocus AcoGoldSmith_v1.008399m.g) derived from phytozome v7. 0 (chr-ID scaffold_16; pos 4280792 to 4281484)
tctctcctcaacacagccatcttcaacaagaaaaggtaagctataccctaaaataaagagcatcatcagagtttagtgttgctgcttgctacaaactaattatatggtcaaaaaagttctactgggaattttacgctcgatcataacaggccatcttcaactactgtatatttcctcaaccaaaaagcatttagacaattagacgtatgcacaacactatgcttttttttttgttcaagggtgattaaatttataaaaataaatcaaagttacaaaagtgactgaaatttatagctacattccagtcagaaaattaaatgaacctataatatacagactggtgattttccaatggcagctgaaatggggcttataatctgtttcacctgcagccctgcaggtatgtaccctttcttgtgcaagtatcagctgcccatatgcttcagaatctgattctacccatatgttatcacagcagcttcagaatctgattctacccatatgttattccatcctactgcaaatttgattccttctatgatggccacacattcagcagtaaagcatgtctccgctcctagttcaccaatgctgactcctacaagagttccatcatctctcctcaacacagcccctcccccccatcctgccaatccaggattccctctctctctcattcatttgaaactctct

SEQ ID NO: 109444 - DNA, 475 bp, Aquilegia coerulea
  Intron number 1 from transcript AcoGoldSmith_v1.006173m (l ocus AcoGoldSmith_v1.006173m.g) derived from phytozome v7. 0 (chr-ID scaffold_13; pos 5788347 to 5788821)
cttttgctttctttcttcttccttggattaactgggtaattctatattctttttcaatttcatgatttgggttttcttataaatttaattttgttgtgaaattattgatttttacgcaatttatagctgatgagatccctttttgaggaaaagggatcatctctttagtcccaaattttgttgagaaaaatcatttgaaatagtgatctgaagtagtaatttgacaccctgggtgtaagttttcgcgcaaagaatgatcataagcagttagatgcaatggaagcttggatcctaatggcatacactttagcattagcagtttgtgcattatgattgtagatcacatctgtataaaactgctcatgatcatcctttgggagattgctgggatgcttttatctaattagaaatttgttgacgtggtttgattggatgaacaggatatttggcaaccagcttttatttctgcttggtc

SEQ ID NO: 109445 - DNA, 925 bp, Aquilegia coerulea
  Intron number 1 from transcript AcoGoldSmith_v1.023430m (l ocus AcoGoldSmith_v1.023430m.g) derived from phytozome v7. 0 (chr-ID scaffold_3; pos 9687715 to 9688639)
tttgcacctttatcaccactaagaccacaatcaaggttcgtattcgcaaaccccacttgctcactcattcaatttaaactcaaactcaattaatctatcttttctacttcatgttttctaaatctagggttcttcaatattgattaatcactaacaaccaatttttcgcacagaatatgattgttaagaaattttctaatcaatatatcaaaaaatccaatttaatatagtgataaagtttcgatttttattgtatttggttcatggtaaaccaaacccaccatagtgtattactgtattgttgttggggtttgttgtattaggttttttttttccttgacccaaacacagtcatgaacacttttggattgataactgaaatcagaaatttgtatcaaattccaaagacctgaacttgataacataaattcagagttagatttttttcgttttgtaatcgttgaattttgttgtgatgttaactgagacagttgaagtatggtagaggtaatcgtcgtgtttttttgacagtgcataacaattaacaactttcattcatacatggcattctttctaactagaaagagttagtggatagatgtatatactatgcacttaagttagtataattcttgggacacgacagatacctgctacgaatctgccttttataagcccaaatgaaaaactttgaaacatatcttcttgaagttgtagaatgttctttttattacttatttattattcacatgctctatgattttgttcattgcgttaaaatgagagggaaaaatagagtgataatgattagccaaaccgaatagagtagaagatgttgtttgaacatgaatttatcaatcatagttacgttgctgtgcttgttggtctaggcttgcacatccaggtggaccactagcaacaaaca

SEQ ID NO: 109446 - DNA, 999 bp, Aquilegia coerulea
  Intron number 4 from transcript AcoGoldSmith_v1.003120m (l ocus AcoGoldSmith_v1.003120m.g) derived from phytozome v7. 0 (chr-ID scaffold_2; pos 8614598 to 8615596 reverse stran d)
ggatctaggaattgttgagaacactgtcttgcaaggtatgtgttgtttatatgcttgttcttctttactatcgtatttttatatatacggtcctggatcctggatgaaggcatcccatgttattaaaatcttggagtgtcctggatacggtggtcattgacctgtacgaaccagattgaagtgaaaaccaattgtaaattattttttttagaaaaagaaaaagacaatttaaagcaaaaaccatgatatgcagtgaaggattaaggaggactagaagaaagtgagagaagaaacagatgtataacgactaacatatatttcacctagccgaagaaactccctttggttgtttgatgtgaaaaatggttggatcagctatgacacacactctgttactgagccaataaaagtccaactgtgaatatactttcatttaagtcaaatttcggttggatctgcttatccaacacagtctgctactgatttcaataaaaaatcatcagtggatatatatttatttatgtctggtttcagttttttgttggatcggctttagggctaacactttagtctttgctactgattccatttgaagtccaactaggaatataatatatattatttatttctagtttgctgtctgaggatcattaagactctggaccttaggtggatcctctctacaaactgaggatattgaatttactcttcaattggagtgcctgacttgtgtgtcagacatttgcataccctgggttaacttattactgaaatatatgaactataattccatgaaaatgagtggtgtttggaaagaacgattttatatacagtcattgtctgcctttaagttatgagtgcaatcacatcatcttattcaaacttgtccatttcattttgtcatgcatagtaataataataagtatctgaatttaccaatttctacgttctggcaatttgctaggctggattgttagtacccttcttgccggtgctact

SEQ ID NO: 109447 - DNA, 558 bp, Aquilegia coerulea
  Intron number 1 from transcript AcoGoldSmith_v1.003120m (l ocus AcoGoldSmith_v1.003120m.g) derived from phytozome v7. 0 (chr-ID scaffold_2; pos 8616259 to 8616816 reverse stran d)
aaacgaatttcgaatcgcattagatcgtcttgaaggttcgattctttaatcaatcacttcttttcaatttcaccaacaattgtttgattcgaagtttttctctgtgattttgttctctcgatctattcaaacacttgttttacttatagattacaagatcgcttcattaatctgtttctttaaactacgattctgaacgaagattcgtcttcttcattgttctggttcgtttctctgttttttactgagttaatagtcgtagagaatgctcgagagtcgagaacgaagatcatgtaacttagtaacttagtgcgattgtatccttgaacttatcaaattgaaaatcacttctgtgatctcattgaaggattaagctaattgagaagaacttcatttatgtttaatttaataacagttgagaatcttctttaatggagtgatttggtgaaaatgaaactgaaattaatgatttctttgatttgatgtagttatctatcttatcttcttcaaattttaacgatttatgtatttttttttatcagtggttagcaggggaaa

SEQ ID NO: 109448 - DNA, 338 bp, Aquilegia coerulea
  Intron number 1 from transcript AcoGoldSmith_v1.001554m (l ocus AcoGoldSmith_v1.001554m.g) derived from phytozome v7. 0 (chr-ID scaffold_35; pos 49044 to 49381)
acggaaggaagaccaagctttcctttggaacagctgtatgtttcttgacttcttcaattcctcatccatctgcttgcttttattaatcattaattatattattagcagggatcctcgatctacttgcttaattgtatttctggcctctgtttcaattttgttcctatatcgagtatctatctatctatctatctatcttatcatgtcgcagtgccacactgtcgtctgtctgtcatttaactctttgaattctcggcgtgtgctcatcttctacctcctctacatccttgtactgatattatatgtaaaaaacttacttttcttttttctgtaggctt

SEQ ID NO: 109449 - DNA, 983 bp, Aquilegia coerulea
  Intron number 1 from transcript AcoGoldSmith_v1.009919m (l ocus AcoGoldSmith_v1.007894m.g) derived from phytozome v7. 0 (chr-ID scaffold_13; pos 5242656 to 5243638 reverse stra nd)
ctgttaacgtgagttttctattcattttatggtttttttttttatttgggaaattttatcaaaattagctcattgtaaacctaatttttaaactgtcgatggaattgagtggaaagtttatgataattaacagttggtcatgcttgctacatatcgcaatgaaaataggaaaattttcatattgtaatgacagaagtagttacagtaataggtagtgtagtttatgactaatggctgcatttgaaggtttcctgactaagaagaagaagaagaagaagaagaaagtgtataaattggtttcattaaggacacaaaaatagcaagagagaggggaaagagtgtttacggtgtatggacataggtttgattagatgttatgtcctatatgcattctattgtcagtgctcctaagaatttgtaggcattgactagaaggcagtacccaatttcgtagaattacttttcaggggtaatctgtatatagagaaaatagtttcttcaacaatatgtttgatcgaaacttctgcgcttctttccttaggacaaaacacctgcccgatctatgatggacctgtatagttgtaatcttgaatctgtctatttccaaacatatggtaaaagaaatttattctctgtttttccttttggacggagacatggagtacacatttgtaattgggaagggtaagagccctttacctggttaatgaacttagtggtgaaagtattggcttggttaatctaaaggctaaagctgtctgtttgaactttgatggagtcaggattatccacattacaagaaaacccgttttagtgtagtgaggaggcttacaatgtcacgacaaaaaatctagctcttttagactattgatatttgatattggtggtatgtgccctaaattgtaggaaagtttgtatgtgactaattagcttgcttgattgttgcagagagtggaggatcgtgtaattatcataaattctag

SEQ ID NO: 109450 - DNA, 894 bp, Aquilegia coerulea
  Intron number 1 from transcript AcoGoldSmith_v1.002292m (l ocus AcoGoldSmith_v1.002292m.g) derived from phytozome v7. 0 (chr-ID scaffold_2; pos 4685103 to 4685996 reverse stran d)
ctggagttggttttaatctctatttattaagcttggtaagagatctaagcttatgtttaagatctaatatgattaaactgagtttttagtgcaattcttagttatagatttgtattaaagttagcttatttatgatttatgacccattttcattgataattgttttatgttttggtgtaaaatgcttgaattaagtttctaattgtagaaaaaaaaatgttgttttcttttttttttcttctaattatttaggagggaatctgatgagtgttttggacttctagaatgtcgttttctggaaaattattgtctctattgtatcttacttttcttgatttagattgatgttgaagcttaattaatgtttgttttagtgtaaaatttaagctgtaaaatgtcagatttacattagatctttttgttaattatatggatctgatcttttccaagaacactctcccctgtttctgacttatttgtttagtttaggatgtaagtttcagctggattttatattatttgataatggaaagatataagtgataatataccgtaagtctaatacatcacattgatgaaggaaaaattcattttggattttgatttgagtgtaattacaaataaaaataacaacagagtttttatttgatctgggtgcaaaagccaaattgactagaaattctgtctcatattatttgtgaagtttgaaaactaatttgcagaacgattcacacaaatactctgtttgttatgaaaacaatcatcaaatttaaattttcaattattctctcccttttcatgaacatagcatgaatgattactttgtatgaatgtgcttcttcttagctccattgataataatactagaatattttgaattgtttcaggtccaca

SEQ ID NO: 109451 - DNA, 294 bp, Aquilegia coerulea
  Intron number 1 from transcript AcoGoldSmith_v1.007159m (l ocus AcoGoldSmith_v1.007159m.g) derived from phytozome v7. 0 (chr-ID scaffold_22; pos 2148026 to 2148319 reverse stra nd)
tacagtagattgtttgacctgattttccatttcatgtaagtaattttttttaaaaaaatggtggtatgttattctgttattttattgattcaatacgtcttttcttttcgttttccatgtttaattatgtttttttgatctatcgtgtagtgtaagaaagtagtgattgaaatgttcaagtataagtcaattgtcattgttaaaacttaagaggataatattgaaactgaggaatttgttccatacgtatttgtttcaggtggaagttttgtccgggaaagtggtggtacagca

SEQ ID NO: 109452 - DNA, 848 bp, Aquilegia coerulea
  Intron number 1 from transcript AcoGoldSmith_v1.014660m (l ocus AcoGoldSmith_v1.014660m.g) derived from phytozome v7. 0 (chr-ID scaffold_48; pos 409897 to 410744)
ggtcgagagatacaatattgaagagaaagagaaaggtaaaggtgttctcaattactgatacgtatagtttcgaaaaatttaaacatgttcttcaaaactgatgttacaattttataagtcacaagaaaaataatacatggaaatggttctggaatctcattaagggggagcaaaacacaaatggcccagctaagaaacccattgtaaaaaaggccctgattaagggttagtagggataagaaagtacccatataacataaaaattataaaaaaagcccgacaagattttaagtttaactttaattccaaatttaccccttttcatacccttcaccatttattcttctccgagcaaacgaaacctttcaagcaatttttcaccattgaaaaaattgttgaagctaatagactcttagttgctgcaatttcaaactctagtgaactaagttataccaaaacactcttcaataacattaaattcccataacatttcatgtataatactatgattagaggttattctcaaagtaatgaacccattgaatccattcatttgtatgttcaaatgcttcaaaagggtatttttcctgataaatttacatacccttttttaattaggtcatgatgtttgtgttcattgtttttgattggcaaaacaacttcattcccatgttttgaaatttgggttttgtttggatgtttatgttgtgaataatttgattagtatgtattccggttgtggggaattagataacgcgaggaatttgtttgaagagtgttttagtgttgttgatattgtatcatggattacattggttacagggtattcgaattcaggtggtatagat

SEQ ID NO: 109453 - DNA, 607 bp, Aquilegia coerulea
  Intron number 5 from transcript AcoGoldSmith_v1.011961m (l ocus AcoGoldSmith_v1.011961m.g) derived from phytozome v7. 0 (chr-ID scaffold_2; pos 5102236 to 5102842 reverse stran d)
agggaccacttgaagcacttcggccaaaattgcaggtaattaaaagttacatcttcccctccccttaaatcctcttcaagcacatcaaagatcaatgatggttattgatggtactgcaagtgcttatttagtaaatctaattctagctagtccttcaatgtttacaatgcaacactcaatagttagcccatgtccttgtatatctccaaatcatgtacattagtcgtacccaaatgaagatgagtcaggttgacagtctcatcttggttatcagcttatggtaaataatatttgtcatggagttggaggcccaactgctggctaaaagtgcctttgactgctctgattcggacatcatcatgcagatcaccaatttgtttagactaccaaaatttctgatggtagaaatataaaattgtaaagagaaaaacatatgaacttaaaaactgaatttgttcacacctttcagctgaataaagatacatgtatgctttaaatctcattgcactatggaagtacaagaaacttgttttcgccgatttgatgacttcatattttttgtatcttactagcccacaccacataatcaagcacgatccaggcgatc

SEQ ID NO: 109454 - DNA, 915 bp, Aquilegia coerulea
  Intron number 2 from transcript AcoGoldSmith_v1.005381m (l ocus AcoGoldSmith_v1.005381m.g) derived from phytozome v7. 0 (chr-ID scaffold_2; pos 7521094 to 7522008 reverse stran d)
cagcaccagctggaactccagtgatccccgcatttgtatgtttttcttttatcatacactttgttgtatagttctgcttatagattcttgttttgtgaaattactcatcataatcaactgtatacattatttctttgattatgtactttatagatgatctttgttccgtgtataaagagttcaatttactctaatacctaaactggctacttgcactctcttagattcaataataagatggtaatgaagcaaaaaaagatacaaaatgataaagctcaaataatcaactttcaatgtttagaaatccagatgtgatagttatatgtgttactcttcatgcaaaagttgtttttgaaatggctgaattagttgcatgaatgagaatgataaagttgtgatcagtttgtttaggccaacaaatggatcaacttactatatactctactaagtatattatccttggggcctatattttgtccataacaagtctgatatcaccaatgagatttgaccaattggtgtaattttagaattgatcacttgataaggcagagtaatggaattgttttctaattttatttatttggtcagtaagctgttcaaacaatgcttagctcgtacaaactgattttttcttttcttttatgattatggtgttttagcaaaatgattaaggattaatcagatcatctgtaaagctaagtttaagtagttgtgtatactttgttagtgctgggaatttttatttatatatatatatatatatatatatatatatatatatatatatatatatatatatatatatattatattggtcaggtactcaggtgtaaatgatgataatgatggggtgttttgcttatttgtttcttttcagccactgaaaaggcgtcctcggcgtaatcgcaggtc

SEQ ID NO: 109455 - DNA, 635 bp, Aquilegia coerulea
  Intron number 4 from transcript AcoGoldSmith_v1.006783m (l ocus AcoGoldSmith_v1.006783m.g) derived from phytozome v7. 0 (chr-ID scaffold_2; pos 329205 to 329839 reverse strand)
acaaggttactgaaatatatttttatgtcataatgtatagtcagtccaattataactcctacgtgatttctgcgcagtcttacttctggatggattttctttggagccttagaatgaattctaaatcatctgccagctccgttggagccatcttgatattgcgccaaattagcaacattttgtttgttttgataaaactaatgttaaggtaatttgagggcttaaggtaatttgagggctgtggttgtcttacgacatggtctcactaatttaaatttatatcaaagaatattcaaatccaatcgaatttggcttccagttcacaactgcggaagtttgtcttttagaacatttgtagatttttctaaagagatattggtggtgcaacctcctgtcatgagggccgaatgccttgaaacatcttagttttagttcaactcgtaataaagtgttcgccaaattgcagtataccaagcagaatccttgatatcataacctgccctgaaaaaaaactaaatttcattaactgcctaccaggcttggtttttcttctatcagctaatgaatatgatatacaactgttttaattgtaacaaaattgcagggtttagttcgagctgttggcgtgagcaact

SEQ ID NO: 109456 - DNA, 531 bp, Aquilegia coerulea
  Intron number 1 from transcript AcoGoldSmith_v1.007415m (l ocus AcoGoldSmith_v1.007415m.g) derived from phytozome v7. 0 (chr-ID scaffold_13; pos 965728 to 966258)
aagtctcttgtcgccggaggagtcgccggaggattgtgagtttgtttacctattcaagttttttgtttaatttgttttctttgatcgacgattcaatttttcttgtttaagttttgatcttgtttgaatgatttggatatttcaaatttgttgttttagattgaatgcttgattaattgcccacttttgtaatcaaagatgttcccttttttttttttctgatttatttcattttgttaaaccctagctagggtttaagaattttacacttttagttttttactgtacaatttgttttgaagtcttgatttttgagtattgacaatgattcgtttggtttaattgtctggaatcctgaagataaactgtatctatgaattgattttgtggcttcactttacaatcggatagtctcactctattctgtaaattcagtgtaacttgaattgatgaataagcttgctgcttctgaatttgttgcaattttcttttgcagatcccgtactgctgttgctccattggaacgattga

SEQ ID NO: 109457 - DNA, 527 bp, Aquilegia coerulea
  Intron number 1 from transcript AcoGoldSmith_v1.008637m (l ocus AcoGoldSmith_v1.007768m.g) derived from phytozome v7. 0 (chr-ID scaffold_13; pos 5102832 to 5103358 reverse stra nd)
tctacagttctaaaagcttagctcacaacattcaggtaagctaactcattacataacttgggtttaagtttattttcatttctcatggattaatctattaaagttctttcttttaagttttagcaacatttcttatgtgagataactaaaccttaaaccccccacttgaaaattttgaattttttttggttcaaggttacaaaatgttgcatttcatttgtaccaattatatataaagatatgatttttgatttgtagttaagttgatttcaagattttgtgattttgttagctatttcaaaaattaattaattaattgatacaagctatcatcttcttatatatataggttgaagcttgaaatgggtgacattaccactactagtaactggtcaaaccttcctgcagttcttttatggaatattaaggatagattgaatatgcttgatactcatcgtgttgcttttgtttgcaaagattggaaatgtgcgtctcaaagttacccatccaaagttgttccttttctc

SEQ ID NO: 109458 - DNA, 704 bp, Aquilegia coerulea
  Intron number 1 from transcript AcoGoldSmith_v1.002735m (l ocus AcoGoldSmith_v1.002735m.g) derived from phytozome v7. 0 (chr-ID scaffold_2; pos 1290627 to 1291330)
acacaaaggtgaacatttctgtttctttcttattctccttaaattgctggcctaatgtcttttcaagaatcaacaggtagaatgataatgtggcaacattttcattatcaagcaactacttatcgcatagaattcgtgtccaaacttagctgatgatttctcagataaaagatactcacaaatgagaaacgctgttttgaattccatttaatgctattgtagtagcaacatgtttgctcatacagctacttagcaagtggctagtcctagagtaaagagagcctctcattgttcatggaataaatgattcagatgttctttttagcaaacggtgggtagtttagtcaatttgtataagcacatactaaaaaggggaaaactcttggtctatagaacaacatatttataataagaatattgagaaaatgacaaaaatattcttgagaaacaatcaggggtgcccacttgacaatgatgattctagttatacaactgttggtcaggtttccatctctaaccgttataaagttatatctacaaaccaccaccacataccatatgaggttattttgacccttctgggtagtagaaaaaatccactaataataaaacacaaaaggataaagaaacatacctattataatttcttctttgttttaagtacatatgtttacttttggttcatcacaggcattccaagctgc

SEQ ID NO: 109459 - DNA, 663 bp, Aquilegia coerulea
  Intron number 1 from transcript AcoGoldSmith_v1.003501m (l ocus AcoGoldSmith_v1.003501m.g) derived from phytozome v7. 0 (chr-ID scaffold_34; pos 842997 to 843659 reverse strand )
ccatcaaaggaactacttcaatcactcgatctgaggtcagtttctctctctttgaattcaatttcctttgtttttactttctttaaagtgatataatgcaataggttttgcaatagttgcaaatgtgctacaagtgatagtttgtaattagtaattttcttcgacaattgcactatagacctagttacatttgtgaaatgctttgacatagtacagtagttcttgtttagaaatgtggctggaaatgagcatatgaattgacttttggttgagtagaatgtatagagaggcgaagaggcatctcttgcttggattttgagattattttagtttaagtataatgtgagtgtttgatgcgtatacattggcctaatatagaaccagggacaaactttaggagagggagagaagagttgaggaagggagaaaatgggttggagataggtgagttgagaagaatgatcaagtgaaagaaaaggggacggacacacaccttttttttttttttttttatttattttgccagtaactctaaatggtctcttaaagtcggtcgattactttttttttgaattttttgatttgatgagtgcatcaaatttatatttctctaataagtttcttctgactctttgatttaatgtttaaagcagattagtgttg

SEQ ID NO: 109460 - DNA, 598 bp, Aquilegia coerulea
  Intron number 1 from transcript AcoGoldSmith_v1.006097m (l ocus AcoGoldSmith_v1.005426m.g) derived from phytozome v7. 0 (chr-ID scaffold_2; pos 9328554 to 9329151)
aaggttggggtgccgtgatcgcgaaaacagtaagtttttctttcttttctagtgatatttggtttctttgagctttaaatgttatcaaatcggttaattgagaatcgttttagtgtagttactctgttttgatcatttttatttttatttttcttctttatagattctgtgaatctggtttagaatagttactacttatgtcattttcataaagatcttcaatcgttttcttaatagattctctttgtataatttttaagtgaatagattagtacaattaagtatctggattggatattcttttgttcttgctttgttcaattaatcttatcagaagttggggttctcagattcagtaacaaaaagtttagtttcgaattttttttcttgtctgattctacaaagcagccggctagagttagatagcttagctattcaatttctgcttgggctaaatcaaatcgtcattatattttgtagttaatcaaaactcaaaagtatatactttctcttatttgtaatacatgctaaaatctatggatttgacatattcgattgtgatttttcaaggtgtcattggaggctgataaagttgtaa

SEQ ID NO: 109461 - DNA, 409 bp, Aquilegia coerulea
  Intron number 1 from transcript AcoGoldSmith_v1.010665m (l ocus AcoGoldSmith_v1.010665m.g) derived from phytozome v7. 0 (chr-ID scaffold_83; pos 467303 to 467711)
tccttggttgctacgtatcggcattggtatcaaaggttggtggaattattttttttcttaccttttgattgatattgtacaatagggtgaagtaattcatgcatttagtgagtagctattgttttgtaaatgctaccctcccatttataatacaagaacttgaggaccaaggaagagcgctgataattcagacaacttagtgaatgcatgggggattggggaaacaacttattcatcaaatactgactccatagcgttgaccataatcttgacctcattttgtttatatttaaatgctaactcgtactttattttgcacaattgctttacaaattgaaaacattaatccttcctttgctgctgacttactgatgtatctctttttacaaccctgtttttaggggaagac

SEQ ID NO: 109462 - DNA, 477 bp, Aquilegia coerulea
  Intron number 1 from transcript AcoGoldSmith_v1.002485m (l ocus AcoGoldSmith_v1.001762m.g) derived from phytozome v7. 0 (chr-ID scaffold_3; pos 1850409 to 1850885)
cacacaacaacaacaaaaacagaataattctaaaggttttttgaaaccagatcttgttttctttctttttgaattctctttctgttcttcgatttgtatttatttatcatagtttcaatttgattcaaactttattttgttttcttcacacatcggacagagatttagatttgtttttcatgatttcaattttgattaattcttagattttcatttcaattttgtgaaatttagatttgtgttttttcttgttttgatcggtgttttgttacatttttaagttggatctatgattgattcctgttgaaaaaaaattcgaatttatttattacattttttattatcatttgcatccatgattctgttgaaatggttttctttgcttatattttttttccccagaatattttataattttttatttttattttgtgaattacagaaatttcacagaagagacagtagagattaaattta

SEQ ID NO: 109463 - DNA, 861 bp, Aquilegia coerulea
  Intron number 1 from transcript AcoGoldSmith_v1.025015m (l ocus AcoGoldSmith_v1.025015m.g) derived from phytozome v7. 0 (chr-ID scaffold_16; pos 3313575 to 3314435)
gcacaagttacaaagttaaagccaattactacaaagatattctctcatcattacctcattaaatgctaggaatggagttacattgtaagcctataaatatgaaggcaagctactcattctaggcatgttctcatctctgctcagatggtctgatggcctaatgctcccaacacgacctcatggtgaggtctcaatatcaacgacctccccaatctctcatgatgagacctcacctctcaggtctcatctctctcttgagctctctccattatcgagctcccattttgtatcaccactactataataaagatcattctctctctccgtggatgtaggcacaattgccgaaccacgtatacaatggtgttcacgtctctactttattattattattcatatcatttactcatcatcattcattaatgtattgaccaacctcacaaatatggttaatacactcactcctctctctctctctcactgtcactctcttccctctaaattctcactcagttcttctagttaaaacttacaagtaagtggctttgacttctccatgtatttactgtttattttccttaaatttggggtttttatgtataattcatattaggtgtatattttttggtctttaggtttcaaggattttgtttagtcttagggttttaattttggggttatcttgttttgttgattgaggagatgggcttagcatttgatttgttttttgtttgatttctttgttcaggtttataacttacagaacccttgaaacaaagattgttaatattcttgttttaagaagagaaatagaaatggtgaatagaagaaattggtcccaacttcctcaagaacccttgg

SEQ ID NO: 109464 - DNA, 436 bp, Aquilegia coerulea
  Intron number 1 from transcript AcoGoldSmith_v1.013067m (l ocus AcoGoldSmith_v1.013067m.g) derived from phytozome v7. 0 (chr-ID scaffold_13; pos 4668363 to 4668798)
gctcgcaataatatcttgcatttgcgagccaacaaaacaaataattcaccaaaatgaatagtcatgataatgtttttgctttgtcgaaataaagtcattcaacaaagagaaagaccaaagggaaaggatacaaccttagatttcagggtatcccatgtctccccctgagaagaaaaaactctctcacatttcattacactggcagagtggcagcaatcttgattttccaaacaacctctatacaaaacttaaaaaacccagcccagaatcaaatttaagttaataaggcccataaaaaagcccaatatgaagtctattgggcccaaaagacaagagcaagttgatctgataacatatctctgcaatctgcaacaactaatcacttcacctgaacacagaaatcaaaaactcatggaagaagaaaaaccatcgaaac

SEQ ID NO: 109465 - DNA, 823 bp, Aquilegia coerulea
  Intron number 4 from transcript AcoGoldSmith_v1.006756m (l ocus AcoGoldSmith_v1.006756m.g) derived from phytozome v7. 0 (chr-ID scaffold_26; pos 361283 to 362105)
agattggagatatagttgttggacgagttattgaggtaagggaatgatgttaagcttatacgagttgttcaatttcattagacaggatttttggaattttttataccagtttgaagtgctttgctatagtgttcgtgtaacatgaatggcgttgctgatattaagtttaacattttttattactaaatcctttgtcaccatataaatgagtttctcaaatctcattgtttatatgtggcacggtttacaagttcttatttgtttccaatattctaggagtggtggaatgggatgatggtatgatatatctagattttcgttgatcggttctgtttttatagttttgtcagttcctttctgatcttcatgaacagtgggttgtattcaccatcttattcttaaagtcccactgcttttattgaatgtaaactgaaatgcatttctctttccaactcctaaacctgtagtaactatattatatgtatatttctgttttatacatgtttgttatgcatacaatttatgattaaacttgcagtgatgttctgttgtcatatatatatatatatagtttatatacttagatcacagatggacatttgactctatatatctgtaaaatgtgatgtgcatgctttagctcaagataatattgtgtcatttgccagtttagaaatttacagaactgaatagattaacattattgtcttcttggagggtctttgcctttgtatgattttagtttcaaatttagctcacttattcgttttggtttttgttgtgtgtagattgttccaaagcgttggagaatagagataaattt

SEQ ID NO: 109466 - DNA, 815 bp, Aquilegia coerulea
  Intron number 3 from transcript AcoGoldSmith_v1.008640m (l ocus AcoGoldSmith_v1.008568m.g) derived from phytozome v7. 0 (chr-ID scaffold_22; pos 1565150 to 1565964 reverse stra nd)
gactcgccagaaggtaagtacactcgtatatcagattcaattactctaaagtttttcagttatcctttattggatgcttggatacttaaattagctagtttgaacttttgaaacactcataatagaggccaaacaagatgagtgtaagtcaggtcgatctttccaatttttgggctcattttgaaaatttggtgctctaatgtctttcactttgtttttatgtctttgtggttgccgtcctcgtagatgttacttatgattttacggtttctggaaaacatagttgctttcaaccattgtccacacaattatttatttgaaggaagcccttcaattgattaatcacactagaaaccactggacatgaaagtaaatgtctatgataaatgggaggagccacgagaactccttccacaaaagtaaatgtttgctttcctgcttgctcaattgttcccagtttcatactgggtctcaaataggcttgtatcccaactttgttgctagaagaagactaaatagtatgtttgaagtgatgctcttttgcattctaatgtctcaaagtgattaattttcaactttaccctgcctcacatactttgatcttgctcactccctcggctatgagtccaatctggttgttgtctatcaaggtgtttgctaggcctattgtatagacaagctgagttagtatgttaaaaatgtgtgcttttgttcatcccaatgtgaaagtgctttttataatgcatttcatttctataagctgttcaacacggtctttgatggttgcgagtgtccaattgcaggtattccatctc

SEQ ID NO: 109467 - DNA, 870 bp, Aquilegia coerulea
  Intron number 2 from transcript AcoGoldSmith_v1.008640m (l ocus AcoGoldSmith_v1.008568m.g) derived from phytozome v7. 0 (chr-ID scaffold_22; pos 1565994 to 1566863 reverse stra nd)
gtgtaattgctgcattcgcatttactcaggttcattattttctctctctcaccattttgttgatttcctttggaattcgaatatctatttctgattttcttttttgcatttgattttgataatgatggaactaattgcaaatgcagcttcttctttgtgttattccttttgatttgtttcttcaatttcatgaatttgctttaataacaaataatgcaccttttcactttatctgcaattctgcatataatagtattgattacaacgacaataaaatgaagattgcttgcaatagaatttagaccgctagttggatttttccatgtaataagtgaaaagagaaataacttttgagttgaactcttagcattttaatttcttattttgtctatcttagtcctaattgcaaagagtatttttgttctgtctgattatactggccttttgtttgttttcgactaatgcttatgcagttttatacattgaaaagtatgaattactgacaaatgtaacaatgtttacttgtaaaagtagaattcaaaccaagttgttttttaggcttatgaaaatcatttcaaaatcaggcatcattttttttctattaaaatttattaaagatcagccaagacttgttttcttacaaaacgaaatgtgaaaaactgagaggcttctttccaatgccattgaagaaattggattgtatgtgagtaaatatgtagacattcttccagtgtttgaagcttactactgaatgcttatgaaattagctttgatagtttgaagctttaaagtattgaaaagtctgtttgtatcttacttaaaattctgagtgacatatggttatatttcattgttgcattagttgatagg

SEQ ID NO: 109468 - DNA, 739 bp, Aquilegia coerulea
  Intron number 1 from transcript AcoGoldSmith_v1.013682m (l ocus AcoGoldSmith_v1.013682m.g) derived from phytozome v7. 0 (chr-ID scaffold_2; pos 2846633 to 2847371 reverse stran d)
attgattatttaagtaagaatttgaattttttttttatgatatttatattgcatgttatatcatgatacacattaagatgatagatttatattgttatatatctgaaataagttttttatatttaatttaataccttgcatagttgcatgtaagcatgtatatatataaaccttttttttttttttttataaatcgaagtagtattccattaatattgaaagttcgagaagatcgagcttaccaatttccgttggatgaaagaggaaccagctcactaaatctggctcatggcctgacttaaaacacaacgtgacctcctgttactttttgagtttttttttcttctgcaggcccttcacagcttaattataaaccgtgtcttcagccattcaactggctaaactgcatcatatattcatatagttttcatctatagacttcactatagttaagtatttattatttagttttgttcttgatatgcagctattatatatttatatatagtctgatcatcttactctacaatctacatgcatgcttgaggacatagatttatgttttcaaaaccaaaggaattgaaccaaatcccctaaatatgattgtagttttatagctatatgcgttgtttagaatttgcagaactgttgtttgaaaattttctaatgtatgacatatatctctctaaagaatgtatacacttgatgtatgtctgcagctaacaaagtgggccttgga

SEQ ID NO: 109469 - DNA, 868 bp, Aquilegia coerulea
  Intron number 2 from transcript AcoGoldSmith_v1.024522m (l ocus AcoGoldSmith_v1.024522m.g) derived from phytozome v7. 0 (chr-ID scaffold_25; pos 1957262 to 1958129 reverse stra nd)
tctaaagagcatcataaatgtaagatccttcttcttttctggtgtcatttaatttaatttgttgtgttttagagaattttcttgagtgctaataagctgtaaagtttgaaattaattaagaaatgcatacaccctcaaaattcattttatatcactttcaagatttaatactttatccaacggagttttatacatgataacagtatcaaaagaaataaaaacctctatggatagttttgaattgtagctgtttaagaaaacaagaaaaccataggttaaactgatttaattagtagccatcatatagtttgactaggagatcaagctatttaatcaggttcactatactcaacactcagaagcagttgttctgcactcagcataagctgacattgacataaaggcctcatggttgtggcagagtgacacataatcagcactgtctgtcttaagttgagtgactccacttcttgaatatacttctcgaatatatagaatgacgtgtctgctttgcattatgtatttgtaggactcacaatctcataggctcctgtaatggatgaacatagttctaactattatcaaagccttttctgtgtactaagatacttctagacataaggctaaatgaatttatgatcatcatcatttgtgaaaaatgttacagctgcaaaaaattggtttattattcaatgtactgtttggcatatctccttttatgattgccctctccaaatatgcagtcattttcattaaatattttgtgcagtgtgttgctacttatatgccaatctttcatgcaaaagagtatttcgactaaaacaactcattcaaacttttggctcctaaaagcttaataattttgcag

SEQ ID NO: 109470 - DNA, 1005 bp, Aquilegia coerulea
  Intron number 1 from transcript AcoGoldSmith_v1.005096m (l ocus AcoGoldSmith_v1.005096m.g) derived from phytozome v7. 0 (chr-ID scaffold_2; pos 2780537 to 2781541 reverse stran d)
ctttgccaattcaggtaccatttcttcaagtttttacatttaactgatatatatatatagctagtatctaatgttgaatgtacagcgtgataattagaaaatgtgagacaatgtaatcaccatggacctacatcatgttagaaataaatcagaattacaacaactttacagtgaggaattgtcactaattaatgaaagttaaacaagatatgagtacttgaactagctgttctatatgtttttggtaaagacttcccaattgttctattgtgttccataaaatgttaacaacaacaatatacttagtagctggttaattattattgatatctgaaagagcatatacacactactttaaatactgcaacacttcaatccataacactttctatctatagaaggatcagattcttttaataaagagggctgaacaaacaactaataaaacaggcaatggatgcaaatacacccatgtgatgatcaactcaaataataatgatttcccttttggcttcatgattttaataaatgacattaatagactagtacctagaataatgctcttctaatctagcctcatttcacctactctacatcttacaatcaggttccatggcactgtgagtctgtgcgtgacacctgcatataagtacattacaagcataaagtgatcaataaaaaagacagattaatggactatcttgctacctttgatatgatcccacatttgataagatgaaaactttagtaaaaggctatattcatattacagtagatactaaagctttaaggatgcgctccatattgtgtgtactaatgtactatgcaagttacaatcatcctctcctaaatgtatatcattgtacaaaaaacttcggtagttttttttttatcaaaaaactttggtagttatttgtgaatttaatagcaaatctgattcaaaacagattatttttaccattttgtcgtccaaactaattaagtttgttgctcaaagtgcaggaa

SEQ ID NO: 109471 - DNA, 721 bp, Aquilegia coerulea
  Intron number 1 from transcript AcoGoldSmith_v1.026584m (l ocus AcoGoldSmith_v1.026584m.g) derived from phytozome v7. 0 (chr-ID scaffold_57; pos 125889 to 126609)
ggttggacagaatttgcagtcacagctcgaaataggtaatgacatcacacttttttttttatctatattcaataataatacattcataattttatttttagagtcgataataaaaatctatatggttttcggaaaatgcaaattagattttttttatttaaaaatcaatttcaatagattcttatatttaaacagatctgattagtaaagcaatgtgccgggtgtgatgggttggcgaacatgatcatgggcctactgctttctaggatttgggccggctgttggtttcactacctcttgaagcccggcccttctagatcacttaatcatatggttccatcacttgtagtcccacttctgagggcccaaattttttaactttgctttttgaaaaaaaaaaaagaaaaaaaaatatgattagaaaagaaaattggatgaaagtttttttttttttttttactgtacttagtttcttcaacaagatatcgtaatatacgattttttttactatggtttgaactttgaagaacaaagttagaagatgcagagtcctgtatttgcatagctcatcttccagatacaatgtagaagtgtagacatatacatagcaatatatcactatatatggcatgaacttacatattttggaacattcagttttattttactaatttttttttatggattttgttatttatcatcaggagaagatacttgtgtg

SEQ ID NO: 109472 - DNA, 909 bp, Aquilegia coerulea
  Intron number 1 from transcript AcoGoldSmith_v1.019795m (l ocus AcoGoldSmith_v1.019795m.g) derived from phytozome v7. 0 (chr-ID scaffold_93; pos 133497 to 134405 reverse strand )
gataggaccaggtgaggttgttttattctattgatctgtcagtattatattgcgtctatattgatctgtcaatattatttgtatttgatgtggttaatatgttcagtgttttttttttgttatttattgtttgattttctcttaatcaataatgaattaggacctttttgcattatatatataaatttatatgtaatgtaaggaccttttttaatatgaatttatatgtaaggtcctggttcagtatgaattgttggttaattttgaatgtcgcatggttgaactccttgtgagggtactacaattgttcttgtgaagccattcctccttgtggctgatattctccaggtcactgaggatgtactcctatagcatcactcaaaggatgtactctaccactaccaaaatgtccctggggagatacatctccaggaattggtccaccacagcctccctattgttgttgaggtctccatccacctcttctaacttgtggtactccccctctctgtcgaagggttggaaattgctgctgcattaggggtcaatattccttttgttatttatttaatattgtatagctttgaaaaatatctgaattggtgttttaattttgttgttgttattttgtttgtatattttttttataaaataaatgattcaatgggtccaaacaggtctaaacatttaaaagtttagataatttgtttcatatcatgtagttcagatttagatatggtttatttatttggattgcatgtttggttagtaggtagacatattggaatgatgtagttcatttcatctgtaatttattttttatttatgaataaaatttctaaatttggtttcattatggaaaatgtctttgcagattattgactcgggatagatttagttttttgccag

SEQ ID NO: 109473 - DNA, 831 bp, Aquilegia coerulea
  Intron number 1 from transcript AcoGoldSmith_v1.024159m (l ocus AcoGoldSmith_v1.024159m.g) derived from phytozome v7. 0 (chr-ID scaffold_36; pos 288000 to 288830 reverse strand )
tcagctggtttagttcaccgaaagttccatacgcggtgggttggtaaaaggtaatggtattttggtacataattaaacactgaattagacaacttcaaactagacatggtgatgtaaatctatggcaggtaaattaaactacttcttggactaaccagtctaatactgactgtttagtttaatggactttaagtttaaagcatatcatttttttttgttaattcttattattattgttgcaatgttgctgcttaacagcattcagcaatatgatcacctctcttgaacaagaaaagaaaattttatttatgtttcctcaataaaaacaatcaaatcatagtctggtcccacaatcaatttatattaatcttaagtctcgaaacgacaatgatcgcccgtcatcactggcgtttcatttcgatgaattagccgtctctatgaacgcctttttgttgttgaccagctgactattagaaatttagaacagtacagtaatgtatacccagtgccagcaaaatataattagtatgttccttcattcaatgacaacattaggtgagtggaagatactgagataaagagaaagacagaatcatggctggagaaggagaggagattagaactcttgaaagaacaccaacatgggctgttgctattgtttgtttgattttaattataatatctactctcattgaacatgccatccactttttaactaaggtatgcaaacatcactgaaatgcaaactagtgtaatactactggtgataatcatttggtttggcttctttttccagtttttcagaaagaggaggaagtctctttatcaagc

SEQ ID NO: 109474 - DNA, 944 bp, Aquilegia coerulea
  Intron number 1 from transcript AcoGoldSmith_v1.014044m (l ocus AcoGoldSmith_v1.014044m.g) derived from phytozome v7. 0 (chr-ID scaffold_57; pos 762791 to 763734)
agaaacaattttggtgttcggagtgtcgtcaggtcagatcaagctactcatggatgaattactcccaactagaaatatagagctgcaccaggagatattcagcttttgaaacaaaaagcaaacaaaagatatagaagtattgggagttgggactttaaaaggaattgcgttttcattgtgaagcaaataccccccaacagccagaaatcgcaatcccttttaaagtcccaactcccaatactattatatagcttttgtttgtttttaatctaaaaatcacggtcggtgttgtactgtttgcacctcaagttgaaggaaactctaaacctttgaacccacatttagaggtctgtttccgtatttagccggcctttaggtcctggaataataaaatggaaaaccaatacttacttcagaggaacatggttgatgattccaaacaataataacactactattaaaacaccacatcatcatcaacaacaacaatttctcaatcaagtatctgaaatcattgctttggtgagcatatgtgatttggggggaagtgtatcatgcagcacctgaggcttgtcagcgattctcttcactaattttgaatgaagcttccagttgtatttgtgcttagctacgtaaatataattgttgtggatgaaactttgagggtaattttatccttcgcattgccctgagctactgctgaatgtttgcttgtttgaacagcatgaatgctgcttagacttttctgtttaatagggaatagtttataaataatccgagattttctgtagatgcttacgtttaaatcaatttatccgagatattgtttgtcccagtcttacttttggtactacaatatatatatatatatatactctattaactgacagagatcagtcttacttttagcagagggaaggctgcagacggcacaacacttgcgc

SEQ ID NO: 109475 - DNA, 844 bp, Aquilegia coerulea
  Intron number 1 from transcript AcoGoldSmith_v1.013883m (l ocus AcoGoldSmith_v1.013883m.g) derived from phytozome v7. 0 (chr-ID scaffold_1506; pos 144 to 987)
tattcactaaaacaggtcagattattgtaaaagaacctaaatacgctgattcgctgaatgcttggttttgaattgctttatccacttattagtgaagaggccatgctcaccatcttgactctatctataaagttcctgacttactgtcgactgcacacattgttttctcattgttccatcccatccgtcacggtaaagattttgtttaggcatttcgttgcgcaatagctagaccttagtacttcagctcaatcttttaccaattcttaaactgatttagttggaagtatttctatgcattttagcttaattagtgaagagaaaatgtaactttacgtttgatattccatctgggtttttctctttcggcattagttttctttaggtgcgcgcatattgtttggagtgagcatcaggaaaactttgatatgtgtttttttttcttttttatagccttttggatcactgatggaaagatcactagttcactactatattaccaaagaaaaatccagattttttagatcactagttcactactattcctgtcatttttagattggataaaatgcaaagagcctttgctgtaacataaccatcttaaatgacatttcaagtgtctaacacctgaacaaaactagcctttgaatatctttgtgccccccatgtagtattcgtgtaactttcttagtaatctttatcacaagtccacatatgtttcatctcattcgtccttttgatgatttagcattttggtttctcagttatgacttgtaccctctgagactaaattaaatactttttggcagatagtttggtacaccaagaaacagggcattctgaa

SEQ ID NO: 109476 - DNA, 901 bp, Aquilegia coerulea
  Intron number 1 from transcript AcoGoldSmith_v1.003667m (l ocus AcoGoldSmith_v1.003667m.g) derived from phytozome v7. 0 (chr-ID scaffold_2; pos 9606148 to 9607048 reverse stran d)
ttcaggtaattttatctatataatgataagttattagtagctttagatcttgtttttgcactagattctaaggattttttggtagtttggattatgatttagctaataaatgatttgaaaagtttgaataatcatatatgttgtggatctaattgatcattatttcgtgaggattagaaatgatttttcattaagttgttgccttgttggttaatttcaagtaagaactatttagctgaaaagttagttatgaagaagaagatgatgatgaaactgaattattgaacatttttatgtcagaaaagaaagaaagaaaaaagtttgttctgctttaggtggttagtattgattgagtgacacttaaaagattgaatgattgattattcaaatgtttaggaccacaccacagatgtttcgcattcaaatggcttggcgtgattgatgtttgtccccaaataactgttgtatgtattcactcttttatggaagtttggtagaaattaaagatagaaggtttataattgaaaagtctttccataagtaatcaaatgaaatctggcagaagaaagtaaatgttcacatattctgcaatctccatagctattatttatgcgatgatcttgtggattaagttggaccaagacagcaaactgtagcatacgataattgaggatctacctaaacgataaattgtgaatcattgaattgttagctcctgactttatgtgctaagaattacatagaatgtgactgaaattaaataatgcttaacgtattataaaagtacatggagcatcaatttgtcttaaattttgatgattttgaattcgagaaagtggcccaattctttacttctttggatatagaatcaaggtgaacggacaagtttgagtactgttgc

SEQ ID NO: 109477 - DNA, 920 bp, Aquilegia coerulea
  Intron number 1 from transcript AcoGoldSmith_v1.012059m (l ocus AcoGoldSmith_v1.012059m.g) derived from phytozome v7. 0 (chr-ID scaffold_3; pos 467964 to 468883 reverse strand)
aaatcgcaaagtctctgttgaatcatctgctcggcgtaagttgttcatccaatcttaattttctagaattacttgtttaacttaagtttttatttctcaatttcaaaaatctcaaaatcgcaaaagtacttgtttaacttaggtttataaggagattgaagatggattaaatgaaaatagaaagtactcaatattcatgcccttgtaagtgcttgaaactttgtaacttaccttaactgtaatgcgggatacttttcggattgatctacaaagaaacaagtgattaactgtgtaaacttcaatcattttcttaaacagttgattcttagcttcagtacacttctgaagttttatagtcattaggtggatcaataccgtgcaggtgtacattccatcttgactcacaaacatgtgtgtgcacgctggagtgtcttatagatatgaaaatggatgtcaccattatcatttcgaaacaaacaattttaacacgatttaaccaacatcactaaataagtttacactttacatactactaattacattcaaattccaaataaaagcaaaacagaaattacctttgccaggaatgtacacaaccccactttcactactgaaatccacattaggattatacccttgaattaattgaggatcaatactagcatttgcagcaatagaatctaaagtctcaccaggaagaagagggtaagtaataaccaaaccaaatctttagaaacatctttatccccacaagaacaattaacagtaacattcaactgggcattttgatctagtattctatctgcaggataactatttgaatgtttgtaaccaattaacttgttaccactttccattcccataatgcttcttcttggtattcaggtcgtttacgttctcgctttagtttcattccagcg

SEQ ID NO: 109478 - DNA, 771 bp, Aquilegia coerulea
  Intron number 1 from transcript AcoGoldSmith_v1.009233m (l ocus AcoGoldSmith_v1.009226m.g) derived from phytozome v7. 0 (chr-ID scaffold_13; pos 5276433 to 5277203)
aagaaggagcgcatcgaacctcgtcttctcgttcggtaagttaaccagtttccatggttatcgattgattttacatgcagaaatcaaaatttccattaaccatttcatgtctttgcaattctttctttcgatttaatagttaatttaaaaaatttcccaaaaaaaaaaaaaaaaaaaccctaattgtttattcactcagtaattagggtttttgcaacaagtgctagaacagatatctgaatcttactttgtttggtttctgattgattagtttcagtcgtagaaatgtagaaacaacttattgttaaaaaacccttttcacagttgaaatgtttatagaactgttgttcttatcagaactgtttgaagacaaacaaaaccataattaggaaccaaaataagtgaagaatttaatttagggaattaaagatataatgataacgttgttgagttcagtatacctttaatctataagaaggatatagaaatgaaagtttataacagttgttaatattaaacactactatgtggaaagagggattgaatggatttttctataaaacttactcaatgatactctgagtactgagtaaaaaatatgaagttgaaaattcatctcaggttacacatcatgaaatgggtaaggtcggaagaattatctgttggggacttgggcagattgggggagtactaattaaatttattgtttacgacaacaatactatgtttattgcagagtgagcttcaggctgcacgaggcacaggataaga

SEQ ID NO: 109479 - DNA, 917 bp, Aquilegia coerulea
  Intron number 1 from transcript AcoGoldSmith_v1.008091m (l ocus AcoGoldSmith_v1.008091m.g) derived from phytozome v7. 0 (chr-ID scaffold_2; pos 10349966 to 10350882 reverse str and)
gtgttgaggtatattttcttataatcctattaatacctaattttcaatttttcattttattttggtgtttattgtttttcaattttttttttatgcaactaattacagatgtaaacaagtaggaaaaattataccttttcgttggtactagtcccattttctcactcactttccagattgatttgatagaattatacagccttttattatggtttttaatagctactgtgttttaatatggtaattatgtggtgaacacaatttaggggtaatatgaaaagaaattgaaagactttgcagaatcatatttaatttattggaatagttgagacatatcatgcaattcacgaaagttaatacagcttagctcagtaactatgagtaaatctgtaaacgcattgcatcgattgtgtgtattgtaaaatgcacagtcgcaaactacaaactggaacttaaataatcagtaggactaatttacatgtgactatagaaactttcagtttgcaaaatgccttgtaattatttaattataaaatcagtattcacgaacctgtttatttggtcagactgctgtatttgtttgaattttttttttttttttttttttttttgcaataaacactaccttttttctttgaaaatatttggcaattgaaacgatttatggtaatatatagttagttttaatggtgaacaaatcatagattatttagccatttttaattgaactaagcgtcaaggatatttttgggtagaaatgcaaacttaattgataaagaatctttgaaagcaagatttggccagatttgcaggattattgagttggtctgttatatcaaaatggccagaaaactggaaatggataccgtttcttatatgggaatgcttttatttgataggtggcagacattaaaagg

SEQ ID NO: 109480 - DNA, 338 bp, Aquilegia coerulea
  Intron number 1 from transcript AcoGoldSmith_v1.026070m (l ocus AcoGoldSmith_v1.026070m.g) derived from phytozome v7. 0 (chr-ID scaffold_22; pos 4145953 to 4146290 reverse stra nd)
gctatgtcttttgttactaatactatattattatttatggaaatacttctcaattttttcctcacggtggctgtttcttcaatttcaaaatatttgctgaattgctgtaacaacttaaaatgaatattgctgtgtattcctatattatatatttcttcagaatcaataaaaaatatgagtactataactgatgtagttttaggggacagtggtttccttgttatgttcttgggtggtttatgctctttgatttgctttttttttagccaaatcatgtggatattgatttcctaccatatgcaggcattaattgcattgaagaagggttctcagttact

SEQ ID NO: 109481 - DNA, 651 bp, Aquilegia coerulea
  Intron number 3 from transcript AcoGoldSmith_v1.010038m (l ocus AcoGoldSmith_v1.010038m.g) derived from phytozome v7. 0 (chr-ID scaffold_7; pos 5532900 to 5533550)
cttacaacctcaaggagcttgatatgtaaacttcttacttgaccaatttctttttgtaattttattgaaaaaaagctggttattatctgattttgagtaaatctttttttggataaaaagcgcaattaattataataatttaattgttttttacttttttaatgagttacgaatttggaattattgtgaagagttgacctaggcagtagtgtttgattgtctcgtgtgttggtggagtttagcttattttattgatgctgaggtgagatttgtacctatatacagttagagcgcaatacttaagagaccatttgaacaaaagaaaatcacaattcacaaacgatagaatatcataacagactttgatcatcatgatcgataacatcaaaactcaattagactataaggacatccaatttccattttgatgacaaatgtgtaacgttaatacttaatagttttgagctttgaatagtttaaaatagagaaataaaagccctggagcatatattgaaaactattatatgtcaaagaggtgcactcatatagtgttatcttttagttacatgttcaattgtgtattgatttagcatcgaatatttaagctcattctaagtagttttattttgatagttcaaggagttgttgggg

SEQ ID NO: 109482 - DNA, 261 bp, Aquilegia coerulea
  Intron number 1 from transcript AcoGoldSmith_v1.001903m (l ocus AcoGoldSmith_v1.001903m.g) derived from phytozome v7. 0 (chr-ID scaffold_35; pos 2185916 to 2186176)
tttccattttcgtccttacagaaattggcaaagtggttagtattattgtgcattattcttattcttcttattatgaatcagaatgagtttttgaatgaatgtgctagttctttgatactgtatatttgtttttatttttcttatacagttatactgacttgacttgttttcttgtcttgattgctctgttggtgatgattttttctggtttctgtcatgatctcagatcctagtggtaagttcatcttccttccttgcttt

SEQ ID NO: 109483 - DNA, 824 bp, Aquilegia coerulea
  Intron number 1 from transcript AcoGoldSmith_v1.004125m (l ocus AcoGoldSmith_v1.002496m.g) derived from phytozome v7. 0 (chr-ID scaffold_2; pos 109465 to 110288 reverse strand)
aactgtattggaaagtgctgcaagccggaaacaaagtaagcttaattgtttatttaatgttttttttttttgttttttttttatatatacatttgataagattttggtactgggttttttaatatttgtttcattatcaattacagttattgaaatttaacaaatattttgagctaaactttgcttgaaaaatattagatttgattaaatttcatgaattctcattctcattattgtcttgtatgtgcattgtttgatgaaacatttggagaccattaaaatgtttctgaatagtctgtaatctcgtgtacgggttacttgctatgagatgttttttttcttttatgacgggcaaaacaaatggtcgtattagatcatccagagcgattcccctaagtgccggagtgcagaaggtccaattctagacagtggaaatgatagaaatccgaacttgtacccaggtgctttcttcctcaaaaattctgcgatttctctccatccacacttcctagcatatgacatggaaaagaatcttccgtatctgcctccctgtcagatgacagtctttgatcctaacctgctcctagaaaagtgggatggggatttgaatgttcatttggggatagttttttttttccctagaaaatatttatgaaggcttccaaatggccaatattgagcataggctccttccagttggtttgttgcacacatgcataatagaatgttcagtgaaaatttcactcaaatatcgatgaaatgggattgctgtctgttttgtatgagcaggaactgaatccatcttcttgttttggcataaagct

SEQ ID NO: 109484 - DNA, 500 bp, Aquilegia coerulea
  Intron number 2 from transcript AcoGoldSmith_v1.014736m (l ocus AcoGoldSmith_v1.014736m.g) derived from phytozome v7. 0 (chr-ID scaffold_83; pos 777770 to 778269)
ctaccatcaaaaacttggaggtaaatctttcttcttcttcttattattttcaactcaaaacccgtaattttttttttttgtgtttagtacataaatttgaatgtcatggaattatgaatttatgattcttttggggtcagctaggttttatctcttaatttagttcatgaaattgtctagtaagagcaattgctatagcacttgaatttgagttatatagttccttaaagaaagttagtcctgatgaatgtgattgagaaaacagattttggttgccgagaatcaccctctgctcgttacttagcatcatggactcatggtgcaaaagaacgagagcaaactggaactgtatctgtttgcaatgatcctgtttcaagaacaatacaatgaccattatttgtttataaaattgcaacttttctttgcgttatctctgctaaattggtaggatatatgtggatgcagtacgatacaaaatatttctacgaacttgggaacaa

SEQ ID NO: 109485 - DNA, 829 bp, Aquilegia coerulea
  Intron number 1 from transcript AcoGoldSmith_v1.005140m (l ocus AcoGoldSmith_v1.005140m.g) derived from phytozome v7. 0 (chr-ID scaffold_2; pos 4048988 to 4049816)
tttggcttaatataccacctaatcttaaatttgctgtaagtttctacttaaataagcaattttgtagttattttgtttgaattactgggttttttttttggaagaatttgattgttttctttgttttttgagttaaattggtgagtttggttgttaaagatttgatttttattcagaattgggtttgaatttgtgatttttcatgttgaaggaactaggttttgaaaatctgtctttgtggatgatttagatgttgtttagagaattggaatttgctttctgtgaaatgtgtgtgagaatggataatcaagattatttttttagttaataattagaactgaatttggtttactgtgtcatgttgcataactttatcgttatgtgatggtttagaagttaggggtttagtcaaatggtgtgattatgaactctgagtagagtttatcgacaagtttttgagttatctgctggtaggagctttgtaaatttctggtatgagtctcacttgtaatggagagaggcaatgagtctggcttgcaatcttgtacaataggcaaacacgtatgttccatcaaccacgttcctagtgaatttgactggtgttttagaaacatggcgcttcttaatcatatgcccttttgcatatgattagtcattagtataatgatcgagtctgtagaatgtagtcttggtacttggcatgttggcctcctttcgtgttgaaggcagtgaaaattttcttatgaatattaattaatttttttagttggaccctttgcataagtatatgatcattgatctatgtatcattttcaggttttcacctggt

SEQ ID NO: 109486 - DNA, 1012 bp, Aquilegia coerulea
  Intron number 1 from transcript AcoGoldSmith_v1.009997m (l ocus AcoGoldSmith_v1.009997m.g) derived from phytozome v7. 0 (chr-ID scaffold_2; pos 1027524 to 1028535 reverse stran d)
gaagttgctgctaaatctgaggtgtggggtctttcatttttcttttttcttgtttaaatttgggttttttctttgattggaactgatttcaagtttgggttttcaatggttttgcttcatgagtccaattttatagaaaagtttgtatttttttgctatggtttggttgatttggttctgacacttgttttttctaaaaaaaaaatgtattctcaattggttcatttttatatgtttcatggaaattttatactatgtttttcatattgatccagcaattcattgaatttaataattagatctcagtggactttgaggaattatgaatattgtactggttaaatgtgttaagatcatatcaatgaataataagcttaattacttattatttcaatttacggctaagaggtgtgctaagggctgattgtgtaatacatagtcatatatgagtaaattatcagtatatacaatactcttgtttgtcaatcttatcaaatttaagaaaaacatgaagtatgtgaaaagaaaaaatgagttagaagaacgaaactgtaccttaaatcgcaatgtcactatcacgcaatgatgtctggagttgtgactgaaacaatattcttattagagatgtttaagggttaagaattaagatggtgattgatctccatgtatttggtgataatatctcctccatagatatataaaatggaaagtggcaatcatggcatggaaatgtgactaactagatagtagaaaggctcggaacgtatctgggagatggatgaagtaaacttcttatgtagctcttaaaataacggtaagagtaagttactgtaaattctgcatttgttggaatttctaaactgatattggtagagatttactctctgacagtctgactaaaccaagtacttttgtggacacccttttagacttttatcttcttgttttaactctcatatattgtctactcattgtaggactacaaagaagctgcaagaatcagagacacgtt

SEQ ID NO: 109487 - DNA, 458 bp, Aquilegia coerulea
  Intron number 2 from transcript AcoGoldSmith_v1.007948m (l ocus AcoGoldSmith_v1.007948m.g) derived from phytozome v7. 0 (chr-ID scaffold_13; pos 4304209 to 4304666)
cccttactcttatacgcgagagagctaaacttaaggtataataaatcttctcttgcttggaactaaactatagagtttcaattcagtcagatatgtattgtattgatgaaaataagatgtgtacagcttaattggtttttttgtttttccaatgcttatgttctatgtcatatatctatttcaagttttatctgattttgataggactgaaaataggatttgtaccacttcttaatttgcatttctattgctattcatccaagagatactctgtcctgccctgcactgccgtgaacttttatttaatttgattaagtgcaagttcatgtgaattattttttggattttccatttatctttactgtttatatagtctttcttctcttgtataagatgcttagggaaacactcttttttccttagggagagcttgttcgcgctttaggaggtgctgtagc

SEQ ID NO: 109488 - DNA, 600 bp, Aquilegia coerulea
  Intron number 1 from transcript AcoGoldSmith_v1.003274m (l ocus AcoGoldSmith_v1.003274m.g) derived from phytozome v7. 0 (chr-ID scaffold_2; pos 2652264 to 2652863)
tagagaaaagattccttgtgttgttagctaaggaggtaagattggttacattcatgcttttgttgttaattatagagtatttgctttgccattcacattcttttcttttgaaatgggttttgagttttagtggtttaactttctctttttgtgattgtcatcaactttattagtaatgcttgataataatgttgtttgtttgagtcaagaagattaaaggggtgctttgctttcatattttttgagaagttgagtttgtgtagaaaactgaaggttttcattaatttttttttttattttaatatttttcattactgggttttcagttgcaaatttattttctgggttctgttttacctttttttggccttaaaattttgttgggttgcttttgtttttgcttagtttgggtgtgtggaagtggtgattgagttttaggattgagattttttaatttgctgcttttcttaatacattgtcttctttggagtgatttgagatttgggttgtgtggagatttgggttttctagtgtgtggcatttgattgattctgtgggttttcagtaaagcaagtgaagaacaaggaggaggagaaacag

SEQ ID NO: 109489 - DNA, 575 bp, Aquilegia coerulea
  Intron number 1 from transcript AcoGoldSmith_v1.005149m (l ocus AcoGoldSmith_v1.005149m.g) derived from phytozome v7. 0 (chr-ID scaffold_35; pos 473665 to 474239)
gattaaaacggtaagttcatgagatcctctctacttctctgactactttttcctgcccttttttggtctgttctatttatcataaagtttcacaattttgtttccttttagattttcagtttctcgtgattcttttgtctagttttctttgtttaacaatggtgatttgatttgactttatcttcattctgggttctattcaatccaagcaattgctactttaattttggtattgggtggggatatgttttgcatgttatgcatttaattgaatttgaaattgagaggaaaaaaaaaaaaacaaaaaactgaagacttaaatgggattaatggaatttgttcatttgttcttgaaatctgaattttcttgtttgctccgccttattcaaattgtttttttttttttaaaaaaagtaagtattttgaagtgtgaagtggatttgtttaagggttgttggcttggcttgttggtagtttgtttatgatatatttgattcttgttgtctgatagatctcatcctctgcattttatttttgcagaaatttagttgttgtggagcttctattctggtagc

SEQ ID NO: 109490 - DNA, 923 bp, Aquilegia coerulea
  Intron number 3 from transcript AcoGoldSmith_v1.018766m (l ocus AcoGoldSmith_v1.018766m.g) derived from phytozome v7. 0 (chr-ID scaffold_34; pos 1696057 to 1696979 reverse stra nd)
gaaagtggacatagcgagatattacatcctgggaggtcattagagcattcccaatagtaaaagggttttaagggtgtcacataggagagagagaaaaggttttagcataaaatttatgttaaaagtgattagcacttttagagttaccaatggttggttttaaaacaagggttaaaatttaaggtttcacttttcccaaaaaatatagtgtacattgtgatgaaatctaatttttaattaataatatggtcctatgtggcacttttaactccttggcaaatttgccaaggagataaaagtgttttgcttgaaaagtgtgttaaaacccactattgacaagagttttttactaaaagttgctaaaagtgatttaaaacctaccattgggaatgctcttagggcatctctaatggttcatcaaatctatcatcaaattcaaatttgatgaaaaagtgaaaaaaactccatctaatggaccatcaaaagtttttcaaatttgatattttagcaaaaatcatcaaaagttcatcaaatttgatgaaattttgatgaaaagcttaaggtttgatactgggtgaggcgggcaagagaagaccgcttcacttaaagcggctaatgaagtgccgcttaaagtggcacttcaaagcccgctttaactaagtggcacttggacaaccccattaactaagtgaagcgggtgttgggggcccgctttagtgaagcggtcatccattagccgctttagttgatgaaccattagatagagcacattttcaaagcaaaattttcatcaaactatcatcaaatatgtatacgtggaccatcaaatttgcccaaccattagagatgcccttagggggtcagtttccaagtttgagaaatgatagatggatggatggaggttgagtttggagaattctata

SEQ ID NO: 109491 - DNA, 813 bp, Aquilegia coerulea
  Intron number 1 from transcript AcoGoldSmith_v1.005722m (l ocus AcoGoldSmith_v1.005722m.g) derived from phytozome v7. 0 (chr-ID scaffold_3; pos 10387069 to 10387881 reverse str and)
cagcctctattggcgtccaacaagactctcgagaggttttattctcttaattcttctttaatttattgaaaatttacctgttttattctccaagattaaatcttttttgatttttattagatatagtgtaatatttagtgagaaagtttggttttggggtgaagggtatgtatctgccatttcaggtgtttcagctcaattaaagttcaattctcaattacccatgttctacattgggcaattattgtgggtttttattgttgttgccaaaattagttctagtattgaaattaaaatttatgaaaaaaatatattcaaattaacttatttattgaaatagagttaaatcataagtgcccatttggtatttttgagttttctggtgggtttagatttatcatttcggggttttggagatgaaacttaacatcctagtagtagtaggtgatgatcataattaattcaaaacagctttagtctacagatcaatgcagatgaaatcaaactgtaaccgttttaagacactgtatgagaatttaatgggttagggctgtattactgaagaatactagcgcatgtcacacacgggcttgctttatagagtaatgagtcatggagcttgatttcccttcattatcctgtataagtagacttcatagattaacctcatggatctacaagctcaggatgttttttaattcgattaaacttaaatgtagaggatcgtctagtaagagtctaggattttcttaactagccatcttagtttaagaagtgtgaaatgttcttcatatgcaggctggtaagcaggtc

SEQ ID NO: 109492 - DNA, 808 bp, Aquilegia coerulea
  Intron number 1 from transcript AcoGoldSmith_v1.007571m (l ocus AcoGoldSmith_v1.007490m.g) derived from phytozome v7. 0 (chr-ID scaffold_68; pos 976529 to 977336)
ctgaaggtaatgactttctatcttttgaataatttttgttcagctagctcttttgcacaatcttaaagctttatgcctttatattgtaagcagttggtctaatttgtcgaaaagtttcttggagaaaaagcatagtgttttaccaattattaatatatcttgggccttatgattaaggtgaattaattaatctaggattaatcagaaatactggttcttagatttcataggtaagaaagctcttagatttcataggtaaattagatttggattaattttgtcaacttgttagagctattattgaacttatcttcaactatctcgttcattcattccaattgctattgaaaattggattgtgtcaataatattgaattgaagaactctggatttataagaaagacatagattaaggttttcttaggaatttaattggattttgatttagttcgtgccttcgtggattttaattgtagctcaggtgttaatatgttcaacttaaatattgatacttgctgagttgttttgacattaaagatgcttgaagagtaaaagcaattccggttttggtgaaaagattcagatatcccttttaggccttttttttctacgaataaaaaactgaataattttgctagacatgaacatcaatttgctcatggatctgtgagtaactctttattcccctgtcatcgattgttgaattttcttcagtcagctcatcattctttagtgctatcgttccttatattctttctaatgcatggttgcagctggcattcagcagcagcaggagaaagccagcaat

SEQ ID NO: 109493 - DNA, 669 bp, Aquilegia coerulea
  Intron number 1 from transcript AcoGoldSmith_v1.008812m (l ocus AcoGoldSmith_v1.008812m.g) derived from phytozome v7. 0 (chr-ID scaffold_13; pos 1730218 to 1730886)
gaactggtcttactgccattgttacaggtataaactagcttttgccttcagggcacttgtaagtgttttgttctctttgttcactatcgaccataagaagaatgaatcttattagtttcttcttaattcttatccatcatctttgtgattgattcattattatcagaaaaagatcaacgatatttagttcaatacttacttttatacagttaggatctttcattgaattaagttacgagtatgtgattttgtggtttcttttgaaacctgatgactgtaatttggaaacatttgaccataaattagagtcattcaagggggttttgaaatcttggactagatcaagtcaatgttactgcagtatatataacctttgttttttaatttaatgaaaattattatttcaatatttcatggatgcctttgttgcctttacataattccaaaatcactgagttggtcaaacaatattttcaagtgaattaaaactttcggattcacttttctcccattttatgtgctagtgtggtacaatgatatttatgtttcttattatatagaacaagtttaaaatggagagcattttgtacaagctctaatgtctaaatttggttattgtttttctcactgaaaggagcatctggtggtattggtgctgagacctcacgt

SEQ ID NO: 109494 - DNA, 443 bp, Aquilegia coerulea
  Intron number 1 from transcript AcoGoldSmith_v1.009471m (l ocus AcoGoldSmith_v1.009471m.g) derived from phytozome v7. 0 (chr-ID scaffold_36; pos 648598 to 649040)
ttgtcttcaatcgcatcattggtgtcaaggatagggtataaataatccttattttcactttgaatttgtttgatctttcaaagggtttttgtcatattgatagatcgatagatctattaaatatgtttttgagtttggtgaaattttgttgaaaaagtatatagtactttttggggattttgggttttagggtttttagtgcatttgagattttttgaagacttaagtgtttgtaagtagaactagaagctatggagagtaataattagtgggaaatttagggaaaatgattttgttaaataagtggatgctggatgttttacctagaatttgagttttatcttttggcaaatgcagcctgtagattgtttgtttgttttgatgatgtgtagtgttctcataaaggtttcgttgtacaggtttatccagaaggaacacatttc

SEQ ID NO: 109495 - DNA, 482 bp, Aquilegia coerulea
  Intron number 2 from transcript AcoGoldSmith_v1.006303m (l ocus AcoGoldSmith_v1.006286m.g) derived from phytozome v7. 0 (chr-ID scaffold_55; pos 491065 to 491546 reverse strand )
aaggtacatatacaaatatttgatactataagctatactatatattatctttcactattgataagaaagcttaaagcaatggatttggttcgtccagtctctcccaatatttaagaagtatcatgcttcaatttttccatccgtacattaacatagtttgtttagcattattctttagtggcagtttaatggttaatagtgcatgcatacgtgaactgaataagatgtaaaaagtactattggcaaaaagcactttggaatatactgaactactacctgtcagatcaaataacttgaattacaaaagagtagccaagtatgagagctctttggaatgttgtgaatttactcatctgccttttgctacttgagaaaggatttactagtgaaactttgttttgatatgcgtctagtacttctgtttgaaatatgagtgattctaatcaaacttattgtaaatgcagaggtttctggaatcagta

SEQ ID NO: 109496 - DNA, 403 bp, Aquilegia coerulea
  Intron number 1 from transcript AcoGoldSmith_v1.010212m (l ocus AcoGoldSmith_v1.010212m.g) derived from phytozome v7. 0 (chr-ID scaffold_58; pos 1039555 to 1039957 reverse stra nd)
tttctaatctctcgtatgttctctttccctttctctagcattactttttatttaatttaaaccttggggttggttttgtttcacccctttttagataccaactagataacaatctcatttttatattgaaatttgcactaatgtaggtgaaatttgaatacctatttagccaaaacagctgaattgtagatgtatgtgagatttgaatattagttatatgtagattttagacattgaacacattatggtttcttcttcttatcaagtgatttgctctttttacgtacattgtgtgttttctgtgtgtgtttttcccataaacaccagttggaaattggtggaagaactaggtaaaccatcttcaatggacagtaatgtttgcattttttttttttacaggaaa

SEQ ID NO: 109497 - DNA, 944 bp, Aquilegia coerulea
  Intron number 1 from transcript AcoGoldSmith_v1.015582m (l ocus AcoGoldSmith_v1.015582m.g) derived from phytozome v7. 0 (chr-ID scaffold_8; pos 3630432 to 3631375 reverse stran d)
cttgaagaaagtatctgtttcaaatagggctttttagactttggtcataggttaatggctttaattaggctttggtcataaaaaaggcgtttatgaggctttggtcacgatttctggttgactcacgatcttaattaaaaaccgaccgagttgagtctaaaaatttaacaaagtaccattattacccctacttgaaaacacttgtagtaaaagagtttcaaaaatttcatttcttcctaaaaacaagaatttcatcctatcaaaattaagtaaattacaacaaattaacatcttaaaaataaaaatttacatttatggtgtaaatttctttaattgtgaaagcaaagttgaaagtattgtgtaattataggtttgtatcattgtatggtgttaaaataaattctcttttacaagttttaattcaaaatttgtattccaatcaacatctaaacatttgtaatttagacaacaacaaatataagaaaatgttgatttaactaatccaaccaaattaggagatatttttcactctaaataaatgttgtataagaaatttctcaatcatggttttattctcctaaagtgttgctccttagcatatctcaaggtactttaatggctgcaaattatgaccaaaacctaatttttctatttacagatatgcttcttctctaattttctatttacaatatgtctaaaactctaaaaaatgacgtaatttaaaactcacgcgtttttcacgtgagggtatttttgttatttttgaaaaatatcaaacctaattgagtctgactcacaattcgtgaccaaagcctaataaacgtcttttttatgaccaaaacctaattagggccattaacctatgaccaaagtctaaaaagccctttcaaatattgttcttgaaaaagaagattgttgtgcatcattatgaaagaaaagagctt

SEQ ID NO: 109498 - DNA, 338 bp, Aquilegia coerulea
  Intron number 1 from transcript AcoGoldSmith_v1.005810m (l ocus AcoGoldSmith_v1.005796m.g) derived from phytozome v7. 0 (chr-ID scaffold_93; pos 56035 to 56372)
ggtaattctccttttcttttcttttgatttgatcttattttaattgagtttgtttattcattaattatttatttactctagcatttgagtgtatatgaatgtgatttgatttttttttaaatacccttttcattcaattcaatttagttggttggaaaaaagtgggagatttctttcttacaacaaaacatgatgaaaagtaaacaaaaccctgatctaagcatttagagaaacaacttttttttttttttgatatcttgactagtcataattaaattattatatcgtttttttgttatatagagaggctcaattgaggaagttgttcttcgttttga

SEQ ID NO: 109499 - DNA, 458 bp, Aquilegia coerulea
  Intron number 1 from transcript AcoGoldSmith_v1.007142m (l ocus AcoGoldSmith_v1.007142m.g) derived from phytozome v7. 0 (chr-ID scaffold_13; pos 3709111 to 3709568)
actgtttctttctccaaagtgttcacaggtttgtctttcaacttcactcactctattactcattagcaaaccctactaattaatctatatttctctctaattactttgcagttgataaaatgtttaattttgttttttgttttttaatctaaatccttatacttcttcccttttcaagtcaaatttgaatgtgtattttaattagaaaacccttagaaatcaaacccaattttttctttttttttttaattatatttgaaatataatttctttataaataggctaaattggtttaaataattgaacgtttagggtgattttgggtttaatattcatttattttgattgatatcaagtaatgttagaaatcctatttcatcaattatattgaacttgttctgattaatgttcttcactttgcagcagaagtagccccgatttctcgacttatctttgga

SEQ ID NO: 109500 - DNA, 1033 bp, Aquilegia coerulea
  Intron number 2 from transcript AcoGoldSmith_v1.007142m (l ocus AcoGoldSmith_v1.007142m.g) derived from phytozome v7. 0 (chr-ID scaffold_13; pos 3709860 to 3710892)
cttccgacctctgctggttcgaactactacaagaggttagttctttctgcatttagtgtttttggggtttttttagtgtttcaattattagaggactaccatttcttttgtagttattatgaatgatttctaatcatgttgtaagattttgtcgttttcattgccactgtgtcatggtctctttctaaataaatgtgtatatatgatatgtgagtctacctcataacattagggacttacatcatgccctggcccctggaggcatggacagaaaagttcaaaactttggggttgaatcttgcatgctcgatatgttcagagcacatttagttttcattgtatgagtctagtttcagtggtttataagacggatagacctagcagttttagacaatgaaaaaacaccatctttttttgcaataaatttgttagcttaatgagaaatggctgtacttttaaattatgacgtgactaccacttttggaggctaatatatctgatttcgataaaagcatgatgctcaaactgatttccctagtaatgaacacgtattgccaaatgatcctgatgtggatgataacctattaacctccattaatatttgtcgttcatctgattcatcaagccacaaataacttgagtaacttgagaaattccttgaacaccattggactaaaaagagtaatctattttctctggatctcatgtccttatttcctttccagtctgagaatgttgtaatggctttagtgaaaacattacgcagaattaagaatggataacaagtggattttcaaagatatatttgaatttacaaagaaaacactgacattgaagaacgctcgcactaaacttcagataatatatgttccattaatttttgaagctgtgtacgtgtgtggaactgaactgtctgtatgttatcagcatatatattatggctgttccattttatttcttacttttgatattgtagctactacaagcttgtttaccagtagttaacggttttctattgctaatagcaggagaa

SEQ ID NO: 109501 - DNA, 615 bp, Aquilegia coerulea
  Intron number 1 from transcript AcoGoldSmith_v1.011685m (l ocus AcoGoldSmith_v1.011685m.g) derived from phytozome v7. 0 (chr-ID scaffold_34; pos 511815 to 512429 reverse strand )
actctgctgcaccgtaagtttctctttccttgttattttctctagatcttgtagatttttatcatttctgcaacatttccttgtttagtttgaacttgcatgtttgattttgatgtttattttgtttgttatctctccgatcatgtttatttttcggtttcttcaataatattactagatctttgttctctgttcatttttcatctggttttactctgaatttcacttatattgttcttagtactccgatcgtagttattcttgttttcatttactccgattcttcactccgattaacttgtagtgttatatatcctttttttgtcatttatgctcgattaaattatttgttttctgttgaaccttcatcttccaaagatcttgagataatcttgtttattaacggtaaagctacaaagttaacagatctgtttggatgttttgatattttgaaatatttaattgtaaaagttcttaatggatttctctgttttaacctggtgttcattaagataaagcaatttttggtatcatgtgaccttgtgttgactactggttttccatttcttaactaaaccagggttaaatctgaaggaactggttctattctgtgtc

SEQ ID NO: 109502 - DNA, 197 bp, Aquilegia coerulea
  Intron number 3 from transcript AcoGoldSmith_v1.004166m (l ocus AcoGoldSmith_v1.004166m.g) derived from phytozome v7. 0 (chr-ID scaffold_13; pos 2413671 to 2413867 reverse stra nd)
gaaaaacttacttctaaagtcgtcaccagctgcaggtaatcttcatcttcatgttcaacagaacaataatttgaatttctttgcaatgtattgaattgaatacaattagcttgaatttgtttgttttttcgataatgtgatgcaattcatttattgatttcataggatttaaaagcagtagagtaaagtgttcaact

SEQ ID NO: 109503 - DNA, 799 bp, Aquilegia coerulea
  Intron number 1 from transcript AcoGoldSmith_v1.010970m (l ocus AcoGoldSmith_v1.010970m.g) derived from phytozome v7. 0 (chr-ID scaffold_13; pos 5615077 to 5615875 reverse stra nd)
ctcagcaacttataagaaaggtaaatttctgaaacacccaactttttttttcattgttatttgtttgaatatttgcttctaaattgcaacttttgaatgcccatttataattgctttagtggttattaagaaaagaagtatgagtgaattgtatatagccaattcaaatttgttttccaaaaggttttgagaaagagttacaatcatttatttcattttgttatcagtgttgcgctaactagttgtgtgaagtgtttgtttttgggtctgaatggatttatttatcaaacacagacaaaggcaagtatatatcatgttctcctaaaatgaatatacatgcgcaatattttgtatgttttcacctagcttttaaatctgaaaccaatatacatattagtatctatggttgtcgtgtttcaatagtttggcttagtgttctaaacaaattttgtatttcaaatgctttatatacaaccaaaataatgctaccagtactagactacacgcattatttgattaaattttacctttcatgctatcattttggagtgagatttattgccggatgccaggacctgatccactataactcccttgaaacccaagattttaaaacagacatttgctgggcaatctttaactttgttataacttatatataagtgcacggtgtgcaccaaaagaaccaaatttatcacatgtcttttgttgttgttgtttcaacttcaagaacttgactatctgcactatcttttctgtctatgaattacgatgtaggtgattggttggagactggtgg

SEQ ID NO: 109504 - DNA, 865 bp, Aquilegia coerulea
  Intron number 1 from transcript AcoGoldSmith_v1.004375m (l ocus AcoGoldSmith_v1.002055m.g) derived from phytozome v7. 0 (chr-ID scaffold_7; pos 4361204 to 4362068 reverse stran d)
aacagaaggcagacatcagagtggagtgtttgcaggtatgactaaataaagtaatactacttccacatctccccacctccccaaataccatacttactctctctctctctctctctctctctctctctctctctctctctttctatttgtttttattttctttcaatctgatcaaatctccataattatttccctttgtttctttaattcccaatctcaaaatctcaaaatctcaaaacaccccctttgatctaaaccaccaccaccaccacccccaccccaaagtttttcatgggtgataatcaatctaatatgtctgaagatgaagataaaccatcagatctcactattattactactactacagccactactagtggtggtggttgtagtggtggggaagtttcaaataagactagaaatatagtgagtggtggttatagtggagattgtagttcactttatcctgatcaagtacttgaaaacgttttagaaaacgtactagtttttctcacatcacgtaaagatcgtaactcagcttcacttgtatgtaaatcatggtatagaactgaagcattaactcggtctgatctatttattggtaattgttatgctgtttcacctcaccgagttattcaacgatttagaaaagttcaatctttagtactgaaagggaaaccaaggtttgctgattttgatttagtaccagttgattggggtgctcattttaatccatgggtaaatactatgagtattgcttatccttctttggaaaagatttgtttgaagaggatgtgggttactaatgatgatttgattcgtcttgcaagcgcgtttccggggtttaaggaacttgttctggttt

SEQ ID NO: 109505 - DNA, 845 bp, Aquilegia coerulea
  Intron number 1 from transcript AcoGoldSmith_v1.001863m (l ocus AcoGoldSmith_v1.001863m.g) derived from phytozome v7. 0 (chr-ID scaffold_13; pos 3538554 to 3539398)
gttctcatttcaaatccgattttcatcgtttcaatgtaacacctctttcttacttattattcacttttatttatttatttaggttgattcagaactgaaatagttttacttcactttgtaactatgtacaactagtttttgaaagcaatagattgggaacactttgagaaaagttgttaagtaatcgattattagtacaacttgtatatgaattgtaagagtaaattttttgaaaggttttgatattgaggtgatgaggaaataacacaaaattttgaatttttcattttaaagactcgctttcctcttaatctcttatgattggatgttacgtttagggacatcgtattttggtttgaaacaattagatgtgacttgtaaaaaaagtcccgtgacttcactaaggagtaaggactgtcaagcagaacattaaggacagtgtctcaattgggaaactcttgtccttatcttggtattcccttctgagataagtgcatagcatttcagtctgcgatcagtgattgaactctttaatatgagactgcctgtctggatgaagaagaactattcgaaagggtcgacatctttccagtcaaagatggtttcgtcatgacccccacacccaactagattatttctatttagtagtgggattagtggcagcccaaaaagatggggctatatgggatcacctgcatggatagttcttgatcatggaatttcattttaagttataaaattgtcaaagtgtgtatatttgtattttgcttttacttagtatagattgttaatatttcttgttttttttaggtaaagttgaaaattgctggaaaaagtagtattaa

SEQ ID NO: 109506 - DNA, 773 bp, Aquilegia coerulea
  Intron number 1 from transcript AcoGoldSmith_v1.021439m (l ocus AcoGoldSmith_v1.021439m.g) derived from phytozome v7. 0 (chr-ID scaffold_121; pos 100308 to 101080 reverse stran d)
cttacaaccaaacactatagtatatataaattaagaagattttgtgtttatgttttttttgtattaacaaatatttcatagatcttgttatagatttgattacaaatttgccttcatttaatttccatttatatgtatacatattatctgattaaagtcttggtcatattgtttggaggatgcatgccttactctatatggcaagttggaagccggtctttcacctttgtacatactattagaaatgtaaagttgatacttttttttttctttttgatttcaaaaaatagataatttaatttttttttggtcttacaaaaattaaaattatcagactcttgatcagatcaataaaatatttttgattttatcaactccttttttagaaaatggagaatcaatacttaaagaaattttatatgttaaaaggtatggatttaggtgacaagaagaaaaattagaagaataaatcatggctaagttggtaatttggagatccatacatgttgaaattatgaaagggggaaaattttggcgattcaatgtttggttggtgatctttgtcccacaacttcaaatcagataacataatgacgtagattctaattttggggtttaggagggaccaaaaatcaaataccattattaatattatttgtttagttagtaaattttaaaggagattctattaataataattccaagattgtgatcattaatcatattctatattttcagttactactgctactggaggtagggaagctctgagc

SEQ ID NO: 109507 - DNA, 491 bp, Aquilegia coerulea
  Intron number 2 from transcript AcoGoldSmith_v1.011929m (l ocus AcoGoldSmith_v1.011929m.g) derived from phytozome v7. 0 (chr-ID scaffold_2; pos 5485973 to 5486463)
tattaattttcatactttgaattacccttcatcgagtaagtactgcatttcttcttcacttgcatggtatattgttgaatgtaatgacatactgacattaatgtgactcaactggttgttaataatctccaagtcaaatggtgttgtatttttcaatcaagtacatgattaaagatttttcatttagttttcttcaattactagttttgtattaggattataattgattctgtttatctatttacatgagtgcattcatattatttgttgaaatgcctagatgagttagtactctagttagaactcaaatctaaagctaaccccacccctcccccatccccacacacacaacagacacactctcactatacaattgggacccttacctcgttacaatttacaatttaaaagaattcctaatctcacagaaaatgacgaagattatttttaatccccctctaatccttgttaaatttgttttatcaaacagt

SEQ ID NO: 109508 - DNA, 835 bp, Aquilegia coerulea
  Intron number 5 from transcript AcoGoldSmith_v1.011929m (l ocus AcoGoldSmith_v1.011929m.g) derived from phytozome v7. 0 (chr-ID scaffold_2; pos 5488583 to 5489417)
ttaaagccagatcttgtacgagccattggagaaaggtatactgctatacctctcattgtcatcttttaaagctctttgatcttattagagttattaatttattgaaaatgatgtatttggagttcattgccttgaaagggaaatttttgtgtagtttgataacatacattgtcaaaagaaaaaaacttaaccattttgaactatgaacaatttactaaggagcttgagatattctatttgtagaatttgtactgctcctgaatagaaggaacacacaaattaggtattactaggagacatgcataggctcatttttatcctctgcccttgtcctcttcgctgtaagatcttttatatgttgagtaaactagaagagcaacttcagtttgatatatatatatatatatagcgtattagattagtcctagaggtgaccgaattaattgccttatctagtcaagtggcgtcttatgaacactttgattaggatgaaaaactattcatcataatgaggtgatgatgatgaagctttaggtgggggcaagatcaagtaatcaacttgctcacaagaggaaacaggaacaaatatataacattttcccatcaaaagtttcctatgccaattgaaacacagctatatattttctttactgaatgcagtaatgcttgttcaaacacattttcttttctgttggtgaaatctagactctgatagtttgactgtctaggctctttttattaaccagttgagattaagctaagttgagtattgaaattaattgaattttaatgtcttgcagggacaagctttttcaacaacaaaaaatatagtatc

SEQ ID NO: 109509 - DNA, 542 bp, Aquilegia coerulea
  Intron number 1 from transcript AcoGoldSmith_v1.019121m (l ocus AcoGoldSmith_v1.019121m.g) derived from phytozome v7. 0 (chr-ID scaffold_7; pos 6870887 to 6871428 reverse stran d)
tccgtgattcttacatctgggtaagtatatttcatattcttattgaattgcttttttggtccactcaaattggaaaaattattaacatgctcaaataatcaaggatgttcacttacagctactagattgttttttcttttcctctattattcttttaggttagaaactttaaggtgaccagaaagtgaatttatacccatacgcctatttactcttggaacagtctagatgttgagcttgtctgcttgaattaacattttagtatttgataatttactttaatggtgatctacctggctctgtaatagttctctcttttgcaactgagattagagaactttcttgctcttagatgatttgtttgctaattcatcgtaaagagacagatgaattatttgctaattgataaaaacagtagacaattctgtgcaaacttatttctttcttttctttctcttgtgtcagctcagttgcttgtagcatagagtaatgtattattcacttgcactctttactggttgtaatataggacgttgtcgcca

SEQ ID NO: 109510 - DNA, 843 bp, Aquilegia coerulea
  Intron number 3 from transcript AcoGoldSmith_v1.008466m (l ocus AcoGoldSmith_v1.008466m.g) derived from phytozome v7. 0 (chr-ID scaffold_83; pos 542819 to 543661)
gtggtcttctcaacaggtaatttcaattaacccctctttttcaattatttgtgttatctttgtagaagatttagattctgggttgttttgtcggtggaattgtaattgatttgtcatgaaatctgagttgtttgttgttctacatggaaattttgaggaaccaatgtttagttgatttcaattatctcatagtttggaatttggaaattcaatgggggttttggttatttttgtgcaaattattgagatcttaattgctcatagaaaattttagaatgaaaggttttgaaatgatgagttttgttgtttctttaagcattcttactcaaagattttacctcagctttaattacttaaacaaaagaaaaagttcttcccaaacagtttgagtatctttaactgatgagttatgagtaagggaagttaaatcagaacatgttcaattttttaaaccaaaaataggcatattattgttctaggtaggtaaatcaaatgagattaaaacggtaatgttttctgcgttacttttcaatttgttgagatccaaatgaggaggattaaaaaagacagttttctagtctgtcatgggtgaattgatattttgtgttttcaaaaatttagttttccaccgtgtcttactagtgagaaatacatttattttggggcataataaacagttaaggcctccattattggtgctcatattatgaagttttgattttatatgaataatgaagataattaaggacattattttgaatgaaaaatgtgaacaaagttcatgttgtttccttgcttttcaatatagctacaatccgttggaaaggagagaggcttgtaaag

SEQ ID NO: 109511 - DNA, 451 bp, Aquilegia coerulea
  Intron number 3 from transcript AcoGoldSmith_v1.016260m (l ocus AcoGoldSmith_v1.016260m.g) derived from phytozome v7. 0 (chr-ID scaffold_2; pos 5984190 to 5984640 reverse stran d)
ggaaagagaactgcagaactgctctgaagaaataggtactagacactattagttcttacttctcatcatacttgttttatttattagtctttactcttgaacctgataatacatcttcttctcgcctcagtaaatcattcagtataaagaagaaaaagattgacatgtttatgaaattattattgacctttcagtccccagtttagtgtttgattgctagatttaatcagttcgtatttaagcaacccttgggtagaactgtagaagcaaaagaatactatctatctattttttggataaaatttcattttactaatatcaccaaaaaacttacaaatcatttgcgtagagaaaaattgtagttgaaatgaataaaaagtctgcccggattatatccattcaaaccttttttccaggaacattgcaggatcaactaaacctgaggaacatt

SEQ ID NO: 109512 - DNA, 251 bp, Aquilegia coerulea
  Intron number 1 from transcript AcoGoldSmith_v1.016260m (l ocus AcoGoldSmith_v1.016260m.g) derived from phytozome v7. 0 (chr-ID scaffold_2; pos 5984909 to 5985159 reverse stran d)
gaggtaaggtttaatctttcttcttatttgagcaagaacaagcttccaatttgactgggcaagtcccaaacacgatagataggatcaacgcagaaacttttcttatgttagcacataactcagacaacaatttacggaattattttggatcttatattcatatgatgatttgatatgtttgagattttgcatcctatgttgctaactatcgacccttattttctttgatgtagctgagaaaagaaaaagac

SEQ ID NO: 109513 - DNA, 610 bp, Aquilegia coerulea
  Intron number 1 from transcript AcoGoldSmith_v1.001867m (l ocus AcoGoldSmith_v1.001867m.g) derived from phytozome v7. 0 (chr-ID scaffold_3; pos 6362508 to 6363117)
actaggcactaggaatttgtggattctgcttttctgtaagtctttttacttctagcttgtgatctttcattgtgagctctattttgatttagatttagtattcattagattctatatttgttaagaattctggggtttcaactttctctttatgatcatacctatctttgagaaattatcacatttttaacttgaatagtcatattaataatgttaaaatacatatttaagtaacaataataagctgtttgcatgaatttccttacttggaatttagtgtgttttttgtgtatggttaaatgcctccaaaagaagaataataacagaataggtttctccttaatgaagtgatgcctagcttttctgtttttatatgatactttgtcatttccctctccaagttttatattttgggtgaatgttgatctgcactcacctacgaatccagttgatcgctttatcattttttttttgtttgtttgttaaattcattttgagcttgctgttctatatccaattctgttcgcttcggcaattatgtagcattcgtcttaaagtgtaatttgttatgttgattttttgttgccaggtactgtaaactgttttgaga

SEQ ID NO: 109514 - DNA, 616 bp, Aquilegia coerulea
  Intron number 2 from transcript AcoGoldSmith_v1.002466m (l ocus AcoGoldSmith_v1.002466m.g) derived from phytozome v7. 0 (chr-ID scaffold_2; pos 4327494 to 4328109)
ctgtggtaagttttcgtcactaaattttgttttcttcaaactctcatcggttatccgtatagctgtttctagtaagtaactattgttctcattgctgttattgagataatttttgggtgtagtaagtttgtcactttcaaaccagtatgcacaataccgtagatatgcatttagcttaacgaaaatgacatcatgttctaagttctaactccaaacttctccacccaagacaagcaggcatgcatttctggataggtatgcagttaatgaaaaattatggggttcatacactaacaacagaagcctcctttagtgcataagattacttaataggtagacaacctattctaagcttctttggttagtcacatcaaatgataatagaatgtccttctccatgatacaaagtaactgaatcaaaactaaaactttgagcgcgcacctctctgttttcatcctctcactcaaaccactattagtattttgcagattcagtagtattttgatttatttagtaacaataagccactagaagttttcttggtataaatgtataatgaaaatattaaattgcatgtttgtaataactttctaatttctctgaagaaatcatcaa

SEQ ID NO: 109515 - DNA, 858 bp, Aquilegia coerulea
  Intron number 1 from transcript AcoGoldSmith_v1.012519m (l ocus AcoGoldSmith_v1.012519m.g) derived from phytozome v7. 0 (chr-ID scaffold_13; pos 5324213 to 5325070)
atattggaatttcaggtctatacctctacataatttagtttttgttatcagtttacagtcattacatatttgcagagtctggtttttgctgagggcattcgtaaaagttttaattttgatttctcattcttgaattttccgatgagaaaaatatggttcacaaggacttctagcctttaggatcaatcaattgtatatcatcgtgttaattcaagaatgatctttaccaagtttgtaatctcaacgaaatatcaagcagagagattgagaattaaccatgcatggagtaaactgattatacgtcgcagtcactcagctcaaaactaaccaaaataatttcttttcaacttcttgtgttatgatcaagcgtatgttgttcaatattacttttccattgtaacatatgttactggaactaaatgatttgggaccatggtggtccattggtccttatcaaggacgcaattaagaacaactcgttacgatgaattagttatgtggtgcaactacaagcatctgtttggagcaactgactatgatttcagattctttcgtgacctcaaaacgctccaatctcatcatgtgagtgaactgcaacaatgctaattaggtaggtataacctcacaacattgttgatcaacctagcttatatattcaagaaattttatagcaaacgtcgcatatgatatgagaagcagaatttcagtatattcaggtctttcagtgaaaattttggtaagattgaaaatgtgattataaagttataatacggtaaaactacttgatttatgtaattcgtgtatctatggaacgttgctaaattaaaggtgccactatgtgaaggtggtgtaacatcc

SEQ ID NO: 109516 - DNA, 789 bp, Aquilegia coerulea
  Intron number 1 from transcript AcoGoldSmith_v1.000141m (l ocus AcoGoldSmith_v1.000141m.g) derived from phytozome v7. 0 (chr-ID scaffold_3; pos 6074185 to 6074973)
cactacccatatttaggcgaggtgaggtgactactgtaaggcgtgatcgctaagctaaaaaattagagccttttagagcctaggtgctctaaggaggagcctttgacagcatggtatcccatgcaacattgggatggtcatttggggatgagtttcatagttcttacttcttacttgccatccgtgagacatatacctctatatgacttaatgatgacactcttgtttatacttggtatgttttggatgtattctccttgtattttggcttttggtgcggggttttctctccctctttattaatgtatctgactatcttactgaaaagaatagtaaggaaattcaatcccaaataggacctaggaaaaatattaggaaaatctgtccagaatatattgtaaatttagttggaaagatttggaagccttgttttctacttgatgaaagtcttgctaataaaccggcttacaaatatgttaacttgagaaactgaaccggaatccgactttaatagtaattaatccttcaacaaactgaacgtttgtttagaaaaacagcctgtatttatttattacttttatttaaagaagtttatttcaaatcaaacttcattatccataaaaaactcggatttattgactttttccttaataatgtccttttgcggttctgccatcacactacagtgcctttttaattgtttatccctggagtctggcaatttcgtaagattttctcgcttacagatatcttttcttgacatgtcatagtgtttctttttgtagaaaa

SEQ ID NO: 109517 - DNA, 720 bp, Aquilegia coerulea
  Intron number 1 from transcript AcoGoldSmith_v1.004643m (l ocus AcoGoldSmith_v1.004643m.g) derived from phytozome v7. 0 (chr-ID scaffold_7; pos 4771801 to 4772520)
tagtaagtttgcaacaacaacctcccttgcaatatgatctttttttttcttctgaataatgctttgcatgtgttttttttcttctgaaaatggtttcatacattacaagtttacaactgctatatataatcttctggaagtccatttttagaatttcaggtgccatctgaattctacacatacagaacatgttttagatgctcaacttgctacattattgtcctctctatagatgtgcagctaaatgtcaagaaattcatctgagaaatatagaaaaatagtattgaattagtatattagacatgtttaatgttttctttccccatttgttgtggaagccttaagattgaacatgcttctttcatagacaacattttgagtctcctactcatctgttatgtatcttgttttcaagccccagaccaatgttagaacttagaagtcctccttgttgtgttttggatcaaagcacattaagagtggtttcaacagttggtcccatatgtttaaaagtagtagctgggagacaaagaacaactacacttaatgccattgaaatgtccattttacaactaaaacacttgtttttttcagaattcatatactagcatttgttttgctctaattcaaagtttcttagcaagcatgccctgttattaaattcaaaagttagaattgtatttacattataattgattttttttgctctacagtctgtca

SEQ ID NO: 109518 - DNA, 478 bp, Aquilegia coerulea
  Intron number 2 from transcript AcoGoldSmith_v1.008516m (l ocus AcoGoldSmith_v1.008516m.g) derived from phytozome v7. 0 (chr-ID scaffold_3; pos 7090758 to 7091235)
ttgataattgttcaaacttactttcacagctcaaggtaactagttaacttacttcactattctattagtactcttgaagaaacaaaccctaaattaaattaaacattttcgagttaattcgcacactttgatttgaaatttagttaattagtttagtatgtataaccaaacactaaccatcataaatattcctgatttaatgaaattgcggtaggtagttcacgcttgttaaatggtgatatacattgaggatccatgaattaggtcagctaaagtattataatatcaaattttttgaaaaactcaatttgaatcagacacagatagaataaacacgttaacaaatctcgtcagcattgtattttattgcagtgtgctgctagtgtattagtgtatatgttagtgactcaattcatgataagttatattaattaatatacattaagggaactactgacttttatgttttttccaggtc

SEQ ID NO: 109519 - DNA, 791 bp, Aquilegia coerulea
  Intron number 1 from transcript AcoGoldSmith_v1.003966m (l ocus AcoGoldSmith_v1.003966m.g) derived from phytozome v7. 0 (chr-ID scaffold_2; pos 8236740 to 8237530)
tcaaggtattcattcttctctctttctaatctctattttgtgatgtgatttgttgttttgattggtttgattttgaatattttgcattttgatttgttgggaatgtatcaaaattgggtttttagcattgtttatgatgtgggtgttgctttgatctatgtggattttgtatattcagcattgattgaatgaaagttgttcgctttagctttgattttgctttgggtgttgttttgatttgtttgattttgcctattgtgcattttgtttagtttggtttgaataaaaatagcttctttagcattcctgccttttgattagaattagattagtgtttctgattccatttttatcagatttatcacttgtcatactcgtttccgtctgctagttgaatgctttgatcattgaaaaaccttttcttttcggtttgtttaacaatggggatgaacatttaatatcagtgtatcaagtgtagtctttaattactactcaatcaaaatatttaagtttcagttcattggatttgaggtttttaaacaactgagtgattcttgacactgataattagcatttgttttgaggttttacttaatggtccttcaaatcaatgtgtagttcagaaaccatcgtgagtatacccaaatttatcatctcgtgattagatgcaacttatttctttactcaagtttattgtctcgtgattaaatgcaacttatttcttttttgttttaatcattatatgtaaacatgcagaacatcgtggttggtggacggtagacgaattgcaa

SEQ ID NO: 109520 - DNA, 811 bp, Aquilegia coerulea
  Intron number 1 from transcript AcoGoldSmith_v1.006349m (l ocus AcoGoldSmith_v1.006349m.g) derived from phytozome v7. 0 (chr-ID scaffold_22; pos 2075151 to 2075961 reverse stra nd)
cctactcgttggtcatttcaggtatcacttcttcactactacctcttcagtcttcttcattgactctaatgtcttcgtcttgattttgattcagattagattttgattcggattgaaattgttgtactatagttgcacatttctttgctccaactacaatatgccaaacgtgattttattattgattgttggaacagttttcactgaattggatagtttctttctttttatattggattcaatgtttgaatctgaatagaatttgaaccagtgaaatcagcagtgttagactgaactaattttctagtacttaaattgaattggatgatttcaaacactttctgaagaggtaatttcggaattatctatacattgaccgttaattgatagttggtgagttatcaagctaagaaataattaattagtgtcagttctgaattatcttctgaatgcagattcgattcaatgttggaatctaaatagaatttgaaccagtgaaattaccagtgttagactgaactggtttactagtacttgttttgaattggatgtttattcaacactttttcaagtgttaaattacagaatatctatataatgtccgttgattaataattggtgagttatcaagctaagaaataaataattagtgttagttttgaattatggtctcgttttttttttttttttatttcatcggtgctttgagttatagtctgaatgcagattttataacactttcgtgtaatatatctcaatgaaattacatgttagtgattatatcttttctgattcttttaaggattttaag

SEQ ID NO: 109521 - DNA, 883 bp, Aquilegia coerulea
  Intron number 1 from transcript AcoGoldSmith_v1.001845m (l ocus AcoGoldSmith_v1.001845m.g) derived from phytozome v7. 0 (chr-ID scaffold_16; pos 4682105 to 4682987 reverse stra nd)
cttcatcacataaagataccattttcaactagtaggtaagtttttttttttgtttttttctaattctttctagtataagatttacttacaagattgattcttttttaattctgtttaatgggtattgtttgatttcttgagatctttaatgggtactcttttgatttttctttaatgcaatatttttctttaaaattcctggtttttatacttatgtatatcaatatgaaagcacaatgtgtttcaatttcatttggaagttagcacaatgtgtctcgataagcgccacaccacattttcatgtttacattgatttatttatcatgataagtatgattatcttgcaaaaatgtgcattctgaaatattgctcatgaactagtaaacatccatgagcaaatatgatgtttacatgttgttaatactgattggtatgtttgcaaattgttggtggatcatggaaattatgacaatttcatgcatcacatcatcgatcatcttgcaaagtttgaccatgcttgttggaaaacttaatgataatgtttcaacttaattacatttttttttttttttttttttgaacttaattacatgggagggtttgtgttgctttccagcctcttagatcttattcacatacttgtttggtattaattggaattctaaagctgttctctaaagttggtccatctttatccttaagttgctatttgctaatatcttctggttaccatttctactgtcaaatgcgagcttcgctctttgttacaataacttctgctctatactctttctaaatttttctcttttattatttgattatttcttatactataatttatctttcagtgatacgacattgagtaaaaaagaaagggacaaag

SEQ ID NO: 109522 - DNA, 555 bp, Aquilegia coerulea
  Intron number 3 from transcript AcoGoldSmith_v1.005503m (l ocus AcoGoldSmith_v1.002672m.g) derived from phytozome v7. 0 (chr-ID scaffold_55; pos 1031382 to 1031936 reverse stra nd)
ctgttgtattattaatttcatactgcacttatcaggtaattttttgctgctacatcaatccaatactagtttcttgtccactttaaaacacactgagtacccatgtgaagggagttcttgatagtccaacctcatgatagttaaccatggtagagtaagtcatgttgcctgccccatgaagctctggcaaaagtgagagtgactaaagtgatatggagtgtttatactttaatgagtgtttgtggaggactgcaggggtgtgtgagtataagttagatttcaaaaaccatgaaatttgaaggcataatagggaaatattataaagcaattacaagtagtcatttatgaccttattttaacgtcattctttaggagcttcctagatttttttccccttctaattagaatcatatattgaaaggagtgatagttcttcaaaagtttgtgactgttttgttttctttcatttgttgactgaaagttttgatttaattccttcacttgtatatgttaatttatgatgttattcctttattttggtcaggtcttccaacc

SEQ ID NO: 109523 - DNA, 425 bp, Aquilegia coerulea
  Intron number 2 from transcript AcoGoldSmith_v1.005503m (l ocus AcoGoldSmith_v1.002672m.g) derived from phytozome v7. 0 (chr-ID scaffold_55; pos 1032049 to 1032473 reverse stra nd)
agataagaaggatacaaaaagatttagcttagcaggtacagatttaaatccttttctatatttgagcctaatttaattttgcaagtcaatttacatttcagaaatcttaaacattcactgcgttccaaaaaaaaaaaatgtaagtataaacaggtccatattgatgcttgctcttcctttgatgtttctgtgtttctttctcatcttttgcttgagtgggacaccttatcccaagatattgtaaattgatttcagttggtaatataagttcacctccactgattttttgtgaaaattgaaagtttatactcaaatttgttctagtacattaatagggaggaagaaaaaactttttataacaagttgaactcaccattgtctcttttatagggtcgggagtcagtactgatatctggactagctat

SEQ ID NO: 109524 - DNA, 380 bp, Aquilegia coerulea
  Intron number 1 from transcript AcoGoldSmith_v1.005503m (l ocus AcoGoldSmith_v1.002672m.g) derived from phytozome v7. 0 (chr-ID scaffold_55; pos 1032590 to 1032969 reverse stra nd)
aagggacagatttactcagatcatttcaaacgaaggtattcaccccttgtaatataaatatgttgaactcactctgtgatatgttcttagtcagtgtgttttttcgttttttttttttttttgtaacaaagggatcaatcgtgttttttatattggttgtcttgttctttgtaaattgctctgttcctatatataagataagctcgcatttctctgtcaaggattcttcttgttcaacttgaaacatttaatgtcttgttttatattggttgagtaggccttaagctttgcatcaactttacaatttcatttaatgactttgatctatttttgtgtgttatacagtttccggactttcaggaagtgctgaagttgctcaa

SEQ ID NO: 109525 - DNA, 956 bp, Aquilegia coerulea
  Intron number 1 from transcript AcoGoldSmith_v1.013211m (l ocus AcoGoldSmith_v1.013211m.g) derived from phytozome v7. 0 (chr-ID scaffold_26; pos 2428361 to 2429316)
ggatctcccaagtaagtttcatttttccctttttatgatcttgatcagattttaataatatcctatatattttattcactatcaaagcaaaatctagctatatatacaacttgatcttatggttattcataatattatcactagtactaaaagctagagtttgtcactcttcaaatcactactcctatagttctagcttgaagatattctaaatttattatctcattcaatattgaaacactctcttatgagtgagagtactttacaaagacaagccgtctccccctctcactagtagcataagtgtgtgctctgaaagaatgttgttttcatgttttgatcgatttttaaactaggtatagctaggtagctagatagtgttctcgctttcatggtgtcaacagtgattgttccctcgccacccattgctatacagcaaaataacaatgattaatttaactggtaaaacattttgatgtatggtttaggcaacaaaccatgaactatatcctttgcaggtagctagaattctaccttttccgcttgctgcttaattagtaatcagacaattcataagaaggttccataagtgttcgatcgtgttccttcgatcttctgcttaagaaacctatatttcagtaagtggcctggctaagtgctacacaaagtagatcgagggacctcattcagtttaaggccggtctttataaattagctgtagctagcttgcatttctaagttctatgtagctatattacttggacaaacaaagttataccataatacacatttttcttttctaatttcatgctaatgaattcttttttgaatatctgttaactttatcttttgttcatcttgatgaaaattaagaagttagtacagtgggagacaaggagatgtactttttttgcataagagaaaggaagtataggaacagcataagaccaaataga

SEQ ID NO: 109526 - DNA, 840 bp, Aquilegia coerulea
  Intron number 3 from transcript AcoGoldSmith_v1.021598m (l ocus AcoGoldSmith_v1.021598m.g) derived from phytozome v7. 0 (chr-ID scaffold_2; pos 3734022 to 3734861 reverse stran d)
cctggtgttccttatttcgttctgtgtttagctaggtatatctcccaccatgtatcttaggaagctatcttgtcattttaatcatatatggtggagtttgagcaaatctgtttgcactttaacatgcttttattatcacatttttatgatattgggcaggagactgctcatactcttaggccaggtcctcccccgtcggccggcccctcccctcttctctccgtgtacactcacacacaaaagggggaaaaaaaaatttgcggccttggagtcaggaggtagacatacacacatgtttagagtgttggactaattcactatccttctaagagtcttatatcgtttttccttgaaaatgagggttgtatatgttcttcaaatgctatgacagcatacaggcttaccttccctaagaacaacgggagcttacaatacattttacataaacacacttccaagcacataaatataaaaacatattagcagttgcttagatctttactagtatatttgatgttagttgctctttcacgagttcaatccttctcgcctgaccattccctgggtaatcttgtcaggaaatagatgagagtagacgagagatgttgttcccatatttttgtcatagctgcctaatgtcaatgactttcagcactcttataaactttaagatttgcatcaggcattgctgcatttgtgtgactcagtttctccctgctttactcattaatgtacattcatgtaagctaaagaagtttctccaagattttctgaccatttttttgttggaattgggcatatgtagggatccaccatcaacagctgagattgaagatctta

SEQ ID NO: 109527 - DNA, 516 bp, Aquilegia coerulea
  Intron number 1 from transcript AcoGoldSmith_v1.008428m (l ocus AcoGoldSmith_v1.008428m.g) derived from phytozome v7. 0 (chr-ID scaffold_13; pos 3131294 to 3131809 reverse stra nd)
cattacttctcctaaagccactgaacaagaacaaggttagacttttctatgattgttgtatatgttgaacttgttaatgatcaaatatataagtttccaattgattgatagatgatcactcatttgaattgaagtagatgaaaaatgtcgcctttttgtatctggctagagtaatcattggtattagatagaaaaataaaaggaacaaaaggcttataaggttgatttcagtcagctagaagatttatataaaagaaacactaaaaatttacactatttatatgggttctttttctcgactttgcaactaaatgcccaagtgtaaaatgatatattaagggatagaagggaagtagatggaaattgcatagtaaagcttgaggttaatttgacacaagtgatgttaattttgaggagtctcttgtccacgttctgctttagtgttcttatgtagtacttggaaaaaagggaaacatctgacagacaatgttaattcaggtcaggtacaaggagagg

SEQ ID NO: 109528 - DNA, 813 bp, Aquilegia coerulea
  Intron number 1 from transcript AcoGoldSmith_v1.012062m (l ocus AcoGoldSmith_v1.012062m.g) derived from phytozome v7. 0 (chr-ID scaffold_34; pos 1691665 to 1692477)
tagtgttaattgcagtaacaacaacagacctccaggtagtagtagtattcatacttcttctttattttcacaaattgggtgaaataattgttttctcctgtaagaaattttttcgccttttgtaaattttttgcaatgtaagaattaaggaaattgatgtatgaattgggtttttcaaaaggggattttttttttttttttttctgtttttagttttggtaaagaaaaatctccggtttgatagttagatttcaacttgggagttgtggggtttaacggttttagtttttccattgttttgtatgattgagtaggttatagaacctgtgataaaagttccaaattgtatctttttagcaaagttgtttggggattaatttgaaattcatgtatggggattctatgaggatatgtttaagcaaatgagtgtgtaaagatgtaaagttgacaatgtgtaaagaacctgtgggtaatgcgcaaagtgactgttataaaggcctacaagttgccatttcatggattgaaggttttaatgttgtaatgttgcatctttattaagatttctttaatttttctttccttgtgaatttcttttcgtaccttgaaatgagaaaattttgctattggaccaatcaactggcgtccgccaaatgttttgactactgatttgtgtaatttcacttggatttgtttgttgattttttatcaatggagcacataaaccacaagatagttttcttttagggaattttggaatacatagaagtctgacaagtttgaatgatgatcttgcaggagaaactgatagcaagg

SEQ ID NO: 109529 - DNA, 587 bp, Aquilegia coerulea
  Intron number 3 from transcript AcoGoldSmith_v1.004429m (l ocus AcoGoldSmith_v1.004429m.g) derived from phytozome v7. 0 (chr-ID scaffold_7; pos 1523167 to 1523753 reverse stran d)
gctcctttagttcaagattcaggtaaactaataagttaaattgagccaatttttgaatcagttggggtttgtctgatttgtattttgtcattgtttagtttaatatataaaaagttggggctttgaatcttatggatttgatgtggtctttttgtctgttatttattttgttcttgttcacttgttaacattcatattcaaactagagtttagataagaactagtgagaactttcactatatttttcagttttttgtttttttttttgaatgtgaattttttttttgaatttcttttctgactgcgagttttttttttcttttctaaatgtgagttatccaagacttttttgaggcttattgcaccatggagaattggagattcaaaattttactatctgcaatgccaaaaaagaataccactaataaattaagtaaagaatattcgcatgagaaagaaaaccatgattgagtttgttttgtcaaaaaggaattatttcatgaaaagcttgttttgtgttaaatttgtgacttaattcttatattttgttttgttgttttgattgaaatgtacagagttgccaaaaa

SEQ ID NO: 109530 - DNA, 525 bp, Aquilegia coerulea
  Intron number 1 from transcript AcoGoldSmith_v1.002532m (l ocus AcoGoldSmith_v1.002532m.g) derived from phytozome v7. 0 (chr-ID scaffold_3; pos 7564932 to 7565456)
gagagaagaaaccttggtggcttagcaacagaaaggtaactagttagctaacttatcttcattctaaatcttaatgctttagttgttctgtttttttttttgaagtgtttaatgagtttagattttgatttttagttggattcttattgaaaaagtgtatattgaaatgggtttttgttggtttttagttttatgttgatttcatttggtttgaagggttctcattgtgttcttattatattgaaatggggtttcttagattaaaattttatagtttttcaagatattttgagagtttttgatgaatgtatctttgttttattgagtcttatgctgttgttatgtagttctaaagattttgatgaatgcatcatttttattactaagatcaataactttgtttgtttacttgtagttataaacttataattcatcaaaatttcttctttgttgataatattttttttttttttttagaaaatttcaataatccaattttttcatttcaacagattgttgataaat

SEQ ID NO: 109531 - DNA, 276 bp, Aquilegia coerulea
  Intron number 2 from transcript AcoGoldSmith_v1.008249m (l ocus AcoGoldSmith_v1.008259m.g) derived from phytozome v7. 0 (chr-ID scaffold_34; pos 1757860 to 1758135)
accctgacagattcttgtaagtcttaactgtctttcaaactaatttcaattaatcagaaaaagaaaagagaagaagaaagtaaagagcagatgcagatgcagatgcaaatgattcttttcttccactcttcatcaatttctcttcttctttccctttcttcgttttagttattcccatagatttgaagtttcccatcaaaggtacctcttatcaaatatttttgttttttttttttaattttgacctagaaagaaagaaagaaaggaaagatacga

SEQ ID NO: 109532 - DNA, 425 bp, Aquilegia coerulea
  Intron number 1 from transcript AcoGoldSmith_v1.009491m (l ocus AcoGoldSmith_v1.009491m.g) derived from phytozome v7. 0 (chr-ID scaffold_2; pos 8844572 to 8844996)
agaaacctagagagagctctcttcacaatcttcgagtaagtattttctctctctttccctttcaaatactctctttcaattccatcttgtttcttcattaatggaaattccctaatttttgtttattttttttttcaaaatacccaaactgtaaaaccctagaattttgtaatttcttaaaggaaactgataatgcagatgaatttgaggtcatttgattcattttttaaaatggggttgttgattatatgtttaattttgaagattgattgatcttaaatgagaaaaaaaaaattgatttttcagattcagaaattgtttagattgcttaaatgttggatttcatttaaaaaatgaaaatggggatctgtgttttgttttagtttctgataattttgtaattttctacagttttggtgcctaga

SEQ ID NO: 109533 - DNA, 861 bp, Aquilegia coerulea
  Intron number 3 from transcript AcoGoldSmith_v1.023863m (l ocus AcoGoldSmith_v1.023863m.g) derived from phytozome v7. 0 (chr-ID scaffold_36; pos 1825188 to 1826048 reverse stra nd)
agctacttttatctgaagccaaggtatttgttgagggagaatgcacattctattcgtgaaagtactctgcttttgtttctttgttttattttttattgtcaaatttcgtcatcttttcatatgatatatcttggtgatgcaaaacttgtctaatttggaaaaaagagggatgcatattggccactttttccaacgtttaggataatctaatggacacagaaaaccattcagttaaaccatatcattaacgcgtttggataaaagacacttcctttctgagaagtgatttcatctctcaacacggagtctgctgcctcaacacaccagaatgaccgaaatctgatacacataaaatgaccagaaacacatactgtattaatattaggcattcacttccctaaatccggcccacaacattaaggagcaaacagttaacagctcatatgctcctgccacttcacctattcatgttcttgggtatcaggttcacgctgctaaacattgactttatggatgtgttgataagcatctgaatctattccgcaatctatcatcatgtattaataaatataatcaaactttgctgcttttgtaaccgatttttgttaaacacactatatatatgaaaatgcatgcctcccattagaattcagccagaagatgaagttatgcacacccccatcacataattgatgtactaacttctatgttactgataatcttttgggaaaaaacatcgctgtctaagaagactaaatggtaattgattctgaatatttatcaacagcatgtttctaattttaattgcacctctgatgtgaagcagttttgaggacttcccttgcattttcagctccactg

SEQ ID NO: 109534 - DNA, 959 bp, Aquilegia coerulea
  Intron number 1 from transcript AcoGoldSmith_v1.000882m (l ocus AcoGoldSmith_v1.000882m.g) derived from phytozome v7. 0 (chr-ID scaffold_34; pos 1929812 to 1930770 reverse stra nd)
gtcttcaatcgtgtaagtcatctcattctctcttcaaagatttaattttaacggttctgattacatcacacatactccatccatctcttagctatgctattgtcaggactcaggcttatataattttattactaggcattactagcaaacagtcaattgtgaagttttgttttgttttgttgaaatgtcccgttcagtagtattccttattccagtctgtttcccttgcaatatcacaaattgttcctgaatttatcaaaatattctttgggtggcttattgatattggcactaatacaagtcttacaagctaggggttgctcattatgcctttttgtgaagaagaaaacaatctgatcaagagtcgcgagcgaccgagccacaacccctgcattcaaatgattggggatgagttggctatgatcaaataaatttatggaactgatgcacatgacacatcaaggagacctactgtccagtgaccaatattcacctagctataattaactcaatatttggggtggggagtggggttgggttggcggcatcgtcctcggtcttgtttgtttgtgtatttttatatctttagccacatgaagtctgtttgtaatgacagtctattattactctactcagtgcatacggattctgcaatttggtttgttattcaactttacaagactggggaggaaatgaataatgggatttatagaattgcatgggaagaaaatgaataatgggattcatagaatgcgcttacagtccctcctattgcttattgcctgaaagtgttcatgtctgatgtgtcctagcttgatccatcaaatccaggatcaatacaaacactaaacataatcattaatcaaataataataatgcgccgaacaaatatttaaacagaagtaactcacaaatctaaaattggactactggacaatggacaggttacatatccaaat

SEQ ID NO: 109535 - DNA, 771 bp, Aquilegia coerulea
  Intron number 1 from transcript AcoGoldSmith_v1.019125m (l ocus AcoGoldSmith_v1.019125m.g) derived from phytozome v7. 0 (chr-ID scaffold_26; pos 2186751 to 2187521 reverse stra nd)
cagtactattacctcagtgccgccaccaggtacccctcttcccgtttcactttctgtttattaagtagttgaattgtctgaatgaatatgttctttgggcaacattgcacttggaatgtccatttctagtttggtgcatcttcaagataatttcagtttcactacgaattattatatgagcttgcttatattgggaaggactgtctacagtccagaaatgtgatgcctaacagatttgaaaagattaatattctatttgtgattaaaaataaaccttgagaatgataagaaaatttcaaagaccatctaaacaaatttagtcatttgcacgtgtttatgtatctgatttcaaggagataagttttgtttgtgtccttcttctgattgggttgagcattataatttcttaaaagttttctataagttcaaaattttcttctttggcaaactttagctagttttcaatgattgatgattaaattggaaattccgttttacaataatttctcgtatgtattttttccttgatcgataactacctcattaagctattgggaaaatgttgcaaaacattttaacctaaccccattagcaaggtttgggggaggtggtcacaatacagcaatcactgcaaactgtatttgatatgaatttcctacaaaccatcttagttcactgaactgaatatttacttgagaggtttcagttttttgttggctaatatctttgttgtttatttgatttttacttttacttgtattgtatgcagga

SEQ ID NO: 109536 - DNA, 445 bp, Aquilegia coerulea
  Intron number 1 from transcript AcoGoldSmith_v1.002056m (l ocus AcoGoldSmith_v1.002056m.g) derived from phytozome v7. 0 (chr-ID scaffold_52; pos 1529748 to 1530192)
tttggaaggagaagattgaacttgtcatcgatcaggttactattccattatgttacttgtctttatggctttctttataaggttactggtggacgacatctagaagtgctgctatgttgaaatccttttgattgtttttttactcccttattttgcaagtgtaactcatcttttcatattttatattttggtagacaaagatctttttggggtgaagttatttttccatgaattttcaccatgaaactttctagattattaaaattgacttttgatgggtcattgaatgtatttgcttaattatcggatcttccagtgccctaattaatgcttgatacagtgttttacatttttatttccaaaatctgcccctggaagcctcagtagtgactacctgttctttcttgcagcatcaggagtctctgatagctaatagtaacaaagc

SEQ ID NO: 109537 - DNA, 346 bp, Aquilegia coerulea
  Intron number 2 from transcript AcoGoldSmith_v1.002056m (l ocus AcoGoldSmith_v1.002056m.g) derived from phytozome v7. 0 (chr-ID scaffold_52; pos 1530230 to 1530575)
gaaagggccgcctcatcatctgaccgtgacagtcagtaagtactaagtagttaccttatcttttctttttgcagttttagttatttgttttcgttttcagtaatgttcatatgttcagtcaaacatgattatgatttatgatgctctgtccttgtttactttcctttagtgtactgatcttcctcacataatttagtttatgaaaacatgttttcttttctttattcaagaactcttaacactgattttaatagaataattcaatcttgcttagttccaccttttctcaagcgatgcattgaccttgcaaacctgattgctatttttaggtgcagtgaccagggag

SEQ ID NO: 109538 - DNA, 946 bp, Aquilegia coerulea
  Intron number 3 from transcript AcoGoldSmith_v1.002056m (l ocus AcoGoldSmith_v1.002056m.g) derived from phytozome v7. 0 (chr-ID scaffold_52; pos 1530595 to 1531540)
tcgaactttgctacgccgaacaacaattggaagtattttagatccgtacaattttaagttatctatgttatacacccatctattccatgatggatttatgtacatcgataagaaagggtgtttgatcaagaagagaggaatttagataatgcaagaaactttatactattaggcgcagactagtattacatttgggggaaacttttcttgcttgtgtaaacaatatttattacaaaagggaatacagttacatcagttcactcgtacaattacaaaactgttatctccatgaagtccacatgtctaatttatctcatatatggctggaataagatccagatccagattcatcacctatggttgaggctgtttcttatttgatactggtgttcctctttatttaagtagcccaacaagtcaaatgaagcagcactttccatatcagacgcccttgtggagacaaaacctgttgtcttccaacctatgaggctttcctcaatgttagtattactcgcaagtcgcaactgagacctgaaggtatcatttgctcatttctacattacacatcatggaagtctacatagagatgccgaactgtcctcttctcttcaaaacacattacacatctgcagcatctttaaaacacaaacattgcacagttagagggattagttccaaaatttaatatgattggactttttaataatgtaagagataaacaaatgtgtctttcgaatgagtgggagagggatacttgcaatgtgtcttgcgattgtagtgggagataaatgttagttgagttttcatttttttttttttcatttattgaatctcaaggctactgattaaaaagagtatgctattattttgtagcatttgtaatgtcgattaccccccttactaatttgtaggtgttcctgagtcgatacttgattggacccaagac

SEQ ID NO: 109539 - DNA, 398 bp, Aquilegia coerulea
  Intron number 2 from transcript AcoGoldSmith_v1.017465m (l ocus AcoGoldSmith_v1.017465m.g) derived from phytozome v7. 0 (chr-ID scaffold_44; pos 1509948 to 1510345 reverse stra nd)
ctcaggtaattttatttttctcaaatgtttgttttcttctgtaattgtcatggtgaatcttctttttgctaatttcacttcatccaaatgaataaaatgtgtgatcaatctgatgtgcattctcctgaaaccactgaaggattacatgtttatattactaggccatattggttggtgcagcacaaaacttcactgtatccatttatgctttgtttaatgcaaagcaacaatgtatatgccatgcaattgttaggggtacttagggaccttatatagacttagtggatttaagtttgagtttccattataagatagatttgctccaaatcaatcatttctgaaacttggaaccttttactacaggaccatcttggagaggttgtgtttgtggagttgcc

SEQ ID NO: 109540 - DNA, 722 bp, Aquilegia coerulea
  Intron number 3 from transcript AcoGoldSmith_v1.019521m (l ocus AcoGoldSmith_v1.019521m.g) derived from phytozome v7. 0 (chr-ID scaffold_93; pos 462746 to 463467 reverse strand )
ctaagattggtaggctgtgttacacaatttgattttagttcatttgtttatctaagcgaaaatagaattatcaatcacacttgcaatttgaatggcataatgagaagaatatggtgcttgtagttatgtgtatgtgtttgtgtgttttggccttttggggaaggggttattcgaatttataatttaagcacatctcagccatcaactgtgacgctgctgttgacacgtacttctatgaaagaactgttctcagctgttgacacatctcaaaccctaaattctttttttatgaaagaactgttttcagctgtttcgtttgcctgcccctttaacttagcaaatagtgatacacgaaagtttagttgatagaaaattttaagtggatccctactaggggttttttcatttacgaattcagttgcattctatgtatcacttgtaaaatatatagactggtaattgtgcaaacatcaagattaagttgatgcattcatatgacatggatgacatctatattcttgcatcattttcctctttgttgcattcttttctgtaagttgtgtaatgaactgaaaattggaagaggtcacttccacggtcaatctgactggttctacctaagtacctatatatattcagtgtgtctcttcggctacaattcatgactttgctaaataatgcaaacaggaggaagtgttgcgtttcctggccattctttaggc

SEQ ID NO: 109541 - DNA, 662 bp, Aquilegia coerulea
  Intron number 1 from transcript AcoGoldSmith_v1.009896m (l ocus AcoGoldSmith_v1.009896m.g) derived from phytozome v7. 0 (chr-ID scaffold_2; pos 7826429 to 7827090)
ctattgattttctaaccttgtgtaatcgtcttaaggtattacctattttgttttctgtctttatatgagaaatttcttcaaatagttaacgagctaaacttttgcctttgttgtgatctttgatgcaaacgcattatcaaacaataagtttgaatggttgaatttgaaatttcatacaagtgaaagctgagttatctaaatgtaataatattgttttattagataattgtgaatttgaagaaatgattgaatgtggaggtttgcagatggatagtcattctgtataagaaacttactttggaatgtgtttactatgcaatgggggcaaacacctttgttttggaaattagctagagttggaaaattgtcgcaccaattgtgaatatgcttcacaattggtgatgacttaagggatgactgtcagtcagtcaggatgttattctcgtcacgaggtttatcctaaataataactcatcccctcaaaatttgttaattaagcatgtacatagttcctttcatgcatcacaattctatgtttattgtgctttcaaggatatgacagtttatttttgttgtggagcaaatcttacattattttcataatatatatcattcactcttcctctttttggtttcttacctcagactacaaaaaggaaggg

SEQ ID NO: 109542 - DNA, 961 bp, Aquilegia coerulea
  Intron number 3 from transcript AcoGoldSmith_v1.015978m (l ocus AcoGoldSmith_v1.015978m.g) derived from phytozome v7. 0 (chr-ID scaffold_2; pos 2340901 to 2341861 reverse stran d)
caaagtcttctctagttcgtgcagtactaacagaggtacaattagatagatcagcgtatatgctctttattcatttagtagttgatctttgaatgacattcaacgtgagtgtgtgcctgcagttggttgttatcgttgttttgcatgtcatataatagtagcgatcttttcttgctgttgatgttccacgtctgttttacatgtgcgaatacaaattcagcataggccttcactgcatagccacatatgtgtcacacctttttttttataaatatatatgcaatgatcatcaaatcatcagtaccaactgaaaaaatcttcaatgaatcatatttgtgtcgaaacttctatgaaaattgaaaaaccagagatgtaagtcaaaattatgacattttagagttttaataatttagaagtagaacataggcacatttttgcgtcacacatattctcaatagaaacaggaccttttttttagcagaatgtgattgttaaagttctattgtgtttatgttgaatggtacccaattttcctcacgtcaccagagggccgaagacccagcttgagggaaatggcacatgttgcagtgcacaggtgcactcagattctatagaggtctcaccaggcatgaatttttcttagggttatgtaaacattgcagtcatttgtatataaagataatagagaagctgaactcgttgaacaattgtcttcctctctatctctctcaggaatgcttcatcactttcactgacgaaagtatacattttaactataattttgatagtttgtatcattttggaggtctccataaatgtctttggtgatatacccatttttaaatatagcttgatcatcttattatgtgcataacttcatcgacttttaccatatggttgaacatgcctgttttcgtgtgtttcagactagatacccaaactatatcactgtcagtgcatc

SEQ ID NO: 109543 - DNA, 976 bp, Aquilegia coerulea
  Intron number 1 from transcript AcoGoldSmith_v1.027867m (l ocus AcoGoldSmith_v1.027867m.g) derived from phytozome v7. 0 (chr-ID scaffold_2; pos 5625698 to 5626673 reverse stran d)
gttacattgtgatcaagcaaagagcttgcaaggtttgttctctttagatctgttggtttaactttcgtttattagtgtttctgtgagtatttcatgttctagggtttttggagtttctatatatttgtagatctttgttagtaactgttgttctaggtttatttattgcgatttctctttgattaagttgtatttttagtatttctggttaggttttatgtttataagatcttttatggctataaatgtgtaaaactctgttttcaactttttccttatgaagacatcagttattaagttgtatttgttgttttaggtttatttattgcgatttctctttgattaagttttattttgagtatttcaggttaggttttatgttttttagatctttcatggcaatgaatgtgtaaaactctgttatcagcgttttgtttgtgaagatatctgttattaagttgtattttgaggatttctggttaggttttatgttttctagatgtttcatggctatatgtgtaaaactctgttatcaactctttgtttgtgaagaatttttttcttaatcttggttattatatgttgacattcgattaggcttgtttccattctatttttggtaaagctaggaagttctgttacattatgtttttaatgatgctctgcaaatctcttcaatgttatagtagtttttttttgtttgatttgtgctatgatggcctagaatgctaattaagagggttttttatgcctggatatggtttttggaagtgtttctgatgctggtttggttgtcattattagtatgttctagtcctggtttggttgtcattatgaggtatcttgtttttgttacatgagtgattatttaaaggtggttgtgttctaactaaaattttggaaaagagtgatttgattgcagcttgtgttttctgctccaggttgttgaggtttcaacttccaagactggaaagca

SEQ ID NO: 109544 - DNA, 413 bp, Aquilegia coerulea
  Intron number 2 from transcript AcoGoldSmith_v1.011173m (l ocus AcoGoldSmith_v1.010128m.g) derived from phytozome v7. 0 (chr-ID scaffold_35; pos 405966 to 406378)
ccttctggcggtcttcacattatttatacaacaaggtttgtgaacataaaattaaatacatatgtgcattggcattaaccacactgaagatcgaccacagttcaacttgcatcaatcctgccccttctatgctttcgtaacagttttatgccaaatttaatttgattttgtactcgtgacacattaattttgatgttttgtttggggaaaaggtgcccactgactttctattaataatagagaccactactattactgccgagttgtatgttaatgtttaggtttttagaatggttgtttgacatgaaaacggaccatataatgtctgtacggctgtacttcagttctctaaagtttttgtttatttctttctcttaggtcttctacaaggttagcgattggaaacaatttag

SEQ ID NO: 109545 - DNA, 814 bp, Aquilegia coerulea
  Intron number 2 from transcript AcoGoldSmith_v1.024230m (l ocus AcoGoldSmith_v1.024230m.g) derived from phytozome v7. 0 (chr-ID scaffold_3; pos 3638348 to 3639161)
ccagaaaataattttccagttcctaataaaggtaaaagaagttctaacaacgtgcgattaattaatacgcttagtgtttttttttccttatatgaatggtaatattagacatcaatcatttggggccatacacatgacaatgaaatctgttttgttgacacttgaaatatattatttggtagatggttgacaacttaataaataaagattagctatttgaaaacaggtagaagctacaatgacataaccatttgagtttcttatgccattaaactgcccctatttgagtcaaaattgttgatgtgtttgccctccttctaattttgaatatcataataacaaacatatttaattagctagtattcctcttgtaatacttactcggtcttaagtcttattaattagcggcatcgcttacactttaattaatatattcacctggtaagatattttactttagacactgacttgtatgctaaataatattacactctgaaagtccgagtttgaattcatatgttttcgttttgaccttctaataaaattgcactttgattggtatgcatctatgcttagtggaattggtacttggcagacaaatatgcatatattcatattgatatgaactctaacccgagacaatcaaaattatctcttctgtcattggaaatttattgaaaagcgatggtagcatctaaacccacaaccaaataaattactttgaattactttacatagaaagggattagtacttcgagtgatattgacattaatttttttttttttttaattgtaggtctgtactacgtggtag

SEQ ID NO: 109546 - DNA, 929 bp, Aquilegia coerulea
  Intron number 1 from transcript AcoGoldSmith_v1.002243m (l ocus AcoGoldSmith_v1.002243m.g) derived from phytozome v7. 0 (chr-ID scaffold_68; pos 662896 to 663824 reverse strand )
ttggcacgggtagcgctcgtgcaggtctgtgcatctctctctcttctttctattaatttctcattcatcttcatattgttttctttcttgattgcagttgattttttgtttattggtgttttgattagattattactgttacattcactgttgtttgatgtgaagattaaaatttaaaatagtacacaaaggttatgttacatactatataggtcaattttaacctattacacaatttgattctttagtgtgatatgtgtgcaaatttatgagacaatacacttgtgtttttatggccagcacgcaatgtatgcagattttgttagatatcaagtctttgattatgtaccatattattatgtttacgctttgaaactacacacttcataagagaactgtttttgggcaaaacaccaaccctgctgcatgttagaatggtagtatgtaacaatctacgactctcattacctttggattgacaattattaaactctcctataagtgagatcttgtatgtcagggtgttgggttgtggctcccagccatggtttcttatggttggactggaacttaagtatcagttcttaaatcgtatgtagcaactatttgaatcaagccttcaaatacttagggtggggagatactatctctaggtattaactccgtgagcgttttagtttttaccatccagtgtacagtttgcatattacaaaaatcaccatgttagggttttcgtcattccgtgtgtttattatgtacatgatatcatctttgtatatggatgtcgtgagtatataaatactcacaaagtaattggttgaagttattttcagtaaatagtttctgtaaacgttattgacgaaggaatgtgaaaatgatggctcatgaattatctctcaattggtggctacttgatgcaggtttgtttg

SEQ ID NO: 109547 - DNA, 433 bp, Aquilegia coerulea
  Intron number 1 from transcript AcoGoldSmith_v1.014972m (l ocus AcoGoldSmith_v1.014972m.g) derived from phytozome v7. 0 (chr-ID scaffold_3; pos 8485744 to 8486176)
gcaaggctggactacatttcgaactcctacatttggtgagtgcttcttaaacattctgtacatgtataacttaataatcgtaagaaacatgtcgcctttttcacattattttgtgatattccaaccttattataataaaccttgaaacgaattttcgcaacagcatttagtaagtttatcaatcatagagtctaacctaaagaaatggagccaagaacctgaattaaattgtggaccaactcaagagtgggataggattggatctgtgtccacatacaggtcatgggctgcattgttcatttgtttggcacactttggtcttttgaatttgttatatatggccttgaagcccaagtaagataatgacatttttttgttcttctttgatatttttctagcggtatctgggaaaggattcattgcaagggacata

SEQ ID NO: 109548 - DNA, 799 bp, Aquilegia coerulea
  Intron number 1 from transcript AcoGoldSmith_v1.014803m (l ocus AcoGoldSmith_v1.014803m.g) derived from phytozome v7. 0 (chr-ID scaffold_8; pos 5524502 to 5525300)
ctctccaggtatctttctcaaatgccaactttattgtattggaacaaatggggttgctagataattgttgttaagggttatattcttgttgagttttttttttttttttttggcttttgatagaattcatagagaaatgaagtaatgaacaaattatgttaggtttattgtaaatgttgagttatgtaattgcatttgattcataaggggggcggtgtgcgagactttgatttatgcatttttaattaataaaagggtttcatattatatgtttgttcaagagaatttaactagaaattacggactatatagtgtatatggactttcgatatgcttgcttgtgtttgtttgtaatgtgattgtaattgttgagagctgtcgtacgcattgaggtgtacatatttttgcaaattgcttattcatttactagttagtgttgttatgaaatatgccaatatggtgataaagtttagaagaaatagaagtggtgtattgcagtattggtgtaaaacacattaatctatggagcacgaactcatggatgagatatcgtatttgtggaaccaagatagttttaggttcatgcgtctgtatatattttagagtttagactacgcatgttataatgcaaatttaacgaaagttttccggtaaaaaacagatgtagaataaggcacattgggtgaggtagtatataaaaagctatttgttatcatatattactgaatataaagagcaactacatagtttctcagcaatagaaagaacttcttactaatctcttcttcttttattgcag

SEQ ID NO: 109549 - DNA, 478 bp, Aquilegia coerulea
  Intron number 3 from transcript AcoGoldSmith_v1.010354m (l ocus AcoGoldSmith_v1.010354m.g) derived from phytozome v7. 0 (chr-ID scaffold_58; pos 503545 to 504022)
gaaggtgaagaatttgcgcttggttcgacatattggtaattttcttctttcatttctttgtgtatagtttgttttcatattaattttcaagcttagctaagctacccctttgattttggtagattttcccaaaattatgagaattctccaccctttaaacaacacatagctgaatttgtaggattgctacttgttcgagcagcattgctcattcaaaggtagctccttggctcctatagcatttctttttggcactacttgtgctcaaggttattcttaatatggaatatcaaagtttcgtggcttactggccttataggaatggtttgacctactaattatatttggagtagtatctacccttatattttcaaatttaaatgaattggttattatttcctctctctatttaaattttgttactataggatttgatattgtaacttgcttctttctgatgtgcagtaactggagcatc

SEQ ID NO: 109550 - DNA, 203 bp, Aquilegia coerulea
  Intron number 1 from transcript AcoGoldSmith_v1.006679m (l ocus AcoGoldSmith_v1.006681m.g) derived from phytozome v7. 0 (chr-ID scaffold_2; pos 9715374 to 9715576 reverse stran d)
ttgtcgaaattgctgcaaagacaggtgcagaggtttgattctaactcaatcctttttttcttcttctttgaattgggttttgaggtaatggcatacaagtattgcagtgtgggcattatgaaatgctgaattgcggttttcttgttcgagtgtttgtattcatatatttttaatgtttttttttttccctcttccaggttgtg

SEQ ID NO: 109551 - DNA, 956 bp, Aquilegia coerulea
  Intron number 1 from transcript AcoGoldSmith_v1.009072m (l ocus AcoGoldSmith_v1.009072m.g) derived from phytozome v7. 0 (chr-ID scaffold_2; pos 7545209 to 7546164 reverse stran d)
ggaatattggccaggtaatcatctttgatttttattgttactatatctatgcttgtttgccgtatttggaatttgattttgtatattttgtttctatttatgaattaatggaatcgtgtttgattgcatacaacaactttaatgaagttcaaaagttagttcaccttaaagaataaattatggtataatgtcacatccgtgaagaaaacttacgcaattaaaccctgctcaaattgcattccactttaataaagtggagaatcttatgcgaaatgcaaaagttatgtcacttatgcatgtgatcgaagaaaacttactcaagtaaaccctgctcaaatttaggttgtcacattttccttgtgacgtgttaatacaatgttactactaccgtggctctagggaaggtgtagtgaactacctctatagtgattatatgtgtctgctttctaattgtagagatgatttattgaggatgcatattgagtttttagtacctgatgatttaattgaaataatttttcgttagggaatagttcaaaatattaatattggtagagtatttgcttcccaaaatattgatttattggtcattatgttaaatatacacaaatgcatgggatgatatatatcaacaacagatctttccttttctgagaaccagatatcgtaaactttgtgcagagcggcaaaaatttcggttgatttgaactagcatactatttttttcgtagcatttgattttgatcaatactcttccttcattagcggtataagtgttaattgggatctgactttttctagtatcatttacagtatatgggatgtatcaatttcgatattcttttggcttgctttttggaatgacattaaactgcttctgaatttcaattcccgatacgatcccttacattatttgtttaggtgaagatcggggatctgggtttggcagcaacagt

SEQ ID NO: 109552 - DNA, 276 bp, Aquilegia coerulea; identical to SEQ ID NO: 109531
  Intron number 2 from transcript AcoGoldSmith_v1.008264m (l ocus AcoGoldSmith_v1.008259m.g) derived from phytozome v7. 0 (chr-ID scaffold_34; pos 1757860 to 1758135)

SEQ ID NO: 109553 - DNA, 865 bp, Aquilegia coerulea
  Intron number 1 from transcript AcoGoldSmith_v1.027520m (l ocus AcoGoldSmith_v1.027520m.g) derived from phytozome v7. 0 (chr-ID scaffold_2; pos 4390580 to 4391444)
atgtgaggctgtccacatctttgcttattgtgcattttgtttttctttttttatgttaataagtttcgaacttctgttgtgatgttatttttcattctctgtagcgtattggttttcggattattgattgatagactttgctgtattgacatcctgtggacacactttctggattcatttagtagtaaaagactgtatttagaaagagagagggtacaaagactcggaggtagagtcacgtcaaaagattctagtagatagaaaaagcttcatcatccgttatatgtctgttttcctattttcttcatgtgattgataaatcggtaaactttatcccttcctactagcatggaatactaaatatgaaccctccaaaattaagtattcttagaggccaattgagaagtacttaaaaatatatccattagcctacaactgacttcacaaacagctgtgaaacaaaccttaggttgaaggtctccaataacttataaaatggaggattccaatagcatatattacagagtacggttcaacgtcctctcagtttggttgcagttaacatcggttctcaccgaaataaaaaaaagagaagacttctctagctagacacagtaaatcggggcagttctattaatagcaagtagttgtcatatacaggagtcagacttgggcttaacccctcaaataaaggtttatttcttgggaattctgttctttcatacttgttttgtgttactttgttctttgacattaacattcgaatatagcttacattgttgtttctttcaacttttggacttctaacggtcccttgctaattttggcagtctgggttgaagccgatagaaattgctgcacagaa

SEQ ID NO: 109554 - DNA, 549 bp, Aquilegia coerulea
  Intron number 1 from transcript AcoGoldSmith_v1.007212m (l ocus AcoGoldSmith_v1.006429m.g) derived from phytozome v7. 0 (chr-ID scaffold_58; pos 478705 to 479253 reverse strand )
caggcttctctcgaagacccattcaagcaaaccaggtgacaaaacttctttctctctctcttttttttttccattttttttctatctattttggtttaatttcatttattttcattttattttttaattcaatcaatcgtaatgaattgattgatcgatctgttgtttttattctttggatctgttatttttcttgtcaaacaagggtttataataaagttatattcccttgttttgcttttttttttttttttgcttttattttgtcgaatggctttaaaaacccacttttttgtttaattgattctatcttattgttgggtgagttttgtttttgtggaataatggaggatgattttcaacatcgcggtttattggtgagattattgatttctaataaaatgtttagttaatctataatggggttctggaaattttgcctataaactaattaaacggttataaagttgttgaaatttcaattattgcagcaattaatgttggaatattgtgttgagatagtttttgttatgatgattaaacaggcaa

SEQ ID NO: 109555 - DNA, 998 bp, Aquilegia coerulea
  Intron number 1 from transcript AcoGoldSmith_v1.007963m (l ocus AcoGoldSmith_v1.007963m.g) derived from phytozome v7. 0 (chr-ID scaffold_8; pos 4120131 to 4121128)
ttactactgttctcttgaatcccatctctgattctgtaagaaccaactttttttttttttttttttaatattaatagagtatatactgatgattcatcacatacccactttgattttaggcgttttgagaagtgggttttatttttttgttgtttgattatggtttttgcatgattcaattcatgggtgggtgcgctttgattttgtaattgaaagtgggtttattagtttgatgtataactattgttttgggattgaagtattgaagtgataggatgattgatcaaatgatcagtataagttaagaaaaatatttctttgtttcttggttagttagtattaatttttgtgttgtatattttagaagatgaggtagaaagatactagtattatggagtattatatacttgtaggtattttacaaagaacgctctaatataaataccttcgtagaatgtaataatgttggtattggatcagtagtaaccagtaagaaggattcaaacttcagtaatcgattctgtttgattagtcatagtataaaatttgaatcaagcaaacatttaaagacatgccgtaaatgccttaagttatctgagctcaggatcaatgtcaacgttagacacagggtactgtatgtcgataatctaaagacttctctttatgagctttagactaaggcattaagctttgtcagattattcatcaaatacatagtatatattttcattcaactcatcacatagttgaagaccattggtatccagaagaccactactgcaggagtactggtctttactacttcaactcatatgtaccacaaggactcgacacactttttagttatcataactctgttgaattagatgataattgtgaaagaggcgagtcatagtgcaggtcttacgccagggttagaatgtaagggttgctgattcttgcgtgacattctttttcaaagtaattcatactattttctgtttggttaggagcatacg

SEQ ID NO: 109556 - DNA, 403 bp, Aquilegia coerulea
  Intron number 2 from transcript AcoGoldSmith_v1.008646m (l ocus AcoGoldSmith_v1.008186m.g) derived from phytozome v7. 0 (chr-ID scaffold_61; pos 1237617 to 1238019)
gctgttggagccgttttctcagatttcgtaagttttattgttattaatttaacctaattttacacactacactagtagttctaaacttgtgatacattgttttgaaaacacaaattcttcttcaatttaacctaattttctttcatacactttcaaattatcaaatattcaaattacataattactggtatataagattagtacaagagaaattagtaactaatgtgattgtgttggcgaatcttcttgtatgtttatgaatagaataacacaacacaagaacatgtactttgtgtttttagctaatggtaaatgactaaattcccatttgtaccaccatatgctgaaaaataacttttgtatttcagggtgggaagatcaattcagttgattttcatcgtac

SEQ ID NO: 109557 - DNA, 982 bp, Aquilegia coerulea
  Intron number 3 from transcript AcoGoldSmith_v1.008646m (l ocus AcoGoldSmith_v1.008186m.g) derived from phytozome v7. 0 (chr-ID scaffold_61; pos 1238082 to 1239063)
ctacgtaagtatgtttttaagttattattgggataaattaagttttcagccaaagcagacttcaaagctaatgtatgattatccgatatttccataaaatcatgtccactcaacaatacaagacatcttgagaaaatttatttgccaatactatatgtacaaattaccatacatatacctagggtattgaaagaaagaatggaatgtgtaataagaatcttattataagacatggagtatgattgtatgactgattgagtgtagattgggctttaaacttgtatcagaacgtgagtcttatgatagataaacataacatgttgaaagaaatccaggatttcaaagaatgttctgcaaatcgtagacattatcgaagaatcttaaagccagtgttatccaggcattataccttgacactatttagaggttcaaattttcaaccctagacatagtagagtttaaaagataatagttatgaaactaacttgcttcaaattgtgattggctcacgggaagttgaaacagcctacgggtgctatttcagaagtagatcaagggtattggcggatgagacactcagatgagggaaaatttcattttactcacttattttgaaatttgaactcagaggcttttatgagttttcggccataggctatgatacacaagaaatatttatgacattgctatttgcttcccacaaaatctgcctttttttctctctcttcttcagttaccaatcactgtggtatatctatcttttcctaccacaaatattgatgtcattcttcttcttatttgactttgttagtagatactgcttatgtagattttgtcattagcatctttaataaattgaagtaattgtgctactcatgtattttcatgccatgaactcattgcgaagtttaacagcttctaaagtttttatccatacttgatcacattttcaggttattgaagactacataccataagaaac

SEQ ID NO: 109558 - DNA, 998 bp, Aquilegia coerulea
  Intron number 1 from transcript AcoGoldSmith_v1.010995m (l ocus AcoGoldSmith_v1.010995m.g) derived from phytozome v7. 0 (chr-ID scaffold_13; pos 2209766 to 2210763)
attccaaagctcttgctgttgttgatagtaagacacttaacacatacacctttctctctctctctctcgaagaagaagaagaagaagaagaatttgcataattttgttaaatttcgattattttactgcttgcttatgtgtagttggtttagttttctggtgaaaaaatatgaattattattctcgaagcttctttttagtttgatttcaagaattatttttggaattcgtttgtgttctgtttgaggttatttgttctgcttggattttggtacttatttagcttttctattcataatatgagattttgttctcagctatgtctatgagaaagtttaacttgttttagaaaaaaaaaaaagttgcttgtactttatgaacttaagaaggaagtagaatttcagcagttctcggggtttttgtttgaaatgatgttctgctttgttatgtatatagttacttagcaatctggatttacgaagattttaggaatttgctgggatttttttttttttttacgtctttttcacaatatgtgtgagaattcaccctttgtcttgaatttgtcatcatattttgcttgagttcactggatatttggttaaaatctgcatctgattataagctttgtgttgattccagtttaattatttaactagttcattctgttgaagctactttgctgacaatcaagttggagatcggtctttctcttgattttctttcttgcacatgttgattacacataattatttggatattttcgggttttgaattttaaaatcatctctctttatagtcgattacgattacgttttcctgatacgtatctgtatttgtacttatcatttttcagttggaattccttatcagtatactgatcaccgtagctagctaaaaaacctaaaattattaagctattatggattgataacctgcagtaatttgtgtttttgtttacagaggttcctgattctactgaagaaaaaaaatctgga

SEQ ID NO: 109559 - DNA, 418 bp, Aquilegia coerulea
  Intron number 1 from transcript AcoGoldSmith_v1.004123m (l ocus AcoGoldSmith_v1.004130m.g) derived from phytozome v7. 0 (chr-ID scaffold_13; pos 2081081 to 2081498 reverse stra nd)
aagaagaagaagaagaaaagggttctcttttaaaggtactttatctttcttatttactctatttttagttatttttatgaatacatagtaagtttgactagttaaaaaggaattgggtttttaacttttaattactaggaacatttgaattgattccttaaatgatcattaaaaagatgaaattgaaattttgtgtaaagatggttttttaagagtaggtagatatggacttttagaggaaaaaaaaagtagtttatcttcttttgttggggatgtttgaatttggttttttttttttttttttttttttagttatattaagtatgtatatggttagtttactgataggaagacggaatttttctgtttgctttttcttatagagagagggctgagttgggtgtttgaagcgaaaacc

SEQ ID NO: 109560 - DNA, 256 bp, Aquilegia coerulea
  Intron number 2 from transcript AcoGoldSmith_v1.008887m (l ocus AcoGoldSmith_v1.008887m.g) derived from phytozome v7. 0 (chr-ID scaffold_8; pos 4539795 to 4540050 reverse stran d)
caagtagagtgcaaagcactgttacatttcttgaggttatttatatatacacctctctctctctctctctctcctttaatttgtcgtaaattgttcatttgttgtttttgctactaccacattggtagtttagcataatttttggctgaaaaagcttcctaattttgagaaaagggcgattattttctcttggaagaaataatgcttgctcttactttgatcaataaggtttatttgtttttccttcaggttaacg

SEQ ID NO: 109561 - DNA, 818 bp, Aquilegia coerulea
  Intron number 1 from transcript AcoGoldSmith_v1.012089m (l ocus AcoGoldSmith_v1.012089m.g) derived from phytozome v7. 0 (chr-ID scaffold_13; pos 3575028 to 3575845 reverse stra nd)
tccctctctctctctctctctggtgaagaataaaggtttgtactttacaccaaaacccattatttttgtcgattttatacatttttggtttttttttttcagtaaaattgaaatcgccattttatcatttctatgtaagaataggaggaagaatacagatataatctcctttccaagttaatatcttagggaatagttgttttattatattattaatggtggtttatttgactcatttgtgggaaattgaaatgcacacaacatgtttgatcatagaactcaaagaggataatttataaattttgtaattcaatgattaaagctcgtgtaaataactaattgttttgagattgtattaccctttatggagatttaaagagttggactcgtatttcacttgattgtctgagtcttgtggacataatattgcttttatataaggttatcacttatcagcttactgatcaagttttaaaatgatttttttttgtttgatttgctcgcgtatagtagtacaacattgtttgatatatgaaattcagaaaactggtataatatggaaaagtgcatgataaaaatgagttttgggaacaaatggtcttggacggatgtggttgtcgtgtaagtttaaaataactagagcatattttcagacactccatattgttcctgcatcttttgagtgagtttggggatatacgctgtttacagaaccttatgaaatcactatttaattacacaatggaattattcttggtttcttttcttccttatatattttctttctgttatttccaaggtagtaattttgaagtgtg

SEQ ID NO: 109562 - DNA, 510 bp, Aquilegia coerulea
  Intron number 1 from transcript AcoGoldSmith_v1.024993m (l ocus AcoGoldSmith_v1.024993m.g) derived from phytozome v7. 0 (chr-ID scaffold_13; pos 352043 to 352552 reverse strand )
caattcttgtatcagattgctgacgattacgacaagtaagtctctgttactcctctattcctatatattttctcagtccatgactccatgcataatcacaacattgcaatatgcagcctgcatcataatcatatacagtacttgattttcactgtatttctacaaaggtaaaacagaataactgcatgagtcctaaggttgttttctgttttttagaagtttgatggtaagatctcctctggttttaggtctaccaagatgctactacattaagagtagagaagaaggaaaaagaaaaaataattcaaaatgagttaataacatagtgatgaatataacttggttaggttgcaagtcatttcaacaagaatgctaactcttgctaaagaaaagttcattcttaatctgtaacccaacccaagtagaaattgataaaactaaactgacaaatttcatctttttttttctaaaccagggcagaggaattgttcaaacgtgcagttcaattaa

SEQ ID NO: 109563 - DNA, 682 bp, Aquilegia coerulea
  Intron number 1 from transcript AcoGoldSmith_v1.027596m (l ocus AcoGoldSmith_v1.027596m.g) derived from phytozome v7. 0 (chr-ID scaffold_16; pos 2851815 to 2852496 reverse stra nd)
ttttttttcaacttttcaagaataaatcccaacaagtaataaagatgaggggaattgaattggtttgaagatgatttcaattcaccaatttgatacaaaagatttgaattggtgagttataatattcttttgattagaaaatttagaattttgcgattaatgtttctagttttgactctagttatgtgtattctgtgttgaattgatgcttatttataccaattatattcaaatatcaataagaattatcgctgtgcatttgttgtttagagcaatggagtcgtaaaaggaaacaatagtgacattttggggaatgtatgcgagatttctcgtgtgatcaaattatgagaatgtttttcacaagctttttgggcagattggatttggattcggattcacttgataagcctggattgaaatttgaaaagcgtgtctcttagtcaatggttccccatatgttctgtttttttttttgagtgccagtcgatagagacaaaaatcaacactgctcagagtccctgagcataatcatcaaacagggaatgttggatgggctaggttgagggaggtcgtactgtcgtagtgatatctcacttctcaagttgtgttatactcttgtattcttgggccgtgttgttgattgtttgaaattttcatggtcctttttgtcagttagaagtca

SEQ ID NO: 109564 - DNA, 1002 bp, Aquilegia coerulea
  Intron number 1 from transcript AcoGoldSmith_v1.005816m (l ocus AcoGoldSmith_v1.005827m.g) derived from phytozome v7. 0 (chr-ID scaffold_13; pos 3821036 to 3822037 reverse stra nd)
gccaaattagaacaccccttgatctttgaggtaaattagtctctctgttatacttcttaatgtatacaattttctatattaatctgctatatcctgtaatgaaatgtgtaaaatgaaacgagtgattcataataatgcgtaaaatcattaagtttgtgatttaatgtgtaaaatgaatgtatattcacgaatcacgataatgggcaaaacatgtgccttgtgggaaaaagtttgaaagttaatctgtaatgcaagatgtaaaccaaatgtatctccgtagtaagagatcccacgtaataatgtgcaagaccagttaagttgcacattttgcgaaagaacgaatctgcaatgctatgtgtaaagcagtaaaacctatctatatctgtaagtctgtgtaagacatccacatctcttatacacggtattgaatgaaatgcaagtaaaatgccgccttaatttgagttagatagatcattataacaatgggcagttaccacctaagtgtcatccaagttggggcatacacattttgcacataagaccccatgtcatgttcctcgtggattgtagtttgctttctgtattggatatttattaattaaagacgtatatactttgtgtcaagtaagcatatttagtgtattcaggaaatgttgtcttacttgctgttttttgatggatttcaaagtaggatgctgtaactgagatatgtgatacctggttgtgatgaagggcttcagatattaatctgaagtttggaccacattccacactatgtttttgtttacatccagaaattaagagttacaacttttatagtgccttcttcgaacgatcccattccacatggtgcagccgtgcatctctctaagctctgttgtttgcactagttgtttgcactagttgtttgttctgtagaagataatccatcttcgtttttctcttctccctaaaacttcgttttcaggtaacagaatttgccctcttagaagattcttttga

SEQ ID NO: 109565 - DNA, 723 bp, Aquilegia coerulea
  Intron number 2 from transcript AcoGoldSmith_v1.020089m (l ocus AcoGoldSmith_v1.020089m.g) derived from phytozome v7. 0 (chr-ID scaffold_2; pos 4868427 to 4869149)
gttcagaggtatgcaattgagttttgttttctaatcatttcatttcaaaattttgtactactagatttttggtaggaaaagacggcgaaaaggttagaaaacaatgatctcttaagtttccccgccacggcacttggacttgttgatagaatactatcacataatcacattgttttgggtctctatcatatataacataacacttgcagcttaaaatcacatatattccatgaaatccttgcagctttttgctgaactagaattcaaattgatagggatgaagagaatattacaagtttttaggaaaaatataaaaatctagaccaattatggtaagaaatccatgcattcaatctgtacatgcatttgaccttgatttgtaggattctgacagcttagttcatcaagactcatctatatacggttgcttgcctttattgaattggcaaaaaattaaaatgtgacaaataatagagagtcctttagtgcccaagtactactcacaagtcacgccaacatcaatccatatggttgacgttgagtacaccagaaagtcatttaaccaaagcagtaaagctcattgtctgccttttatctacacattttgttagtatcacactaccacattttaaacctgatgattcatttagaatgaaaagatttgtaatggcattaatgtgatgattcatggtgtttgtgcagatatcagacttgaaatcgaaa

SEQ ID NO: 109566 - DNA, 634 bp, Aquilegia coerulea
  Intron number 1 from transcript AcoGoldSmith_v1.027902m (l ocus AcoGoldSmith_v1.027902m.g) derived from phytozome v7. 0 (chr-ID scaffold_22; pos 1955502 to 1956135)
ttctctacatcctttctttgatctatctttaccaggtatgactttttccatcttcataaataagttttttaagcatattgatgattatggtgtgttctggtgcaatatgaatcatatattaagtcagattgaatgaaaagtaggccttagtcataaggaaacatggatattattgccttgaacaaaccaactaggaatatggagtgtcgcattaacatagcttatattttgttatcttgtgcgatgggcaatccaatatctagatagagagttcatccaggtgatctgctacttttcttggaattggatcatctcccatgttatttaatatatacttcttgagtaactgttatgtatcgaatgttatgggaatgttgcgtctaataatcgtcagcaaatatatgacaaaattttattaatctgaatcaatagtagggacttggacttggctcaatagaagtataatcttttgatttcaatgtatattagcttatcttcggacggtatgtctttgatactgaacatatgattgagaaacttgtggtttttggctttgctgtttaatatgtagtaatagtttttagcttgaaagttttgactaattagtgtcttcttaatcctttataaaaggttc

SEQ ID NO: 109567 - DNA, 954 bp, Aquilegia coerulea
  Intron number 1 from transcript AcoGoldSmith_v1.000853m (l ocus AcoGoldSmith_v1.000853m.g) derived from phytozome v7. 0 (chr-ID scaffold_2; pos 3848519 to 3849472 reverse stran d)
agaagaagaagaagaccccttcaaaccactccaaggtaaataacaactcaacatctctctctctgtatatgttgtactaccatttcaatgtagaatcatgttacataaatgatcaaaaggggattttttttttttttgggtgttttttttttccttaaaagtgtttatttatgattttctaatcacggaatgagatattaatccattttataacataaagtttggatctttcattttcatttgtgaaaaaggtttaaaatttacagatggggagaactttactgcatttggggttgtaggaaagctgcatttaaagtcattttgagcagaaacattaagaaaaacccaactttatagatggcttatagtgatatatataaatatatagagagacaagatggaaaaagttttagttttttttttcttttttgcaattgatttaccaaatttcattttcagtacatttagcccctcgcatatttttcagttaactttcttcagttttgcttttgccgtgaacaagcaagatcaaatttgaagctttattgaaatattgaactttatttacattggtcaaattttatcaaatgctgcgagtttttctaaattgcgactgtttttcctgtgagattaacaaacactgttcatcgaggacttggaaaatgagatggatcacaagaagtggcagagtgatttttattatacagtattgtgaattatgtagcatctactgagacagaatgagttccccaaaaaactgtattgctatataccaaacacatcatataggcagaatatacaactgggtatagttgatgaatcataatgtatatggaatggagacaaccatactagttgatgaatgataatgtatacaatttttgcatttgtatctttctccctctttcttgtttatgcctgtataaaaacttttgttagtatctgtttcagata

SEQ ID NO: 109568 - DNA, 704 bp, Aquilegia coerulea
  Intron number 1 from transcript AcoGoldSmith_v1.016910m (l ocus AcoGoldSmith_v1.016910m.g) derived from phytozome v7. 0 (chr-ID scaffold_7; pos 4266985 to 4267688)
tttccgttctggtggtggtggtttccgatctggaggttagattcacactttcaagaatcttgcatttgatcaaaatcttgcattaaaattttttcaaacaggttgctttgatcaaaatcttgcattttcttggaacgattgtgaatctttgtgcttgttaacataactttcagctaaaccggtacaaaatatgtagtattacttttcaccttgaaatattgaattagaagtattaaccttcatgaatcatgactggttaaattcgcacaaaactgatttgtctggtttattagatctgtgtattattctgtttttatattgtttggattagtgtataggttacactcttacgtgtaataaatttgttgttcttgttgatgtattttataaaaaaattgatgcgagttttgatgtattacgccctgctccacgtgcacaaaaatcactgaagaaattattcaatatttcaatatgtcgatgctgcattcttgtaaaatgtattcattctttgtgttgatttgttcctttttaattaatggttaatgttggattttgatgcagaaagacattctcatgtgcctgcaactcaaaatggtatttcttgtaaaatatattcattcattgtgttgattcgttccttattaattaatggctaatgttggattttgatccagcaagccctgctcctgtgcctgcttctcaaa

SEQ ID NO: 109569 - DNA, 415 bp, Aquilegia coerulea
  Intron number 1 from transcript AcoGoldSmith_v1.002640m (l ocus AcoGoldSmith_v1.002640m.g) derived from phytozome v7. 0 (chr-ID scaffold_2; pos 5573972 to 5574386)
atatatctctcttgtttcaggttttcttctcacccttttgttataatcttgcatttggttgtacattgtgtgcttgtttcatttttgaattattttactctgttctttgttattgctttttattttttatttgtagtttatttgaatttgaaaagtaatccactttcaaaacacattatcttcaattataaataattgatttttttttttggcaaaataattgacattaccctacaaattttcttttcaatcacaatctcaaggaattgttttcttgcaaagttgtttgttttggggaattatttatagtaattctttgtgcatttctttatcaaatgttaaaggtctccatgggaatgaatataagttttttcatgcaggtgtgaatttctgattgttcttcaaactcggcgtg

SEQ ID NO: 109570 - DNA, 492 bp, Aquilegia coerulea
  Intron number 4 from transcript AcoGoldSmith_v1.011194m (l ocus AcoGoldSmith_v1.011194m.g) derived from phytozome v7. 0 (chr-ID scaffold_25; pos 996947 to 997438)
ttctgaggtatctttataattatcactaccttatgcagtcatcttccattatgaaaggcattataacaagctaatggataatttgctggctggtaaactattaatgcactttaccaatcagatgcccaagctgatgagtcctcttaagattgttttatggtgttgcctgtaaattttctctgtagtagatcgtctcagcatttgttttggttgtttctcttgcatgctttcttccaagatttcctggattactaaacattttaaatatcattaagcaataagcttcttactttctttaatggttaaagttatactagtctaccaaagcatgggaagttttgttgtgatgacaaaagcctttctatatttggaatgagtttgtatgtttccttcaatcattcaaatttgctttctagtttgaaaatctgcattctggaatgcatgaatatatgtatttgctattttcgttactttcaggctcacttcgttgag

SEQ ID NO: 109571 - DNA, 864 bp, Aquilegia coerulea
  Intron number 5 from transcript AcoGoldSmith_v1.011194m (l ocus AcoGoldSmith_v1.011194m.g) derived from phytozome v7. 0 (chr-ID scaffold_25; pos 997528 to 998391)
tgagactttcttggaacgggctgacaaaatagtaggtacgtactgttcatgcttcccaaaattttcttagtgcacagtgggagttatttcatggttgctgcctctcagttattaaattgcttaattacctgaaccaatcccaattccgaagtgtttcctagagtctgtactctgtattaataaggagagtactctaacaaacccatacaatatgcatacaaaggaaaccagcttatctcgaataaaaaagaagaagatcagtacatccatagccttttcctccatgttgtttataaatggaacttttcttgtgacatcattgcaattttttgcccttttggtctattttttctttgttcagaaccttcagaaatggtacattcctaattggagctgttagtagtctacctaacacctggccaaaccatatcagctgaccttcccatatgtgagactatatgaacaaatatcgtgcgaagaaagaactaacatacaatatcagagctggtcggatatgaacttttctgaattcatgtaaggactgatttcctcgtcatctcaaaagtttccttttccattgaagtttataaatgagacatgaaaagatttgagaaacaggactctgttacacaattagaccctgccccatgaccaagtatggctgcttgcctgagtttgttgttggcgtcctctacagattttcccgattttgtttctcttggtctataggcactttcaatatccctaaggggattatttgacatttatctacatttgtatatttgcgacattttcacatttttacaagcaaatacttggtttcatgcaggcgaaagtggcccatttgattacatcagtgttaca

SEQ ID NO: 109572 - DNA, 474 bp, Aquilegia coerulea
  Intron number 1 from transcript AcoGoldSmith_v1.020376m (l ocus AcoGoldSmith_v1.020376m.g) derived from phytozome v7. 0 (chr-ID scaffold_7; pos 3042399 to 3042872 reverse stran d)
atcaaaaacatacctaataagttaacgtaagtatatataatcattttaatcagattgttttgtttatttattttggtggattttgtttcatcaatctccctattttctgagtatttcgagtgtttgttcctggattttttttttttttttttttttgctaatgtttgattatttttgctttattttgtcatattgaaaatgaaaaaaagaagattgggatttggggttcattaattatattatgctctaaagtgtatggaaactgaaactttttttttctcccttgtctcattgcaatctgttgttgccttaattatttgggaggtgttaaggtctggaatttcactattcaactcaaataagatgttatttacatggtggtttcattaactttctatatgttcgttgatgtaagttttcttttatgtgcttggatcagtagggagaacttagtggccttgcttgacagttttt

SEQ ID NO: 109573 - DNA, 539 bp, Aquilegia coerulea
  Intron number 2 from transcript AcoGoldSmith_v1.003818m (l ocus AcoGoldSmith_v1.003818m.g) derived from phytozome v7. 0 (chr-ID scaffold_2; pos 9690399 to 9690937)
agtaccctgttactactgagctccaggtaacaaaatctctcacacaattgctatgaccaatttttaaatacagtagaaatgtagaattagattagtcgtcaaacctgtgtaatattagaaaaatattgtgtataggctttactttttgaattgtgatccatagactcagcaaccaattcattttaaactaagattgtttattagaagaagattagatgatactttttttttggttaacaagtgcaacttatattaataaaaaggaacaacgatacatactctatatatcatgatcaaattactgttgatcttttgtttgttgggtccatattgtgcggatttagtcatcagttagtagcttgcttacgtgcatattaaaatggtttttttttttttttacagagtaaattaaaatggtttgtatactagaatctaaacgtacaaaaattctatacaataggtcttgctccaaacgtacaaattttttatcaatggtgcaatacatatagttaatattttatttttcaagtgcagaatcg

SEQ ID NO: 109574 - DNA, 761 bp, Aquilegia coerulea
  Intron number 1 from transcript AcoGoldSmith_v1.019541m (l ocus AcoGoldSmith_v1.019541m.g) derived from phytozome v7. 0 (chr-ID scaffold_13; pos 1498401 to 1499161 reverse stra nd)
ctatttgggaagctattcaagtaagttttcaattacagtagtaaagtttgaaactttttctagtttttattaatggggtttaatgggtttagttaattttgattccaattgagtaaagtttgcaaattttatggttggattgtttttgttttatgtaggactatctcaatgtcaagtttaaagagactggacacagtaatatgtattttccacaggttcgaattcatcttttgagttcatttctgtttatttattataatttttaataatcaggttattatggattttctcttacggctaattggtgttaagttgtagaatgggaggaaatgtgagcaatggggttagctaatttttaataaaactttacatataaactaaattttatgtaagtagcattattatctgatacaatgctctgtagtcgtttttatttgtagctgctgagtgatacaatatgataaccaaattgcactaaaattgagacatagttgtctgtcctaattgcatattggcttatatatatttcttgatatgattaggcttagatttgtaccataagaaatatcagtcggacaaagaatactatctgtaatgatattatcgcacttacacctgtatgtaagcaaacagtttatatatcatgttagtgctcgtttctatcagatgttctatattttattaccttttcagttcttcttagctacttcttgatcctcattgcagttgataccatactcatttatagagaaagaagctag

SEQ ID NO: 109575 - DNA, 719 bp, Aquilegia coerulea
  Intron number 1 from transcript AcoGoldSmith_v1.016242m (l ocus AcoGoldSmith_v1.016242m.g) derived from phytozome v7. 0 (chr-ID scaffold_35; pos 2276063 to 2276781)
ggccttcaaaaggagagtatcttcttggtcataaggtcaccatcctttcaactccctctattattgtgattatatctttattaacccttatcagttatcatacacaaaatatttcattatagaaaaggatcacattttatatttgagagtagatatcaacatatgtgataccatatatattattgactttggaaagtgttagaagaaagcacatatcatgctttccaaaccaaacaaaattgttgattattaaaggtaattatgaccaatatacaaaccaaaccaactaatcacaatagccatataatcatccgttcaaacaatcaaactcatggctgaagaacatggcctaccactagttctgctccttggccaagtggccaaccaccagtccaccatcttcattcccggaattcttctcaaaactgttaggaaagatcaaattcttaagtccatgctgaatcagtcagggttgtggtttccttgtgtggaggtgatgacctagtgacctaccaggctaccaatagaggttctcaaagtgccagagtcaaccatgttgacttgaccgagtgtaaacttagggggatcaaatcacaaatactggaactgtgttctctgaagatgtgatcaatcacatcacattgtgatttgtgattactttaggttctatcagtgtgtcactagacactaacaagtaaccaagcatcacttgtttctgc

SEQ ID NO: 109576 - DNA, 953 bp, Aquilegia coerulea
  Intron number 2 from transcript AcoGoldSmith_v1.026237m (l ocus AcoGoldSmith_v1.026237m.g) derived from phytozome v7. 0 (chr-ID scaffold_13; pos 5371651 to 5372603 reverse stra nd)
ttcgattgtaagttcttttctttttactctcttcataaatttcacttgaataggttgagtggtatatctatccatctattattctttttatttagaccattatttacacagactccttgttgttaggaccatgtaaagatacatttggttatctatgttgtgtcgatcatcatcacaaaaacttatgtcaatcttaaacttctagacctttgaaaaattcagttcaggtcatggtacaattcattggctaaattgtatttttgtatcaaagtattcacaagttatgatcgtcagatcaaattgaacttttatgatgataatcttcacaattgtacagttgaattctccaaccttagcattatagggtccgacaacaggaagtaatatatattgtaatcaaagtataagccaagttgcatcgtggatatttctgagttctgaccatctcttttaaggtctccaggatgcacaggccttgtattgttctgaataaatacacaacggtggcctatactattgtgttgtgaaaaataagcctgagaatatttatatggtcagaagctgattaagcatagcattagttaatttgtctagtttgagattagaatcctacacactcacttccctttatattttagaaaaaaggtttacatcaacgggagaaaagctcaattaaagaataatttaggcgctttcgtaatgcagtagctagcctttaacttcactgataaagttgtatgcagcatcctcgtcatggcatccacgatggctgttacttatcacattgcaccttgggatgatgtagattgtatataggactagtttattgttatggtctagttactctcatcctggttctggcttaattttaaccttcctttcatatctcatctggttatatctttttttccgttgcagaattaggctggttgccgttgccacacaaaagttta

SEQ ID NO: 109577 - DNA, 416 bp, Aquilegia coerulea
  Intron number 1 from transcript AcoGoldSmith_v1.002557m (l ocus AcoGoldSmith_v1.002557m.g) derived from phytozome v7. 0 (chr-ID scaffold_7; pos 3777051 to 3777466)
gggaaggtaacattcaattgggatcacgttcaaccattactacacacccaacaacaataacaagaactcaagaagaaagaaagattgattatggaatttgggttatggattcaattactcaatcaaagccataattactgctactaatttaagtcaaatcttctacagttgttctagttagtagtattctactattctttactctgctttacaaaagtttggaaacaacctacaagcaagcaatcattattgtatttttcattacgcgtaaacgcgtaaagtgcgccgaaattaacaaacagttcaattacaggtggatataatagagtcagcttttcccaccccttataattatcacagctcaactgaagatatagatagaacattttgactgtttggttgagtaaagatttgat

SEQ ID NO: 109578 - DNA, 483 bp, Aquilegia coerulea
  Intron number 3 from transcript AcoGoldSmith_v1.002557m (l ocus AcoGoldSmith_v1.002557m.g) derived from phytozome v7. 0 (chr-ID scaffold_7; pos 3777890 to 3778372)
tacaacaaactagacgagccctttttgttaacttggtgagttttttctttcattttctgcgtataaattgcttaacatactacatacacttaagtttgtcttggattgttatttcttcaagcaattggaagtatatgagtaatgtacgccaattccaaagtcaataacaatccccagttttgatataaatattttcaagattatagtaggagacattttctatgattttgtaaggataagtctgaccattaattcttgcggatatgatcgttgaatgtgggtgagtctgtattttgctatgggcagttcatggttatcagtgacttgcagtttaatctgtaaagcacatatgtgaaaatcaacttctgctagcctttgttgtattggaataattaacttgtgtgtagatgctctggatctggatctggtctagtatatctctttgaaatttaattttgttcttcattttgatgggacatagga

SEQ ID NO: 109579 - DNA, 883 bp, Aquilegia coerulea
  Intron number 1 from transcript AcoGoldSmith_v1.027306m (l ocus AcoGoldSmith_v1.027306m.g) derived from phytozome v7. 0 (chr-ID scaffold_3; pos 5784113 to 5784995)
tgttctgcatcagaataataattgtttcaactatagtaatgaatatagatagtttggataactcttctcataatctgattcttattcgagcccatggaaagtaattggtattgagaaagttcttacatcctttggaccacatatttataaggggaatagctccatgcagccatggtgtttgtttaaccacctctgtcacacttattggtgcaatatacaattgtatttatatactatgttttgccagttcaaagaaagaacaacaaaatccatcagactaaatcgtaatctgtccatcattaataccccctcaaactcatagaaaacagacatctgatgcctattgtcctaatatgcctatcttgctagtgaagacttgttgatgaggaaacacttggaggagctctgatgactaaacagcccatacgactgaaatagaaaatgagcagaaactgtaggtacgggcaagactgaaaatggaagaaacttttcgaagacaagctcaaagtagtaaactgtaaaagcaaattttttaggttgaatcaacctttagaaaatccaggaagagaaagggaatttctaactttaatggaccaagattagatttggcagtcacatacagcggatgtttaatatatgtctatttcttcccaaacaaatcaatagaatataatatcggattaggacttagtattatttgattagatagtatgccaatatgcccctgttggattcttaatgcatgttgggttccttttgcctgtatgtgattccttctgcaaatttccatcacttgtacagctgtaccaagtcatatatataatagttgtattaccgtggcaatatagcttaaatatttcttgttcacattgactggatacag

SEQ ID NO: 109580 - DNA, 777 bp, Aquilegia coerulea
  Intron number 1 from transcript AcoGoldSmith_v1.003215m (l ocus AcoGoldSmith_v1.003215m.g) derived from phytozome v7. 0 (chr-ID scaffold_2; pos 5598594 to 5599370 reverse stran d)
tgcttgaatcacctaggttcttttcacctggtcaggtatgtggataaatttcatttttttaaaaaaaaaaattgatatgtttttgtgattggttatgtttctgttgtttcatcaataattcatttataccaattttttttttcattggtactatcaaatttaagacaagttaagattcaaacaagagtaggttttatttggatttggtagtaagacgatttaatctgctattaacacattctcataatgcactgatagatgatccaaatgttacccatgtgctaggtatagtttttggccaattgtgtaattagacttggtgaatagcatcttgaagattgtcaaagacagccatcttctcattcttaattcaggaatcaaagtgatgttcaaagttactgtgtttcaccatttaacaagcaatgggggtctatcatatgtcgccttgtgggatacacataacagtagtattacaaatgcaatgccatttaaaagttttcccatagggtgatcttatattgattgcccccttgattataatcaccttataatgacgattctctacttgccccatacttgtgtgattataatggcatgtctcgccaagaactgcccttggttcaacagttagaatgtatgtctagctactcgtgaatcatgatactattttggtccatatggcttaattgtacttataacattgtttgtttcattcttaaatgcaatagaagctaacttgatgctggatccatattatatgtgtagggtgcttttgga

SEQ ID NO: 109581 - DNA, 468 bp, Aquilegia coerulea
  Intron number 3 from transcript AcoGoldSmith_v1.004701m (l ocus AcoGoldSmith_v1.004721m.g) derived from phytozome v7. 0 (chr-ID scaffold_52; pos 531811 to 532278)
gacgtttggttgctagtaagtgttatcccctttaaaaaagttcaatagtgttagtcttattgtttagcttaatagtatgtgccacatggtgtgtatgatgacaaaatctatatgattaagttttgtcgctaggtttgaattaggggtctcttagttaattacgacttatttaagtgatggataaagtcaataagggcagctcgttgtgccctggatgagaaacagtgtagaagactataaggaagtccatatcagttaagtataaaattcctgataaaatcaatattacaagtatgatgaagatgcttaatgaagaaaagtgtaatacaaaagaaaagaaagaaaaattagtttatcaaaagtaaatattaaaatgcaataatcataagtggcaacttatcatgcatttataacatgcaaccatcttattgcattctcctttgaaaattacagtggcaggcgattcgg

SEQ ID NO: 109582 - DNA, 932 bp, Aquilegia coerulea
  Intron number 1 from transcript AcoGoldSmith_v1.002015m (l ocus AcoGoldSmith_v1.002015m.g) derived from phytozome v7. 0 (chr-ID scaffold_2; pos 8110886 to 8111817 reverse stran d)
agtctctgcagtgaataagccggcaggagtctctggtatgttggattttgattttatttttgtgttataattgtgaaatcacatgaaaaccattttgttttgccgagatttacattcagttaactgatagcattagaggcgagtagatacatgattacatatagtttactgttgtttttacatatacacaacgcttgccctcttgatgcttaaatcccacaggatcaatagaagtacatctgcacacacatgtttggggaatagcgatcttagtcctgttcagaatttctcgagaaatacaataggtcgagaagactatgtcagtcaaggaacatatatactatctgatttttttttttccctgctcatttaggatgaatttgggtttaagtctgcattgttttggtttgtgtgccagccttttttctttggtgtttataagtaaaacttgaagcagtatccataaatttaagaatgttgtcttttttccctaaaagcaaaacacaagaagagctgctctttacatgcatagacagtggttggagaatgactcctttatattggtccacttctgtattttaatatatcaagcattgttgtacatgtactttgatacttggtgtagaagattatgactctacgagtttatacctaaatgatataacattatggaaaccttctcctggacttaatgagccatatattaaatattatcttgaagggaaattcacataattctgacgcaaaagaatggccgagaaaatcagttcttgtttcatggtgaaaaatggcttctaaaacaattcttatcttttgtgtgtgcctccctctgatccccttagaggtttcctatttcttttggtttacaaatttcagcatttagttagtaaatacttttgcagaaaaaggtggaggattgtcggaacttcaaa

SEQ ID NO: 109583 - DNA, 387 bp, Aquilegia coerulea
  Intron number 1 from transcript AcoGoldSmith_v1.021291m (l ocus AcoGoldSmith_v1.021291m.g) derived from phytozome v7. 0 (chr-ID scaffold_16; pos 4018267 to 4018653)
aggaaactgctccatcaacaagcccaagtggccaagtatttattttcataaagggactttttaccttattaataaaataatttgtactattttagaaataaattcatttaaggactaaaaaacaaaacataagatagatcaaggactattcaaataaatatcttaaactttcctttatccacagagagaattgggctttttcttttcttcttgaaacaaacggatagaaaaagctatggcttctgcaacaatgctgcagtgttcttcttcttctttaaacttcttttcttcttcatctctaccatcaattcaaacttgttctcatggtgttcgtttagcattttcttacaagaaaaacccttgtttgaatcttagttcttctcgtaa

SEQ ID NO: 109584 - DNA, 788 bp, Aquilegia coerulea
  Intron number 1 from transcript AcoGoldSmith_v1.017140m (l ocus AcoGoldSmith_v1.017140m.g) derived from phytozome v7. 0 (chr-ID scaffold_32; pos 228151 to 228938)
ccagcaggccttaagtcatcaatcagctggcaacggtaaggaactcagaaaccttttgcaccctttatctttgaattatatcatttagtagtcacacagatcatctaacttgagtatgtgacacagcatgcatcaagattgcttcagatttacacaataaactttacagtctttctgttgttttttggataagcatgatcacatatatatgtatgtaccagagaactgatatgaatcattcacacttgctctaaaagcagataaaaagccgcatatgacagagattgcggttatctccagtgtattaatagttgtagtactgggggttctatttggcttcttctgctattgtaaacgtcgaaggagtaagacatacagaggtatatatatggaccaaattaagttagtagagataataaaccttcagaagtactagtattcagtatttcagtttaattttttcttacagatcaggtaaaaagtgatcatgcattactacaggattccgtagttccagcgatactcttcagcaggaatactcatggtaacaagcagaataataatcaagatcagttgaacttgatggatttgactattataaaagtagctacagataacttttcggatttaaataagctaggacaaggtggttttggaactgtttataaggtaaaaatgaaagttaaattgttttcacaatgatctaagacagtttttaatcataattaggttaggaaaatgtttttaatcaatattacttttttgcaatcttcagggtaccctgttag

SEQ ID NO: 109585 - DNA, 1052 bp, Aquilegia coerulea
  Intron number 1 from transcript AcoGoldSmith_v1.003435m (l ocus AcoGoldSmith_v1.003435m.g) derived from phytozome v7. 0 (chr-ID scaffold_58; pos 352931 to 353982)
ttccataaatcaactgtcatcttccttctctacaggtaaatctcgctcatctctccaaacctagggtttagtactagtagggtgaacatagtaacacatcgtccatctcagtatctagggtttagacatcattgatttggaaattattcttctttcatctatgaattgtatttttttttgagttttaagtttgatttataattattttgtagaatttatagagtcgttatgccttgtgtttatttatcctgtatttgaagtgttgaacttgaacattaaccttgatgtttagttggagatattcctttggaatcagacaactgaaagatgtgttattaggaatactagttatagtgttaagcgaatagtagaattttagtctcattatccgaattgtgaaaaagcaagaaacacaatatcggcctgtttgtatcaatttccattcgataccagttttgattgtatattttgtgtgttagttcagtgttaattaatacacataaatttaatctgttacttttttgagaaacaatatggaaaaccttgacataattcatcacacggttctgctacatcaacacataaaaacataaaccactagacctgtagttgtcgtactcgtggtctgtgcctgtatagttagtgtccatgataatgtcaatagatacaattttgagtactagttctcacccggttgctgtcctattgtcatgtattaatgtattattattaaatattgttgtcaatttatttttgcaaatatgtctatcgaaaaactgttggcatctatttggttgctgtttctgcaaatagtattttctgcttttcttttcttttcatcaatagcttttgacaatctacatttggttcccactatgttgctgtatactggttaatttatactttatgttttttggattggattggactggaactgcagttcactagcaccactctccgtgttttaattaagtgaagctaaagcccccttatacctttctacttctcccttccttatttctctagaactttgtcgtcggaagcaccaagca

SEQ ID NO: 109586 - DNA, 126 bp, Aquilegia coerulea
  Intron number 2 from transcript AcoGoldSmith_v1.009490m (l ocus AcoGoldSmith_v1.009490m.g) derived from phytozome v7. 0 (chr-ID scaffold_2; pos 6546886 to 6547011 reverse stran d)
catctaatagttaccccagtaggtgagatttggttcttccgactctagtttcttcttctagctttaattttttgaattatttaaatatgatttcattgtactcgttttccaggaaaagttcaagtg

SEQ ID NO: 109587 - DNA, 462 bp, Aquilegia coerulea
  Intron number 1 from transcript AcoGoldSmith_v1.003275m (l ocus AcoGoldSmith_v1.003275m.g) derived from phytozome v7. 0 (chr-ID scaffold_22; pos 2512537 to 2512998)
attgcatcaaggtattaatttcaaattgagatttttttaaaaattatgtaaatgtggtttaatttgtttatctgtgagcaatgtacgcttttagaattaatatgtgaaggtacattctcggctgagaaaatgccttaatttacttgtctggacacagctgaaactgattagagctattatgtctttttgccaaactgaatatattttacatagatagtaattcttttttataacctgaagcacatattaaaaagatagtaattatagtatattcatgaatgagaatgtgcttcaggttataacctgtagaatatcagaatgctagaattaatatgtgcttcatggtactcattcatgttgtatatcggaatctttcttcttttttttttttggtctttttgaattttaatgctaatttagtttatctcaaaccttccagggttcggaaaccagaaagtcctg

SEQ ID NO: 109588 - DNA, 1018 bp, Aquilegia coerulea
  Intron number 2 from transcript AcoGoldSmith_v1.002052m (l ocus AcoGoldSmith_v1.002042m.g) derived from phytozome v7. 0 (chr-ID scaffold_3; pos 3511242 to 3512259 reverse stran d)
aagaggaagacaccatcagaattgagagtaagtttctaactttagaagttcagattcctgcatatcatctggttcaggacacgggcatatatttttgataacctgttgctttgttacctttttatctgggtttaattttattaaaattctgttttgtatcttatcttacacacacacatatatatatatatatatatatatatatatatatatatggttatgataaattattatgatgacttacaataccaaagaaaaaatacaccattgataaatgataactcatttgattttttttttcacttgatgatttgagctcttgcattgaacgttcctgggaaaaatgttggaggaatgtctatggggttatttgttgaaaggcagtagttgctgttcgttcttggttgtgaaaatcaggacatttatattgttgttgaaaccatcaaattgtccatttttggatttttcccatttgtaacccttccctccattggtttggttgctcgcattgtttaaaattcctgtcttccttatattaataaaaggtctgattaacatggtttgttatatttatacccatcggaagtttgttgtggtaagcttgtttttattgagatcagtaactcggtaatgctggcgggattcgaaccccagacctctggtatcatcactcaaagtttttaccagttgagcccaactgacacctgcatgcaaagtttgttgtcatgcttcccagaatttctgattaatttaatatagattccacttcttgaacttttcttcctagaaacacttacatatatattctcttaatttttctaatacacctcttgcataatcattttctcactgtctatgataaattattatgataacttacaataccaaaggaaaaagacaccattgtaaatgataactcatttgatggtttgagctcttccatttggaagagtcaagagtgtgactactcatgtttatttgcatgtgtggcaggacgagcagttaaagcgaaaagtag

SEQ ID NO: 109589 - DNA, 599 bp, Aquilegia coerulea
  Intron number 1 from transcript AcoGoldSmith_v1.002052m (l ocus AcoGoldSmith_v1.002042m.g) derived from phytozome v7. 0 (chr-ID scaffold_3; pos 3512373 to 3512971 reverse stran d)
ttaaggcaaaatcgattactcttcaatccgtacaggttcgattcactgtttttctaggtttaactgaattaaaaaacaaactcttttcatttattattattattattattaaagtttaatttttggattttcttgcacgagatagattttattgactcactttgtaactcaacttctgaggaattgtagagaacttgagaaattactgatttttttttgaagtatctggtatgttggttgcaatttcaagttcacatttttatataaaaatatatttttgaccattttgtcttgtaattgagttgtgagatttaatatctggatgaataagctataagcttatgatctaattttgaaatttttataaattgggacttttttttttgtataaagttcaacataaaggattttgaattattaataatattcagaagttagattctagtaagcagaattataattgccgctttcttccaatgcgcttgggaaaatttagtttcaagattgttaatgttgttgttgttttcctgactcaacctttatcgtattttataatgaaaatatacgcaggtgaaagaagaagtttgtgatagaagggt

SEQ ID NO: 109590 - DNA, 997 bp, Aquilegia coerulea
  Intron number 4 from transcript AcoGoldSmith_v1.001385m (l ocus AcoGoldSmith_v1.001385m.g) derived from phytozome v7. 0 (chr-ID scaffold_7; pos 7122622 to 7123618 reverse stran d)
tctcaggtctgtttattttggtgttatatgtttctaagtatattaacttttgtgaacacaagttctccatgctgtagcttacatggttaaattgaaagttccagtttgatcttataatatagcactatatttgcttgtatgaatatgaatataagattataagatctggctattttcagtgaaagcatacaatttgagtcacaaaattaattaatatagtactatacacatctcagccgtgttgggaatttttttttttttttttgtggaatttagtcagattgcaagatttgactatttatctgtgtcatgcagtcgtttatatgaacatacaaagcctgatgcattgtgaaatatgacatgcaaacagtgtttttttttcactgtatgtgcactacagttttgtctgataacattgtataattttaaagtgtcatccccttcaaaacttcctcaatactctcatctgaaatttgaactttcagtatgtctcagctcaataattgcacaagctcatgtaatatttagccttgttgacaacataattaggtaaagatttagtggaattgagcatgattcaggtcagatttagtgttcaacggttgagccatgagcagtccagtttctgccggttgatgaacagtgtcttaaagactcctcaatttacttattattttcaaaacataataatagaaaactttttttatgacaagttttttaattgttcattggttgaaacatatgataccaaagtccaagttttaaattttcttctactctttaactttttttgttacaaatggatgtaatgacttgacaatggctggtctccaattcggaatggtatgcaagtctcttggggataaaaataaatagttttgagctgcagtgtaaatatatctctaaacacttctgtcatcatttttacattctgtcttttcttcttgttgcaatttttatacctcacccttgtagctcatgtggatctgtaggtgaa

SEQ ID NO: 109591 - DNA, 363 bp, Aquilegia coerulea
  Intron number 2 from transcript AcoGoldSmith_v1.001385m (l ocus AcoGoldSmith_v1.001385m.g) derived from phytozome v7. 0 (chr-ID scaffold_7; pos 7124501 to 7124863 reverse stran d)
gtacatctgaaccccattctgtttctttaatcttggtaattgttgtttttattgatattggaggtgttttttgtctttctattattattaaatctggtcatgaatctctatcctgagctctttgtatctcaataatgttttagttaaatctttagagtggcctgcagaagtgttgtattttgttttcttcctttgtcttgttagttaaattttattggtggaaatttgaatgacagattggtgcttttgttagattatgtgaatgaatatacagaccgtgaaaccttttgaattctgatcttgatttttttttttgccaatctggtaggttagtctttttgtgattgaattgtgaaaaaaaaa

SEQ ID NO: 109592 - DNA, 674 bp, Aquilegia coerulea
  Intron number 1 from transcript AcoGoldSmith_v1.001385m (l ocus AcoGoldSmith_v1.001385m.g) derived from phytozome v7. 0 (chr-ID scaffold_7; pos 7125125 to 7125798 reverse stran d)
ggttttcgagttgaactggtacgatagatatcctctcttcttccctctctctcgctttctctctttctctgtttctgtttctctttctctctcttcgaaccagaaagaaaaacaaacagaaaattaaaagcgatatggtttcttcgatttctgtatgtttttaactttctgaaactctttattagggctttttttttttttttcctttctaaagattctgaacagatcagattgaagtattcttttcatttttaaaagttttgattgatttgaaacttgtaaagctttagatttattcaaatctgattgtttgagtaaatagcgaagagcttagtttgaattgatcgcttgttttcaattacagattgaaagattcttcatgtgtttgttcttattgtttgaactgttttgatcgattgagtttgagatttaagttgctttttagcttagaaatatagatttcgcatctgtttgaactgtgaaaagtagaattttcttcaattttatagcaaatttggtggaaattttgaagttaatgaaagttgagaagtcagattttttggaatgtttgtaatgtagatcgcttaggaattataaattaatattatctgattagaagtaatgttttgattaattcaggtaatttgaagttttactgcaaatctgtgagcaaa

SEQ ID NO: 109593 - DNA, 145 bp, Aquilegia coerulea
  Intron number 1 from transcript AcoGoldSmith_v1.009322m (l ocus AcoGoldSmith_v1.009334m.g) derived from phytozome v7. 0 (chr-ID scaffold_24; pos 689788 to 689932)
tctatctttctcttgtgggggcagagagaggtaatgtaatgaatccaagaaccgcccatcatctaattttattcaaaacttccaatttttcttcaaaaggttttgttttatagcaagttgtttgtttttgtatgcagatatagag

SEQ ID NO: 109594 - DNA, 750 bp, Aquilegia coerulea
  Intron number 1 from transcript AcoGoldSmith_v1.017062m (l ocus AcoGoldSmith_v1.017062m.g) derived from phytozome v7. 0 (chr-ID scaffold_2; pos 5682443 to 5683192 reverse stran d)
tgaaaagagtgatttgtcatttgtggaagaacagggtaagtgtattttagtttaaattttgagatttttagacataccctcatttaaaagtcgaaatttgagataccccatttaaattttttttgagatacccatttgaagacaaaagagctttacagccgtaggtgagttttatgatggacggctaagataacaccacatcttgaattggggtatttcaaattttgtttcaaatggggtatctcaaatttcgactatgtccaaaaatattatcctatttatgaaatatattcattttaatgattttcttcgatcaaaacacatcaaatcatcaatgctgctttttttttttccttttaaaataaagatagatagagtcacggtacattgaaccaaacacacatttgttgtttctctctctctcctccaatactccaattgattaattgaagggtgcgaaggataaaacgaacagatcagtgatcagacaagttgaaaaagtatacaagtaattgtgagttgttgttgttattatggtttttaattcttctagtataatttgaactcattttaaagcaatcttaattcgtttgtagtttatgaatcaatgttttatgaaactaaaaagggttgttagaaattgtaatgttgttttggtttcatgaaacccctcttattttttcttcaaacctaatttgtattcttgtatgtacagactacagtaacagtatatacattgctactgcctac

SEQ ID NO: 109595 - DNA, 480 bp, Aquilegia coerulea
  Intron number 2 from transcript AcoGoldSmith_v1.003049m (l ocus AcoGoldSmith_v1.003049m.g) derived from phytozome v7. 0 (chr-ID scaffold_16; pos 3223700 to 3224179)
cagtaacttcgcttgcttcttcagaactcaaaattgtaagttttttttcttctttaattagtgaatcattattattattattttaatatgttttgttacttgtaatttgagctacagttatgagtttgtaatcttgagaggtttatttatgtattttgaagttaattgtattgaattttgtgttataaattgattaaattatgataatgtgtggcgttcaaatcaaggatcacactacactgttataatagatggaaaatataatgatataatgtggagtttgatatatgttggattcgaagttgctgttgtatgtgaaaatagttttacgattttttggggaaggtcatttactcgtctatgcatatgttagtttagatgtttttgtttttgcagtaggaaattgtaggctttttggtgtttgaattttttttttatgtttttatctaggagcaatttgggtcgtccagtccgaaagtt

SEQ ID NO: 109596 - DNA, 1041 bp, Aquilegia coerulea
  Intron number 1 from transcript AcoGoldSmith_v1.005027m (l ocus AcoGoldSmith_v1.005027m.g) derived from phytozome v7. 0 (chr-ID scaffold_2; pos 5081731 to 5082771 reverse stran d)
atctcttcatcacagagtcttctttcatacaatcggtaagtttcttctatactgtgtaaagtttgaatttttatgttgtttttagcttaaacaagttcttattccttgttcatgatgggttttgttagtttttcttagttgtattaatgtgaaagagtgttagattagtttaaagtgctaatttattgattgcttttgtttaaagtgttatttttttttttttttttaattttcatttttagttatgatttgaggcttttagtaccaaaaatgttacactgaagctgttagtaaaattacaaaaatttatgatctttgtaaaattgaaatgttgggggttgtgatttgtgaagttggtatttagtactagagcaaggctgagaaagggagtgaagaactggaagaagagaggggaacagagaaataagagagagactaattgtagtagcagaggaaaaagaagaaaattctttggacagtcaataacactgaaagatactaatgaattgccctcctaagctccctttggttattttgtgcaccaatttttttgttaaatccattttatatgattgttttttctaagcatgttttgctgctttagtttgattatataatctcgaaatgcagcttaaagtactgttcatgtattacgtcaaatctaatgactttaaagtaatgttgagaaaacaacaaactaattttcttggctggtaaaataaatttagcttgatagagtcataatactgtcagggtattctttttcttgccctttatatttttgtttagttcacatggctttgggcatttgttgggtcatcagattgtattatttgttcactattttatttttttctggttgcactttgtataaagagctatgtttattgttaattattaatgtttcgaaagatattaaacagtgagcccttgatgtttgttttcttctatgctaggttgtattggactattggtagatgatacatagtttttaaattgatttcaggaactgttgaagcatttaacactctcaaaagatct

SEQ ID NO: 109597 - DNA, 486 bp, Aquilegia coerulea
  Intron number 1 from transcript AcoGoldSmith_v1.022828m (l ocus AcoGoldSmith_v1.022828m.g) derived from phytozome v7. 0 (chr-ID scaffold_19; pos 1422899 to 1423384)
gggttagttcttaatcttatgaaattatatattttttttttcccaatctaccctactaggtatttgattacagtctaatttgtatttaggcactgtgatttctgtgtataatttaatggtcttgctttgttgctttcttttcccttgttgatgttaagacaattatataaacaaaaaggttctattatctttcttttagaaggcatttttgtcgaaaaataccctttaattttaaccaattttgtggtgattttcatcacaaatgtattagatgctctacaattgtaattcgattaaagtgtgttggatgatctacttgtgaacatttggttatgtctcgggtattaaagagggatctgtgttctctttaacctctattttccctctgttgacattctttctcaagtttgtgtttgtttgatctttggactttatcattttgcataatcaggcaatatatgaccatcttgttctttatctacagat

SEQ ID NO: 109598 - DNA, 649 bp, Aquilegia coerulea
  Intron number 1 from transcript AcoGoldSmith_v1.027343m (l ocus AcoGoldSmith_v1.027343m.g) derived from phytozome v7. 0 (chr-ID scaffold_44; pos 1265933 to 1266581)
caacaatcttctccttctcaggtccattattattccttaaatttctctttacaactattcatggatccttttattaatatattaattttgttgattgtaaacaataactgtcaacatgttagatccattattgcaggccctcatattttttttgcgacaatttctatctatcatatatacagtaatacatctatgctaattcactgaatataattaacacggatgcattatataattaccacatatctaactgattttataaaatttagtagtgttaaaagaacctttgtttcagttttttgaatattgctttttagtcctttctttttcaaaatgatgtctgtccaatgtgcataccgaatgtgatgtttttaaacccgcaaatggagtggttgtacttgtatgtgcatagtagttgtttttttttattggaggaatcttcttgatcatgtcaagatcgagaaatcttaaagtttgtttcaattgaaatcgaaccatcggcgtgttctaacttctaagccctaatactttgttatattaaaatgttttgtgaatatcttttgggctttacatagctttcctatgttaatgttttcctactatttgatttgcaggcctacctagtaaagctcccaaaaaatctcctgtc

SEQ ID NO: 109599 - DNA, 818 bp, Aquilegia coerulea
  Intron number 3 from transcript AcoGoldSmith_v1.011351m (l ocus AcoGoldSmith_v1.011351m.g) derived from phytozome v7. 0 (chr-ID scaffold_7; pos 5474885 to 5475702 reverse stran d)
ttgctgagttcaatattactttgcagtcggatccggtaaatcttctgtattaggtggttgagctttacattttttattctcgtattcctccattgtcattgcgtgtctttatttcgttaatttcttgaatgccgtgatgtcacgggtatattgccagttatgattattgcacctatttatttttttgtcaaacttaaactctggaatgcaaaaaaaaataaaaataaaaaaataaaaataaaaataacattgtgataattgatcttgtgttagagacctttatactttttggtaatatcttgctattttgaggcaaactttcttgtgtgaggtttgaacatagaaatattttttgttgcatcccatgaacctccagatacccagaaatcatgcatgtgcactctttaatacaaatgcagcaattatgtagacaatccaagttggttttatatcattgattaaaggttctgaattcttattaaatttggggtacagaaaaggacacaaagtagtgagatcatacaagtgacatctttccagtgcactgtatttcatttcttagattgtttaaccttggctgcatgatatttgatatatcatcctgattctgtggggtctttcccataaaatatatgctttgactaagaatgtttgtttgttgtctttgaagcttattaatttctcttttaagagttttagagtgatttgcattgcctagtacttgtatattctcgcttgctttatttaggcctaatgtgtgtgaatcttacaaaatatttccagaagcagaaggacttgtcattaacgaagattgagct

SEQ ID NO: 109600 - DNA, 534 bp, Aquilegia coerulea
  Intron number 1 from transcript AcoGoldSmith_v1.006241m (l ocus AcoGoldSmith_v1.006241m.g) derived from phytozome v7. 0 (chr-ID scaffold_34; pos 452915 to 453448)
ttggtggtgctaattcaaaactcaaaaagaaaaatgtgagctttttctatatcatgttaatttgcattttttcaattattattatttggtgaaattgacatagttttgtgaatcttagtgggggggtttctttactttttttttatgttgatttgtatattgttgtttgttctgaatgttgggatggaatttcatattctgtgaagatgaaagttgggatttgaggactagaacatttaagtctaggaaaaatttcctgaagaaaaatttgtgaagttcttcttttactgtgtgttttgatttgatgcatttattttcaaccaattctcaaattttggaaggctaacatgtttttttttttctcctttcaagccttgattattatgtataatatgttaaggtagccatttttgacaaaagacaagttctaaatatctgttcgagcgaaaatatagttaagagtaagaagggtgatatatgtttcttgaaatgaaaatgttataatagtgtttcttcttcccctttatcagattc

SEQ ID NO: 109601 - DNA, 930 bp, Aquilegia coerulea
  Intron number 1 from transcript AcoGoldSmith_v1.018039m (l ocus AcoGoldSmith_v1.018039m.g) derived from phytozome v7. 0 (chr-ID scaffold_2; pos 2060986 to 2061915 reverse stran d)
aaggtattaataataataataataataataataataataataatgtttttagggtttaattttgtttactttgtgaagatagaattttcattaagtagtttggttagtggagataattgatttacattatgttgatgtggaaaaaaaaaaagctcatatgctgttagtttgttgttatttatgacctcaagataaaattttcgccttattagatggcagtctggctggcttctatgtaatagaacagatttagaagatttaacacaactctttgtaagatcacaacagtaaacatcttcactttccctaccatgtctacttatgttccctaaatttgccaaagttttatcagattagcaaatatacctgttattagcattggttacagatggccaaaatgcaatgcctccacataagtggagggtgctactacctgttatctcatttttggaaagacctttaggcaaagtacggaacagaccatctgtaatagtacataagtttgaagttgtgacttacatcaaataaaatttatggttttaccgattaaaaagcaagaactattcatcaaatgttttgtgccatctattagacaaaccctagacggctaaacgctaaaagtgtctaatcactactgacataaactttagtatacatgctgacatgcacatctgtgtcgaaaaaaaccataaagagggttcctggctatggtgttgtgttgtgaactcaatagtagtatacacccgtatccccaaagttaattatttcattgtgagctcctctgaaagcacaatttgtctggtaaaattcttctagctgtatgttaattggcacaagacaaaatgtccaaatgacaaccttaacttatgatatttttggtcttccaattcgttttatattaatcctttcttctcatttggcattggcaga

SEQ ID NO: 109602 - DNA, 826 bp, Aquilegia coerulea
  Intron number 1 from transcript AcoGoldSmith_v1.014127m (l ocus AcoGoldSmith_v1.014127m.g) derived from phytozome v7. 0 (chr-ID scaffold_16; pos 1193933 to 1194758)
aaggtggaagaaaagagttacctctgtgttcgatttgattcacagacaaagagaatattttgcttaattaaggttttaggcagtcgaagagataagcccaacataacaacttaagcccaacataacaacttaagcaatagaaattgataagtaatagaaattgaaatcgataagttaaagttatagaaatagaaattgaaattgaaaagtattttggtaatagaagttgagtgttgatagaagttgaaattggcagtgacataacttgatttactggtgcttttgggatccatagcagatgaaaaggtcagagcaaaaggcacatcgggagaggatggagtagtgaagtgattcaactccggcggtggagtgaaaggagcagttgatagctctgttgtaaaggttgataagtattttcaaccaaagctcatctcaagcccaattcgaaacataagaacaacttaagcccatataacataacaacttaaacccatattccgtctccaataaggtttcaactaaagcccatctcaagcccaattcgaaacataacagcaacttaagcccatataacataacaacttaagccaattttctgtctttgtctagttatgtttatctccccaagtttgtgtgtccacgaacagtataatatagatatactactctatagttcattttaagtaatatattaagatttgaaattttgagtgatggggtttcaaaatgtggttttgggtttagttttagttttagtatgttttctcctagatacaaatgtatctgtggaggagacgagttttcgagttgagattgaagctttgaa

SEQ ID NO: 109603 - DNA, 910 bp, Aquilegia coerulea
  Intron number 1 from transcript AcoGoldSmith_v1.016941m (l ocus AcoGoldSmith_v1.016941m.g) derived from phytozome v7. 0 (chr-ID scaffold_58; pos 1048146 to 1049055)
tcgaaggagagacccactcttgggtatgttatttctacaccaattgtttctttcaatattagttgtgattttgccatattttatgaccattagacatcaatgactgatgttcttgttgtatttgtatgattctgaattacttcagtaaattgatttgtttcatgtattcatgtttaatacttggagtgttttatcacttttatgatatccatgttactataaatctgcattgatgtagagtttcaaatttactaacttgttttagctatgacaatgattctgttactcagaaaaataatttagttaatgtattgctctgatccctggacaatacttgctttaaacttattgctgtactgccatgctttttggctcataattgattgaacccgttgcagattgtttaccttttgtagattttaattgcattgttgttatattttcaatgatccttttttctcattgaatattgaactcaaaacttctatatgatatttcgttggctcaagttcatcatgcctgttgagctgccagatttttttttttttttttgaagaaatacctccatggtgcagtctaaactctaataaatgtatctggagcttagtcatagtaaatttctcctgaaacttgtgggttgaatgtacttctaattggtttattttgaagcttgggcttaggagcagagttttttcgtatcaagtttagttttaattgtctttttatgggtttaagtgttttgatcccgaagcgatggcttcctgacacataacaagtatatgtcaaactagctatgcttctttgcttcccactatcgtgcttgttttgatttcttagcttatgacttgctaatcatttctccttggttatttcagtggcacgcggatcaagacccgcaaacggaatatag

SEQ ID NO: 109604 - DNA, 550 bp, Aquilegia coerulea
  Intron number 1 from transcript AcoGoldSmith_v1.011704m (l ocus AcoGoldSmith_v1.011704m.g) derived from phytozome v7. 0 (chr-ID scaffold_13; pos 1279181 to 1279730 reverse stra nd)
tttctcgactaacatcaagcaaaacacaaacacaggtactactaatttctactctgctttctttgttttcaagttttgattttgtatatagatgaagaaaaccaatatttttaaaatttcttattttgaactatttttcgcaattttaataaaaaccccaccttgaatttgttgaattgaagtgaagttagtgacttgttgaaattgggtatgttaatactgactagagttaagggatttgatattgattctgttttcttagctcaattagtctgagaattgagctaaagaagttccctttgataatggattgtagtttgattgattctattattgcagattattctgtgtttcatgtcataattttcaaataattttatttttatacttgaatcctgtgtctgatattgagggttgtatgcggcatattgctttctaaacaacaattcataagagatatgattgttgagtcttttaaattgagcttaagaacctgacatagatcatacatgtgaaaactaaaatatttacttgatttctgttatgacag

SEQ ID NO: 109605 - DNA, 555 bp, Aquilegia coerulea
  Intron number 3 from transcript AcoGoldSmith_v1.004049m (l ocus AcoGoldSmith_v1.004049m.g) derived from phytozome v7. 0 (chr-ID scaffold_26; pos 567718 to 568272 reverse strand )
ctgatacatctctttcgccagatcaacgccatcttgtaagttacattggctcatcaattctagtaaacagaatgatgtcttactgctataaattttgacaaagttatatatatatttcactccttcagtcagagtgaaatgagatatggaaggaaaagggtggagtttctttccatctaacggtttgactgtttttattgattagtctcactgaaataacagttggatatcctaccatctcgtctgacagtgtcgtattaagttattaactaaatatttagcttctagacttctatcctttatttcgttgcaaattaggtgtattaaatatggtgataaaccgcataatttgatataactatataagtatctccttgtataactatataagtatctccttctatcctttatttcataacattatgccctttattgttctttatcaagtgaatccatttgctaatggtaatggtttacacaatgtttcttcaaagatgtaaattagttttgtcttatactgttctcatttatttctattgtttaacatacaggtct

SEQ ID NO: 109606 - DNA, 280 bp, Aquilegia coerulea
  Intron number 1 from transcript AcoGoldSmith_v1.004049m (l ocus AcoGoldSmith_v1.004049m.g) derived from phytozome v7. 0 (chr-ID scaffold_26; pos 568974 to 569253 reverse strand )
aagttgctggttcttgaatagttcaactgttcaagtaagatttcatttattcttcgaaaacctaattcactttgatcttcgaattcgcaatttttttttcaatttgtgtttcttaaacttgatcaatttactctaattctgttgattttattcttaattaatcaatcaacaagttcatctagctagattagatcgttttctcaatcgatagttaatcaattagtttgaaattataattgagttgattgtgttaattttttttcaggaattaatttgataa

SEQ ID NO: 109607 - DNA, 850 bp, Aquilegia coerulea
  Intron number 1 from transcript AcoGoldSmith_v1.027053m (l ocus AcoGoldSmith_v1.027053m.g) derived from phytozome v7. 0 (chr-ID scaffold_16; pos 864705 to 865554)
ggcttgaggtgaatttttaaaaactaccaatacttaatcctgtcacgtagaatttgaaaattgatgaaattatattttatgacaaaatcatctttcaataaacttggaaaaataaactttgtagagtttatactaatattagggaaatcatattgacacccggctctttacaaagagctatccaacatattaaaagcaccccccaacaaaattatatactatttttactaagagccacacacctatttaaattaaaaatctattagaaaattttgaatttttttcatttttttttctttgattctcttctctactttctcttttcgtctaatccattaacaaaaaccaaaatcattacactcttgtttaccaaaatcttaaatttaatattatctattctttacgatcatggtaaatttgtaagagataataaaatactttaatatggacgaagaccactaattcaagaaaattttgtttaaagtttaacttaatgttatttgacctaaaagttaaaagaaaaattaacaagttgaatattttaggattttcatttgaacatttaatttacttaaatatttgaagatcaaattttgaatatggagaaattttgttgagagaatggggaagaaatagaagagaaagaaagaaaaatgaaaaaaattgggtagctcttatcatattaggtgtttttaattagtaacaatttttggatggggtaagcttaattttttggatagctctttgtaaaatattgggtgtcattatgatttccttattattattatcacatgattattaacactattatttcaattatacttgttaggcaacaaggttacttcgagag

SEQ ID NO: 109608 - DNA, 869 bp, Aquilegia coerulea
  Intron number 1 from transcript AcoGoldSmith_v1.004337m (l ocus AcoGoldSmith_v1.004337m.g) derived from phytozome v7. 0 (chr-ID scaffold_16; pos 2476522 to 2477390)
cgttgttattcttcccttccacaccaacctctcaggttttcttcattccattaagaaaaagttcacttttttttttaatctttatttcttattactattattattattatgaaatattttgaggtggtggggttttttatttgcagatatgcaattcttggagctggttttgctggattatctgttgcttggcatctcttacaggtttctattactacatttatgtagaaatgaaaatggattattttattaatgacaaattttcaattaagacaatcatttctgtatatataatggttgcagtgggggtgtcgtgttgcgattatgaaccatatttgatcctttgtcatttggagaatttataaaacagtgatggactgatggttaaattaaatatgcaatgactcatgattggtgcgactgaattgttgtaatggtatcagtaaaattgattactaaaacaatgtatacgctaaagagtttgtttcatggcaactgaccaataatcaaccttccgtgcaatgtagtcattcattcagtggtttgatttggatggtgtcttgttcgttcaatttagtcaaatgacatacataaatggtctggattttagagtggcttttctatgccctttttcttttgacatgatgtccctttggttagtctgaatcaccaaagactcacacattgcccaacatagattttggaatagctaaatcaactttgttaattatggggacatttcgcctgatgaccttctacgtgtatgcacatgtcttagctcctgtgtactcttggctttcgataaacttttcattgaccatccacttgacaaacgtttcttatgctgatcagaaatttacttttgcaga

SEQ ID NO: 109609 - DNA, 290 bp, Aquilegia coerulea
  Intron number 1 from transcript AcoGoldSmith_v1.005538m (l ocus AcoGoldSmith_v1.005538m.g) derived from phytozome v7. 0 (chr-ID scaffold_13; pos 5840366 to 5840655)
atatcgctcttctcaaaacctatgtaagttttcttcaatcgaaaaccctaatttcgatttggaaatattgttatttaatgcttttgatctaaattgcaatctatgttttcgatctgtttaaactttgtgtacttatctcttgatctctttgttttaaattatattagggttttgaatcttgttttgtgtaaattgagttcaattactttagatgatgttgtgttgatgagtttattggaattgttttgttgatagggtcttggaccatactcgaaccccattaagaaaac

SEQ ID NO: 109610 - DNA, 622 bp, Aquilegia coerulea
  Intron number 1 from transcript AcoGoldSmith_v1.004265m (l ocus AcoGoldSmith_v1.004265m.g) derived from phytozome v7. 0 (chr-ID scaffold_2; pos 4054614 to 4055235)
ggagaactccataagtggcactagcactcattgtaatctttgttgctttaagaaaacattccatttcccccccagttttcgagaatttcttgatttggcttgttctgtacttttgtctgtttcatttactttgaatacttatattttggtttactttgaatgtgttatttctgtccattgtgattttttttttggcatgttctgttgatggtagcaagtttgtctttgtatgaatttttgattgttgtacatttgtttcttaacaattaagatctaaaaaaatccattatttgattcctctagttttgtgctttgtaattacataatgatataccattaatttggattaaagttcattgccagatatgaatatcatatgtcacatggattccattcaaagattctgggttgttgttcattatgcggttctgcgttgtaaaataaaactcattcacgcttcctgaagttttagatgctttgaagatttagatatcatacattaaacatatacttagtttactcattgctttcaaataagtatacgaaacaaatggtttaacatgtgttttctttgcatgatccagcagaaagtaaatctacaactgatactagcagagaccag

SEQ ID NO: 109611 - DNA, 823 bp, Aquilegia coerulea
  Intron number 1 from transcript AcoGoldSmith_v1.000468m (l ocus AcoGoldSmith_v1.000468m.g) derived from phytozome v7. 0 (chr-ID scaffold_3; pos 2302976 to 2303798)
gaggcaggcagaaaagctttgcagatatttttcaggttattttttatattatttttttgatacttatacttgatactgtgttatttgttttcaaagcatcatatatgaattcactgcatttttttttatattccattagcagctgttacttttgatagatacattggtatgaattattgatattgtgcctctcacgaccatattgatttgttttcaaaatttaatttgactataagatatacagagcttgtttaatactcgttgtttttactatgtatttggttttcctcgattaaatcagtgattaatttggttgagcatgactttgtatttgaaggtaacagataacctgtttaatgatggcaagtgtttatacaaattaaatgagggcttcaccgtgaactagtattaatttgatgcctgtttcacttgatagccgcttctttcctaagccttccaagggttgagttttctgcatgaacttattgttaagaaaaaaccaaagagttttacgtatctaacaatgaagtagatgtagaattgattgttcatgaggtgagggtttttgttataaagtgtaggcagaaaggaagaagaaaagaatgataaaatcaataaatttgcctgcactcccaatgatatacacaacaactctctttaaatccatgtcttgctacttttatctatgtaggatttagtgatgatgttattattttttatttattttttttgattacttgattgttccttgagagtactttgattttttttcctactgttgttatggttcttccgatgaataaactttaagttaccatacagg

SEQ ID NO: 109612 - DNA, 962 bp, Aquilegia coerulea
  Intron number 1 from transcript AcoGoldSmith_v1.015183m (l ocus AcoGoldSmith_v1.015183m.g) derived from phytozome v7. 0 (chr-ID scaffold_13; pos 1721917 to 1722878 reverse stra nd)
atttagcaaaaagggtccaccgccatcagcatctggtttgtggtttctcatcttcatcaacagcagaggaagttacacatggaattaatggaaatggtcttactgctatcgtcactggtgaaacatttaaactataatataatattataggggtttctgttttctttgttattaaacatgaattattgataacttatgtttttatttttattcttggttcaccatctgagaattttttttttcaaaaaaagtgggattaattataggttatttttcttttattattttgataatatcttgatgtgggtttgtgtcgaatatctaggatgttcaataccccccttcactttactgaagtttatgtgcaccacatgacctgatttgcatattaacataatttcaatttagtggttggtactaaagtgtagttcatcatctagagtacagtgtccaaaatgaatagtcaatagctgtttgtttgtcggttatgctttggtacactttcctatttccatgtctactacacttgcgagaagaatcgtatttttgaattattatcaatgtggctataaggttctgtcgttgctgcgggtagtgataaacgtattcaataagttactaatctactacgtggcaacgacaagaacaattaggacattgacagaggtaccaagtgtccaacaaaagtataaaacgattgccataaatttgatagacaaactcaaatcattacttttacctgcatatgtaaggttcttttccgttgtaatttttatgcaagtgagagataaatgatgatgatgttcagcagtccagttactgaacatttgatagtcataactgctaagtttatagatattggtgtcttggtagctaatgttgtgaaatgcatttggattccaatctccccttgtcaatttttgaaagtatttcatactagttctatctttttacatcgtttt

SEQ ID NO: 109613 - DNA, 785 bp, Aquilegia coerulea
  Intron number 1 from transcript AcoGoldSmith_v1.008146m (l ocus AcoGoldSmith_v1.007022m.g) derived from phytozome v7. 0 (chr-ID scaffold_35; pos 1575156 to 1575940)
tgatccaaagagggttgttgtcactggtgctgctggtaaacattcttttctttcaaactcctcacaatgttagttgttgcttgcatcttgttttaattgagaattagttaatcactttgataaacattcttttcttgattgtcaagaaatcaaacttccaaaatcttgaattagttattgttttggtatcgaatgtgggtatccttgtttgatggatttgtttggattctatgtttacttgattggttttatgatcttatataatgtatttggagaggagagtggttttgtattgtttagaaaaagatttgttttggctattgtaaaatgtatatggaaatggaatatcttgggttgcttcagaaatttctggttgtttttgtttgttgtgctcttttgtggaagatcatcagatatttgttgaatttactcaatatggagaaggacccagttacagttcttgtgacgggtgcagcaggcatgttaaatctatcctttttgcagtagttaattagatcgccattgtagggtgaggtgatccaaaatttcaaatgaacattccaacatgaataagctttaacttctctttcatatggtcccatagtgtatcagcttgttcatttgtagcacttgcttagtctatattattatgaaagagaagtgtggcagtcatgaaaatgcataattgtgtgatgctttcgtctgacgttattgaatcaagtgtatattatgatttacaaagtttaataaattgacatcaaattctcatccagggcaaataggtt

SEQ ID NO: 109614 - DNA, 688 bp, Aquilegia coerulea
  Intron number 1 from transcript AcoGoldSmith_v1.007192m (l ocus AcoGoldSmith_v1.007192m.g) derived from phytozome v7. 0 (chr-ID scaffold_13; pos 3261812 to 3262499 reverse stra nd)
cctcactatccttcttccgttgcttctccttccaggtacatttgatcaagtaaagaaaataaaaattgttcataattttgttagtatttctttcattattatattgctggaatgaaagtgattagagagtagtatgcgaaagacagagtaaaaggtgaacttaaaagcaagatgctttatgtaatagaaagagagatagaaagaaagaaactgcaaacatgctgtcattaatttttcttcattaatttaagagttttacagacaatatatatcgatcacattataatccaaacaagtttataagggtgatagatagaaagacaagaagaattggcattgagggtatatatgtgtggctaataatggcttgcccaaagcatgtatgagtatgatttcccttcttcaagaccagttaggataataaccacattctgtgcctgtctatatattcaagaactttgaattaaagattcgaatgttcaaatgatgtttctgtgaatactgaaaaggatttaagtataatgttaaggacaaatcgttttctctattttaattcctagtaaatgtgtcaactatggtgattaaattttgggttcgttatttgttttatggtggaattgtcatctttgtaattgattcaaagcttttatatatcttataggggcgggtacacagttttgataaacac

SEQ ID NO: 109615 - DNA, 567 bp, Aquilegia coerulea
  Intron number 1 from transcript AcoGoldSmith_v1.016036m (l ocus AcoGoldSmith_v1.016036m.g) derived from phytozome v7. 0 (chr-ID scaffold_7; pos 2781915 to 2782481)
acccttctctactgccaattcaggtgcagccacaggtgcttggcattcagcttcatagcttgtagtaatcccaagcctttggctagcacaccaagtacttctatttcagagtttctgctcactatacctgctcctccatgaaaattttgacaggggaaaaaatttgttagggaaaaaagtttgcgatttgataaagaaaaaatcttgaattatctattgggacttgggaggtagggtaaattaggtttacataggaacctaaagaaaatgtaatttgaattattttttaacaaagtttcttatatgatgaccatacatataaataggttctaatagacaggcgtttttacacaaaaaaaaacatactcgttctctgttgtttgttaaccatgaaaaactctagaaatcttcttcccttttttcttctttcactgattataatctcaataccgttagttcttgggcaatctgcttcctcttcattcaacataaccgcagattcagatgtatctacatctacctcatcttttaacataacaataggttcatctatttctgcttcatcta

SEQ ID NO: 109616 - DNA, 685 bp, Aquilegia coerulea
  Intron number 1 from transcript AcoGoldSmith_v1.002048m (l ocus AcoGoldSmith_v1.002048m.g) derived from phytozome v7. 0 (chr-ID scaffold_2; pos 1257244 to 1257928 reverse stran d)
ccttcttttggtgacttcttttgcaatttcttttggtaagttttgcaaatttttactaaaaaagcaagtacattttcttttttgagtttgatcatacatgcaaattgaaataacgctaattatcttcttccccaatttttttttatataattttactgtgttttggttttgaatttgtatttttagagttgtttcactgtgggaaaaatttcgaattgatagttattagttagaattttgataaagaattgttcttttgctcttttggagtcaattgcatgaaaaataaggtttattttcttgctttgttaagtgttttatcgtaaattttcaaacttgtgactaaattgtatgagtttgttgtgaatttatgttttaaaattagctctaaagattttttctgtaaaattatctctaaagctatagatttgagttgtgatttttacatgaaattggtaagtggtcatgttttgattttcgagtaaagatttaaaatttgtgatttcaagaatttgatgtgtggtatttttttttttttttttatgtgattagttctgttctgtttctgaatatctgcaaggtataatttgcctttagacaactcaatggaatgtggtttggcgcttattactttcctttttcgtgaacagtttggaaatttctggtgggggagcttcgagtttat

SEQ ID NO: 109617 - DNA, 415 bp, Aquilegia coerulea
  Intron number 1 from transcript AcoGoldSmith_v1.001484m (l ocus AcoGoldSmith_v1.001484m.g) derived from phytozome v7. 0 (chr-ID scaffold_2; pos 8400940 to 8401354 reverse stran d)
ttcttgcggttacaaaagagtgagtcattttattcaatccatctttaattttttttttcttattaattttcattattgctgaaaagtttaattgttttgaatattgtttattgtttatattattaatcaaacttatggtttatttgaggttttaaattcaaattttctaacatttttggtcgaattaatcattttttttttcacatttaagtgtattgaagttgaaactctgcaattttgatgaacaatcttttaattacagctatctaatttctaattgaagacaagatggcttccttgcgaattggatttaaaaagaaatggtatctttcattcatgtttttacgcaatatgattgatgtagaacgtttttttttttttttttttaattgcaggtcggttaagacatttactt

SEQ ID NO: 109618 - DNA, 824 bp, Aquilegia coerulea
  Intron number 1 from transcript AcoGoldSmith_v1.004104m (l ocus AcoGoldSmith_v1.004104m.g) derived from phytozome v7. 0 (chr-ID scaffold_22; pos 1785040 to 1785863)
ctaaacttggtgctgaacttctttctacggtatgtatgtatgtatgtatgttcattttcaatttaattcatttggggttgttgcattttgtttaaagattcgttctttattaagcaattcaagatctattgttcgtggaattgaattgggcatttcgtgatttccgagaaatttttgatgatctgaatctgagtttgtttgttttgggagctgaattggttatgcacggtcccattaaatgctatgtaacttcagaatattcttctgttgttgtcttttttgcagtctgccactttcttcaatcacttaagattctgctagctattcttagtttatctgagtaaattaggtttaggtcaaatggattctaattacgattataataatgtattttaaagagtataatatagaatcggcaaggggattcctcaatattattagtatacacgatgagctgatgtcctccgtgcgtttcgtgtgtctttggatctgatggggatagctgctcatacttttttgatgtgttgcaaactgcttacatcagattcttaaggagggccaattatggtgtgatgtcattatttgttttttaaaaaaggtgtacatgtctctaattactagatttgaaaagttatgaggttcggaataatattaatctgaggtctctatgtactatggtctacatgtatagatgtcctgtatcaattattgatatagtgtctgtgtctgtcataccttgtggagttaattatattgctcattgcatttgttaacctttgttatttgcagattgacaaggaaagagctggtgtgcttgttgggac

SEQ ID NO: 109619 - DNA, 461 bp, Aquilegia coerulea
  Intron number 2 from transcript AcoGoldSmith_v1.007999m (l ocus AcoGoldSmith_v1.007999m.g) derived from phytozome v7. 0 (chr-ID scaffold_44; pos 1574940 to 1575400)
gaccttgctaaccgctcgcaaactcaggtaaatccactagctttttttcttttacttctgtcacagataatccatactgttttgtttttatacaatgtatcactatgttggttcttattgctttatataacggcacatcttggagtataggtatctcgatcaatgctcttgactgtttgagttgtacatctcttatattttgaattggattaccatgaaatgtaaccaaaattagaggtccttaaaatattaatctctatatggaaaatacttaaaatgactagcagcagaaggaaatagtttataaggaaatgcaatgatcattgcattgtgaagattacataacataatattgtaaaatgcagatttatttctgtcatatgaccttttttaattccattgttgttattttattttcctggaatgattattcctaacatagttcatattttcttacagga

SEQ ID NO: 109620 - DNA, 257 bp, Aquilegia coerulea
  Intron number 1 from transcript AcoGoldSmith_v1.022464m (l ocus AcoGoldSmith_v1.022464m.g) derived from phytozome v7. 0 (chr-ID scaffold_2; pos 7131432 to 7131688)
ggaattcagttggttagtctcaatgtctttattgctttagtgaaactgaatccaaattgatattttacattttttacctcactcttaatgtttgacttcactgtttttcgaaattggttaagtcttcctgttgtgtgtgtgtgtaatatctacactttagtttggttcagaatttgaaatctgtttctctgtccagtacatctcatttgaggctctatacttttgttcttttgtctgcagtgacttggaagtagatt

SEQ ID NO: 109621 - DNA, 901 bp, Aquilegia coerulea
  Intron number 1 from transcript AcoGoldSmith_v1.020038m (l ocus AcoGoldSmith_v1.020038m.g) derived from phytozome v7. 0 (chr-ID scaffold_3; pos 7170532 to 7171432 reverse stran d)
aatcggatttcaaccggtacattggcgtatttcaggtacaaaaccatctttaaattagtctatttggacccaaatttggtagtagttagtactactcatattcaaatcaaacgcatcatcacaacattttatttatatcaaaagcaatatcattgtttggaactttaggtcagagcagccaaaactatgccccaatccatattattgagcacagctcaactgggaataatttgttcgattagggatgggagactgataaactaatatatggtacaggggtgaaaaatgagcaacactactcgtattatttcgggaatgtgttctgaaaagggttttctaatcatcctcgtcaaattaaatttccagtttacaaatgtgtcgttctcaacaatctttcaatctccaattactatcgaatatttttcaaacagcatatgatggaacttgggtacatattgtacagagtgtgtagtttctattttctaagtaaatacctattatttgatcttcgtcccctttcctctcgcctaatattataaccttctgtttattgaagcacttataaatagtaaacactgtcatttctaagatcaaacgatacagattaagattcccttacatgcatgctatgctaatagaacacaaaaaatcaaagatgcatgctgctgggatgttagctatcttattgattaaggcccctattcaagtagatgataatagaggctatcttggttactagaaaaaatgtcaacatggaaaaggtcttgaggtgagattcaatataagtatgcagatgctgtattttcaaattatctgaactagtactgttagcttattattacttgtatgaccttattttctattaggttacagcagaggctatagctgtcactggaaatac

SEQ ID NO: 109622 - DNA, 483 bp, Aquilegia coerulea
  Intron number 2 from transcript AcoGoldSmith_v1.007785m (l ocus AcoGoldSmith_v1.007785m.g) derived from phytozome v7. 0 (chr-ID scaffold_13; pos 909520 to 910002)
ggacagaaagacatccttggagccaagtatcccaggtaaaaaatctgtccagatttattcttcaacaacaatagactcaccatgtgtacgtcgtttcacggtttcggtgtttttttacctatataaaggcacacctgttctacttcaaagtcacaaattccctttttcatccatatcaaaaagcacctttttaactcaaaatcgtcatcttaatcattggccaacacaacccatgaaaatatacacacagccacacatacagaagtacaaatgtacagttcacatggtgagattcaatactatgagtcagctttcaaaacatactgctaagctgtagacaaaaaataaattaaacttagtcttcgttttctacctatgtatttgggttgtagtattaataatagattgtcagcggacaaaaaatatatagatgaaaatttgtatactaattagtggtacttacacttgcagaggctactatcg

SEQ ID NO: 109623 - DNA, 1027 bp, Aquilegia coerulea
  Intron number 3 from transcript AcoGoldSmith_v1.009305m (l ocus AcoGoldSmith_v1.009305m.g) derived from phytozome v7. 0 (chr-ID scaffold_13; pos 283414 to 284440)
ttggattcttcacctaatcaagtatgaaatgtcaactttactgttaatgcattgctttagtatgtttgatgcatacaatattctgcattattccaacggtaatccattgaaaaccagtaaagagaaatactattaggtaccagtgtactactgagcaataacatgaacaagtaaaaacatcagtatccgtagtcttatttgactaatataagataatgattgaatgtttgagttaagcaatgtgttgttattaccctccatggaaattacatatcaaaattttgtcttccttacttcctttttggcctttaaatcagagaaactcccgactgatgatgtgatccataagacagaggttaatcctccagcatttgtttcaatacatgcttcattacaagcactaccgattctgaccaagtgttagatcactatttagttgataaattcctaaaagtaggtggttttgaacgtatggtgtgggatcagatggcagctagtgctcaaaaaatagagaatgagcatattcatcccactcgtggggatggagtgtgtttcaaactccttcaatgggtacatgtctgtcaacattttttatgttgtttttagctaagctggtaaattcaaagaagttgctgacttaagggtggggtttgatggagaatagcctaccgaagttccacactctccctctccctctccctgatgtaggtggtctgatctggaaggcatggttcatttatctgagcagttagtgttatttcactttgtgtacaaaatgatatcttacgtatattgttgtaatgtctcttagcggatacaatgcgagatcagctttttgttattacctcattttccacggcgttaatatattttgtttagtgttatttcaatttgtgtacaaaatgatatcttacgtatattgttgtaatgtctcttactggatacaatgtgagatcagcttttcgttattacctcattttccacggtgttaaatatatttttcttatatcttgcaggattttgaaga

SEQ ID NO: 109624 - DNA, 937 bp, Aquilegia coerulea
  Intron number 1 from transcript AcoGoldSmith_v1.011188m (l ocus AcoGoldSmith_v1.010608m.g) derived from phytozome v7. 0 (chr-ID scaffold_35; pos 1021090 to 1022026)
tcaactttgcaggccgattcacctattggaagaaggtaaattaaccctaactctttatctctgaagttctctaaatcgatttaattgaattttaagcttttaacctacttgtgaaaagaagtaaaacagatcttgattatgatatgaattcaaaattttaaggttttttttttttgattgtgtttgattcatgctttgatgtgtttcgatctgtgaaaaaagattcttgttaaacttaaatctatctgtttcagatttggggtttttgttatgtttttatgtgtctggttatgatctggtaaatcaagtgaatacgagattctgttttttcttatttgataatttaaacctaacatttggtggaaaacaagcaagaaaggtgtaggtttcatttgattgaacaattaaagtagtcaacctatgcgttattgtttgttgcttttgttccaggtaactatttgtagatactcaatacaattttttcggcatattttgttttgatctttgaggtcgtaattccattgtctttcaaatttggagctcagatataaagtagaagcctatctgttggagtttggatgttagaaatctcatacaatcattaaaaagtacaactgcaaacatctaggttgtctgtggcactacaactttactgtatatattttggtctatgtcacccgatctgtaacaaggttagtactggtaatacgttcattttactgtgcttgagagagaccataggaacagctagtaaggaacacatttctctttgacatccctacatttacaaattgtttgatactgaaaatatgttgttggctggttgcatactattaaattattagaaccttttaaatctttaatttgttgcgtatatccttatatctgtattgggttttcaggacttcacgatctccatcccctagagtactttccc

SEQ ID NO: 109625 - DNA, 923 bp, Aquilegia coerulea
  Intron number 1 from transcript AcoGoldSmith_v1.012852m (l ocus AcoGoldSmith_v1.012852m.g) derived from phytozome v7. 0 (chr-ID scaffold_3; pos 3697600 to 3698522)
aaaaaggtgttctgttgtcaaaaatcacagcctttgtttgtattggcactacaattgaagggagatgaatataggttttaagttagggctacacttcatgtcagacatgctgctagccgtttaaacatgaatgttctacattccttgcaatattgcagatatgcagcaatcttgattatagaatgatctcaaagcgcacaggcattatgatcccatctgttagttaaaaacctaatactgtagttaattagttgtagaagataggattcagtagaatcatgcaaatgtttacagggtgctgtgtaacttaatattttgagatttttccttcgcaaaaatatttgagattttgttgtaatgcggtttatttgttgggcctgatatttgattaatcttgggctattactggactggagcaagaagagtagtctacttcatctttctcgtacgttttgagttgcaacactaactctagaaaatcccaccaccatatgttttctaatccaaacaaaatacgtagctagtgtttcataaaaaaaatacttgtcaaccaacctaatttgcttctctagctttgttgtatataaataatcatgaccaccttgctttgattctcttctcttctatatcttctaccgaattggtgattccagctcttttatttcttctcgttttcaacccttttttttttccaacttcaatagtattcttcaagctagtctacaacaactcttttaggtttacaacaatcttaacccatccaacttcaatagtagatctagctagctacttcacaacaaaacccttgattcgattatagttttttgttattaacactctatgaaaactggttctgttgcttcttcttcatcatctacttctatgaagaagtaccctgtaggtccagagttttatcaactctg

SEQ ID NO: 109626 - DNA, 820 bp, Aquilegia coerulea
  Intron number 1 from transcript AcoGoldSmith_v1.024094m (l ocus AcoGoldSmith_v1.024094m.g) derived from phytozome v7. 0 (chr-ID scaffold_3; pos 8796730 to 8797549 reverse stran d)
cgctatcaggaatcttggtcaaatatacgctggaggtagtatctttacctattccatatatgtggttttgtttttgtttcttactaaataacatctcataccttcatattccgttcattcaactgggaatattaatttgttgaaatgccgattactgggagtgttaaatttgttgaaatgctgattatttagaaatgagatcagtggtaaaatttccttttgaagttcaaaataagataagtacacagagtggaatttcatgcaaaagagttctgaattttggctttgaaggaatgtttagttattgtgaagattggttgagggtgtatatatttacttgttgctcacaagcagaaaataagtgtcgaagtcatggagtgcagtggtgaatgaatgcagagttattttgttagtttgttgagatagatattcgaaagaatgtttgttggagtgttgattcacaaaccacacatttgggatgcttgtacgatttcaggagtgcccacagacaccgtggtgcgtcgaggcgcacaaattggtgaaggaagcgttgcatgtagatgatgtgtacttatctcgtgaagctacttcccttgaagtcttcttagccactagacataaacataacttgataactatgccttcttattgaaacaaacgaaaagaacatcaagtttttggcattctactcataacaccatttcactgcacgcatataatcttctctagaatttgttgaatatgttgttactttttgagtataatttcttttttcttatccttaggcttgggtcctggaacacttgttggttctgctgcg

SEQ ID NO: 109627 - DNA, 636 bp, Aquilegia coerulea
  Intron number 2 from transcript AcoGoldSmith_v1.011786m (l ocus AcoGoldSmith_v1.011786m.g) derived from phytozome v7. 0 (chr-ID scaffold_3; pos 6779840 to 6780475 reverse stran d)
gctctgcggaggaacaaacatcttctggagctagtgtaagttttatttgtcaaattaaataatccctgtcataaacagatttataaacaaaaatcaaacaactgatttaagcttaatgaacaaaaatattaaggaaatcttagtcttcttggtagtagatagtcatatacaaattcaattaaaatggttgtgactttagttggaaaacactgaggtttctttagggatgtacattttcttgccaacagaacaagtttaagctaagatagtaaagttgcttacccaaacagaacaggttttaaaattgtgaatttcgtgtgtgtgtgtgtttcaatttcagatgggcacgtacaacttcgtttattttgtactttgtaaaaaaaaaaaagaagcctaatctagatgggcacgtacgacttcgtttatttctactttgtagaaaagaacagttagaatacagacaaattgtatacttctattctgctgaacaatgtactagtcaattagtattttactttgttttcaagcatacggagatttgaatcttattcaaaacaaatgatatgttacaagatgatgaaactctcccatcatgttacaggttgctaaagaggcttcaacaataaaaaggttgct

SEQ ID NO: 109628 - DNA, 520 bp, Aquilegia coerulea
  Intron number 1 from transcript AcoGoldSmith_v1.022914m (l ocus AcoGoldSmith_v1.022914m.g) derived from phytozome v7. 0 (chr-ID scaffold_2; pos 2998190 to 2998709 reverse stran d)
ttttggtgagtattgacatctttatcttatatctcaatcatttcagatcatcatattaatgagaaatttttgggattatattgattttcaaattagttttttcgattttgatcattttaagccttccgtgtgcgtgtgaagaaaatgcccacagacatgcacaattatagggagtcttgagtttgattaagaagttcaattttcgaacacagggattagggcgaaccagagtgatcacaagttttgatcactacatattccatcgatttgctctgtttcaattactaacagcctcgcggatcaactaccataaagtagtgcattcctcaagaactattttatttacttctcagtaaacattttaaggttgtggatgaatttatcaacaaataatgtataggatgttatgaagttgaattaaaagatcatatttgcactttcctgggacatgtttctaatcaaaatgttgctctattttactgaagggacttgtagcattgacatcaactgcatttgtgtg

SEQ ID NO: 109629 - DNA, 536 bp, Aquilegia coerulea
  Intron number 1 from transcript AcoGoldSmith_v1.011392m (l ocus AcoGoldSmith_v1.011392m.g) derived from phytozome v7. 0 (chr-ID scaffold_13; pos 630515 to 631050 reverse strand )
cgaaacttcaaacaatcaatcaagcctaccgatctgtaagtttttctccttcgattgatgttgaattcgttctagcgatagtattaaatcctgtttcttgatttagttttttgttttaatttgatttttttttcgttcgagagtattagattttgttctcaagtttgaaagcctagagctttatatgatcgattaatctaggtgcaaccttctcgatagtgtcttgaattcgttgtagcagtagttttgattcctatttcttgatttagtttttgatttaggttttgttcttagtttgaaaacctagggttttgtatgattgataaattttgatttaggttttgatgaatattgattaggtttttgatggaaaacctcttgtttgaaaaacctcttttttttttagttttgttcagagtgattttgatggaaacctagagttttgaaagatgcagcaacaaaatatgatttatttttaatggaagacatgctttggtaattgtattgatttgaggttgttgttcttttagattgag

SEQ ID NO: 109630 - DNA, 337 bp, Aquilegia coerulea
  Intron number 1 from transcript AcoGoldSmith_v1.020066m (l ocus AcoGoldSmith_v1.020066m.g) derived from phytozome v7. 0 (chr-ID scaffold_3; pos 33710 to 34046 reverse strand)
aatagaagagttcaacctttcccttccgctcccaggtgaatgatgatgtaattttattatcgtttttgaacttcctttttattattatatcgccttaatttgatcttagttactggaggtgctaattgttttacctgcatgttttcttctgctgatcccacaatctatcttttcagtaactgttgtaaactttgcgttacaaaagtacagctataatgttgttttacagattagtaaacctattcaacaaatttgaatgcattaaaaaacaatctgcagcaggaatgcttgaatttatatatatttcaatcttttcacaggactgaaatctgggaaa

SEQ ID NO: 109631 - DNA, 319 bp, Aquilegia coerulea
  Intron number 1 from transcript AcoGoldSmith_v1.004611m (l ocus AcoGoldSmith_v1.004611m.g) derived from phytozome v7. 0 (chr-ID scaffold_2; pos 508396 to 508714)
ttcttaccttccgactctgttattaatctcgaccagtaagtagtcagtctgactctgaccccactcttctgcttctcttcttcgttttctttctttctagctttactccacaacacacgaggtattgggtggggttatcaagattttcttgagatttgtgtttctcaatctcaagctaagtatgtacataagttgtctttttctcttttagtactgttgatagtcaaggaagaaagtcaaaatacaagaaatttgatttgatttgacttgtaattgatgattaatttgaaattattttaaatgcagtggtgatccaaca

SEQ ID NO: 109632 - DNA, 995 bp, Aquilegia coerulea
  Intron number 1 from transcript AcoGoldSmith_v1.012162m (l ocus AcoGoldSmith_v1.012166m.g) derived from phytozome v7. 0 (chr-ID scaffold_2; pos 6604758 to 6605752 reverse stran d)
gtaacagatcgaaagaaccaaaggtacgaaaaaccctagatctttgttttctaagctagatccgcctctttcttacatttctgatgttgttttcttttgttcaatttcactcaaaattgcatacttttcatgatcgattcattgatttgatgtttattggtgctgatctggtgttttttagtttaattttagtagatttattgattttgtagtattttttgaagttatgattgttgttttgtgaaaatgttgctaattttagggttgatttagtgattttaagaactgatgttgctttcgatatttcgaaatagataatgtgattaagacgttcgtcaagtgagatctggttaatgacactgatattgttgagagtaatcatgaaatctcaaatattttctccattaaagtgggatctcttcattttgttaaatatttgtcatgttttagttactgttataatgggaaaattttaacaaattcccatcacattgggcagacagtgtgctgtttttaatgaagaatttttatttccagtgggaaaaaatgttgtgtgcatataaccaaggagattagttatggtttttattacagttatacaattgtttgtcttgattgaaggggtaatatagaaattgggggaggggtcttaagttgtctcaattgagtatttagtgaacatctgaacatgctaattagccttggttaaaaaatttggctgtttgagcggacactttttgattctaaactttgctggataactaatgtgattggaaattctaatgagatagtaaaaaaaaatgtaaggctaattagttgagggtttatgcttattgacgattaataaagcatcatgcgggtgtttctttggtagtgtattcttgttactttttgtttaataatttgtatgtttttttaataatcttatcataacagatatcttgtgggaatttctaacagggtctgtttttatataactgaacaaatcagacagc

SEQ ID NO: 109633 - DNA, 795 bp, Aquilegia coerulea
  Intron number 2 from transcript AcoGoldSmith_v1.017956m (l ocus AcoGoldSmith_v1.017956m.g) derived from phytozome v7. 0 (chr-ID scaffold_32; pos 623469 to 624263 reverse strand )
ctcgagtagaagcaaaacaagaatctttggatgtatgtagatgaaagagtttgcatggaacatacaatattacggcgctttatgcattctcttgctgtatctttctctcttctattcgtgttcatttttattagaattatcaaatgagatatagcccaattgagtgaagtgtgcttctgtttgaggcataaacgttaagtttgaagtgttagctagaaagtattctttttcttactacagtatacctttagcaaagtgacactcgtccaatctcaaagaatcttgtctatttagtgcaaaatcaatgtgattaatggcatataataaagatgcaattttgttgaatgcaaatttgttttgtggaaatgtacgggtacatgaaatgttggaaaattcatccaaattacttcaatactaatttacatagaggccactaccattgaacatgagactggatgaagaaagattccttttttttttctagaaaaaaaaattaaaggattcagttcatgcgacatctaatcatgccatagggatctgaagtgggtagctttttacatgtaaacactttgatctaaatcaaagaagatggggtcatattactttaaccagatgaaacccagtggcgcttaaatttacaaaaatctgattcataaatggtattgtttaaggttactttgctcttatccaatttatgagatgatcttcatatatcaccatggatttcatactatcttttttccttgtttatgacttgcaggtgtcagctgtggttgagctccaaaagtcgcttca

SEQ ID NO: 109634 - DNA, 953 bp, Aquilegia coerulea
  Intron number 1 from transcript AcoGoldSmith_v1.026428m (l ocus AcoGoldSmith_v1.026428m.g) derived from phytozome v7. 0 (chr-ID scaffold_22; pos 3366543 to 3367495)
ttcatcaaaatatccaggtagctagattatcccttgctttaagatatgaatgattagaaaaataaagtagaatgtctaaagctatactcaaggattctgagcaacaacaaaatccatccctgtggttgtgcaatatatttattcatttggcaaataatttgttgcttataacagttctaataggtccacatggaagaaataggatagaccattggttgcatgtccaggtttttggagtacatgatccacactcctagaataaacaccatccaaccattgtaaacaacgacctatacaattatatggacattttcttctctatccaaactttggttttattgtcttgtagcgtaaatgtcactatagagtctataggaaaaattattgatgggatgtatgttttgtcttttgttttatgtttttttttctttttttcattggagtaatatttttcatgtttaccttcactttatgtccctagtaacaaaggggtatctgcttgctgtatctatgttccctgatagtagtcaatttcctaaacactatgcctatgcattttaactaatctagcatccggatcaccctcccctcctaagattcgatctgcaccaccatcattttaccactacttcaattcttcaacctacttctataggactataacaaaatcatggcaacgtgttagtaataggaatcaagacactacaggagacagagatactgaggcaagaagtacaaaataaggtgggagagagagagatattgaccaataagatggaagagaggtgacgactactattgattcctgtttcagtatttcctattaagagtaaaatgctatttgttagttgttacatgcaactttgatacctttgtacaaaggtggagctcaaatacatgttacattttatattatagaggttggagaagctgattgaatcagatccagtggt

SEQ ID NO: 109635 - DNA, 603 bp, Aquilegia coerulea
  Intron number 2 from transcript AcoGoldSmith_v1.009993m (l ocus AcoGoldSmith_v1.009993m.g) derived from phytozome v7. 0 (chr-ID scaffold_2; pos 5008146 to 5008748)
tcagggtaagttttattaatttcgttgttttattagctactcgtgttcgtgatttttattgtatacaacattttatattgcagtgttaattaggtcaataaattggatatttgtgaatctgagtcgacttaaccgaccaagaatcttggttcaaattttgttaatgtgtcacgttaaatggcttaatttaggatttgaataaatgtgacaccataattaattatggaaagcaaaaaaaaaaaaaattattttcttcaaaatctatttgaacaacctgtaatatcctaatatatatactcaaagtttcaaacaaatgaccgctaaactcctcaagtatcctaatgtgaacaagtgaaggaatctatcaatcatgattcatgaattagctggaatctgaatccttttctgaggttgctagacctctctacctattaggctttgagttgttgcatgttttttcttctgtcagtatattcctcgtactctttttggatagaatatgtgtctgcatacagtgaaatatccatatgcaaagaaattaactagagagaaatgatctcttccaaaggagacctgcagaacttcttgaacttgaacccgtca

SEQ ID NO: 109636 - DNA, 728 bp, Aquilegia coerulea
  Intron number 1 from transcript AcoGoldSmith_v1.023353m (l ocus AcoGoldSmith_v1.023353m.g) derived from phytozome v7. 0 (chr-ID scaffold_35; pos 2257793 to 2258520)
tattgcagcagccacagtaagttcttacatcaatctctaaagtaaaacctaaatgatttagttttatgctagagtggtcaactatctgctttgtcagagctgcagtaagtaaaatacgtgcaacttgtactgaaaagtaaattttaaggttatcacatatagtggtaaaaccattctctctggtccctctatagaaattccgtgcaagttgtgactatataatgttaacaaaataaattaggtagagttcaaacctaatttactcctcttatccatggacctatcatgagcccagatcaagaatggacaaccgagtgacagaatctgatagaggagattagctcttcagtattgtatcttatttggtagcagggaaatatcgtgctaagataattatgtgaccatacactgctagaaagggtcaaaattgtgttatttttaataaaggtcaaaattgtttcggaagcaggcagtttgatgcctactataaggttatgccccagtcaaaacaaaatctgttgatcgtctatattgaacttgcgttagatactaggatgacctaagtagatgatatttaacgatttaaggacacaaaaaacatgcaagtacagtatttgaaagtccagatgcgtgctcatatacagattcccctttctttatgtttttagatgtttttctttttcaagcaattatcatttttgctaaaatgaacagaacattgtaacaga

SEQ ID NO: 109637 - DNA, 157 bp, Aquilegia coerulea
  Intron number 2 from transcript AcoGoldSmith_v1.026213m (l ocus AcoGoldSmith_v1.026213m.g) derived from phytozome v7. 0 (chr-ID scaffold_16; pos 4513911 to 4514067)
ttgttctaagggaatttgcactggtgagtgagaattttgtttgatattagtctaatcatcatattttaatgcataaagatgttgtttttatggtaattctgatctgatatgattgtttttttgtgaaattttcttctttgcagagtgctttttgcag

SEQ ID NO: 109638 - DNA, 649 bp, Aquilegia coerulea
  Intron number 1 from transcript AcoGoldSmith_v1.024196m (l ocus AcoGoldSmith_v1.024196m.g) derived from phytozome v7. 0 (chr-ID scaffold_57; pos 536721 to 537369 reverse strand )
gaaagattcagggcactctgtattccttggtgcaggtatgcaagccaccatctcgaagtctgtgtgtattcttgggttataatccagttatttgactaagttataaggtacataaacactttgaacttcgggatcctataagtagacttctgtccaatatttgtttcctttcttatttgtacagagtatattaaaaaataattgtaatgtggaagtacatgagacctagatgatccaaaaacctcgcttttttttcaatgtaaatttcttctggtcccatactatgagtccaggataaagaatagcatttagaccccataatattgatcacttgatcagtgaccagtgaccagtctacgaaatccgactacagaagcatccatcactacagacctaaatttattaaggtactagcagctgaaagcgtgaggcacatgtaatgcactaacgcagtcaagacgtgtctctgtgttgtccaagtgtttagtatgtgtgactactatctaaaatttttgtaatccaacaattcttctacatatagcaaacttcttataggttctaactaaagaaacaagtgacaaaatcaaataagcatgattatggagcttcatcctccactacacttgttagaataccatctgatcgaaag

SEQ ID NO: 109639 - DNA, 419 bp, Aquilegia coerulea
  Intron number 1 from transcript AcoGoldSmith_v1.022654m (l ocus AcoGoldSmith_v1.022654m.g) derived from phytozome v7. 0 (chr-ID scaffold_2; pos 9283227 to 9283645)
ggacttggcgggtattaatttttcttttcttttgtcttgttatcatttgtcatttagaatttgtgtttgttttcattaattaatgtttgtttatgtattacatactgttatactgacttttacaatcacatgttggttgaaatgtttaaattaatttaagatcattagatccgtttaatcatttcttattgtatttattaaaatcaaaaattgaaagagttctaaagaaacaaaaattgtatattgccttttattattggataacatgtttcactgtaccactgttttggagaaacacaagtagtatattctaaacaactttcagatgaataaataacgcgcatcatatgaattattcagttttgttttgcatgaataaataaggtaccttgctgccaaaagtgaagcagaccattaca

SEQ ID NO: 109640 - DNA, 500 bp, Aquilegia coerulea
  Intron number 3 from transcript AcoGoldSmith_v1.022654m (l ocus AcoGoldSmith_v1.022654m.g) derived from phytozome v7. 0 (chr-ID scaffold_2; pos 9284001 to 9284500)
aagtaagttgatatgtctttattcataaccatatatgagcctccagtccactagatgtcacgacataattttagagtcatcttaatgtaaatgaatgttctaaaataattgctccatcaatggatgacatcgataagtttttgatatatattcagagagaacattgtggcaaacattttgaattaaggttgcaaatttatttaacaatatgtaatcatgattgattttgtgaataaagctcaatataggtcacgtgttcatcatcattcgtacacagttttgagcaagaacgtaacatatatgttataagcatttgttaaataaatatgcttgttgatcagctggttcaagaaatcaaaagtttttttaagcaaacatgtcaaaatgaaaagaatgaaggttctcaatacttaaaggttgtgtatctagtacccagtctaaattaaagtatatgcatgaatgcaggtttgagcttggattggagaagcctgagccgagaa

SEQ ID NO: 109641 - DNA, 989 bp, Aquilegia coerulea
  Intron number 1 from transcript AcoGoldSmith_v1.023596m (l ocus AcoGoldSmith_v1.023596m.g) derived from phytozome v7. 0 (chr-ID scaffold_57; pos 749056 to 750044)
ttcttcaaggtatatctatatatataatagatctctctcttgcttacttttatgtcttatgggtattttgatttttgttttaatccgatgatttaatgtatttttagaagtagattagttttgttgcatatacttgctttttgatttcaatctatacacttttctctaatagggctactttttaagttgatttgatgggtattttgatttttgtttgaattaaattttaatcaaatcaattattatctgttttgtttaaaggaatctgaagtaatgtagattggatatactgattttgtgattgtaaattaatcttgtagttatgtaatggcctattgaagaaatgggataaatatgacctatgatgttctaaacttctaatctatatgatcgtttaacttttttattttttttagttttcaactttactctgttgatcggcattaataggaagattatgcatattgataaaaccacatgctgtgtttcaatcttgattgtgtgtacagttggtttgatttggattgggaagatggtcggtgcccacaaccattatgaacctttttaaatcactttactcttggtatcactttttatcgaaatttttttgaaaattttgatcactttctattgatgttgttttcttgggatcttgatatcaaattatatgtcaatggaattgattcttcaaattgctgagataccttattagttgacttctatgttctacagtttaattctgtcagtattagcactacaatgtgtgtgccagaaaaggttaaattaagttaatgctatctatgtaaacgaggattcttgtaggatgcaaaaagtattggacttagttgaattcctgcaaataattttctgtttccttattgttggtatttaatggctctgctaatgaaactcatatcaatggctaaaacttagtatttacttactttaccacaggaagtggcacagctggaattgtccttccagaagca

SEQ ID NO: 109642 - DNA, 558 bp, Aquilegia coerulea
  Intron number 1 from transcript AcoGoldSmith_v1.010579m (l ocus AcoGoldSmith_v1.010579m.g) derived from phytozome v7. 0 (chr-ID scaffold_2; pos 9180129 to 9180686 reverse stran d)
gaagatcaggtgccttgtcgtccaaattttttgtgacttcaaaccctagaattcagttatttttattcatttatttgggaataaaaacaataaccgtgaaaactcttatctgtgaattgcttatgcttgttattggaacttctttttatttctaattaattatgaattgatttttttttattatttctgtattttttttttgttattcttcacatcaatggtatattaagtcaaaattgtatatgaaattaactctaaattttcgcatgcaaagtcttcaataacctatattatacatgaaattaaactgttcctctgacactttcctgtttccacattaacttattaactacggaagtaatttattaaaatttgtaataaacattattgttcatattgttttaggtttatgttaacttctaatctgtaacaaacattctttgacctcataaaacagttcaagcatgcatgtgtgttacatgtttaatatacatttctaaacttcaactaattatgttaaatatattgtgatcttgcagggaaaagctgtagattgag

SEQ ID NO: 109643 - DNA, 915 bp, Aquilegia coerulea
  Intron number 1 from transcript AcoGoldSmith_v1.003111m (l ocus AcoGoldSmith_v1.003111m.g) derived from phytozome v7. 0 (chr-ID scaffold_16; pos 3324918 to 3325832 reverse stra nd)
tgaaattttatctgcataaggtaaggtttttcattctatttataatttcttcgagtaagtatgttggttctaagatagtcctgaatggtgagtctgaaatcagtaacaatttcaacatctttcatagtgtttgaaacttgtatattcattctcaacttctagggtctaaaaataccagatagagcctcataaccttggtcttatatgaataaaaaaattcaaaaggaagaaaaacgcacggtcaaaaaacaagctcaaatactccattaacatagtaggttgaatgcattaggatactgctgcacactgcatgaaagcagcctacataatgctgcatagtttatcagatcattcaaaataattttagttgctacatgcactatttgatgagaaattaccaattgtaatttggattaagaatctattgtgaactggtgcgcactgcgttgaagaaccttgtatagttgtatggtttatcagaccacttccactaatttttagtgctgcatactccacttatgtaaagattaccattccattataattttgtgaatatattgaatatcgagcttcttgctaaagtgtgtttgattgacaaatttttatcaccttcaactttttttgtttggaggcgtaataaaatgtatctgttatatgtttgaaaagccacgtagacttgttaaaatttgaacaaagtgcattttcattcaaattcacgggaaaacttggaaagcatcattaacctaaagaatgaaatgatttggccaagaacctgatgttatagttgagatttttttatcaaaatgcttcttatgaagttacttattaccctgttacggtcgattacatcttgatgcatatactgtctgatttcttgcagttccctcttctgtccaagagcaaccacttgcagaa

SEQ ID NO: 109644 - DNA, 429 bp, Aquilegia coerulea
  Intron number 1 from transcript AcoGoldSmith_v1.022866m (l ocus AcoGoldSmith_v1.022866m.g) derived from phytozome v7. 0 (chr-ID scaffold_124; pos 68528 to 68956 reverse strand)
atctctctctctctctctctctgtctgagtctctggtttgatttctttctttgttggaaacttttcgaatagaaagaactttacggaaaattaacaaaaacaaaaaaatcaattgggttgttcaggtaggttaatttttcatgtttaattttaaaagtaataatcaaatcttgtttagttttttttttctttttgaattttgttcatcaacagagataacaaaccaaaccaaaggggttactgtaatcccctcacccccttttttttcttcaaaattcaaatacccttttgttcaatttgattgtaattaaatttaagaatgatttttgttattagctttgttcatataattgtttgacaacccaatttaatctaattcaattcaggtcaatctgaaaaaataatatatggcccaggagttgcctgaac

SEQ ID NO: 109645 - DNA, 588 bp, Aquilegia coerulea
  Intron number 1 from transcript AcoGoldSmith_v1.018220m (l ocus AcoGoldSmith_v1.018220m.g) derived from phytozome v7. 0 (chr-ID scaffold_3; pos 5914190 to 5914777 reverse stran d)
tagtaagctacaatgaaagcccacctgctggctaataaaaaaaaaaatggttggacttcggtttttagttttagtaaaaaaaataaaattgtgggacctatatataaattatatcttttgattatcccagtccctactttcacgacaaaaattaggagaaaacttcaaaatttatatttaggtgtatctctactgtttcgtaatccccaaataatgtctttagcaaaaaaaaaaaaaaaaaaaaaaaaaaatcacttcattgtcaagttattgggttgagctttggttttgtctagactatacatcatttcagaaaacactattgaatttatatcctggagtaacgtttggccgaaagccagcttttcaaacacccattttttagtatcattgataaataagattaaattaatcccaaaaatcacgctataaatcacgcaacataatcatgttatatggttataaagcccatattattttacttctaacctgtacttaaagaaaaatggaagatgcatagtattgtactattgtgtacatatattatttggggaacctggttttaatgacagtgtgatccttattttg

SEQ ID NO: 109646 - DNA, 963 bp, Aquilegia coerulea
  Intron number 1 from transcript AcoGoldSmith_v1.000271m (l ocus AcoGoldSmith_v1.000271m.g) derived from phytozome v7. 0 (chr-ID scaffold_2; pos 7855263 to 7856225 reverse stran d)
aggaggcaattgaagatttgaggcgaaaacagcaggtattttatcttccagatttttaatgcaatctaccaattattgagtttttctctctacttatgactggtgcaagatcagacaattcaatcacttgctgagaagatataggcaattcatgaattaaatttgactttgatattctagaggtggtaaataattatcaacagaaaagaacaaaataccttattctgtttctgaaaagtggctccgcagaaatgaaaaagggatagggggattctgatcatctatttaatggaaggcaaactgggcatctattctgaacttattggttcttcagatgtcatagctttatcccttatctagttacacattggctagattgctttcaaacctcaatttaatcacagaatttattaagtgacatgaacatcataaaacgggaatttgcaaaacaactttgccttaatctaaaattcttcggatatgcttttcagtgtcacgtaaacaatccaatagatcacttagacaaaagtgtcatttgatatagattgttgtcgcagttttgcttataggcaagtcaggtaggttatcatttctatgaagattcgttgcaacatagatctgcagcttcttttgtccacacgccctggcacatttaaaagtgtagagtgtcgacagttcatatctttgtcaaatgccaacccacatgctatgtaggtctatgctatatatgtgaaagaggaactactgcagaagctagaactaaaaaatacatagcgacacaactatatctatgactaacttgatgatttagagtaccacccaacgtaattatttattatacttcctacagataacataatatttgaattcatggtcagcagttctgcaatcacattgactctgtatatcttagtgagccatttcacttgtgtctaaatgcttaatatttttaattatttcagg

SEQ ID NO: 109647 - DNA, 313 bp, Aquilegia coerulea
  Intron number 3 from transcript AcoGoldSmith_v1.026942m (l ocus AcoGoldSmith_v1.026942m.g) derived from phytozome v7. 0 (chr-ID scaffold_86; pos 720822 to 721134 reverse strand )
ttgcagctcgtggtttgggtaagtgcatattttttatggtgcatgcatgtgctacgatacttgtaatacttaagatatttcaattcaccctagagtaattgatctgacatagactggatttttggacatagttcagctattcttcatgttttgtgtaaactaagtaaaaaaaaaatagtcaaagtcttaaatggctataactctataagataatttctgtagcagatccatgaagtggccagtttctgaaaagatggttgtttgtattgcaatgatttcttatatcttcttttgttttgtctggttgttctag

SEQ ID NO: 109648 - DNA, 879 bp, Aquilegia coerulea
  Intron number 1 from transcript AcoGoldSmith_v1.001022m (l ocus AcoGoldSmith_v1.001022m.g) derived from phytozome v7. 0 (chr-ID scaffold_7; pos 2927816 to 2928694)
atcttggtgaacttggtcttcttcaattcaaagacgtaagcaactttaattcaatttaataatctcattctagttaaacctaatgttataagtttttttgaaattgatttgagtcaattgttagattgactaagcttgttgttttttcgatgtttttagtttaattgtttgaagaatcttagttttcttggctcttatcggcaatctatagagtttttaaatcaaatttgcaaacttgtttagttattttatcaatgttttgattagattatcttatctgtagctgaagaatgcattttttttgcacaatttttaatcaaactagaattgccaatgatgaatagagagagattaggatttatataatcaaatggtagcatcaattagaagggaaagtgggaatgagttgaaatctgaaaatgggcaagagaagaagtataaagagcaagagtagagataaatatgcaaactttcatgaaatattattgctgatttgctatagatagtgaaccttgaaattgttgttacttgattggaaaaaaagttggttcttttactaattaccagtggattagactcaagattataatgtgaaaaagcgaaacttgattggcacaaataaaattggctaaaaagcttcattttatgctttaggttgtactattgtctactgtagaactacccttagttctgcaacactcaaaaagagttgattttggttgactaagcttgactaaattgaatttgattagttttagtttttcctttacatgtgtaacatatccacgaagtgatgttgtgcgttttattctatttttgagtatcttcaattgaaatggtcctaacaatttgctgtaatgcaatcattcttccagctca

SEQ ID NO: 109649 - DNA, 839 bp, Aquilegia coerulea
  Intron number 2 from transcript AcoGoldSmith_v1.007935m (l ocus AcoGoldSmith_v1.007935m.g) derived from phytozome v7. 0 (chr-ID scaffold_13; pos 2853748 to 2854586 reverse stra nd)
tgcgagctcttaacacccaatttgcaaggtcttttattctcttattgatattgaatcatttgcttttttcgcttattagttataaatttgaaacgaaaacatctggagcaatagcttctcaagatattctgaatgacttcactggactactagttaagtagttttctttgattgtgacaaattgagtggcactgcaatgccatcagtattgcccactagtccagtgttgaggtcctcaaccatgtaattagtgcaactcaatttaactactacagatcaaatcatcaaaattgcaatttagtaccttctccaatcagaatgaacctgataaatagatttttgaaacattattgaacactactacccaatcaatcttattgataatgttgaataactgatgattaacaaattgaaactctcacctgtcattattcactcctatctacagacaaagatgatgtaggacactagaacccacactaacacccttatggcaagagagctaatataggtcggactatcaggcttagtttgagattcaggataacatgcttcaatatgtcgaatacaatgctatttactgatggcagtattataatcagttttatttctttttttcttttatatggcttcttcaaattgtttctatttatcttctatgttatgcatccattcctcctccaagatgtacctgtgtacatttttcaaaattaggttccatgcattttattttatttttttgtttcaaactgtcagtgcattatgttcctttttgttcgaatgacctgttgaattttatgtgagcagttgggtgcaatcacaattacaaaatcatccag

SEQ ID NO: 109650 - DNA, 437 bp, Aquilegia coerulea
  Intron number 1 from transcript AcoGoldSmith_v1.007935m (l ocus AcoGoldSmith_v1.007935m.g) derived from phytozome v7. 0 (chr-ID scaffold_13; pos 2854687 to 2855123 reverse stra nd)
aatcagattcgaatcttgacaccaacgagtctcctgtaagcttttttcttcactttattttttcttaacatatctatctatctatctcattcaaaccctaatttcaattttgtgttttttttttttttttcaataattgtgtttaaatgcttctttcaagcttctttcaaagtaattattggaatttttatcatttattaactaaaaatatgtttaaaaataagattttttcttgaacatggagctggttagagtagttaaaaactttaaattgagtgagattttgatgttttatagtgtaaaaaaactgtaattgagtggaattgaataccccttttaatgttttaatggaatttaatttgagtgaattggttgaatttgcactttttgaagacttttgtgtgtttattatgatgcagttcgcaagcaaaagagta

SEQ ID NO: 109651 - DNA, 762 bp, Aquilegia coerulea
  Intron number 4 from transcript AcoGoldSmith_v1.004165m (l ocus AcoGoldSmith_v1.004165m.g) derived from phytozome v7. 0 (chr-ID scaffold_7; pos 6233847 to 6234608)
gggagaaagccgttgtgcaggttttgcagccatttgttttcccttaaatttagttaatattattcgtggtactttatttagagagaaatagaggtaaatgagcagattttattaaaacaggcagattaaagccaagggatgagatatccctggtcagaacaaaacagtaaagtactaagacctacagaagaacaagaagtaaaagaaaaataacttcaaggccacatggtcagggtcccctaggaaaatattaaggccccttgacatgaacaggccatataagtttgacctaaaacgaactcttatattatccttacttcacacttgtttccgttttcgttaggatttcattagttttctctttcactatctggtactgaattgtactacgtcttttgatcaattatttcgtaggttatgcccatcactccatctatcttattttagtttacgaattttccctggactgtggactgtatatgggttagcctaagtctatgacaatgctacaaattcctctcttggtccaggttggatatgattttcaatgaattactggtcaatgggacatattttaattgcccaaaaatcaatcaatcgattaacaatggtcttttgtttgtttgtttctttttcctaactactgatttcttctagatctctctcatgcttgatttgaagtttgatctgatgtatgtgttgttaattgatcttcttgtcttttcaggtttttgaaggaacttcaggaattgacaacaagta

SEQ ID NO: 109652 - DNA, 377 bp, Aquilegia coerulea
  Intron number 3 from transcript AcoGoldSmith_v1.015591m (l ocus AcoGoldSmith_v1.015591m.g) derived from phytozome v7. 0 (chr-ID scaffold_16; pos 4180479 to 4180855 reverse stra nd)
accccgcatataccaacttaaaacaggtatacactttcaaatacagtattcttgatactgtactttgtggttgcatatattggattacacaaatttgcatttacggttgcattttccaagtggtgcctaatgaatttgcaccatttgccagcaagcaaccaagattaaatttatggcaaggttttttcttacgaaaagatgatgacctggcagaagtatagctttgtcatttacatcattgaaccttgctaaaatgtatctatgttccaaatggagctggtgggcgtgctggtggcatatacaagactattattggctctatctgtatggggtttacttttgaatttgtttgtttttcttctgcagatcattgacga

SEQ ID NO: 109653 - DNA, 823 bp, Aquilegia coerulea
  Intron number 1 from transcript AcoGoldSmith_v1.001993m (l ocus AcoGoldSmith_v1.001993m.g) derived from phytozome v7. 0 (chr-ID scaffold_3; pos 3707462 to 3708284)
gggagaaagtaattaattaaagtatgtccatatccaatgttcaatactccaatgtcctgaccatcctcatcttcttcttctatattgatcttgtggggggggggggctagtaggataactttactagataccctttaggccaaataagttgtcaagttcagtggtgttgttggttttggacaaaacatgttactacccactcctcagtcctctctacattgtcattgtcttaagcctcaatgagtgaatctgtccctacaacaaagtattcaatctacatccattttcaataatatttagatttagataaaacttagaagatagataacaatcacagtatagtaaattagcttacagtagtagtagtagtagtacctttttatctccacttaatcatcatcatcataacaaacatatagaaaaaaccaacaacttttacacaaacaacttatatactggaacaatacatacattgtcctttgaagaagttgaaaagaagacattgttagaaaagggggaccagttctgatgagtcttttgaccttgaaagttaataatcaagagaagcattattaagtttttatgttaggttaagttgacaagcattgttatcagttatcatcatcactcatctttctatctatctatctatctttccttactagtagtagcttttttcttttctctccatatcactatatgtgttcagtgttgtggtttgtgggtaccatttagattatctaaatttttgtgtgcacgtgtgtgggggcttgatttgagttcttaagaatcttgtttctcaaatcttccaaattgaacttga

SEQ ID NO: 109654 - DNA, 490 bp, Aquilegia coerulea
  Intron number 1 from transcript AcoGoldSmith_v1.022051m (l ocus AcoGoldSmith_v1.022051m.g) derived from phytozome v7. 0 (chr-ID scaffold_26; pos 1381228 to 1381717 reverse stra nd)
atttcttgcttgggaggttggaggctgttgttcaggtatatttttttttctgtcttgcataatcgcattctctttcaatatatacatgcctgtgaaaatacgtatacctaattaaaatcaaattacctgtttaattgatgccatgcccctaaaacatgatatagatttgaatctaaacttaatgacactaaatatataggtattagaatagcattgatcttctatgcctgcaccaaaaactaacttgtgaggtcgactgctgtaaataggtttagtcctagcttggtataattgtctagatatgatatatattgctgtaggaattctgtaagtaatcttataatgtactaggatcaaaccacatgacgttttcaaaacttgggtttacttctgaatccatgtgtacagagatgggtatggccaattcaaactattttgatgatcttattcttactggtattgttccttgttattgcagcgtctttatcgc

SEQ ID NO: 109655 - DNA, 832 bp, Aquilegia coerulea
  Intron number 1 from transcript AcoGoldSmith_v1.004530m (l ocus AcoGoldSmith_v1.002289m.g) derived from phytozome v7. 0 (chr-ID scaffold_26; pos 1286834 to 1287665)
cgaagttctctctgtaaaccctagctgtgaaggaggttcgttgttagtgtttttacttgaaattcgcaattattactcagtttaattcgttatttacttcgtttttcttgttaattcgttaattaggaaaaaaagagagcatttctctctatctatctatctatctctgaagtagtgatttgaagtagttgaatgtgtttgattttttttttttttttttgattgaattcggtatggtttttacttataatgaacaaagggaacttaagaacagttaagaaagtgtttttagggtttttagtcgaaatttagtactgattgaaatttgtttgggataattgatataatcatcagtagaaataactagtgaagtagattatgaatggttagtgaattaaattgaacagtttgattgagtgatcataaacaatgacgaacaacaacacccccaccaagtatttagaggaaataataagatgggaaaaaagagcaaggataattgggataatgtacctatgaaagatatacataccctcgattatgatggaaatgagctcctttaatgagggaaaatgttggtggttctctttaaaggatgacttggacgatacatttggggggaaagggaagaaaacatactttttgattgaaaatcccatcctaaatgtttttgatgatttttttttttttttttataatcagctgtctttctgcttttgtattgtgttatttcacttatttgtttatctatgagaagaatcactaggtacaagttttaaataagagttttttcatggattccttatatatttttgcttttagggcctcattg

SEQ ID NO: 109656 - DNA, 960 bp, Aquilegia coerulea
  Intron number 1 from transcript AcoGoldSmith_v1.003555m (l ocus AcoGoldSmith_v1.003555m.g) derived from phytozome v7. 0 (chr-ID scaffold_3; pos 7181354 to 7182313 reverse stran d)
gatttgattcacatcgctaaacttaacaacaattggtacttaggattctcttttcaataaattaattcttctttttcatgattgattctcttttcaagaaattttgattgaattcaatactagaagaagagttgtttggttttcgattttttctatgaaattgatttataaatgttgtgaaactgaattgagataattagattgtttctaattagaaattgattaattttgattaactttcatcacacctactgaactaaactaggaatgtagaattgatttgataagtttgtgtgtatgagaatgtcagtttatagtatgctggattgacaatgagttgattatgcatttgttagacgtggtatttttgttcttccttcccgctcgctttctagttaaaattattttaatgcctgactgggtgaaggacctttaactttgtggcaatcaagaatgtaactcttccttggttaatcatattaagagtttgtataaatttgacttgaagtgattagttagttggaaaagaacaagagccatttcgattagtccaaaatgtgagttataggatatcattttgatacgttttgttctggttggattcttagtgtagagagtgtggcatttatattgaaaaatttaacaaatactgttacaatatgtatcagtattgctgttgttatcaaccttattgtactcatttttatatctgatatagcaaatttgtttctgataaactcgggatcattgtctaggaattatcttaatgaatattggaattcaatggtttaagtggttggagcatatataagttcaaagttatatgttgaatagattttctgttctacatctagttatagcagttttattaaagatattaatcatcaccatgtagaattattactttttaattgctgctttgcttgcaactcaccttgtttattctccaggtagcttaaa

SEQ ID NO: 109657 - DNA, 950 bp, Aquilegia coerulea
  Intron number 2 from transcript AcoGoldSmith_v1.013750m (l ocus AcoGoldSmith_v1.013750m.g) derived from phytozome v7. 0 (chr-ID scaffold_44; pos 1079538 to 1080487)
acctgcgatttccaaacccagaacgtattcctaaggtagattgctattcaaattggaatttgtttactcataaacttgtttcaaagctggttacatctacctagttgctattcaaagctaagcaagagagcatcttacctacattcttgggctggaggcaatcaacatatgatcatttttatctttgatgttaataatcttctcaacagaggcaccaaacaatacacaatcaaaatggctaccttagactaaaacagttgtatcaccacctactttgcatgtatgaagaactaaataatgacacaaatgcctgtcagtgctactatgtattcaaacttgtatatgaaattgtcaattaggattggaagagaagatataaatataaaaaggtctaaattccttgtttgtaatatcctagcgtgttcttttgataccttggtcaagaggtttgatcaccatttgtttggtatttgtggatagctaaatgatgatacatatttgtcactgcaactaaagactatacaaaatatatataagagatatatttttgtttgtattggacttcaatatactagcctgtataatgtttacccgtgaggctgtgacgacctgctcgtacctctgataggcttaatgggtatagaattggtgctcaagtaggttatcatagtaatggtatcttttttcactcgcattcaccttaaatggcactagaagtttagtttgaccaccaaagagttaggttgttatggataataacttagaataaagtatccatatacttggagtcatttttacttgagtacatatgcttgcagttacagtatttgctttcttgaaccagtagcctatgataatgcttcaaggaatgaagtcgatgtgtcgcaggtatggaagtcgatgaaccttactttagtttctttgggattgttttgcaggtaaggaagtcg

SEQ ID NO: 109658 - DNA, 571 bp, Aquilegia coerulea
  Intron number 3 from transcript AcoGoldSmith_v1.022903m (l ocus AcoGoldSmith_v1.022903m.g) derived from phytozome v7. 0 (chr-ID scaffold_39; pos 1771734 to 1772304 reverse stra nd)
ttacaaatctggagctccatcattcatatagggtacgtctttttgtatcatttttttttggttttgttataaaatgcaacatttaaggatgaatcatgcattatttgtctgcagtcgtagaagtaatttcgaaaaggtgtatcggatttttttagttctgatatatatatatgtataccttcatatacaattttgttcttcaataatcacggcattatgcctcctgtcttcaaatccttgctatagatccacagtcttactgttacgccatctaaaagccgattatcttgagtggtcctatagttttgtgtagttacatatccatacatgcatcatcatgatgtacgtgtttggcatactccaatcattatttgtgtttctctattttcaacatctttcataaaattaggtttgattgtgtaacgagtggatactgagttgtgaacttcattagctatttctactaagaagcatactgcatttctacatggttttacatgttatttaagttgtttataactttttatcccttccagattaagccagaatctgatcatattctggaggagct

SEQ ID NO: 109659 - DNA, 942 bp, Aquilegia coerulea
  Intron number 1 from transcript AcoGoldSmith_v1.012145m (l ocus AcoGoldSmith_v1.012144m.g) derived from phytozome v7. 0 (chr-ID scaffold_55; pos 1259323 to 1260264 reverse stra nd)
agcagaaataggtacatttctttcaaaccccttcctttctctaacaaaactgtattaaatcaaaacttaaagcatagaaatgttgagatacagagtcattttctccactttacatactattgttctctagtgtatattaaatggtggtctcttgctttcgttggactaatgttgattacagtcattgctactagaatgtgagttagaagtttgaaaactgaaatacttacagaaggagatgagtttcatgtgtacaaacggaataccatagtgaaagtctgaagtcatgctctatctgttgtttggtttagttaagcacttagcattggttgcggggtgccaagctgcaagttggtgccatcattcaaattaaaatgtcgagatagaggactgacatgcttgtaacaccaactttctcattagtaaacatcgattcaattttcacttttcatactgtcattactaggaagtctcgatcaaattaccacttaatgaaatggaattctgaacactatttaggattggaatgttaagttacacagttaaagagtacttgttgaactatcatttacgtgcactaatctttgtctgaatatttacagtatttatttatttagttttgtatttgttataaagaagattgatggtaatgtttttcaggtgcattttatattatattgaattacacttaaaacagattgacaatgtaacaacgcataaacgataatccaatgtttgactaaagtgtccctaattaacacggatagccgaggaatcttgtggaaacattgatgctatttctccattcatagtttccgatttgtattttcgctgatcatagtaggaagaacatgtaaactattgttgagaatttttcaattttgcattcataaactaatactgttgatcatgttctttgcagtgaataaaacttccttaatc

SEQ ID NO: 109660 - DNA, 570 bp, Aquilegia coerulea
  Intron number 1 from transcript AcoGoldSmith_v1.000024m (l ocus AcoGoldSmith_v1.000024m.g) derived from phytozome v7. 0 (chr-ID scaffold_8; pos 3343721 to 3344290)
tgcagcttattgtcgaggtgcaaattcagcttgatttcataatttcatcatccattttataatcaaagtagatatgttaaatttacgaactacactatcatctaaattctgaagaaacccaatattgatgtataccgcataagaacaaagatgcaactgaaattacaagatcaatgatttccctgcacaaatgtgtttgaattcctacttccagcagacagtgatgaacacctttatttttcatacacttttttagcttcgagtcttcagcagcagtatttttagaatgaaagagaatttctggcccgtttctacaaaaaataaaaaataaaaacaagagcagtaaaaatttgatttcattaaaatacactaagtaggtcaagataacctaccttaaaagttaaaagatctgaactgaaagcaataccaccaaatggatttgtagctaaaaaattctgaaactgttcatacatcagtgttaattctaaagctcattgtaattttttgacataaatttgatcccattgataatatatgcttttttattctaaatttttgggtcatctgcag

SEQ ID NO: 109661 - DNA, 730 bp, Aquilegia coerulea
  Intron number 1 from transcript AcoGoldSmith_v1.009869m (l ocus AcoGoldSmith_v1.009874m.g) derived from phytozome v7. 0 (chr-ID scaffold_2; pos 6477502 to 6478231 reverse stran d)
cattcttcttcttcttcttcttctctgttttgcttgtaagccttttttttttctttgttctggttgcatgtatgtttgattctttgaaaggttttttttttttttttttttttaatggggcttatttttaatggggtttgggatttgggtatttcttattttgtagaaaaatccatggttttggtagattttcttcttgttttgagtccttgtaagcctttagttttatattgtagtttaccatttttttttttctttaattcattgtcagtgatgtttgagttggattgctttgtcttgtttctctgggttttgtttatttaatttttttggtcttggaagatatggcttgttttgttcttttggtagggatttgttgttaatccatttgcatgaactttgaagtttctgaacctgacttttgttgcatgttgtgtagcattttaaaaaatttggttttttggagttgattctaatttctacctatacatgcaattggtagagatgggatcattgagatgatttggtgatgaggtttttttttctgttgttgttgttgttgacagattagcaatgttgagattgaaaattatggcttgtttgttattctatttgtttcctagttattatctacatttgattagagatgaaagtttcagtataattctgtgacctgagttagtcttgtgatttgtatttgttgtagggccattctagccttctcaagaga

SEQ ID NO: 109662 - DNA, 824 bp, Aquilegia coerulea
  Intron number 1 from transcript AcoGoldSmith_v1.024813m (l ocus AcoGoldSmith_v1.024813m.g) derived from phytozome v7. 0 (chr-ID scaffold_3; pos 4117217 to 4118040 reverse stran d)
aaaccagaccaaggataacaagcagtctcaaataggtacatgtttttatctcattttcatattatcaacatcataccattatcattgttcttgaattttgtatcatttctttcttataaattactgaaaaatcaaaatttaggttgttgtttccacagatttgagaccaaaaaacttataaaaccaaggttggaccatgtgaatttcggttcattataagttatgtatatgatttgattcatgtgatgttggggatacatgtaatggattttgataacctgttttggcccccacttttttaagcccaatgcattaaagtccccactttgcgcacataaacccacggtgaaactttaggctaaacctatatacgtagacaaataacatttttatacatctcaatattgtccctgtttagccactgtagtgtcggctaaacctatatacatagacaaataacatttttattcatctcaatattgtccctatttagccactgcagtgtcgtagggtagagttttgctagaaaacaatttcgaaatttgttagaaagcaatttcgagaagaaccatggctatgtttggttcccggaatttgaattccggggtaatatggtgatggaagagtttcagaccttgaaagaacagtttccataattataaaatagaaaccactttctttaattctatactaggatggaatctgctttccagatttttctccaaaaatacagataattatacatactttcccggaattcaaacatgtgtttggttcggacacttagctacacaaattgcttatccgctcttcttatgcaggac

SEQ ID NO: 109663 - DNA, 320 bp, Aquilegia coerulea
  Intron number 1 from transcript AcoGoldSmith_v1.011402m (l ocus AcoGoldSmith_v1.011402m.g) derived from phytozome v7. 0 (chr-ID scaffold_34; pos 1891895 to 1892214)
atctatactttcgacactgttgaagatttctggtggtgggtttttcttatttattattattattcattgtagattgatttgaataccctttgatttcattaagaagattcttgtttattgaaattaaaaaaaaaaaaaaaaaaatcccctttttccaatagattggagcatgattatcatacattttgatggggggttttttttttttccttacaaattatttttctgttaaattgttaaagtttcaatttcccattaccatagtctttaattttttttttttaattatttatatattttttgttttggctgcagtttgt

SEQ ID NO: 109664 - DNA, 955 bp, Aquilegia coerulea
  Intron number 3 from transcript AcoGoldSmith_v1.011402m (l ocus AcoGoldSmith_v1.011402m.g) derived from phytozome v7. 0 (chr-ID scaffold_34; pos 1892590 to 1893544)
caccaaacgaggctgcacaggtattagtttctttctgacttagtatatgagaagaataacatttatttttgaaaagccttgaaaaattaaaacaactcttattagttaaagataaacatatgatgcatatatgcacttcctcctttttgtgcttgtggcagaaggaaactttttgaatgattcgctatagaaatcacatatgtgcaaatggtgatctgtaaattaacggtccttttattgttttattcatcagaaaatgctaagtatatcctaaagaaatgcttttagccgtgaacacattagcaccgtaaggcgtggttaactgtttatgtgatcacaatcagttgttagaaataccaattctggatatgttttgtgagattctaggtccaacttattctaattgcagacattgggacaaaacccttagctttaactaagcccagccaatctctcctctctcctccctcttcaaacgaaagtgaaattttaatatgcaaatgcaacaaactcaagagttgcctatctgcaatttggctaactatgttcggttaaaccttggtaccgaaatttatatatttggtgctattgtgctttgaatgatcactgggtatattttctgatctttaattgtgggctgttcagctgtctccaagctcatatattgtaaactcaagagctctaaggtttgatgtctaggtccattaaggtataaactgcagttatgttcagtttttaagaaccgacctaccatttgacctaagttgcatgcctgcaactcttactatgcttcttataaacacatttatgttaagctttggacagccgagcatgtgacataatttgcctgccttgcgtgtctgcaactttttattatgcttcttatatggagaattttgtacgtggtccatctgttggttgatctagtgcgtgtttctatctttggattattcag

SEQ ID NO: 109665 - DNA, 713 bp, Aquilegia coerulea
  Intron number 1 from transcript AcoGoldSmith_v1.003706m (l ocus AcoGoldSmith_v1.001184m.g) derived from phytozome v7. 0 (chr-ID scaffold_2; pos 9625793 to 9626505 reverse stran d)
agaacaagaaaactttctcgaccttcgaatcaaaggtgaatttcttcctttagctgccattcataatttttttagttgtcaatgttattgttgtatgtaaggaaacacctaacctaacacacttccgtgacatgcgagaataatgaagaagaaaagcaaattgaaattttttcaagaagacacaaatttacaacctgggagaaaacccatggccatatcatggacttgtgttaaattaactctgcttataattggacaggaagcagtgtacagttagggattttgccttcatttagtccccatacaaaatataagagtggatatatggaactgatttcaatcagtgctagctggatctgcaatgggcatggatatgatgacccgtattaatgggcctttatatattcattaggattcataatatcacctgcttcttggtcattttccatcagttatttgaatgtcttctgttttcaaaggcttatacctcaagggcttgaaccttggggaaaacttcaccaagatttccttactagtttgctatgcaaaacatataacgcggaattaatttctacttcatatctagcggtcttgttagtatgatttgtaaatgtgtgtttcatccacgaaagataaagtctaaactgcatgtaaacttatgttgttttcatttacatgtgtttattcgcagttccacaacattctctctggag

SEQ ID NO: 109666 - DNA, 532 bp, Aquilegia coerulea
  Intron number 2 from transcript AcoGoldSmith_v1.017906m (l ocus AcoGoldSmith_v1.017906m.g) derived from phytozome v7. 0 (chr-ID scaffold_3; pos 923789 to 924320 reverse strand)
gggaacattttggacgtgctacggcagatataatactcaacaaaaataacttaaacctattttttttattattataatacaattatttgattgatctaacgctaattcttatttaatatatgtagtcctatacacaatcgaatttcaaaagagaggtcttccccacgcacatatcttgctttggttacatcccgacgacaaaccaaaagacccatctgacattgataaattaatctcaacggaacttcctgataaaatatcgacccactagcatttgaatctgtcttgcaatatatgatacatggaccatgtggagatcttaatcgaaatgcaccttgcatgataaatagatgttgttctaaacattttcctaagcaaatacaaaataacacccagcatgacaaatatggttttgctatccacagaagaagacaaaacttacacaaagttacgaagaatggaatagaagtggacaatacatttattgttccccataatacaaatttagttgtaaagtaccaagctcatatca

SEQ ID NO: 109667 - DNA, 478 bp, Aquilegia coerulea
  Intron number 3 from transcript AcoGoldSmith_v1.018997m (l ocus AcoGoldSmith_v1.018997m.g) derived from phytozome v7. 0 (chr-ID scaffold_13; pos 2112889 to 2113366 reverse stra nd)
gagattttaaccttttcgagaggtacctttttttttcgaaaatgtattcttcttgcaatagaatttgagttttttttactttttattggtttttttaatgaattttggttatagaaaacctccaacattttctgactaggtttgacaattataaaattgtttgatttcgagtatgaatgtatgatgatctttgtgactgagaaagtgagaaaggtcatctgccccaaaatcactttttatatttcaatttcatttgcgcaacaaaagtgaccagaggaaacattttgttataatgtattggacactattctttttcaaaacatgaatgggatacaatgatgctatttctttccctagatcaatcatagctaggacaaagcttctcttagtcttttctctatggcatccttgttcgttcactagactgcttggtattctcctttgtgataaacacaatcattttcattatcttacagtc

SEQ ID NO: 109668 - DNA, 928 bp, Aquilegia coerulea
  Intron number 1 from transcript AcoGoldSmith_v1.009486m (l ocus AcoGoldSmith_v1.009489m.g) derived from phytozome v7. 0 (chr-ID scaffold_3; pos 1955551 to 1956478 reverse stran d)
tcttcattgttggaattggtttgttaaacctggtactacaatcttttctcttactttagttattatagaattcaagttgtagtaatgttgaatctttagacttaaatgttgtatttgttctccaatgctgcttgaatgatgttctgtgtatgttgtggaattgaaatcttgttatatatttttgtaaatgttaattgcttggtattatttaagtacaaattttagggatcacattttttttttcttccccttttagacctaacctaaaattttaagtgattatatattataaagcttcaaataaattttataaattttgataccaactccctcctttcaaattatttagtagaaaaaggggttttctcttagaggttagtgctcattatttttgcaaaagaaatgttattatcaagtcaagatatgcagtttatgtcgaaatatggttccttgcacaaaatttgtgtacatttttttttctcattgccttgaattgtttaatgtgttttttttgtttgtttaaactataacttttaggctattattaatgtaaataatgtacttatatctctaactctctagtttgtgcttcctccttcaaaaggatttattagatcatatgtactgtcgagttgtgtacagttcagaatatcccccccccccccccccacacacaaagcattgtttgggaattgatcctcgtaaacattacaaacgaatatgtattagttgtcggttgtccatataatagggcttagtagaaattgatgtccataaaagctttgaaacaatatctgttaattcaatcgtgtatatacaatcaattgatcatcatcaaataagtgtaacaactatgatctttgataccttgttctgttttttttgtattgcagtccaccttattgtttgctattaattctctgtgcct

SEQ ID NO: 109669 - DNA, 904 bp, Aquilegia coerulea
  Intron number 1 from transcript AcoGoldSmith_v1.012429m (l ocus AcoGoldSmith_v1.012429m.g) derived from phytozome v7. 0 (chr-ID scaffold_58; pos 431843 to 432746 reverse strand )
tctctgtgtttgaaactcaagaggtggaaatcgtacgttcgatttaacctaatttcttcatttctcttcatcgtttcaattatcaaaatctttgatctctttggttttatttgagttgatttcatttatttttatttttttcgcaaatctcacaaaagattttgcattattactttgtacttcgattcattttcttgttcaatatgtttagagaagatttgggtacctttattttttcgttttgtttcattattttgtgaatctaaggttagggtttagcttcattttctgaatgtattattgttgtttgcctatttcttctcattttgaagtgaaatgctttaggggtgtaaagattgttaatgtttgttcaaacttcaaagaacagtaaaacttgaaacttttcaacaaccaagctatgaacttgattaagaatggaatatgttgtaatcactattagaaattagaatactattagaaattagaatgtggatttgatttatatctcgtgaagcagaggtcaagccaacttattggtaaagacagatagtatcgttactacttgagatcaagataattgatttaactaaaacttatcctgttgaaatgtgatgtatgggcgaaagtttttatagaaatggtagatgaaaaagtaacatggatgtctgatccaccattttgcacagtgcatgctatgacaatgtttttaaaaggttgcaaaacatgctttctattacttgtatgttgactacatgaatgtgaatctaacactgcttagctgttaatttgttattcaagtcatagatgtttgctagataatctttgcttgggtgtattttggtgccttcgtcttggagattgatagtttacttattattggtttgtatgcagccaaagcaaatcc

SEQ ID NO: 109670 - DNA, 437 bp, Aquilegia coerulea
  Intron number 4 from transcript AcoGoldSmith_v1.007099m (l ocus AcoGoldSmith_v1.007099m.g) derived from phytozome v7. 0 (chr-ID scaffold_22; pos 2197428 to 2197864 reverse stra nd)
ctgccagagctgcggcgtcagctaacacagctgtttgactctaacttcttatgttctgtttgaaagttatcagcttgctagtagtggactaattttcttagtcattttctcaagaatataattgtttttatttaaatatgttaaaatatgcttgtttatacatctttagctcattgttgtccatgcatattctgaagaataatactattctgacatttctgtttttaaaatggaggcttttgatgagacacaaaatagtaccaagtaacactatttgcgattgatcacaagtttttactttgtgtttcttgtaatgtttatcaacaccagcttcttggcctaattacatattcaaatcagaaaagatccttctgttaagattaataattgttgttgaacctactgacacatggttgattgttccaggttttgtcctc

SEQ ID NO: 109671 - DNA, 1008 bp, Aquilegia coerulea
  Intron number 1 from transcript AcoGoldSmith_v1.007099m (l ocus AcoGoldSmith_v1.007099m.g) derived from phytozome v7. 0 (chr-ID scaffold_22; pos 2198828 to 2199835 reverse stra nd)
agcttctcttgctgcttagaggcaaagaacccaaggtctgttcttctctatttttttttttcttatacattcttatgtttcaatcttcaatctgttctatattagttttgttgttgttttttgaacttcattgattcaatcttgagtctgttctttaaagttatttgagaatcaacctagtgtattttcaagttattgattgccacccaaaaaagaagaagaagaagaagttattaattttcttgtaattgggtgggttttgttaataggacttcagaagttcagattcattgaatctgtttgtcatgagtttgatactttgattttaactggtaactttagacttcctatgctggttttattttagaaggtggtttttgataccctttctggagactaaattgcctttaagtcccatttcaactacattagtcgcaattggaaaagaaatatatggaatctctgttggagatggtctgatagtgattcttttcttttgaggccgggtttagtcaaaattggtgtgtctttagtttatagtctctacatctaaacatttttaatgttagcaaatcaaaatttccccatcagtacattattataatctatgcctgatcttgtatatatacgtaaccatttgtgtcaaatttgtacttgagattattagcttctttctcaagtgaaggattttatttggtgtctatcttttgaatttttcatggttgcaattctttgtttcttataggatttagattgtggtaagaaattgccgttctcttaatttcatctcactactttgagaacactacatgtatatataatatctggtagtggtgtgaatagactatattttattgtaacgttctggtttacgaagaatgtgacctataatttatagctgaatttggttgtggtcagttgtctaatttatagctgaatttataatacaaagtttatgttatgttgcttccagatcgtgagggaagtttacgcctttcatcttaaaga

SEQ ID NO: 109672 - DNA, 854 bp, Aquilegia coerulea
  Intron number 3 from transcript AcoGoldSmith_v1.009599m (l ocus AcoGoldSmith_v1.009599m.g) derived from phytozome v7. 0 (chr-ID scaffold_91; pos 6790 to 7643)
caacagtgctgacaagatttcttttttctttgaaggtatgttttgctttgctttttcgtagcttttctgtttaatttgattgagtgacttgtcttcgttgagggatatgttgtgtctttgtatgtatgtatgtagtcttaaacacccactatcacttgaactatcaatcaagattatgtaaatttcaatcaaaactttggtgttgcattccaagtagagaaattttgcatttttgttcaattagcacacctagcatctcgtatggaacacaaaattctcactatggatttccttagtaagttctgacaataataagttttttagtcaatacgtgctcatcataagcaataacctatgttactgtgtgattttcaagtttatgtacgggcatcacctttttgagcataagttaatggatggtgttaagttgatctttgaaaatttgaaaaggaactgtctccttccaccattcaaatgaaacatttggaagtgaaagatagatatgctttagttttacggtagaactaaagcatatctatttttcactttcaccttcttgacctgtcccactgaccgtgcgttctaatcgattcacatcgtgacatacaatcttcaatctcaaatggggggcgcactttagggagatgattaacgatgaaaaaatcacatttgaaagaatttctgatggtggggtttgttctgggtgtgtttccttttctggtatcactcttcttgttatctatttgtatggtggcattgttgcctgttaaacctactattggattgccttatattttgttcaatctcataacatattgctctatgcatgctgcttgcagagaaggcattcactg

SEQ ID NO: 109673 - DNA, 544 bp, Aquilegia coerulea
  Intron number 8 from transcript AcoGoldSmith_v1.010630m (l ocus AcoGoldSmith_v1.010630m.g) derived from phytozome v7. 0 (chr-ID scaffold_61; pos 420183 to 420726 reverse strand )
tcaatcctaataccacaacttctatcatacttcaggtgagataattgtactctgcgcctttttattgtagttatcagagctacgatttcttcttcgtgtatcttgtttatcattatatttccttatcatggggtgagtacaataatatacgaagggatacctttgtattttattgccggaatagtcacttctccttttgtattaataagtgaattttacaacttgagatatttcgcatggaagaccatgttcagaaacaatgcaagttcttttaaactgctttcattgtctgatctcttttttctcttatttttccatttccaaacttttttcttaccctctattttgttttctgcaaatcaattctttgaatccaaataatgaccatatccacaatccaaatcaggccaaagctgttgttttcttctaaatcttcttgttttaaaataagttcttcctattattgtttcgtagtagttgttctttctgtagtttgatatcccgttccagtgttgatcatgtatactctttgtgcaggttatca

SEQ ID NO: 109674 - DNA, 491 bp, Aquilegia coerulea
  Intron number 7 from transcript AcoGoldSmith_v1.010630m (l ocus AcoGoldSmith_v1.010630m.g) derived from phytozome v7. 0 (chr-ID scaffold_61; pos 420770 to 421260 reverse strand )
tgaagtcatttggaagcctaaaagtggactgataggtacgcaatgaataaagttgtcttgtctgcatttatcagttcaatatgaacttatttgagatcaccttgggatattttggtctagcattagtggttatttgattaacaatttgaagcatctatccatctatttacgtgtgtcaaggaaagtgcgggttatactaagcaatgaataaaaaccgaacctacagtagttttcacttatgttttgtagtcttgtttttttatttgttgctcaccttaagcattctatgcttttttttaatcacatttcgtagtcatgtccaatagatcttctgtgatgtatcttgttggaactgtagagacctgtgctgaaaattctggtgatcctgggcagttgctatgcgaattttacttaaatagttaaatttctttccttttgatgatgtgaacattttctttcaatgtgtaggcaaggaagagagagagtgtgag

SEQ ID NO: 109675 - DNA, 877 bp, Aquilegia coerulea
  Intron number 2 from transcript AcoGoldSmith_v1.010630m (l ocus AcoGoldSmith_v1.010630m.g) derived from phytozome v7. 0 (chr-ID scaffold_61; pos 423117 to 423993 reverse strand )
ggttgcggttttcgatattggttggggttttggaggtatgtacttcactgtttttcaattttaatctcaccccatttcttattttgatgtaattgtatttgggaaaattttatttgctttgttataaaactcttaaaatatttactgcaaatttggcggaattggggcaaattatttattgcattatatatgcttcaatgttaatatagttcactgaaagagattgtttattaggttgtagtatgaattcatagttacgcaaaattagacccaatacttttaagaaaagtaaaagttgaaaatgatgaaagatttaagttaggtataaggaaaatgtatgaaagaaagaggaaatgaaatgaaacaacctttaaaggcattggaaaatgatggagtttgatgaattacggttgtttctctgcgtattctataagttagtatattgcagatgattgcaaactaaaccttatctttcaaatgtaaagattcaccgagatactggtttgatgaccgtatgtggtagatccattttattctggtgtcttgctgtgtttgaaatgtgtagagtcctaaaaagttagtgtcgctaccacattagggagttgtcatttattcataagctgtgtgtaggtctcacacacgcaggttgggttgatgagatgtgaaactacccaaattcttaatttgggagaaatataagaaatgcagcactgttagcataaaagctgaagaaatcaagaatcatttcattgttatacttggaaattttaactgtcatattaaagagcctacacgattttactcaacaaaggtattgatgtttataccaaccggggatttgtcactcaggagtgtcggagtaaattggagtctgccg

SEQ ID NO: 109676 - DNA, 377 bp, Aquilegia coerulea
  Intron number 1 from transcript AcoGoldSmith_v1.010630m (l ocus AcoGoldSmith_v1.010630m.g) derived from phytozome v7. 0 (chr-ID scaffold_61; pos 423970 to 424346 reverse strand )
gtttaaagaagatttttgttgaagcaaaggtaataaatatatatattttctaaatctttgatttaagttgctatcttgtttgttgtagaattgagttaaaagtgattactgtaagtgaacattttgatatgaatttggttttgaagtgaaatattatgaatttggggttttaatagaaatgcaatttttgctaatctttttgataaatgccaactaattggctgcttgtaaaatttatattcgtgattttttttttttgttaattttggctccaaatttgtcataatgggttagttttaatcttttcttcaacatcaacaactttctttgttttggttacaggtttcagtgttggttgcggttttcgatattggttg

SEQ ID NO: 109677 - DNA, 687 bp, Aquilegia coerulea
  Intron number 2 from transcript AcoGoldSmith_v1.022159m (l ocus AcoGoldSmith_v1.022159m.g) derived from phytozome v7. 0 (chr-ID scaffold_2; pos 6121553 to 6122239 reverse stran d)
atatcaatattaggaacaatgtgagtactacaaatttcataacttttcttttattatccttgctttgatgatcatgaaaatctgcacattatgtagcaatttttggtagggtggggtaaagggaagaatatattctttgttcgggtcgtctcatgtatatagcccctgaatgtttgaatttggaccttggaatcttggatgaatgctaaagtagcaggatagagatggtctacagtgtttgaatgctagggtgcaatatcaataattcaatatgtctgtcttcaattagagtattctgtaggagtaggactaagggaaggctctgccatagtgccataactagaccttcattgaattcttctgtggagggctcatgtatcaggaccttaaatgctaaagtagcaggaaaaatatggtctgttgtgtttgaatgctaggatacattaatgtcaatatgtctgtcttcagttacactatcatgcttctcaacttgccagaccaacccctggagcacaatcataaaaacaaccaatcataccagagtattcagtttattatcatacatagtccttcaatgagtgattttgcatgcatttgtagtctttactgtaccattttttttaaaggatcatacaagctaatatttaccccttttcatgtggcatggcagattgaaaatcttgtatt

SEQ ID NO: 109678 - DNA, 249 bp, Aquilegia coerulea
  Intron number 1 from transcript AcoGoldSmith_v1.002993m (l ocus AcoGoldSmith_v1.002989m.g) derived from phytozome v7. 0 (chr-ID scaffold_2; pos 1860880 to 1861128)
acaaaccacctatcgattctttgtttctcgagcttgtaagtaattatttctactttgtttagtttcgattgttctgttagattataatcaatttgtttcaattcgaagattcagattttctagggtttgttgttatttttttttgttttgattttgaataagattttcgattagtgttgttgaattaagtttctttaatgttatattgtttcaggaatttgttcaacttagctatagcttgcttcacgc

SEQ ID NO: 109679 - DNA, 612 bp, Aquilegia coerulea
  Intron number 3 from transcript AcoGoldSmith_v1.005906m (l ocus AcoGoldSmith_v1.004137m.g) derived from phytozome v7. 0 (chr-ID scaffold_57; pos 1413745 to 1414356 reverse stra nd)
aggtcggtgaagctttcgagagcatattagcagaggtatgtcttatcatcttctctttggtattccttatgtgtcctggattggtaatgactcaaaaagtacttgaacctattacaggtggtactcttcaggatctatttgctaaggtcattcttaagtgtgtttcctcacacatgagctccatatcatttatgtgagggaatcttgtcaaaatgtttagatttattctattacttgtcttgatgttcaatatcattacaaattagacaaagtctgcatctacgtccactctatgtgtcatgtctgttttacgttcgcctatcctcttaactataattgtatataaacacgaaggaatgaggagatttttttttcaatcatatatagttataggttacatgtaccttgattgtgtacgctcgccttatgcactactgaaaattgatgctgccatacattcaagagtcaagaccaaaacttgtgtcaatagatgtgtgtccaacaatgatctgtttatattatacctatttctgatgtgtgaaaatgtactgaattgttgagggatgacgttcttcagacagataaagtgaggcaggaaaatagcgaggacat

SEQ ID NO: 109680 - DNA, 817 bp, Aquilegia coerulea
  Intron number 3 from transcript AcoGoldSmith_v1.015398m (l ocus AcoGoldSmith_v1.015398m.g) derived from phytozome v7. 0 (chr-ID scaffold_3; pos 2655539 to 2656355)
tctgataaagaactgcgcgcatccattccaagcatgattgatattgtctcacttgctatacaagtaagtcatttttccacattgggtaaacacagtgcgcaacccaaccaaaggatcttactgtcagcattgtcaggcagttcaggtaacctgcaccggccggcagggatcaacccagacctaaaatagcctcctcaatgttgggcaggcagtgggccaccttgaaacacgacgcagcactaactgcacgtctgaagctaaagatttttagtactagtgctctgttttgttctgttatttggaaaaccctctctccataaaaaaaaaaaaaaaaaaaaaaaccttgtgcacctaaagtcatgcaaaaagtcgagctaataggaagttatggttttccaccgctcctcaaagcaaatagcatagaccttctgcccatctggttttggttattccaaatgatctaatcatctaaatcacaccataagaaactaaatcaagatttgaatcttcattatctgcatctttctgatgcatccatccatgtatggttgtgaccctgcactgattagcttaatttgtataaaaatcagctccctaggtcatgtatggatcagagatatcagtaccactaccaactcttcttgggaaaccttcctcaaacataaaagcaacttaagcaatacttctcagaattatattgttataacttataaggaaaaggttttctctcttatatgtataggaagccactagccaggatgcatgtgtatatggtgatgcttacaggcacttgctgtcacctaatcagtaatttgag

SEQ ID NO: 109681 - DNA, 825 bp, Aquilegia coerulea
  Intron number 1 from transcript AcoGoldSmith_v1.009152m (l ocus AcoGoldSmith_v1.006311m.g) derived from phytozome v7. 0 (chr-ID scaffold_16; pos 4090251 to 4091075 reverse stra nd)
tcttcatttgggttacatctgcagaagttactcaggtgagagatttcatgacttttggtctttcaatcctttaatttgatatattgttggttttgcagttcgggttttaatttatacattatttaataaatatatatcaatatgaagcaatttatgtgaagatttgaagtaatttattgaagtccaatttcttgatttttgtttctataaatggttgtttgggtagttgttgtcaatttgtcataaatcatttacttgtagaaaatgtcattattatgtacatctgatttctagcatttattggtatattctcgatattgtcttaaaataaattcaataagatatgattgtataacttgattatactgttcaaaaggaatgtctatatagtaacacatgttaaaattagttctttgggactgtaggagagaatccctttgtgcctatacgtattgttcgattctcagaccccaaaagttatactaattgtttaagaacttatattttcttacgttgatgataagttttattgggtttggtaaatttgtagagaatatgaagtaatgttaataatgttcttaggttgcaaatgttgttggtatatcatgtgattaagaaagtgcatgttccaatctgagcagttgtggtgctcgcattatatgaagtaatgttaataacttctttgtttacctactaatttcctttcttaagagaaagatatacatgtacatatagaatcatgttactgttgatataaatattttgaacttactctagctcatgttttcagagaatcttcgtggagtataaacaaccatttgcact

SEQ ID NO: 109682 - DNA, 906 bp, Aquilegia coerulea
  Intron number 1 from transcript AcoGoldSmith_v1.001683m (l ocus AcoGoldSmith_v1.001683m.g) derived from phytozome v7. 0 (chr-ID scaffold_8; pos 3297629 to 3298534)
ggagtacaatacaggtatttgttctttggtttttattcatcaggttatgaaattgatggaaatatgtcttgggtttgcgttaattgagcttaattagttgtttctaattcaaattatggtattgggatgggtttccagattttattaataaaaggaatgttaccatctagaatacaaggtgcctgctgcatcctggtccataatagtttccagttgcgttaattgagtacgtcatttctgagaccctttttctgcagcctttttacaagccatagccattctctgtgagcagcttttggttgtcttctgagtccacaccagctctgcacctcagtccacactttcttagaatagcaacagttgaaaaatactttacgtgttttgtgtcttcaaacactagtcttctgctagtacttggtccttgattgggtggattctgctgtgtagcactgctaaggatacatatagctgggagttgttggttattactctgctgagtagcaccgtcatggttgctttgggccctaactgctgagttgctagctccttgtggcaccccatattgttttatgctaattctcatgtgattgtttcatttggacttaaaacctgtttgtgattctatatggtaatgctctttatgtgggtttatggcattttgatcctgggattaaaagtaaaggacgtaatcaaactgtagcttcctaagttgattatagatcaacattaaaaattgattggtttgtggatattcagctggtaacttatattatgcaaatagtaaaaggtcttgtttgtgtcgtcttagaaagattagataccaagcctgaaatcttcgtgagcagttttcttttctttattttattactgtagtatactaactactgaaaatatcggatgcagtct

SEQ ID NO: 109683 - DNA, 881 bp, Aquilegia coerulea
  Intron number 2 from transcript AcoGoldSmith_v1.002135m (l ocus AcoGoldSmith_v1.002135m.g) derived from phytozome v7. 0 (chr-ID scaffold_7; pos 2954390 to 2955270)
ccaagattcaggtactcttttctaattttgtgttgttgtttcaatgtaattaccctgaaattgttaactgcttataccaaaacatgttaaattgttgaaaaacgaaagatttcattgtgttaagtatgatgttttttccctattacaaaaatgcagaatacgtaattaggatttatgagttggggaagaagctattactgtatatggtgttatttattagtatttaaatgaggcttttgtatgtaacattgcaacactcaacgggattgtattcaccaatagacgtattaggctgtttgacttcagatgttattaggctttgagtctgtaatatagaacattacacagttgttctatagatggtagtcattttgaacttattccacatcaccagggtgcacctctgcaggattggacttttatgatattctgaaaatgttcaagaaaataccttccaatctttattattgccatcgttttacctaaggattcttgacgacaaattgttgtattggatgggtgggggagggggattctaagcactcaatttctcgggttacgccttcaagctcgcaccctattctcacaattaatcgtacattactagtaccaagaaactttgcacacaaataaaaagaaacttctaaactaaaaataagaacgtgcaggcttgaggtctgaccgggtgacgttttgcgactcgtatctattctgctcctggatgtttttctctgtattctgcacacttgcatttttgctgattcacggtgaattataccatcatgccgcatggaaccacatttaaaaactctaaatatttattaatattttttttttcttatttcaaagcgctgataaaaactttcaggttttagcacctc

SEQ ID NO: 109684 - DNA, 780 bp, Aquilegia coerulea
  Intron number 2 from transcript AcoGoldSmith_v1.019717m (l ocus AcoGoldSmith_v1.019717m.g) derived from phytozome v7. 0 (chr-ID scaffold_8; pos 2463326 to 2464105)
aaggatacgagtgattttttgtggtatacaacaaggtaaaattcaaccatggttagatatactttttctatctttttgttgaacaaaatgatagtcattcggattgcagagaaaatgtagttaatctcacatatatgcagtgactttaactaatatgtgtactaaatataatttttaaagattcaattaattgcatggtttaactctaaaagttctaaaagttggcttcatttttctatgggaacatatgtatggccctagagactgcccaggcctatggcactccttgcctgattgacttttgttaattaacttcaacataacggatgtgcttttggtatatattgcttgaagtttggagcatggtaaactgtaaataaacagtagttttgagaaatagtcttatcatctgggatacaaacacctctccctttttcgctagaatgtttttgagttgacagataaatataaagaatcagtcaatcaaagccaaaagcccatcaaaagcttagttttaaaggaacaaatggttgaatgttgattgacttttgtttcttagttggttttttttttttaaggaaataaagttcatgttgtatgtctccatactctcgtatgatgatctactttgtatgaaagtatgaaactcgttctcttgaacttgtttttgtttcttttcctctctttttttttttcgggatgatgttcatattattgagtatttgttgatgatctctttttacagtatcaacataaaggaaaaactccagccaggagaaa

SEQ ID NO: 109685 - DNA, 856 bp, Aquilegia coerulea
  Intron number 2 from transcript AcoGoldSmith_v1.013243m (l ocus AcoGoldSmith_v1.013243m.g) derived from phytozome v7. 0 (chr-ID scaffold_83; pos 749167 to 750022)
ggacagaaatctatccaaggatctccacatccaaggtataatgactacaactcactcgagtttaattttgttaaattatatatttgaagttgcagttttggtctttgacttgggtacattattgagcttatgatataatgtcacacacttctttgcaaacaaatgtgcttggaatcccaccttaagtcatgttgattaaaatgaattgagaatcatatctgatttctttatacaatatgttgtagaccaagacccattcatctgcacctagtcatggagccaaacttcaccatcctctttcatccaacattagaactaccaaaaggctagagataactattacacgaacacaaacacacgtaagtcagcttgcttagcttgtggcagtttaagtttagcatcgtcgagcccttggtcttaatgcacacctgaactatcatcagtgacagacactcttggttgccaaaataaaaataaaaatgatgagaggctggactttgattaaattttcattttcttaagtttctaatcttacaatgtgaccccttggcccttgccaactacttttttaataggttacaccaactattagttttaacatatctgaatgtttaacatatattaaatttaatatggttttgagaactagaagaacagattcacctaatgtggctctaactaaaatctaaacaattatagatggaccatgaagtcaagaaccaactaattggtattttggaatgagatttatagtctgagagtacctgactcattctgaaaagtttcttataaagtatatgctactgtcaattgaatgccaggggatattataggtgcagtagtgtgaagaactgtc

SEQ ID NO: 109686 - DNA, 804 bp, Aquilegia coerulea
  Intron number 1 from transcript AcoGoldSmith_v1.012323m (l ocus AcoGoldSmith_v1.012323m.g) derived from phytozome v7. 0 (chr-ID scaffold_80; pos 360564 to 361367 reverse strand )
ctataacaaccgcataaagatcttcaactattgaggtttttttttattttttttttatttttttttaataaatatttatctatacaactttgataattagttatgcatgtcctctctgttcttctatttgaagtgatagatagattttcttaatagggtttgattggatttattagttatgacgcatatatattctataatctaattctataaattagttcattaattccatattatatatgtctactgcatagatagttaatactttaaaggttaaaaattgatctatatagatttcttaataacaattactgaatttaaaatgataatataaatgtttttacttgaaaaattatgttagtagctatattacttatgttctacgtattgaatggtcatatattaattacaaatcttgactataatttacttgatggagtagttactaggtgaaaacataggattgtcttaaatcttacctcaatgctatattttaaaacaaatatgattatgttattttcttctaagtgtatacatgactaattggctagaaaaaaaaattaattctatctatctactgtataaagtataagtactttaagattacaaaaattaaaccaaagaacctcaataaatcctgtcacttagaagaataactcctcgtcattatacaactggcttttatcgaattcattaaaataggaaattaagattcttcaaataacaatatatttgtgctgcaaggtataaattaatatatctgactttgtttttcaatgttgtacagattacttattacttaca

SEQ ID NO: 109687 - DNA, 593 bp, Aquilegia coerulea
  Intron number 2 from transcript AcoGoldSmith_v1.018521m (l ocus AcoGoldSmith_v1.018521m.g) derived from phytozome v7. 0 (chr-ID scaffold_26; pos 855918 to 856510 reverse strand )
ctagtaagtttgtagcttattatatatcatattacagggttgacttcagaattttttctgttaggaacatggatatttggataaacaaacgacttatttgtcatggattatgcacaggctagacctgacctactaatggaattcttccatgtgatgagttttcttctttctcattgcacaactaaatggaaagtagctactgatcttattttggaaaagctagctattaaacactttaggtggttgtttagtacattgggcattgacttatattcactgttgttatcgatgagatgtggatcattgtgccacttctgttttgctaactgaccatggatgtgcaaggtaaattttcatgcatagaaagacaatgtacaaccattaaatttctttggatgtgtttcttgttctcccttataatttgtggctatcttccacaattttgatgcttaagacaacctttttatgcattttgcaatttgtctcaggggggtatacttttgcttgaatctttattgcttcttggctactttgctttgtttcatcctggaaatcaagcagtccttccttggggcaagagtcctaccattctt

SEQ ID NO: 109688 - DNA, 675 bp, Aquilegia coerulea
  Intron number 1 from transcript AcoGoldSmith_v1.018866m (l ocus AcoGoldSmith_v1.018866m.g) derived from phytozome v7. 0 (chr-ID scaffold_35; pos 227762 to 228436)
agagacttatctatcaggctgcattgcaggtaattatccgcctggctttcttaataacctttgaaattttggtggtgggtgaagctctctccaaagtgccttcttcacctggtactctttatcctttgcacatttctcacctagttaattcttacaaaaatattgcacttatttcctttgttgtcttagcttctagggaatctaatgtccattgattatccatgtttccatttctcactccatttggagttcctgaagcctgcctccttcggtcgggtctcactaggtcatgtgactatgtgagggactttttattggtttgctcttccctgtggactgtcctgtttttggctatcctatgtttctcctatgattctatacaagaagaagatcggtgtttttggtgtaagcatgtgcatcatacaggatccatgttgagtgtttcttttttcatgatacagcatactgttcttatgtgtggataattaattgttctgttgtttactgtttttctgataggatcaccttgttttatgttcaagttgcgctcttaatttgtattgtattgatagtatattgcctgaaaagtaaacgacaagaagtcaaacttacatttggttatgtttttgtttccgaatagaatctttctcaaccaaaattagaagccactttacc

SEQ ID NO: 109689 - DNA, 1019 bp, Aquilegia coerulea
  Intron number 1 from transcript AcoGoldSmith_v1.002951m (l ocus AcoGoldSmith_v1.002951m.g) derived from phytozome v7. 0 (chr-ID scaffold_2; pos 4236169 to 4237187 reverse stran d)
ttgaatcggtttatttcttcatttaatcaatccaggtgaatatcaattgttttttttttttttttttttttttattgataagctcaacaaattacacaaaagtagtagaggacaaacgcgctacaaactggattcttcaacatggttgtatatctttgtgagatttcgttatttttcaaaattgtttacagatgagataatttaaggctaaactgttaccctgtttgctctgttttttggaatttgatcaagttatgaacttgaaattatttcatcaagcttctcaattgtcatcaagaatcaagatgttttcttattgttatgttttgttagatagggtagtttggtctatgtatgcttactactgtagtactgtataagcattgtggattagatgttgagtactcttatgtactagtatttgctatcaatgtctttgttaataatggatgggaaatccatcaaaactaaactatgcgtctatgtggtaagttgtttggtgcacggttttgatggagcaaacaatcaatttcactgcagaagaatgacaattcttttgtgtcaataagacaatgatggtctgtgggatgtcacatcactcgcttgcttttccctagaagcgtctctcgtttcactccagccatattcctttcatttttggtaattggatgatgctccacagtattatctaacaaccgtgtgggtgacactaggtagaactacatcgttaaaagatcacagaattacaatccacctaagctactgagaccaaatcaaggagtagcaaaatacaacttgatctctaagcacacatgtgttgaacgaaaatttataatgtcctgttttatctttgttatttaccaagtgagggacttagtattactattttccttcttccttatttgcagtataatatgtactgatctagtgggatgttaagtctgccagacattctgagatttctcttattttgatgtgctttagatcattacaaacactgtcttttgctaccgtagaag

SEQ ID NO: 109690 - DNA, 566 bp, Aquilegia coerulea
  Intron number 1 from transcript AcoGoldSmith_v1.001130m (l ocus AcoGoldSmith_v1.001130m.g) derived from phytozome v7. 0 (chr-ID scaffold_3; pos 9991460 to 9992025)
tacatctcatcgaatcggcgaacttcacttgacaggtcagcaaaactaccattaaatctctcttaacttaattatgatttagtcaaaacttaaaacgagtcaaaatcaaaagcgatttaaccccattcattcattaaagcttttttctttctcaacaacaacttaaaaaacaccaaagctgagatgttcggagacttgctttcttcttcttcttcttcagtttaaacaatctgaaaaccttaaacacgaactcaaaccaaacaacaataacttcaataatccgattgattcgttcaataattcgtttcaaacggttagttagggttcttattctttttcttcatcatcggatgttttgttatcgattgatattttaaagttttgcttttagtttaaattaattaatacttagttatttatttaattgattgaacaaaaacccttgttttcatgattaattgaagttgttttaactttaaagttgataacttttcgcatatttattatgaaattgttatttgaaagttgtgttaatctgtttgttttgttttttaggaacttctgca

SEQ ID NO: 109691 - DNA, 961 bp, Aquilegia coerulea
  Intron number 2 from transcript AcoGoldSmith_v1.010281m (l ocus AcoGoldSmith_v1.010281m.g) derived from phytozome v7. 0 (chr-ID scaffold_2; pos 7771111 to 7772071)
cttcgtcagagaacttgggtaagattaaagttataaattcaaacattccttaatttgaattgcgcaaatatatatgtattagctgaaccctgaaccaattccaaacatttagctgtggaagaatatcggggcaactagcttaaaaggagtgtaaagctctagggtcacaattataactagtaatatgtatacgcgtacagattttggatgaagtcattgttgattccaacttaaacggaatatttagtagttttggggttgctgtggcactttgatttatcggaaactgtacatttattctgcaagagtatgacatcgtctatggacatcactggttttctatttgagaggttgtattgcgtcattggattcatttggtagcatggaagagtttacttttctattaatgaccacatgtgatgtttgcattagtaacaactcatgttggtatgatcgtgtattacagtattctcatttgatattatttgaaagttgcccacttttattataatgacttatatgcgagagactataaaattggccattctagattctttcctgtttatgcatcaaccaagttgctttctttcttcgtatattcttttgagatgaatcaactatagtgttttagaagatacgttgattcgtatactgtgttggtgcatcatttctgagaaaccaagttgtaatggttaactacacattttttgatttatcaaaattctgtgtcatggactggctgcctaagctattgagcatgctgcacgcctctgtggtagaaaaaaaaagattacttaaatttttgttggtacttttattttgtataagtttctgaaggctcaatagttgcgaagtctgtctaagcacttgccagtttcagtatactcagatctatcttgtactcccagaggaattgatacttggtttatattttgtagggagtcttccaaaatttcctcga

SEQ ID NO: 109692 - DNA, 839 bp, Aquilegia coerulea
  Intron number 2 from transcript AcoGoldSmith_v1.018460m (l ocus AcoGoldSmith_v1.018460m.g) derived from phytozome v7. 0 (chr-ID scaffold_2; pos 3777125 to 3777963 reverse stran d)
cttgcgtgtctcttgtgaaatccatactttgtgcagtaagattttctaatcctagttttatgaagaaactgctcattacaatatatatgatttttaagctctttacagattaattcataaatccttccgtagagtttgtaccttttctttcattctcattatcacaaccattggttcacaaatacttgaaagcacatttcagtaccttttcaatctttgctaactgtctatgtgatattgccatatggccttctgattcacagtttcacacacaaactgttctaaggctgtgtaggaattttatttgagttatcatttttttggaccaaacagcatgtttacaaagaaaaaaagggacaaaagaattctgaatgtacaatcaataaaatgaaatttgaaattaataagattgacctaatcatttgctccaaattgttacaataatatgaagataactatgttattaatgccaaaatatgaaaagatagtctggacattgtggaagtatacttatatgctacaacaacttatagtaggataacgagaagcattgttagctagtagcggtaacactctaacacgtctgccagtgttaaaaattcctctgtttcctggccatatcattgcccccagtcccccaccaggccaccgttcatggctcaacctgcaatattctgtctcttaagttgtaaatttggagtagatttggatattgagttcttgtatcttcatatgaatttttgactgtgccaaaaataaaaaaatttcggtactacctgttttgttagtagatgcacatttacttctatttttacttttagcttcttctgtttgcagaa

SEQ ID NO: 109693 - DNA, 751 bp, Aquilegia coerulea
  Intron number 1 from transcript AcoGoldSmith_v1.018460m (l ocus AcoGoldSmith_v1.018460m.g) derived from phytozome v7. 0 (chr-ID scaffold_2; pos 3778052 to 3778802 reverse stran d)
gaatatccagtcggcaaaaacgattttttcaaaacgtcgtgaaatttcgaatcctcaaaaaacagattctgctgagattttgacactataaatcccgagtactcatggatattcgtgaaattttatatatcagtataattcgtgggatatcctccgtattttaaactatggtctcagcagattcctatgcaaatacaataagaaccaagccgacttagctcagtggtagagcgcgtgacttttaatcccgtggtcgtgggttcgatcgtatgaatgtggtaagggagagaagtttgcatgtggttgagttggagatagtattcaggaatatgggagtgtgtgtatgtgtgggactaagtgacttgagtgatcgctaaatgagtctgtcttcatatgaaacttaaacaaaatttaatctggaatgttgggttttgtgtttatgtctcctttcactctagagagagagtgcaagggagaggtagtactagttggtctgcaaaagctaatcaactctaagctttagggatggatggtgttcatttgtttgtttttctgttcttttacctttttttattacaatctaaactatgttctttcactcccttatgtactgattcaagtaagtatatttctctatgtactgattcttgcattttgtttcaaatttattggctgattggtatatgagatttttttttttgttatgattgttataggagcaccctttactccaaagagaccactggtgttc

SEQ ID NO: 109694 - DNA, 557 bp, Aquilegia coerulea
  Intron number 4 from transcript AcoGoldSmith_v1.009096m (l ocus AcoGoldSmith_v1.009096m.g) derived from phytozome v7. 0 (chr-ID scaffold_13; pos 2256660 to 2257216)
ggacactccaggtaaaatttaacattttttttttctctttttaatgcgaaggtaagcaatttaaataagatagagttcaattatcattcatcaatggacaatggtgtgttagtgttactactgttagcaaggaaatagaaaacacaagtcatgactcctattatgtgttcagataaaaaaaattgcccctctattaatttctattgcatgtcatttcggataaagatgatgaatgctatatatagccatataggctatatagtatatacaggatcaaaatctgaactatgtagactcaaaccggacatgatcatggtctaacaaagttgcgatgtagctagtttatttttccaatcaaaaagtacaggtcgtcctgttaattagattaggtaagtgtcttaggtttgtgttactataagttagtttcttttgtagcctcccccacactctgaatacaatgtagcctctttgagttctccattatctggtttgcttatgtaagttatccgtgtcatgtattaatgaaactctcttcttattgttacagtacctacata

SEQ ID NO: 109695 - DNA, 612 bp, Aquilegia coerulea
  Intron number 1 from transcript AcoGoldSmith_v1.012354m (l ocus AcoGoldSmith_v1.012354m.g) derived from phytozome v7. 0 (chr-ID scaffold_32; pos 1196561 to 1197172)
taaagtgagttcttcaactcttcgtcaatatcaaggtcagttctcctcttcttcaaacttattcttacctaaattacttctttaaagcttccgaattatttaataagaaagattaatagacaaattaccttcatatttctatttcttggcaatccatacgctaagttcatggaatctaagatgatctaacttcaagtccctatttcttacttaactcagtttttgaattaattaattcacaacttctaattttccccctttctaatactttaatcttttctaactctttatgaattagaggttcaatactatgctgatgtcatctcttccaaagaaattactttttttttttttggctctatcaatccataatttttttctttcaaaattaaaaataaaaatatatactcaatcgaggattaccattcatcaattacttgggaatgttgtttcatttgctcatttcattccaagcaaatttgatatttttcttatattgttgaaccgtgtttcttctgtcatattgacgttacaaaaaaaacttcgactgaatattgactcactactctctttgcagcccatacattttaatcacagttgttctcggtcttt

SEQ ID NO: 109696 - DNA, 886 bp, Aquilegia coerulea
  Intron number 1 from transcript AcoGoldSmith_v1.011000m (l ocus AcoGoldSmith_v1.009056m.g) derived from phytozome v7. 0 (chr-ID scaffold_91; pos 274277 to 275162 reverse strand )
attgattgtttcccttgtggattaacctttgctttgtaagtaatgtgaagaatttcatagatttgtgctgttaaattttatttattgtattattattattattattatgttcttgctaacttgttttgaagagaggtttataatgtatttgaacaaatgccaaactagctaaacaatcccacttatgaacaagaacatgaaaatactaggattacaggaactcattcaatcttcattggtagccattttttgctcatttaggacattatcgctttttatcatcgtttgatcttcaaattttgttctcagcttaatcatattactaaactaaagtcctttaaagttgtatgcattttaatagttggatttctttttggtttccttatgaagttgagcaatgttgtttactagaggattggtaacagtaaattgggtttgatcatcgtctcaatgtttagaatgtatgtggtctatgactactacaatctgaaaaatgtaattcaactattggagagcaagtgtgaaatcctaatgcttattttcttcaataagacttatccgtacgttcccctatgtatgcctaagtggtgtaagcattactgtattaaggatggcattgttgcctcatcgagttcattgggagacctgtcactaagcccaacataatgtttgaaatgattttctgttaaaccaattcttttgaggttattcatatactaatcatgttgaaaccctgtaacttattttaagagggtaaggatttaaattcctaatctgataatctcaactaattcctcaaagtgaatacatgatacttgttactcgttagagaaacaatcttttgatctttgatattttcctgctcttctttaggtacaaggaatct

SEQ ID NO: 109697 - DNA, 741 bp, Aquilegia coerulea
  Intron number 1 from transcript AcoGoldSmith_v1.027488m (l ocus AcoGoldSmith_v1.027488m.g) derived from phytozome v7. 0 (chr-ID scaffold_3; pos 3065531 to 3066271 reverse stran d)
aaccggtgcttggaaagctgccctcttcattgtaggtaggtttgtcgcgctttactgtaacaataattagattttggctatgaatgaagacgtatcgggcctatggatttagtttgtatacataaattacacaccatcaattggctcaaactagagtcatatatgtttctagtttgtactcaaataaaattcataacttttaccaaaaaataaaataaaattcgattaagggtctgtttgaccgggtttcaataccttttcatttttatctagtaatttcatgaaatgtaaattagtaaatatgtattcaaacagaatctgtctcaattacaataacttgttgattcaatcagtctattatgaaacttttcagtaattatttcaagtacataaaatcaggctaaataaccttcatgctagaacaattatttttctcactgctatttcattttacagaatcaaatggacagcaaaggcttgacatatggcacaaacaaaaaaatcaataaataggagaataaattaaagaagtcaaccttaatttctttgtcgctgccacttgtcgagcccctgcaatcattttaattttttttttttttttaattagctacatacatttgatggttttagtttaaatagatggtcatcatagaaagagaccattgccacaattttatgttaattgttcagctctattttgaaacagtgatcgaattcagcgaaagattgagttactttgga

SEQ ID NO: 109698 - DNA, 613 bp, Aquilegia coerulea
  Intron number 1 from transcript AcoGoldSmith_v1.004723m (l ocus AcoGoldSmith_v1.004723m.g) derived from phytozome v7. 0 (chr-ID scaffold_13; pos 3691767 to 3692379)
atcgatttggtgtcaaacttctacatccacctcaggtaatctcaatcatgtatttttttttccttcttataatcatggttttttaatttgtttattttgcttatgtatgaaggctaattgttactacgggtgcctgataattgtaatatctgtaatttgaaattcaattggttaattttattatgcttgaatggttttagtgctccaccaccttaattctttataatggactgtgatttgcaattcaattgatgagcagagattcttttaatcttgtatgattttaattgcattgacactagctgaattcttagctttatagatgttaccaatttaccatatctaatattcagctattggctgagtagggaaaggaagttatgttgtgtgcgtttgatttatatgtaggcttttgatctaggacgcatcgatcatatacaatcttcttgtactgtactcgttgtctttaactgattctgcattttactaaaaaaattctgaacctttggcttatttttgttagaccattttcatagtgttcagctatcatctcgtattgtattcttctctttggtcaggtggtacatttgtataggaggaagtggattgagga

SEQ ID NO: 109699 - DNA, 788 bp, Aquilegia coerulea
  Intron number 2 from transcript AcoGoldSmith_v1.007411m (l ocus AcoGoldSmith_v1.007411m.g) derived from phytozome v7. 0 (chr-ID scaffold_55; pos 565274 to 566061)
tcagaagaacaccattgtctatagtaacatttgaggtgagtttctaaaatcattacttgaaacagtgttgcatgtttgtttgtccctctctatgatatattctgttctgcttgtttgtttgtccctctctatgatatattttgttctgctttgttctgttctgttttttcatcttggaatcttctcatggttctcttctgttttgtctatatgatctcttgaatttttggaaattgaaaaaatattgtttgtacttaatacactcctttaagctattgttcttggttaaatttaaacattacatgctacttgctagatttcatcgtttaaaagtccgacgaaagaaaaacagaacagaacagaacatagaactattagttttgataatttgaaactatttgtattaacatgcatgttaataatgacttgtgatgaactaaacattcacttagaaggagcatagtttgagtatgttgtatgttgaccaatcatattcatactcatgtacatgtactttgcatgcacaataattttgatgtcatattacaaatatttaaaaaaaatttcccttaacgaagattatcatattcatattcgttaaaggtttgtaatattatagagactagactatcagtaatccgaagcagaatttcaactctactttggattaccgataatcgggtctctaagccgaaccatatatagtttggactttggatgatgattttttttttttttttttgaataagaaagaaaactcatgatttgtatgtgaattgatcaggaat

SEQ ID NO: 109700 - DNA, 761 bp, Aquilegia coerulea
  Intron number 1 from transcript AcoGoldSmith_v1.004124m (l ocus AcoGoldSmith_v1.004124m.g) derived from phytozome v7. 0 (chr-ID scaffold_34; pos 756082 to 756842 reverse strand )
agaagctattctttatactacttgtgtttattcaggtaataattttctcaaatttctcgcttctcttttcattttcttgattaagtttaatcagatagctagatagatgattgaaggaccagagttaggaggtatgatacgatgattcatcatcaacatgaattgccacctgccttatcaccattggatgaagatgatatgtggcagttcatttgttgaaggactagatttccaactttatggtcccaggcttcttatagtccaactttaggaataattggtaatatcactattttttatatctaattgattcaagatttgcttcaatgttaagatatgtggcagttcatttgttgaaggactagatttccaactttatggtcccaggcttcttatagtccaactttaggaataattggtaatatcactattttttatatctaattgattcaagatttgcttcaatgttaagatatgtaaaatcataccggtttttggcaatttgactgattttgacaaactttgatctagcaatggagccatttgattatctattgaaaagataaattaataatatgtacagcagtagcaaggatcatgaagttgccaacgtggtttcacataaacttgttgcaacattcctttaagcatccagttagatgtgagtagaaaataaactgagtttacgatgaaaattgtgctaaatttattatattatctatatagggacaggaaggcagaagcctgattacttggctaca

SEQ ID NO: 109701 - DNA, 839 bp, Aquilegia coerulea
  Intron number 1 from transcript AcoGoldSmith_v1.010809m (l ocus AcoGoldSmith_v1.010809m.g) derived from phytozome v7. 0 (chr-ID scaffold_2; pos 6197836 to 6198674 reverse stran d)
gaattcaaagaaagatcgatcagcaatctaatattgtgagtttacatctcttcttcaactttaatcttctgattttttttttctaaaatttccttagttttctttgattcatttgaaacagaggattgattgaagaatgaattagggtttatttgattatgggtagaacattttggcatcaaagtatcaaacattgaacagtgatttatatgatttaaatcaaagatatgaagattttttctttttttccaagaaattaatgaataacaaggtttgctttgttagagaatttgatatcagaagttatcttagtattcttttaaagtttttatctaggattatagggttttttgagaaatttttttaggtatttttttttttcctttgtagggtcttgtttggtgtggtgttaactgttaagtaacattgccatgattcagaaaatatcaaatcgatagaattaatgcgcaaaggtagaaatttgttggttgaagtgcaaagatgaaattagagaagtggaattttgtatacttggcaatggtttgtgagatgttgttttaacatgtatgaaaacatacaattgaaaactaattctgcaactagtgcaactaatctttgaagagatgattttattttttccagttttttctaagattgttatccacagttgggttgttcgtaggttggaccttaggaggggatactgttgtgattgattcttgacagtttagtgtgatctcaatttgatgtcattctgtaagattgaagatagagttctagctaacaattatattttatatgcagttgcccaaacctgaagaacgtgcaacaagaggtac

SEQ ID NO: 109702 - DNA, 1021 bp, Aquilegia coerulea
  Intron number 2 from transcript AcoGoldSmith_v1.008068m (l ocus AcoGoldSmith_v1.008068m.g) derived from phytozome v7. 0 (chr-ID scaffold_36; pos 1010996 to 1012016)
gcttctttgttcaaggtaacactgtattctgtatttcgacacaacaatacagtgttgtgttgttcttcgtttagtttgcactattcaacatgctttttacacattattttgttaattttagagaagataggtttaaggattattagttgtggagatatttgtaattagttgaattgaatgtagaaatatgattaattaaagtgtttaagagttgttattctattgattgacttatagaatgcataagtatcaattcttaagtttaggtaattaggtttactaacgaaattattggatttgtgttatgcattgtagaagaagatattgtaaactagaaatatagtggaattaattaacttttctagtaacaaagacttagatgcctgctggaattgttttgagttggtttttctttgtgtcctatgggttgaatggtttctgttaagtagattcaactatgtgagttggttttgcaaaacattgttcatgactcatgagaagaatcaagtaaatgtttgtttaaatgtcagtctgcatatgtcttgagttcagtaagaaagggaataattagagagtaggttatgaatctagtgaaaagtggttaacaattttgagcactacccaatggtttactgagcggtttctacgctttgagtcatttgagtttgtccatttaaaaaggttacatatgaacttttacgaagttaggtattgtcacttttttgtttctgtcttattttttgccattgtgtttgcatcgtataatatatagtgggagttaatcacaaggcaccttttaaagacgctgaacactatttgttgccctgtcatcctgattgcaaatcttatcatctagagtatatcatctggctagattatatgttttagtgcaaactgtaaattgtatttgctgccatcctttccttgttgaaatagtttttttttttgaatagattcctttatattgattttgtttttacattcaggaccccaataagctatcggcataccgggatagaaa

SEQ ID NO: 109703 - DNA, 906 bp, Aquilegia coerulea
  Intron number 4 from transcript AcoGoldSmith_v1.004744m (l ocus AcoGoldSmith_v1.004744m.g) derived from phytozome v7. 0 (chr-ID scaffold_36; pos 1471165 to 1472070 reverse stra nd)
gatctcttcaaaacttatagcagtggtgggcattcagtttagtcttatcagttccatagatttgtatttatatttcaaacaactttcattgtgtggaatttgtttcgaataccatgctggcactgaatgtttcagtattttagggtttgatataactttcagggtgtgatttctaagtgactcacttccaaagtgagtggaaaatacctctagcgtaggaaatatttgtgagagaagtggctcaaatgttttgagattaattgttatatcacaggtaaaaaaataaaataatatatacgttgtagcataaatttaaagtcggtggatgtggaagggtcaagtaacaaggcaagtgttgtttagatggttagacccaaaaattagagttttcgtgttggagaaggaagacaaggtcaaaagaaagtaccattggttctttcttttttctgtagacctactatatataactagcagaattaagaagtgtccgtagtgtggatatcttttttgttatggtactaaattgatgcactcctcgtaatggctccctgacaacacatacttgcctctttaaggtgctgttattgcagaatggggttttcaaaatcctttgatgcttgtttgttgaccacggtagattgaggcatggtgcctggtcttttgtgaagtacacgttcggcatctgaactgagtggtaataccttatctttgtgtgatggccttgtggtaatgatattagtgtatacaacactcttaatttgtgtacacattacgtcaatgaacatgaagtatactttataacggctctgtgttatgtccttttatgctatcgttctaggtaaatctagttatttctgaagttctcatcatgtctcctattgacaagctaatgtatgacataggtcg

SEQ ID NO: 109704 - DNA, 509 bp, Aquilegia coerulea
  Intron number 2 from transcript AcoGoldSmith_v1.004744m (l ocus AcoGoldSmith_v1.004744m.g) derived from phytozome v7. 0 (chr-ID scaffold_36; pos 1472478 to 1472986 reverse stra nd)
cttttcatcaatacaagtaatcccccaatctttatttcactcttcaattgctccaattcttttagttgtattactgtaagattaatttttatgtatgtatgtatgtattgttgaaattacgttgttcttcaatttatgagtatattcagatcgggaaaactgcaatttttcgcatgtgatgaatctgtagtagtattattgtaattatctttgaattcatttattgagttgcatgcctatgttggataaacttctggaacaaaaaaaaaacccatttcagcgtcagtagtggtgcattcgcacaactcttagtcataattgttattctttcttttggtctttcttaagattttaaaatgtggtatggaactaaaatgtaattttggctttgtaaattttgtcactagattctttaaatctgtagtcatattccaaagatatcttcattttcatttattgattatatgactttattcagttctgggaagacaacactttcaacatcaggg

SEQ ID NO: 109705 - DNA, 544 bp, Aquilegia coerulea
  Intron number 1 from transcript AcoGoldSmith_v1.012112m (l ocus AcoGoldSmith_v1.012112m.g) derived from phytozome v7. 0 (chr-ID scaffold_103; pos 116870 to 117413)
gtcatcatcatcatcagtagtagcaacaaccacctgtaaatttctcatcaaagttcaattttttttcttctttactcttttacatcttttatgccttttttcttcatacaatgaagaattatctatgataggtctatgataatgaattaatttaactttagagttgtaggtaatctccattgcttctctttttttagtttgatatactattcttactcttgaactcgatcaattgaagattgcattaaacagagaaggcaaattgcatctgcaatttatctttatcttcattagcaatactatgtcatgagtttcatctgcaatgaaaccatgggcctatcaattatttagttattgtttgcattctatgtatattatatatccaacctgtcagttttgaatatgtattgtgtgattactatgtcacgtagcatgtacacctttattaagttgttatatgcttggataaaacatgtttcatcatataatggttggacatcatgaagcaggtaggaaagaagctttgagattaccttccattaga

SEQ ID NO: 109706 - DNA, 689 bp, Aquilegia coerulea
  Intron number 1 from transcript AcoGoldSmith_v1.026895m (l ocus AcoGoldSmith_v1.026895m.g) derived from phytozome v7. 0 (chr-ID scaffold_36; pos 2283253 to 2283941 reverse stra nd)
tttcagaagtggaccaagtaactgcggtaaggggttttgaaccagaaaatttgtatattggacacaaacatggattcttatgctttattgctatccagaatgaaattttatccacccactttgtttatctagtattgaagttttttcttgtatacccactttgtttatattgcattaaattacatttaaaatgattttggtctgtttattaatgttttttagatatacaagagcataccagttcaagtgataaaaatcgatttgtaacagtagactctactcacaatagctcaatcaaatttgttctttttcgccattatctttttttttccccccttatttcaagtgtttgggttaaaagctttcatgttgatgacttattttgctctttttttcagaaatataagactcttttttgtgtgctccttattgtttatgttaaagttaattacctgatatacgcagtcattaaaatgtgcataaaactctactcatgtgtaattcgtgcaagtatttttcacctgcatattgatgcttcaatatcactttccatagtggattagttttttctccattgtcttcttccatcttcccttaagtccatttcatagacacatgatctacattgcttttattgaatgaagttgtcttattctgttattggggttgtttttcagaactggattcca

SEQ ID NO: 109707 - DNA, 379 bp, Aquilegia coerulea
  Intron number 1 from transcript AcoGoldSmith_v1.011006m (l ocus AcoGoldSmith_v1.011006m.g) derived from phytozome v7. 0 (chr-ID scaffold_2; pos 8589633 to 8590011)
ggtaattaataacaattccattttttaattttttttttttttttttttagttttctgtcaattgttatgtattttgttgatgtacattccttgatgataatttgttgagagttgatgatattgacatattttgattaattatgtagttttttcttgataccatactatattttgatcaaatttatctcgtcgatgattccaagattggtactttccacccttgtttgtgtgttggaatgtgggtgttttcgagcttactgagttatgtaaagaagaatgctagacactcccattacctttgtttccatttttgtgcattttttgtttgtacaattatgcatctaatgtgtgacaatgttcatttcctctactttacaga

SEQ ID NO: 109708 - DNA, 304 bp, Aquilegia coerulea
  Intron number 3 from transcript AcoGoldSmith_v1.022036m (l ocus AcoGoldSmith_v1.022036m.g) derived from phytozome v7. 0 (chr-ID scaffold_34; pos 1035188 to 1035491 reverse stra nd)
gttcactcctgtagagctttttaaggtaatttgttttactcataaggaataggaatgaattttctagggaagtttgtaaaagcaatttgtgcagtgaatatgatgactttgacttaggttagtttttttggaaagctttctaactagtaaagtgaactccatttcacaattcttacatcattttattcttctgtttttacattgattcccattgaattattttctttttaacaaaaagttaagcttccatgtttttctatttcataatttcatgatatggctaatctttttctgcagccttggt

SEQ ID NO: 109709 - DNA, 610 bp, Aquilegia coerulea
  Intron number 2 from transcript AcoGoldSmith_v1.022036m (l ocus AcoGoldSmith_v1.022036m.g) derived from phytozome v7. 0 (chr-ID scaffold_34; pos 1035523 to 1036132 reverse stra nd)
acttgagaaaagtatcaagttcaatcagctagaaggtattacttctgaaaaccaaaaagaaaaatgttcacttttgtttgtaaatcaatttaatgaaaatgcttgttataatgtcagtcgccaaacaaagcaaaggttgcagcttaacatttattgaacaaccaaacaaatttgtgcattcacaggttttatttgttcttatgttgatgttactgactacctatccctttaaacggttttgccttaaataccttcttgaaaactaggaattttactcttgggaattcaaacagtggaaatttattgtcttgtggagtcgggggcatcttcagaaaccttgtatcttttggggtgattattgtacaactctttaaaaaggggggttgctcccggatgttctttttatatgtaatgtttgatttcgtattcattatagggagattacccctttacctcttcagatggtttgcttctttttttctatctgatttcatttttggagcaataggtcaatttggatgacatttaggaaacaatatgattgcttagaagttaaaaccatacacattttggtacttatcaggtaggagagcatatttgcagtacttgg

SEQ ID NO: 109710 - DNA, 697 bp, Aquilegia coerulea
  Intron number 3 from transcript AcoGoldSmith_v1.006963m (l ocus AcoGoldSmith_v1.006963m.g) derived from phytozome v7. 0 (chr-ID scaffold_35; pos 123454 to 124150)
acataacgagcatacgtattccttccttggaggtgattgtttttaatttttcctagtaagagtcaaatgtcaatcatataccataatacaatctaaagcatgttgcagcttgccacttacgaatttacatccataaacacacaaatacatatggttggtgctattcacgatgaagagtattcattggtggaagtcaatgacatgtgggcttgtcatctcagtttaactgtctaaagaaagttgtaaaattggaatgccagtgatcttatgttttcctcatcatgaaacctgtgaatctttttcgaacagccaaacaccttgtttgtgtttgtggcgttaacaaatagttttttaattgtcgattttgatgaagtaaggatttccctttaattttacaaccgccagtgcagcaatctcttggtcaattttgataaaataaggatttctctttcttaattgcatatttattttgtttgctattggtgttattgaagcactaatgattacttatttagtatatttgcctatttgtgatagtccactgtaagttgggggtccattaatatatatctggtcttctttttgctgaattactgaaggtaccatgatatttggttgatagaaaaaagtcgtgaacaaatgaattacactttatcatttgtacatatgagaaaattcatcaatgttatgtgcaggc

SEQ ID NO: 109711 - DNA, 739 bp, Aquilegia coerulea
  Intron number 2 from transcript AcoGoldSmith_v1.003574m (l ocus AcoGoldSmith_v1.003574m.g) derived from phytozome v7. 0 (chr-ID scaffold_2; pos 5482141 to 5482879 reverse stran d)
gaagaaaaaggtgcatccctctttcatatttcaagctgtgctattttttagcggtgttactataatgatagactcattgatatggatcaccactgactcattttaaatgggattattgccttttttggtgtatgtacttttgaataatttcaatgcctcattatttcttatgaatgttccaactgacatgaatattccaacttatatgttacatacttgcatggcaattcttttttgttttcatttgtatctgggaagaaacctggttgccttcttattaaaagatagcccaggttgtctttttcttaaaaggatttctctttatcacagaatatccagactcacataatatttcatgctcccttcagctaccatgtgctcttcaacaattcctccctttagtagcaagtctgaacgagattccgcccaactatttgtcattataattcttggttttgcgtccttcaaagaaataagataagttgctagaatgcctttccattgtctacgaccacaagtttaagtagctttcgccagccttccttagttatactaaaactttgtttaggaatatatttgctcatttacctctctctcgaatagggataaaaaagagagtatgcaacagtgcaaattacttcattgagcattcttcgtatgagcatgtcatctgacttgtatatgtcatatacatttgatgcttgcagtgagacgagaaattaaaattttgagactgttc

SEQ ID NO: 109712 - DNA, 910 bp, Aquilegia coerulea
  Intron number 3 from transcript AcoGoldSmith_v1.017535m (l ocus AcoGoldSmith_v1.017535m.g) derived from phytozome v7. 0 (chr-ID scaffold_13; pos 1825256 to 1826165)
agatcttgcctaacgaaccggtaattgtttcaattcgatttcgtgtttgttttcgttttaaggtttagataagtagatcttaagctttattttcattaattcatctcagtttatctgttagagcgagtttttgctttttggacgaattcctaacaaaaaatctggatgaatgtggattttcttctggttttattcatcttgagtagcaattcgtctgaagattgaaaaaaatccagagattttccacctttttttaagagattgtgtctaaacagtggtagaaaggctataaactacactatatcattacattagatttcttcttcattacatgtttgaatcattgtttctactgaaaagtcaattatttatttatatcatcaagaagctagaactggatattgataatattgattcagataaactgaagagcaacttaacttcttttggctagatactggtgtttgcataatgattaagctcaactcacataactcttaactatggattgaataaacaaatgcgaaatttggtacgaattttgtgagactatggatttaatgaagtttctaaacaccagtaccactccaatcctggctagaccatgtttattattgttttgtaaattgtgcgaattttgtgagactatggaaactgtcttgttatgccgtcaatgaactctgctgtcagtgttgtccacacagaaaatccatttttgtttgtgatgttgtgtgtgtatgtgtggttgtgcatgtcttctgtgcatcatccatttctgaatcattttcatttgttgtttcctctcaagttcccagcacttactagcttagaaaaatgcatcctttcttttgacttttagatatttttggacacagagatttggttctcagggagagaacacgactaagag

SEQ ID NO: 109713 - DNA, 272 bp, Aquilegia coerulea
  Intron number 1 from transcript AcoGoldSmith_v1.024125m (l ocus AcoGoldSmith_v1.024125m.g) derived from phytozome v7. 0 (chr-ID scaffold_57; pos 641555 to 641826 reverse strand )
ggtttccactatttcttctgcgtaagtcttctctcttttcaatctttagaagaaaattaagtttttttttgtagattagaagcaatgcaatctgattatttgaaatgttaatttaatcaaatttgcgattaatttgcgatttttgtcatagatttagacctgtttgaaatatgggaaatttggcaagaatttaatagtttagtatgattaaattgaatgagaaatatatgttttcagggtattagtacttgcgaaaggaactgcgattccga

SEQ ID NO: 109714 - DNA, 319 bp, Aquilegia coerulea
  Intron number 1 from transcript AcoGoldSmith_v1.020459m (l ocus AcoGoldSmith_v1.020459m.g) derived from phytozome v7. 0 (chr-ID scaffold_24; pos 3291145 to 3291463 reverse stra nd)
ttaataattttgattttagcgaacaagttgcttcagtaagcaaggaagaaaatcaagaagatgaagaattgttttttgatattaatcaatactttaattattcttaattaataatgtaatatcttaatttcgtcttctttggtggtgtaaactgcattaatacattatgctctgtgtttttattaattaatacaaaatctactaaattaagcatttgtttatgttgggttattttcttctagttctatttcaaattttcaatttagttctacatatgatgtcttgactcttgagtcttgacaatgcaacaccacaggat

SEQ ID NO: 109715 - DNA, 507 bp, Aquilegia coerulea
  Intron number 2 from transcript AcoGoldSmith_v1.017869m (l ocus AcoGoldSmith_v1.017869m.g) derived from phytozome v7. 0 (chr-ID scaffold_34; pos 2177624 to 2178130)
ctaacaggtgatcatctatataactagcatagtcatttatctcatttcttaagaaatcttttggtattaatggttgccaacttagttgtttatggagaggagacattggagaaaattttctttcaggttgtaatttccaaggaacatgtttttgtgtaacttacagaaggaaatggttggcaaatatgaagtgttgttcactagtataacagaaatcgccacataaaacagtttgggtggtgtttctgaaatttaaccatgaaccccatacttcttttccattcattcaaatacactaatctgcttagtatcagtgcaattctttatcgatttcatatatgtgtcggatttatgataagatatggaatcactacgcatgtgtgctgttctaattgacataagatcttttcaagaaagcgtgatcatcgacttttgaattcaaatgcataatccaattctaaatttaatgtgggaaataactttgaaatgtatttgcatgcagtaata

SEQ ID NO: 109716 - DNA, 342 bp, Aquilegia coerulea
  Intron number 1 from transcript AcoGoldSmith_v1.005134m (l ocus AcoGoldSmith_v1.005134m.g) derived from phytozome v7. 0 (chr-ID scaffold_7; pos 2583487 to 2583828)
tgatttcgtttcactaggtattacttcttcttcttccatttcctatttattaagctgaattttatttttattttgttgattttgctttgtttagttatggaaaattgaaaattagttatttaatttgtttttactgtgatgattgctcaactataattgcacttaagtatagtttgagcttacttgaggtctggaaatggagtccttttgagttcaattttcaagaaagattttaaaagtttgattttatttatattttcaattgagtagttttctaaataggttgttgagttattttctttgtacttatttacaggggtatttggaagttgttcaaagatc

SEQ ID NO: 109717 - DNA, 690 bp, Aquilegia coerulea
  Intron number 1 from transcript AcoGoldSmith_v1.007491m (l ocus AcoGoldSmith_v1.007491m.g) derived from phytozome v7. 0 (chr-ID scaffold_19; pos 1289170 to 1289859)
ctagcccttgctccatttgcttattttctagaaaggtattatttttgaatcttcgtcttcttcgtcataagtagtctgaaatcttactggccgggaagtcgtttgtttttaacgcctaacggctctggtcatggaacatgcatttctttcctgtcaataaagatagatatgattctattcctgcacttaattcttaatttattgggttgattaataccattttcaaatttatacaattatacacatggttttatcatgcaccttcatcttaactgtccatccatattgtgtttgcaatgacctaccaacaccattccaactttggccacctctaattggtgatgtgatcctttcatctttgcctttgataaccacaaaatagaccatcttcttcggcatgcgacaaaatggttagtctgagcccaactaaattcgaaatttggcagaaaaattgcagaatctaaattacaaatgtgttaccctttttagtggacccacactagaaacaaaaatatttggtaaatatgatcaagtaggattttgaatttgttttattattgctttagatttttggaatattctaactttgatttattgtttgttttattattgttcatgacctcacatatatctttcatttctatcaattttgaaggaaaacattaccaaagattactacacaaatagtat

SEQ ID NO: 109718 - DNA, 559 bp, Aquilegia coerulea
  Intron number 3 from transcript AcoGoldSmith_v1.001491m (l ocus AcoGoldSmith_v1.001491m.g) derived from phytozome v7. 0 (chr-ID scaffold_13; pos 2526437 to 2526995)
ctggtgcaaaagtggttcaattttgtgaaaggtgagtatataatactatgtgttatttaatatatgttgtactgtggtgcatggcagatttgtttatggcttttcccccagtggcctttagtgtgtgagcacttagtagtagctattaagtatgtaagagctaacactaaacatatgtgaagattaaaatatttagggatgaagttgaagagtgttcaccatttttaaggtccaatagcattacactgcgcaagaactgaaaccgttggaggcaaaaccaaaaagaatatttttttcaaacaagtaggatctgtaatcacaacttgcaccttcgagtctggttgtgtaaaatgctacacttaaggcacaaaaacacttaatggttcattgtttgtgtctagtttagaaacctagacttttctgtggatgggttgcttcacataggtgagctgaagagctctttgactacttagaataagcaccccccccccccccccggtgtccccggatgtatacggttttgaatgtctgttttgatcaatgtttgtaaggttgcgag

SEQ ID NO: 109719 - DNA, 776 bp, Aquilegia coerulea
  Intron number 1 from transcript AcoGoldSmith_v1.009698m (l ocus AcoGoldSmith_v1.009698m.g) derived from phytozome v7. 0 (chr-ID scaffold_2; pos 5553984 to 5554759 reverse stran d)
atcacttaggtatctctctcaaatctcaatctcaatgtcaactaacagctctctctctctcacacacacacagtctcacacacacacatcgcttgtgtaattgcaaaaaatagatagttaaattcggtttgtttttttttgttaattttggctccaaatttgtggttttaattgtaattgatgattgttgggggatgaacttaagctgcagatcaaatgtaatttcaaattctacttttgtctttagaaattttgtgataattagttatgttttaccatgctttcatcaacattatgttcttcttcatcatgttgatttgagtgtttttaattcctcagaatatactgtgatgttctgtccaaatgtttcatgcttaggtatatatatattgctgaagaagatgacaatttcatatattcattctttttgtaaggtttagttaatgaaaactgtttttaatttttagtagtatattttggactaagacttttgaatcataaaaatgttttgtaaagcttggtctgaagtctgaacaataataatttaggttttttaattagtagtataatatatattctttattttttatgatacatcgatttcaattgaaatatattctgtgtagtatgataacatgttggctgttaagaaattttaaatggtaccaaactattattatgtctacaaattaaatggtacaaggtattttccagttgtgatcagtagcttttttattgcaggttcttcctgtggatattgaagaactttatctgac

SEQ ID NO: 109720 - DNA, 463 bp, Aquilegia coerulea
  Intron number 1 from transcript AcoGoldSmith_v1.006315m (l ocus AcoGoldSmith_v1.006315m.g) derived from phytozome v7. 0 (chr-ID scaffold_93; pos 479512 to 479974)
ataatctttctcttcgttgcattcgagctcaacaggttttttttttttttcaaaatacccttttacttatatgtaaattttgattttaattgagtaattttgagttggtattgatgattttcaatctgcggtttgttgggttttgtttatttgttcttacattgcttttattttgttaatttggattaaaaattgcatttttatgttaatttgattggttgattattgttttagtgatttgggtttgtttaaattagtgggaatttggtgtaattgttgttaatttgataagaaattagtttaaaatcagaaatttggcgatgaaaatgtgtccaatggaatcttagaaaaattgggcaatatagaaatattattgaattcttcgaaagggttcataagccaagacatttttttgggtgtgttggttttgcagtcggattccagtgacgaagcagctgtaatc

SEQ ID NO: 109721 - DNA, 944 bp, Aquilegia coerulea
  Intron number 1 from transcript AcoGoldSmith_v1.008504m (l ocus AcoGoldSmith_v1.008504m.g) derived from phytozome v7. 0 (chr-ID scaffold_3; pos 8705815 to 8706758)
tcttcttcaccttcgtgctcctatcaagatctgcggttcgttttctctctttcttcccccttttcttcatatcttctttgtttgcaattgggaaattgattcttttatctgcaattgcacaatttaatttgatgatttagttgaaattaatgctattatcaagttattctcaggtggaatcaaacatagactacgttacaattgttgtaaacacaatatttttgaagggagtttttatgtttatgtgattgcaaagtacacattggggatttctaagttcttaattgaatttcctcaaaacaatgaatatacataaaccagtctttacaatgcaaatctttagggataatatgtgttttcctcactctagataatgtttcataaaaggtttaacaaaagacatataaaacttggagaatagggactatttgacattactagttgcagttatatgtgtttttgttatgatccacccactgattttcattaaatcatcggacaaaactcttacattttgtaacttttaagcttggagaatagtttgttcagtgaaagactctaatatttgttcatcttaataaaattttacagattgtctatggtggttttgttgcatctgctgttgttaaaatatataaaatggtgtttattatgttatttgttttttttaaaggctaaggcaagcggggttgttgcagcggtttattatgttatggcttgtagaataaactttatgtagcatctctaggtaatgataaagtgaatttgtgcttgaaaaatctaggaatattatgtgtagtgaatgcggcgcaagtatgctgttagctgtcctgatcctgatatttatagtggatcatttaccatattccagtacactagcttctttctaatattacagacctcttacaggtgacatacacgggcaataccaggacttattgagg

SEQ ID NO: 109722 - DNA, 286 bp, Aquilegia coerulea
  Intron number 1 from transcript AcoGoldSmith_v1.019446m (l ocus AcoGoldSmith_v1.019446m.g) derived from phytozome v7. 0 (chr-ID scaffold_2; pos 5508172 to 5508457)
gattgcgtgattaacgagagtgatgttcaaacttcaaagtactgaaaacaccaatttcgtgagtgttttcttcaggtttgttgatttcattcagatctgaatctcaattctttatctacatttccaataaacaaatgttgttttatactgaggttgaggttacaacagtatatctaatttagctgatccaaagattcaagattcaagatttgggtatttgtttttgtgaattatttgattggaaatggaagattcaagtaaaattgaattggaaacattgagaaat

SEQ ID NO: 109723 - DNA, 456 bp, Aquilegia coerulea
  Intron number 1 from transcript AcoGoldSmith_v1.012723m (l ocus AcoGoldSmith_v1.012723m.g) derived from phytozome v7. 0 (chr-ID scaffold_7; pos 2835254 to 2835709 reverse stran d)
ttgttacaggttagcaaacaccctcttcttcaattctctgttgttataagctttttcattggcatgttcatcatcatcatctttgtttgttaagttatatattccttacatggcttacttgatgtgatattaattgtgatataaactcattcatgtcataattatatatctaactaacaattttagtatactttgttcctaccttaattttgagttcacatgggctataggtagtgtttgtcgtaatctaattaattagaggattatcttctcatgagtttttttgttgcttagtttaagagctcacatgaaggtttttttttgtttttactttttactttgaataagctagctagatttcttcatatactagcttatttctgagaaaatatgcaaatgaggttattaatatttctctgctgtctttgtttttgcaggtaagggagagttaataac

SEQ ID NO: 109724 - DNA, 543 bp, Aquilegia coerulea
  Intron number 1 from transcript AcoGoldSmith_v1.012420m (l ocus AcoGoldSmith_v1.012420m.g) derived from phytozome v7. 0 (chr-ID scaffold_36; pos 1106244 to 1106786)
tgtcgtcgagggaaggcataccttttcaccactgcgtgagttccttactgcaaattcgattgttgcaatttttttcttgactattaatttactttgtaattcttgatgataagctcctttcttgtcagagcggcatactctatatgcctataagtccatcacctaacaatcaaagtcaaccgttaatcaaagcttacattaagcatgtagatgcacaatcatagcttagatgcatcttcgatttttattgtcattttccccttctttttattgtgatatactacctgttggttttgatagtcctgtactcccgttacctatactctgtagtattcatgaagtaacatctaatggcaatattaaggatttgaaatgataacgtttgaaattacactgttaagattttgactgttttattttgcactttttgaatcaccctgtcagacatcttgcaatgtgttttttcatactcgtgcactcattgttttgtttctgtatttattctcagggtgaatatcacagtgggacctcaagaggaaagga

SEQ ID NO: 109725 - DNA, 638 bp, Aquilegia coerulea
  Intron number 1 from transcript AcoGoldSmith_v1.014075m (l ocus AcoGoldSmith_v1.014075m.g) derived from phytozome v7. 0 (chr-ID scaffold_2; pos 718232 to 718869)
ctgcctgcaccttttcgtcctacctttaatttcaggtaatttgtgtaccatgtaattgtgctacatcaatatagctctgcatatgtatgatttctgcacaggtactttgattgcaggggttttatataggatatatgtgtatctatgcagagagagctgaatggatgcatagtgttgtattagggatgtgaaatgtcattttaactaaaatcaatccatactcaaggaaatacctcatgaacaagtgtggacaagtgggtttcatataccagtttgggcggcaggttccaaattattatcatatgaatttattcatattttctgtggtcaggaagagtcaattgtttttataactctgctgatatatcagttgatacacatgaaactaattttctacttttccatgctctaatagtaagtatatgtgctcgataaaagacttgttgaataacgccgaaggcttcaatacctatatgactcttagctgttaacattctgtatagtccggttacaatttagattaagtgtgagatctatttatttcttgttttgttttccctgtgcacagtgcaatcattgtggttttctcacttgtccatgcaggtatttcaattcattgcagagtgagtgttttgctg

SEQ ID NO: 109726 - DNA, 340 bp, Aquilegia coerulea
  Intron number 1 from transcript AcoGoldSmith_v1.020818m (l ocus AcoGoldSmith_v1.020818m.g) derived from phytozome v7. 0 (chr-ID scaffold_13; pos 3263217 to 3263556)
ttcgtcttaagatcattaaaaagcttaaagaaaacgtaagttcttttacttctcttttctctcacttagggtttcttcaatccaccataaacacaattatgtgatactaaattataagtcttaatactgtacaatcatcattgattcaatctatacaaattgtttgaaaaaaatttggtttatgtgttaatagttattttgttttgggatgttttttttttattcctatctctagagctgtaattatggtttatattatatttttatatgatagaagtgaaaactgattattcatattactttaggaagaactacgtaacaacattatttcaacagtaaa

SEQ ID NO: 109727 - DNA, 457 bp, Aquilegia coerulea
  Intron number 1 from transcript AcoGoldSmith_v1.001655m (l ocus AcoGoldSmith_v1.001655m.g) derived from phytozome v7. 0 (chr-ID scaffold_3; pos 8066233 to 8066689 reverse stran d)
aaggtatttcataactgggttttcatgtttaaatcttcataattaataaataaaaatacctttttttttttcatttcatttgttgttctgtcagttatgattccttaagatattatctgtttttgtcaataagtttgtttaaggatttaagatagatttgattgtttttggaatctgaattattttttttaaataaaatttagtagatataatatcacatcagaagatacttatagttctgattccactctagtttagactaagtatcatgccaccagatctaattcaataacaaatcagaaaaaactcgtaaaaacaatttagatgctatttctgtttgtatagagatggtaacaagtatgagtagatttgtaatcaattagattctgctatctgacctattttgtatgattatctttcagtcataacgtgttcgcgggcagtagttgcattatct

SEQ ID NO: 109728 - DNA, 899 bp, Aquilegia coerulea
  Intron number 1 from transcript AcoGoldSmith_v1.003272m (l ocus AcoGoldSmith_v1.003272m.g) derived from phytozome v7. 0 (chr-ID scaffold_2; pos 5921024 to 5921922 reverse stran d)
tacccttgaaggcgtcaacaagtgctcttctctcggtaagcaaatcttcttctttcctctcccctccccctttcaattattcattcacattgagatcttgtttttctattgattcccctgttttgagatctgaatagaaattgttaatttgggtttgatttgattcaatttagctttgaatttatgaaattttatgtggggatgagttattatttaacgagtttttgtgtttgggttgatttgggcgatctcaatttaaagattatttagctgctaggggattggatctgttgttaatttatttggaattatttgcaacatcttaaatttcatttagtatgactatataaccttgggttctcttcaatcgcggaaatggtcgcattcttgttgttgggataattgtagtgatgtgaaatatacttgtgtataaatgctggtggttaaaactttggttgttgttaatttttatttaatttgctcttgagttgcttaaggttttggtggcatcattgttgcaaaaatatttcaacgatttaaagtggcagacagttagttcaatatttgcatgttgatctcaaacaaatgttcattacaaacatgtttacatttgttttgttgtctatgttctcctgaaaatttctgattgtattgtaatatctggtacgtgcgtcattatgttaggttcagttgagcattggtgtataaagatgggttagtgatttcatcttccataatctgaatagtttcctttgtttctttacgttatacattttccatctctatgtttttagttatagactattgttgtttgatactggcaattgcttcctacttatcattctacattatttttgtgtttagattgtttgggtagacgattggggccgcggcttctt

SEQ ID NO: 109729 - DNA, 665 bp, Aquilegia coerulea
  Intron number 1 from transcript AcoGoldSmith_v1.018865m (l ocus AcoGoldSmith_v1.018865m.g) derived from phytozome v7. 0 (chr-ID scaffold_2; pos 759300 to 759964 reverse strand)
ccaggtctatcgttggactgttccaaagaaaaaaggtaccccttttgtgatttattgaccattttgcccctacttatttcatgaaatcttatatattttattttcaatgcaggggtatatatgacttttgactctctgttgccgcgtttttatctaattaaagagttgtttgactttttttagtcaagttgctttggtttcttgtgtgaatgtgttctctcgaatgcttgataagtcagtcaaagtcacctgatttcacgtcatacgcacgtgataatagtagtaatcaataggaagttgaatacaatcttgctcctcaggagcataggattctactcactatttcagttagttgttgtaacttgtaagtttatccccaactacctctctctcctcattaacctttaaaccacttccagccaaaaaattaaaaattactgtaacaaaaaggaagcaaaaccctctatatgaaatcaataaacaccacaagtttccaatttaattaaaaaaaaaaaaaaaatgaaaaataatttttttctatttttcttatcaatatccacaattccctcttttatctatgggacattttctgatcttcttcatggttctaatcatatcttcaatctctcaattatattcacaaatttattcacaaccgcgattag

SEQ ID NO: 109730 - DNA, 895 bp, Aquilegia coerulea
  Intron number 1 from transcript AcoGoldSmith_v1.009446m (l ocus AcoGoldSmith_v1.009442m.g) derived from phytozome v7. 0 (chr-ID scaffold_35; pos 1508336 to 1509230 reverse stra nd)
tgaataccatctgacctaacagagtaacaggtattctcttattctctctctctctctctctctctctctctctctggttgagtttgctataactgtttctgttaatatttttgttcattggagttttgagatgttctttagctgaagatatggtgattttaatttacacagtggttttttttattattatattaattgaaaatcaatttgattgataattagaatatttggattattattgatcatagatcaaaaggtggtatggtggttgttgttaatcagctgtattttttcactttctaaaaaaatcgcaaaatcaaatctaactaaaagttatttggttattattagttcatgatttaccaatctatgaacatgaatataccatgtatgtacattgtagatttttttggtctattgtgggctacacatttgattgtaaggtgagacatgatccctggtcgagtttttagtttagtgatgttttatatgtttttgtttgattaatggattgtatgtgcaaacaactgtattccctttttgtaaaatatagtatagtagtccattgaaggttcactcggggcgtttatagggtcctggaccatatgaatttggaaattataagttacaaggtttcacaccgagcagtctggctggtttagaattgtaaactgaagtcagttaaatttgttgtccactatatttgttatacagatttggttgtagccttgttccaatgttattgttgaaaacaatgattatttagccttctagacttctagtttactactaagttgcttcccaagttgttaacctgtttaaaatgtctgacttttgagtgagtgacattttccttgttcatttctcatttttaatcaagttgtaccattgtagg

SEQ ID NO: 109731 - DNA, 702 bp, Aquilegia coerulea
  Intron number 1 from transcript AcoGoldSmith_v1.017806m (l ocus AcoGoldSmith_v1.017806m.g) derived from phytozome v7. 0 (chr-ID scaffold_57; pos 1147389 to 1148090 reverse stra nd)
cttcctgggtgttcacactcttttcatcactaaccccagcattaagtctatttgtataagtgaaggtaataatcttaatattaacatatccgtctcaactcttcggaaacttaattgcttcaggtgtgaaccaccaaacataagttctgagaccctattgtctctctgcaacgctgaatttgagttgtatcgtggttcatataccagtgccgtaattgcttctcattttaaatgtgcgagtaagattctaatggggatgcacaacgtcgagaaactgcagttgaatactacctttattgaggtatgataattttcttctatcgcatgtttacttttatcgtcacatgaaaagttttcattggatatatacttgcaaaacactaacactttgatatatgtttgcagtttctctccaggggtcgagagttattaccagcttctttgccttcatcatgttgcagtctaaaacatttgtgcctcgatctgttcccaaccaggttccatgtccaagtgatgaaattattacttagaagttaccctcacctgcaaacgttggagattgccgttgacagtgaggtagtgttcgaacattttaacctataatttcttttattgcttacgaatataattagatgtttaacttgtgaagtttttactgttcgtgtaggaatataactggcacttggaagcattagcatccat

SEQ ID NO: 109732 - DNA, 807 bp, Aquilegia coerulea
  Intron number 1 from transcript AcoGoldSmith_v1.004538m (l ocus AcoGoldSmith_v1.004538m.g) derived from phytozome v7. 0 (chr-ID scaffold_2; pos 4878140 to 4878946 reverse stran d)
gtgtccctctccagtttctgagaccaataagaaaggtatgaatttatgcaagtttggattctgttagcttcttatttctagctatattagtcggtcaaatttgtgcaaaatcttgccaagacagtatcttcatttttctgtgctatgtggttttttgatacttggaaaagagtccaactgcaattatttataactatcagctttcacataggctttgtacttatgtagtatttatcctaccaagtagaactgggagctgcatttctgttatcattctttgcttttcatatcattatgcttatttataagtcataatttttaaattttgtccaatctggtattctgtacctgaatcaaatgccaacacttgcagtagttgtggaacatgtcctatatctacacaaattttctaaggacctaactaatatattttctgaatcagtatatgaccaatccgtattgctgaaatattgcatctcctaactttgatgcaatttacacccgtataacaaatgtttaatctgaatttatgtgtgccaagctatatttctgacgtacccgtgatacttgtctcttttcaaggtaggatgtcttggtatcttgcctggttaagcatttgccgtgtcttttgttttggaactgctcttcattcttttaaggattttcatatttgaatgtaacacaacacttcacatgttctattcatattttcacttgtgtttttctggtcgccatttgctacattaaggaattttgttcaatttatccaaatttgattttaaatggcaattctatccttttcagtgg

SEQ ID NO: 109733 - DNA, 187 bp, Aquilegia coerulea
  Intron number 1 from transcript AcoGoldSmith_v1.008283m (l ocus AcoGoldSmith_v1.007896m.g) derived from phytozome v7. 0 (chr-ID scaffold_26; pos 590579 to 590765 reverse strand )
agtccaaggtaatacctttgatctttttcttcttaatttggtgagtaaaaaggtttttagttgaattgggatttgggttttgattaaagtttgaaattttttattggggttgtggattttgatcttcaacgttgtgtttttgttctaagaaggttgaaatttgaggtttgttttgagtcattttggt

SEQ ID NO: 109734 - DNA, 763 bp, Aquilegia coerulea
  Intron number 2 from transcript AcoGoldSmith_v1.013341m (l ocus AcoGoldSmith_v1.013341m.g) derived from phytozome v7. 0 (chr-ID scaffold_3; pos 10027290 to 10028052)
ggttggagagagtttgtaatcacgattttaaataggtaatggcatcacacattttattgttattcaataatcatgttcataattttattcttcttctatagatatttttagaggtttaaattagttttaagattcaaaattttgtattttatgagtattaaagggaacttgggtttttaattattaatttttttttcgtggtagtagtaatagtatttcatcattcataactcataactagcgattaacaaatcatgtacacagagaaaaacaagaaactaaattaagtggacctagttacgaccccaaaaacatatccttttaggcctagtagcagaaaattatccatcagcccgtatttaggaattcccttccttttttttttgttaatgatttaataataattaattttttttttccaaaaattaaagtttttcttttgataatactatgatttatgataattcccaatgcgactaaagttaatgttaaaagaataaaacaaagttataagatgtagattcatgtatatcttcataaaccttgagttttttctccatgccattaatgtattttgcctttttttaatagacgttgtacatgccagctcatattccacatagtaatatgtagaattgtagacgtatacatagcatttataagtatatatggcctgaactagtatgattttggaaaattcagttttattttttattaattatcattaggagaacatacttgtgtgatagttcaactgatccta

SEQ ID NO: 109735 - DNA, 724 bp, Aquilegia coerulea
  Intron number 1 from transcript AcoGoldSmith_v1.010584m (l ocus AcoGoldSmith_v1.010561m.g) derived from phytozome v7. 0 (chr-ID scaffold_34; pos 1728552 to 1729275 reverse stra nd)
ctggtgtcaggtaacataaatcatacttagaacttggatatcccttttgtttcttgtttttatcatttgcagcttgtttgattgatggggtttgatgatttgaaattaaactttcatttactcaaattgggtcttcttttacctgctggattttgggattttctctgcacaattctagaatatgattttaatttgtttcctgttttagtatttcttgttcattgcttttcatgaacttgtttgaactgttctgtatttttctcattgtgggtattttgtattagattattgtaaattttttttccccattttatgtgtaatgtcatagtgaaacattgtattcccctttatgtatttgggtatttctgatatttttgttttcttttactgcctttcttgttcttatgtctttgttgtttgccttgattcttttgttctctgagaatttggtttgttcttatcatcagttgttttgtccagatttattaatttataatttattctgattttctctatgatttgatgatagaggttctctgtctgtttgttccattagctctttgtttgttagtggaggtttttaataacatatcttaatttttaatgaaattattactaacaattaagttattattttgtttagtgtttgatgactatggaattgctatttattatatgcatttcttgatttattttttcgttttggcagcagtcaggttgtggg

SEQ ID NO: 109736 - DNA, 756 bp, Aquilegia coerulea
  Intron number 2 from transcript AcoGoldSmith_v1.012224m (l ocus AcoGoldSmith_v1.012224m.g) derived from phytozome v7. 0 (chr-ID scaffold_64; pos 1198960 to 1199715 reverse stra nd)
gtacagtggtgactgaagaaaaaggtaataaagcttttagtcactaatttccttagtttcatgaattaaattgatgtctcagaactttgattttagttaaaaatcatgagaagattgttagagaattgtttataggttctgattgaaatgtatgaactactcaatatgatgagtgtaacactctctcctgatttccaaaaccctatttctgatttccaaataatactctctcttcttcgtcaaatgtgagacaacaattggaaacagagtttagagccaatgtactgatggcaacaataacagatgatgacttaggaagagttgagcaacaaccagattctgaaacgggtttttcatttcttatactttattattattattattttttattttatccgtttgttttgttacgttaaattaattttatggatttgttatatgtgttttaattgaaaatcgaaagtttgattaagagagagagaaaaaccttgaaaatctaacatgtcaaagttataattttcattgctgaattggttaataaagatttggatgtttatgattttgagtagaattcattttgttggatttgaaattgaaatcctcaaaaagggaattttgaaatttgtccacaatttttttcctttctgatcgttatatccgtacatactgttatcactataactctgtagtttggactaaaaaaatgaatttgatgacgcaggcaatagaagttgtcgatttggatcagcagactga

SEQ ID NO: 109737 - DNA, 1067 bp, Aquilegia coerulea
  Intron number 1 from transcript AcoGoldSmith_v1.013461m (l ocus AcoGoldSmith_v1.013461m.g) derived from phytozome v7. 0 (chr-ID scaffold_2; pos 2911533 to 2912599 reverse stran d)
tggttggcttctcagaatacttggggagtcttaaggttcaaacttctttctttgattactgttttaagactatgggtgtctcttattttcaattttatgaaatgggttttgtttgatttgtagtttttatattgattgttgtgattactagctttgtcaatgtgttttttagaaaatcttaattttgtgaaaaattccatgttttggttgtttggatgtttatataagattggttgattgatcttttacttttgttcctctgtttgatggttggttttatgaaacttcaatatattgaagaaaagtgttacacacttttggccaattggactatttcccttgtagttttcccatatcaattcatcatttcatcatctaagtttattacgagatttgggtatttctgaacagattctctttcctgatgtaataattcataggcttaatttgaagtgtctccattgtatatgttattcattccctatttcattttcaatgattaagtggaaaacgttgagaaatactctaatcaatagaaatccaaacggttccttatttcgattatgcctttttcccccaccatgttcagaaaggaattttatagtttttatattattgtttttgacgtggtatgtaagttgctattttttcgttcttgtttgataatataaatgattagattgtgtgcccaattcagattgatcatgacaatccaatggatttagattactgtgagactttaggatctaactgttgacacttgtcaattgaacctgttcggagtgagtacataaaacaccaaacaaaccgttcattggggacatcatagtatcttgcgagcccttttttcgaagaccttgttgtgtaattgcagaatataatcagaatgatagaaaaatgcttagaagatggccaattttccatgccttgaaatttttgagattgtcaattataattctgtatgtgttttctgtttgataatttaaacccgttttgagcacaacaatgacatggtcacattttgtcctgcagtactatttcacttgaactgaaaggagctccctttg

SEQ ID NO: 109738 - DNA, 213 bp, Aquilegia coerulea
  Intron number 1 from transcript AcoGoldSmith_v1.021051m (l ocus AcoGoldSmith_v1.021051m.g) derived from phytozome v7. 0 (chr-ID scaffold_34; pos 2484178 to 2484390 reverse stra nd)
aacttcaagaagaacttcgaaacatcgaaaagcaggtaactatatctcaactcaactaactcaacaccattattttgatattataattaatgttgttgttcttgttttttttattttatttttacgcaattgagaaaatattcggaaaagaaagaaaatggaagtgtgctttatacattttcaagttctaacatttgtttctaattaaggttt

SEQ ID NO: 109739 - DNA, 446 bp, Aquilegia coerulea
  Intron number 2 from transcript AcoGoldSmith_v1.021229m (l ocus AcoGoldSmith_v1.021229m.g) derived from phytozome v7. 0 (chr-ID scaffold_39; pos 300222 to 300667)
gaacgtattttgagactgctaactggatttttgaggtaaaaggttaatggaacttcatgttactatgaattgctcagataatacatatgcactatcatataccattttctgagaatgtgtgataggtaagcaataactttttttttttctttttccttttgtagcaaattctgaagaaaaatgacgggggagatcatttccctctccttgctatctcctgaggctttgaagttcttagcatgattatcagcaaggtattactctatttatttttttatcgggttctattctgtgaatgttcatgacattttgtcttggaactaatgaatgtaagtccttcctggaagaagtctttcgttcaaatcatgaaatcatagtcgtatattttgtacataaatttgtcttatcagtcttcacaaatggcgttttttgattactccagaata

SEQ ID NO: 109740 - DNA, 441 bp, Aquilegia coerulea
  Intron number 1 from transcript AcoGoldSmith_v1.020712m (l ocus AcoGoldSmith_v1.020712m.g) derived from phytozome v7. 0 (chr-ID scaffold_44; pos 1512989 to 1513429)
tgcaccttcggcttaaagatagaggtatataatattttcttccatatttgcattatgtaggttgaatgtggtttctccactaacccatatccagccctaccccaggatgtctccctacttaaaattgtttaaatttccctatatcttttcaactgtagtaagatcgttcatttcatagatgtcatacaagttattatttgtgaatctggtagaattatatgtaagcaattttaggagtatttggtgcatgcaatttggaaataagaaattaattattttttttttctctttacattactgaaggcaaaaaaactagttgtaatatctcttctttttctgtaagaattgttgtttgggattgtcaggcctctagattttgatttgaaggtgtttgttttctatccagattccattatagttgctgttaaaccaaaatcacct

SEQ ID NO: 109741 - DNA, 934 bp, Aquilegia coerulea
  Intron number 1 from transcript AcoGoldSmith_v1.001974m (l ocus AcoGoldSmith_v1.001974m.g) derived from phytozome v7. 0 (chr-ID scaffold_16; pos 3677181 to 3678114 reverse stra nd)
ttcttgaagctattgctaaagttcttgaatttccggtaatttttacttcttatcttcataattattgtataatttagcttattttgggggttttatttgcccttatcaaattagatatttaaatcgcataaacccaagtgaagataagttctgattaggaaggtttatattgagaaatggtttgttcattggagttccaaaattgaatttgaatgtgtattaatcacaggacaaaactttgccatcgaaatgggaattagacagaagggtttctcacttgcattgtagcttattattttctagaaaatttcttgtgttttcaggatgaattgttgtataaggatgcaatgttacagtaagttttttagtggtttttaatcatttgaataaagtagaaagaccaggaagtagtaacgctaaggtcatccttatgaaaatgcaaatgcacaataaccaaaacagcacttcttctatatagcaagtttacaatttaaatgaacacattttcattgttaggctagctgcatttgccccaaatcacatgacaacgcatgttttcttcgttagattatatagaagtagagagtttgaccataagcagcaaatctgtattagtaaatattgtagtgcttttggtggaagctgaagtgtcaactggtcggtttttgttaacatgctgctttggctaacacggtcatgtttattccctgtaagggagagcattttagattccttaagaatgacgagaacatgattaacaatcttgatatatttatacatctatttttctgtatagagaattcagtattagatatgtggtgctttatatctaagcaggtgaactttgtcaaatttctactataatttatgtgattcctttgatgctcattatgactctatttgtggttgatcttttctattctaggttgcttcc

SEQ ID NO: 109742 - DNA, 831 bp, Aquilegia coerulea
  Intron number 4 from transcript AcoGoldSmith_v1.006081m (l ocus AcoGoldSmith_v1.006081m.g) derived from phytozome v7. 0 (chr-ID scaffold_35; pos 1563679 to 1564509 reverse stra nd)
tcgttgcgctctatcaatcaatacttagtacactacaaatttgagaatatatattttatatgattggtttctaatgcaaattcattcttgcatgattacactaagtataaaatggccattggaattcttggggttgataccattttgtagacagtgttttattgcttgaacaacttgacgcaagtacgttgatgattgtgtagtttttctgcattttacatgatcacaatttgatagtgagtaacataaactggaacctatgtttaacaactcaagacgatagttgaacagttttgagcagtatggatatttagttccacctataaatcacatgagagtatgagacatattaggaaggacagcatattgcaattgtagttaggttctccaaataaataactgcttccagaaaaaagagagaaagaaaatgtaagtaatgcattttatggttttttgtacacatcacactgacaatatcatgtaaatcgaagtctcataacactagtctacaagtgtggtttagtgcgtgtgtatttccatatgtttcttcgattatccatagtcacagattcataattagtcaacatagaaatgcaagaatgtgcattgtacgatagactctaatcagatgcatttctatcatctttgatgtttcattgttctttgaatttttatttatcttatcaaggatatataactgggttaagatttaccctatcaaaaaatataattatgttaggatcatattggatgattatatattgatgatctcttatacaataattacttcatgcagggaaggtggaagactgtaaggagtttttcaggaca

SEQ ID NO: 109743 - DNA, 660 bp, Aquilegia coerulea
  Intron number 1 from transcript AcoGoldSmith_v1.003019m (l ocus AcoGoldSmith_v1.003019m.g) derived from phytozome v7. 0 (chr-ID scaffold_44; pos 974932 to 975591)
ccacaagcccaaaggtagtgaaatacttcatacttcttactaatgtttcctacacttaatactaagcaataagcatcttcttccttaattagtctttacttggatacatatctccactacttttgctttggcataaaatcatgatcattgatcactctctgggtttttttatgcatgtgtgtagagttgtatttctgacaacaattaagttttaaattttcttttggaatctcactagattttgctttttgtctgtttcctttttgtttctttccttacttttacttaaattcaatttttgaataatactcattggttaataagatcaatagtttaatgggttattcatgtttggattcagactttagagttcaggtgagttgatccctttatgttctctgcaactctagttatattctttaattagtccatttgattgagttgatctactactacatttcacattttctctaaaaacatttagcaccatagttgagtttaatagttgtattatgctgcttatttttacttgaattttaaaattttctcagctttgaaggtgccaatgtttttttatctacaatatagagcataggttaagtgtttgatgattttcctcatccaggccctgcagaatcaacaactgcggtttttcttgta

SEQ ID NO: 109744 - DNA, 695 bp, Aquilegia coerulea
  Intron number 1 from transcript AcoGoldSmith_v1.008010m (l ocus AcoGoldSmith_v1.007338m.g) derived from phytozome v7. 0 (chr-ID scaffold_13; pos 222969 to 223663)
ggtaagttgtattagtagctggatctgacattttcgatctattttcttatcttttcatttttcattttagatctgagcatcttttattttgttgattttagcaatgcttttgaatctcttcttattaaagcattctggctttttagaatctcttgttgatttagctatttcttatcttattatgttacttggatctgtttaccaatgcacttgatttcgtttgcttcttttgttggaatctcgaaggattttaagcttgttattgtgttgtgatttagagatattaagctttttcaaaatgtttatgttgattggatctggctatttgttgtaagtctttctattgattcaagtaggtaaggttatgtgattgaatctgttctttgatgctgtctttcacattttttttatttgtatacgtgttaatttagggattataaaattgaggacattatttcttacttgtggagatataggatctagatttttgtcatgttttgtactatgtaggtgaaatgtttgtttaaatgaaaaattgaatcaaatcggagattgtgactaccaaagtgcatagatcaacacttcatgataatacttatattagtagaagccaccaaatccaattgtttcttattctaagttctaactatacgttgttcctttggcattagctggggattggttacagggtcctt

SEQ ID NO: 109745 - DNA, 791 bp, Aquilegia coerulea
  Intron number 1 from transcript AcoGoldSmith_v1.002793m (l ocus AcoGoldSmith_v1.002793m.g) derived from phytozome v7. 0 (chr-ID scaffold_7; pos 3696154 to 3696944 reverse stran d)
tttcttctttctctggtaattttatttataaaactctctaaaaccctaaccctaattatttctgttaagtttatttttgttggtagtttaaaccctaatttgaatatttggtaaactttgattgtgaatatcaataattagagtatggttttgttatggatttgagattttagggaaatttatgcaagtggaattgggtttggtgtttgagttgaaatcaatggttagaagtatgctgtttgtggtattttagagttggtggtactgtttctttcgattagaaagtggtttttagttacaccataagtatgcgattttcaatttttagttctttatgcatattgcaagattgagtgtttgttggaagggagagggagaaggagaggaagagttatgtgaggagtcactgtgtgctcttacgaggtttaggaagaagagagggatcaccctgtcgtgtagtggaatcttagaggatgggagattctctgagatatattagattagaaagaaggaaacatatgtacatatgttttttaatctcacacattcatataatgacgctcttactttgttcatatattaatatcgcggagtaccctctcaatctttttaaatttgaagtatcatgattagccatgccattagttaaggaacatttgtgacgacatgtactttcgtaatctttgttttatgtatttgatttggtgttttgtttactctgatggtctcttatactaactgatcagtagtgactagtgagtaatgactatgtttcttcatttttcacccag

SEQ ID NO: 109746 - DNA, 673 bp, Aquilegia coerulea
  Intron number 3 from transcript AcoGoldSmith_v1.023871m (l ocus AcoGoldSmith_v1.023871m.g) derived from phytozome v7. 0 (chr-ID scaffold_3; pos 7105650 to 7106322)
agctctagcaccattgatctttatctccaccgcaggtagtttatattgtaattgcaaattgaaatcatagattttactagtacgtactatctaaaagaactatataatgcagtaactgggttttaacccgggtctgtggttacaattcctacggactgaaccaatgtagctatctggctatggtgcctgctattatcaatccatgtttttattttagtttttatgagtagatagctttttatgagaactcagaagctctattatagtattattaccctactgtttttcttggggtctgatatttagaaaagtcactagatttgttggtgacgtcgtctcttcagctgttgtatgtgcatgcactctgtcgtcatgtaattacatagccaacttccagtaaatcaaagatattttttcgcatttgtttggacttaagaagttagctttataaaaaaaaattctagctggtcaactgcccttatatcaatctttacctcgaccgcattgtttcttccactgatttttacttgctcaacgctttactattgattttgtagaggcaattattattattgaagttgcaagaagcatttgtagactcaacaactttttagtgttgagcttattgcatgatgctaatattattgaaaatgtcttgtctatatcagatatt

SEQ ID NO: 109747 - DNA, 531 bp, Aquilegia coerulea
  Intron number 1 from transcript AcoGoldSmith_v1.004393m (l ocus AcoGoldSmith_v1.004393m.g) derived from phytozome v7. 0 (chr-ID scaffold_7; pos 1725197 to 1725727)
ttcttcaattaaagctggttagttttcgattctatctcgatctctttgttttgaatctttacttctaatttaaatcaaataaatcttaatttgttagatttattttatcttgaaaaatcaaaatcttatgttttgttttcttttgaatatagatgtatttgcaatttttcaattgatatctagctaagtagtttgatgtgtgttcttccatactaatttttggaatattaagaattttgttgctctactgaagttttaggtaatttatagtagtgaggaatccagtaacgttgtaaagtcaatcatgtgatgttttgaattaatagatttaacttaatctgtaagataatttagcgtaaaactgactcctactgatgatcacaacaatttatgtaatggaccatatcaggagtgtttttaagcaaattaagtatcatacttgggttgtggagtataagcttgtctaatgtgatttttggtgtttgttttaatgcagattgggcaaagtcatccaactggtcttactcccac

SEQ ID NO: 109748 - DNA, 785 bp, Aquilegia coerulea
  Intron number 1 from transcript AcoGoldSmith_v1.026801m (l ocus AcoGoldSmith_v1.026801m.g) derived from phytozome v7. 0 (chr-ID scaffold_22; pos 1190819 to 1191603 reverse stra nd)
agtccaacatcaaacccagtctgtttgtaagtatcccatctctttgcttgccattatatagcttgtcggtaaaatgaagaaaccctttttggcagtgtgtttagtttgattttcatatacttgtccctctttaccataacaatgtgatgaatgatgtttagaacagttttggatagatgaaacaagtttgaaatctaaatataaacttggacatgcttaaaagaaatatatggtccatttcttttagtgtctcattttagttttctccttactacttggtagatatactagataatgtggaactccatgttgggttgttaacttaatttctttcgtttattagatggcttcgtcattaaatgatgttggatgtgttgattaatgtcattgattatactaccttacaagtctcaatgtatgctttcagcacaaagaaaatgatttgaaattttttgttggatacatcatcgtgatagactagtctagatgataattgttagggattcttgagagttggaaccaagatcacagttgaagtgatacgcggtttgcaacaaactgtgaaagtaaagacaatgctagaataattaatattcagctgagaacataatctccacattttattcgaactttgccaaaatcatcattttttcttttcttcaacagttattgagatatatataaatgcgtaagttgctgaccatcttgtaggatttgccaaaggagtttgtggaagagcacggaaaaagactttcagacgctgtagtcctcaaggttcgcaatta

SEQ ID NO: 109749 - DNA, 677 bp, Aquilegia coerulea
  Intron number 1 from transcript AcoGoldSmith_v1.009324m (l ocus AcoGoldSmith_v1.009328m.g) derived from phytozome v7. 0 (chr-ID scaffold_3; pos 3674677 to 3675353 reverse stran d)
ctcaccacctcacttgttgtaagtgtcgtcttaaaatattagacatgaatgagacctctttgttaaacatataaatagacccacttaggaactactatagtgtgcattcattggagtttcacaagggctgtctttgataaaagtattgttgttaatgttatgttgttttcatttatatttgtttaaatagagtgatattgtattttagttctgcatttttttatatatatagaagagcttgtgcattgatttcttcatacatgcttcaagtttttggagttaaggaaaaccagtcagcttggagttttttctttctttttccttttcttttttttcccatttcatgctcttctgttactttacctgatgggataacaaggtggttcttcttcttcatattaagtagtaataatatgattctttaatgaaatccttattagatgttacatcatataccaaaaaacaaaacaaaaaaagagaatatatgcttgccattaatggtttattctactactggtgaactgttttccttttatggtggtttagttttacacttttttgttctgtcttttatcttgctattattaatttcattgcaaatatatctcatgtacataaaaattttatcaacatcttttaagctttattttatcaaactgtttacagcatttttcgac

SEQ ID NO: 109750 - DNA, 785 bp, Aquilegia coerulea
  Intron number 1 from transcript AcoGoldSmith_v1.005205m (l ocus AcoGoldSmith_v1.005205m.g) derived from phytozome v7. 0 (chr-ID scaffold_16; pos 2984754 to 2985538)
tcttaaagaaggtggaacaaattcgcactcaccatgtatgtccaaaatataatagaaatgaagagggtaaaataatttattaaatttgagtttatttatagaaaaagaaggaataaatgaaaaaaaaaaaaaaaagctgggaagcacaagtggacatgttttgtcaggatcgaaaaagatgtcaaagatgtgagcccacgcgtgcgataccgtacgaggttatttatgtcattttacatagaaagcgacccttaattccactagccgaccaggtgacgactcacaattaagctaactacatacacaccaccaccgtagtactagtagagtcaacatcactgctgcaataattactatgcaaccccttttaatacatgcagcaccacttgattccaaattgttgcattgttttttttcactttaaacaaaacagtaatattttaaggccagaagatttgtagtaaatagtaattttttttttttcaataatatacagaatcttgcaggtttattttcagagaaaaagtaggagaaagtttgggaaaactgaataaccgtttattgaatttccattaagcattttgacaaataaaaaaaaaaaattgcacaaacatttctcaatacttgttgaataggcattttgctatataggttgcattggtgcaacttgtgtttgacaagtgttgcttcttctctttataactagcagaaaaaaccaagcttgaaaaagaaagcaaaaaacacaactagcacaccggaagaagaaatcttctttcttcttcttc

SEQ ID NO: 109751 - DNA, 238 bp, Aquilegia coerulea
  Intron number 5 from transcript AcoGoldSmith_v1.016721m (l ocus AcoGoldSmith_v1.016721m.g) derived from phytozome v7. 0 (chr-ID scaffold_3; pos 10277631 to 10277868)
atcttggaaagggtaataatttactatatcaaatcttctctctttctgccagtttctttgtgtgtgtgatgagtttgaaggttatgcaagtcacgccttcaattgtgacttctacgttaatttcctcgtttttcagacagattcaaagattgcgtttcttgtttaatttgttgcatttcattctccttatttgaaccaacttgtgtatttctttttctacatcgtattccaggaggtc

SEQ ID NO: 109752 - DNA, 510 bp, Aquilegia coerulea
  Intron number 2 from transcript AcoGoldSmith_v1.010694m (l ocus AcoGoldSmith_v1.010694m.g) derived from phytozome v7. 0 (chr-ID scaffold_58; pos 1103458 to 1103967 reverse stra nd)
agttggatctggtcagacttccctcggcattaaaggtaagtttttttttttattcaaattaatttctgtattttgccctaatttaacttaacctaatcaaagtcatcgattttggggatttttattctcttggatcaatgtgcacctgtgatcacttgttacaatgcatctaacttagggtggaataaaatacagtatcactttaacttagtggatgtgttttggttgtaattcgagctatattacagtatggttgtgatcttggtttaattatagtgtttatttgaagaataacttattttcaaacgatttttaagtttttaaagtgctttgagtgtgcaaagtttagtagcccctaaagtgaggatcatatcatgtgaatgcattcctgatatatatttgtactgaaatgtggttgcatggtagcaaatattctttgtttttagaattggtgaacacatagctattatgttttgttttgtaatttatttgtgatgtttgcagcggcta

SEQ ID NO: 109753 - DNA, 598 bp, Aquilegia coerulea
  Intron number 1 from transcript AcoGoldSmith_v1.027046m (l ocus AcoGoldSmith_v1.027046m.g) derived from phytozome v7. 0 (chr-ID scaffold_86; pos 781156 to 781753)
gataggtattttaaaagacaagcaccctgcagtgaactaattttattttattttattgttgtaattataatttaaaatttcattatattttgcaaaattttgacggtatatatagatatttgagaattcggtatcacaaaattttgcgtgtcaaaatctcgacgcatgccattatttcagaaaacaaaatttcacttgaaatcgaaattttaaattatttatgcaatgtgaataagagtttttgcagcactttgtcttccatccttcattaacaactcctaaacaaagcccaaatccaacacagcccatttgttaaaacccattttcttcttctcttaaaccctgaaacctcttcttcccttctttccttccttctctctctttttcacagagaagaaagaaatgaagctttctaagctttctctctcctcaaaaagacttataaactcaatatcattctctaaatttaaaagggtttctgggttttctttctattcaacaaaaacccaatctttagaaccaaataaacctgctgctaaaagtaaaagagatactttatttagtagaatatctccaataagtagtagtaattcaagtg

SEQ ID NO: 109754 - DNA, 575 bp, Aquilegia coerulea
  Intron number 1 from transcript AcoGoldSmith_v1.008162m (l ocus AcoGoldSmith_v1.008162m.g) derived from phytozome v7. 0 (chr-ID scaffold_2; pos 6385569 to 6386143 reverse stran d)
agttggctacaaggattcagagacttccagttcaggttgttgttcatctcctaatatttttaagtgttaattaattgatgttaggaggcaatacaataattatagtctaattacgagtaatgctgacattcatggccttgagtttgaatggagcattatttcttatttgagttttggctaacagaattgattttgttatatttttttatcaagagtataagagaagtacacaccaatgtttcaagcttgttcttctcaaccataaacgacattttgtgattaggtttatgtggggtggatttaatttttttttctttcttagtagcaattttaatttagtagaagtcaaagtctgttgtcaaaatttccagagctttacctttacatcaaaatcataatagtttcaaaatgaaaaaaaagaaaaaaactaaatatgttaaaagagtcttggccaaatgtctggaggtaactgtgaagaaggtgaccccttccaataaaatagcaagttgcagatctaaacagtaaattgagcaaagaaatgtcatgtcatgtaattcactgtggttcttgcagat

SEQ ID NO: 109755 - DNA, 483 bp, Aquilegia coerulea
  Intron number 1 from transcript AcoGoldSmith_v1.022131m (l ocus AcoGoldSmith_v1.022131m.g) derived from phytozome v7. 0 (chr-ID scaffold_26; pos 368418 to 368900 reverse strand )
cccgagagtagaggatctcaaactacgtaaacaaagtaacaaacacacagatcttggaaagcttctttattgatctaaagtcatacctctaatgccgaatctttctcatcaactaaacttctaatctcaaaaaaacattaaaaacaaccagtttttgggatctggggtaacctttaatctttaattttgtttgaattatgggcttaaattgcatttctaatgatttattttatgttcaaatctttataaaagaagaactgggttttgttaattgttgagtttagattagtgggaattattaatttattttttttttttttcatttcatatggctcatcatggtcatcaacaaggtttttgtagtccaggggttttcagattggttttgtttttgttaagtgtagttttggttggttatatattagcacctccattgttctggcaaattacagggaaagttggtgctcaaacttcttgtcctcc

SEQ ID NO: 109756 - DNA, 637 bp, Aquilegia coerulea
  Intron number 1 from transcript AcoGoldSmith_v1.023087m (l ocus AcoGoldSmith_v1.023087m.g) derived from phytozome v7. 0 (chr-ID scaffold_13; pos 5634777 to 5635413)
aaggttttgatcaagtgcaatagatatatatattccacttgtttaagagaaatggctcgatcattagtgagattaggaaaagaatacgttaagcattgcaatttgcatgtaacatgaaaaatatgtaagggtgggcataatataagattttcgcaaagggtgggcataatataagattttctaagccaaaaccatgctatcacagttagtattatatgtaagggttggtcatatgcctacccttgacatgtggctccgtccctgaaaggatgtcacactaaacaacccccactaccacttctcttgaaaaagagcatgatatgcaccattgcaccagcaccacctttctctttgcttttgtttatattgacttgaacgattcttcaccctcaacagctcaactttcctgcatttctacattgtgaggtttaattttcaagttttactaattttagactcgaatttcaagcagtagcagcagcagtagaaatggcaccaggtccgttcctcctttgttttgatttggacagataagaaaataaaaagcttgaattagcactggaagaagccatgaaatcttttgacttactttgacaccccagattattggaactgtgttgctagggaagttggcgga

SEQ ID NO: 109757 - DNA, 646 bp, Aquilegia coerulea
  Intron number 2 from transcript AcoGoldSmith_v1.002287m (l ocus AcoGoldSmith_v1.002287m.g) derived from phytozome v7. 0 (chr-ID scaffold_24; pos 3858327 to 3858972 reverse stra nd)
accaatttacacaagaagggaaattgttggaggtattgtattactaacttgttcttttttaatttgtttggtactgaaaacaacaagttttttagattgcgaaagagttgcttcaacttgtgagaaacataacaaaagcgttggaaatcatattctttttgcataaaactaaactaacttatagctgtgtttgtacactgaaatattaagtcagtattattgtatatattgaaaagatagaaataagtcattatgttgatcaccattgttctaggttaaacattttagtcttttagaaatttgaactgaaaaacgttttgtgggaaacattattcttcaggcataaaactaaaagctaataactatatacaatgtgatatattgttacctcaattcatcttttgagttgataatggtctatatttttgtacgttcacagatatgttgtataagccaacatgtttgtgatttccctataacaactaaaccacttgtactgtagcacattgttctaggtcgagtatttgtatcataattataagtttgctgtggattgccctgtactctcttttagttgtccagtcttccctctatttaggcttgtaatatggctaatattgccagggagaagatttggattttgctt

SEQ ID NO: 109758 - DNA, 618 bp, Aquilegia coerulea
  Intron number 2 from transcript AcoGoldSmith_v1.021466m (l ocus AcoGoldSmith_v1.021466m.g) derived from phytozome v7. 0 (chr-ID scaffold_3; pos 6518361 to 6518978 reverse stran d)
gctcaaaacagtttggcaggaatttgattcagttggtgtgggcagggatttaagacgagcatcgaaaacagtaaagcaaaaatttttctggcagagtactttttcgtgttcaccttttgttctgttttgttggccaattggatatattctgaaggccaattggatatattctagaactagatgaaagtcgatattgtaggtaatgataaaaatcctattatgggcaggagtaaaattaaattttgatgctggctaggctgcttgttccgtgttccacataaatcagaaagattaaaaagttgatgattgttttgtattgttctattttgaaagataaagtgatatcctgagcatttattttctttgattaatataatacaagagtttcttgcacaaaaacagatttcatcagaacgtctgtacctgtttggtgtatgccttgtttgttcatggtacaaaacgttggtatattagacaagcccattaaaggaagagcaaaggttcgtaacaacatgcacaaatattcctgtatattaaaccccttaaaagaatactgttgatggttgtaaaagctttctgcaagtcaccttcgttggactgacccttcaagcattgtgg

SEQ ID NO: 109759 - DNA, 805 bp, Aquilegia coerulea
  Intron number 3 from transcript AcoGoldSmith_v1.010317m (l ocus AcoGoldSmith_v1.010317m.g) derived from phytozome v7. 0 (chr-ID scaffold_7; pos 4678395 to 4679199 reverse stran d)
gcattgctggtttctctgaactaagtgagattcttcaagttttattctaatcatttgacccttttgattcaatttattaatttatcctccctgttttttcaagtaattaaaattaaaagatatataaaacatttaagaaataaggattagtctgcgtagttcttcagtgaaagacattaaaacactttagactaaaagggacgtgacttcatttcaactttttaagtgtttctgtaacataagatgaaccttatcaacaaatcctcatgcagttgtgtgttctatagttttcagcatttgccgcttgtctaacttcttccctacccgcataaatcttagcttcgtctggtcgctgtgaaaaagtgaaaatgtattgcaactctgcaagttgtaattcacagcaacaaaacaacaaaaagaaaggatatatagccatataggggttaaatacttaaatacatatttttaccattttctcggtcttatatgtgcaagtaaataaaaactaaaaagaacacatactactattactattctattaggatgatgtggaaatttagtgaagacttattctaacataagacataacgatttttcataaacaatcatgtattatagtcatgcattcatagatcatttgcagggagagcaggccgagagaaatctaattttcattgtatataagagcatgatttaatacaatggattttaagtggggaagttgtacgtcatgtccagtccttgttaacctagtagagtacaatgagcaggctgtggaaaatttgctctgagagctctgtcacaa

SEQ ID NO: 109760 - DNA, 459 bp, Aquilegia coerulea
  Intron number 1 from transcript AcoGoldSmith_v1.012239m (l ocus AcoGoldSmith_v1.012239m.g) derived from phytozome v7. 0 (chr-ID scaffold_2; pos 5225003 to 5225461 reverse stran d)
caactaagaaaggtattaactttccctttatttgattttgtcttgctttcatttttcaatgcaatctttcaaaggaggagattgaattcgaaatacccaatttaagcattatgattatctattgaatatgtcatttgggtatttatttttatttgaattggtggtggtatgttgtttggttttaagaaatttgtaaaatttgggttatttcatagtttgcaatctacttatataaatttgatattgcaaaagactacttgttttggtgctttttaccaatatgatgttttctcagtttccttgtaagtaaataagagattttccaaataaaagatggtcttcttttcttttttgttaaacgttttattgtatatgtgctaaaaaaaatttattgtatattggttacactcaaatagatgttttcttgatgctaaactgtagctcttacgtggagtgctg

SEQ ID NO: 109761 - DNA, 1009 bp, Aquilegia coerulea
  Intron number 1 from transcript AcoGoldSmith_v1.008703m (l ocus AcoGoldSmith_v1.008703m.g) derived from phytozome v7. 0 (chr-ID scaffold_2; pos 4921303 to 4922311 reverse stran d)
cattgatatcgtcgagatttacagaagatattgcggtaattcagttacacttacttgattttctttcttttaattctttcgtaataaacaatgtgagaagataaaaagtttgattttttagctgaaaatgaatcaattctttgttaattcaattaactttagactgaattgcaatccattttatgataatttagtctttttataaagagtttgaaatgttggtgcaaggaatttcgatgttttgatgttgtgaattgattcaattctttatgaatactattaacttaggactgaattgcaattgcttttatgataattaagtgtttgataaagtgtcggtgtgggaaattgtcttgtttagatgtagtgaattgcttgcacgttggttttagcttatatgaataacttttataatgtctttgagctaaaagattgaattgattctatgagtatgatttgtttcttctttagcaatcttagtgagatgttgtattgtccagcattcctgttttaagatatagtcaggtatttgacggagtagttaatacttaataggtatactacactagtacactttatagttaggtattcgactgcatcaactatgaaattcgtacatacccaaagagtagtaaaacttagtcctatatatgtgtataagggcagtttgtatttatttacagtgctcaatagttgatactcaagaactctttttttttccttatcattactgatacgtaatgtatagtactcaccctcatcactgaataataaggatagtcttatttggttagacagaaaagttaataatcaaaggaacttacagagctcagcaaatatgttacctcactctatatcatgtgactactcagttataaagatttcatacttggaacttacaactctcatgactttctgtataactgttgccttgaattctttgtactcctacgcatgaaattaaacctacgttcctgttatttctttgtagacattaggtcacgaaaag

SEQ ID NO: 109762 - DNA, 822 bp, Aquilegia coerulea
  Intron number 3 from transcript AcoGoldSmith_v1.020563m (l ocus AcoGoldSmith_v1.020563m.g) derived from phytozome v7. 0 (chr-ID scaffold_35; pos 2428832 to 2429653 reverse stra nd)
taaaggttgaaagtataggggaccggatttttttggtaggtcaaaattctttgtcgttctctgcagctgagtttggagtcaagggcaattgtatctattttttgcgttctcaatatacagccttgttcagatttgatatggatgatgcaattataacatcaaccttaccttgtcccaaaaacattccttttttggcgtggacctttttgggcggttccaaagtgcaacttgcaggtaattgctcctttttcattctctttattcgagatccccatctgtgtttttcatttagtttccacgattgtttagatatccttctagattgtaagtcaattatgtacttcgttctgtatagcttagtattcggataattctttctatatccagtagtttatttgattattaaatttttgtaggactcaaagatgtccttacaacaaacaggatgatcaaatattttcatattactgccattgatgaacacacaaacgccatagctaatatacgttgattggattcagaaattactgattattaaaaaaggaacctatccggccattcgatgtggccaattgaacgaaaattgtgtttaaatcattcccttgggtaaaagataagcaaattctagtaagattaaatttgaaacttagccttctagttcttttgtcaatctcctcagttaaatatacatttttcagtacccttcattataagccaacatttttctgtaactatatgtaagttgtttttgtcttcattaaatttgacggcctggtaattaccctaatatttttctgaatttttcatgtgtcaggcgaacga

SEQ ID NO: 109763 - DNA, 299 bp, Aquilegia coerulea
  Intron number 1 from transcript AcoGoldSmith_v1.019682m (l ocus AcoGoldSmith_v1.019682m.g) derived from phytozome v7. 0 (chr-ID scaffold_52; pos 662431 to 662729)
cttctggaattgctggtttcactgctgcttattgggttagtcttaaaccataaactaatgcaaatttcagcaataatttcaacaaaactgctactttgaatttattcacatccaagcattaatttccctcatatggtgacttctctatattatatttctagaaaaagtcagcaatcttctcaaaattcataaactagacataaagctataaaatcatttgaacatgtcatgagcacttgtgatccgacttattactggttttgttgttttgattcgtgatgttttaggtgggcccacgt

SEQ ID NO: 109764 - DNA, 925 bp, Aquilegia coerulea
  Intron number 3 from transcript AcoGoldSmith_v1.012835m (l ocus AcoGoldSmith_v1.012835m.g) derived from phytozome v7. 0 (chr-ID scaffold_34; pos 795960 to 796884 reverse strand )
tcgctggctagttgctgatcaaggtgtggtattctttctatgtctttgatacgaaaactgtcagtttactgcctacatgcaccttgaaattaacgtattgactttgtgactgggataataaggaaaagaaattagttcaaaatgtaatttgtagtacaagtgtataacgtgcctagaagtaatttgtattacttctagataacgtgcctttaaacacttttgtcaaacacacatgggcgtactttcagggaatttatgtatatggtgtatgggtgtcagtctctttgcctctctgtatcctgtctgatacaaatgtccatatccttgttacatggtaaaaacactaactaaaacggaacctgttgcaacgtatggcacgtccatgtgttgtgttatcccgtgctaattttttcgtatttgtggctaagccactacaattaataaaggaattgttatgtccaggatggtttatatctttttgacttgtctagaagtgattcctgattttttttcttaagcattgataccacgaggcagagttccacacgcttacaagcttagagacttaataggcaaaatataatagttgtaatttaatcagtaaaatctttatttatttctacgacttgtcgttcaatccatatttctatgctacattgctacagtctacaacatggacactttttaaaaggatggtattctagtcgtggtttgtcagactcagactcgacatctatatattcttctgtgctgatttttagaataagtaaatactaaataaggataccttaggagacgagggaaaaaaaacatgagaagacaatatatgcttaacaacgtaaagaaacacaagtatcttgtcaaatgtatgttttggtagttaaattactgacagtgagatgtcacttacgttgacacaggtatc

SEQ ID NO: 109765 - DNA, 419 bp, Aquilegia coerulea
  Intron number 2 from transcript AcoGoldSmith_v1.012835m (l ocus AcoGoldSmith_v1.012835m.g) derived from phytozome v7. 0 (chr-ID scaffold_34; pos 796942 to 797360 reverse strand )
atcataatccacctacaaaattaacttataaacaagtaagctttctccacaacgatgtttcttcgtcgaaatttgatcataacataatgtttacacatctagttattatatggatttttttttcaccttgtctggacatccctattccctactatggtgtctctgcaatctttcggcatgttattgatggttctgtccttaaaaaacacatatgaacaaagacatatgatttattttaggatatgaaattgttcacatcaacttcaaaattcaaatttaattttacgtggttaaacatttggcagagaaattttcttaacatgatattcgtaatttaggatgtacattattttttaaaatccctctcccttgtgtgagtgacagctcaaacaagaaattttggagttttgtgaaggcct

SEQ ID NO: 109766 - DNA, 329 bp, Aquilegia coerulea
  Intron number 2 from transcript AcoGoldSmith_v1.005587m (l ocus AcoGoldSmith_v1.005587m.g) derived from phytozome v7. 0 (chr-ID scaffold_61; pos 1288639 to 1288967)
ccacctaaggtatgtatatacttccggggataggtttttacttaattttcgaaagagtatatatgctaaatctgttgaagaaggatacattcgaagttttgactatttatcttgtatgggactatttatctcaacattttctcttttttgaagatatgataaatttgttttgttataaataactggagtctactttgtttgtatcacgtctttttgtaatgccataaattgttctatacaagtaattgttttccttgctcatgattaaactggataccccttgaattattgggatgttaagatttcaggggggcataactgaagaacag

SEQ ID NO: 109767 - DNA, 392 bp, Aquilegia coerulea
  Intron number 2 from transcript AcoGoldSmith_v1.005505m (l ocus AcoGoldSmith_v1.005505m.g) derived from phytozome v7. 0 (chr-ID scaffold_2; pos 6434532 to 6434923)
tggattacttcacaataacgacaacaacttcttcagtaagttgtagtattttttactctttgatctctttcatttgtttcaattgatgattcttcgtaactcatcgaaaaccaaataaaattatggaaaagatgtttgattactataatttaataatcacttgagttttttgtaattcattagtaactagggttttgattttagctttgaaaattgtggaatgctttgaatttgacttgatattgttctatttatgtaactcaatattgttgtgttagagctagttacatagctttggaaacctagttacaatatgtaggcctactcagcattgttggataaaaattactatgaaattgggattttttttttcatttgtgttatgctgcagt

SEQ ID NO: 109768 - DNA, 489 bp, Aquilegia coerulea
  Intron number 1 from transcript AcoGoldSmith_v1.009802m (l ocus AcoGoldSmith_v1.009802m.g) derived from phytozome v7. 0 (chr-ID scaffold_61; pos 944084 to 944572 reverse strand )
aaggtaagttcattttgagtcctttttggttctttcaattagttcttcttgtattaatgcatatactgtatgttgtcttccttatcattcagcttattcagtattgtttgttttgcttaattgtgatgttttaatgggaaattttagttagctctatatgtacaatacatcatttcattccatcctcttggtcaaggcttttatgttctccatatcacaattcacaaatttgtttgttgttgttgttgttagtgttgtctgaaatgataaaaaactgctttaagcctttaatcatgtctctttgtctcaaactttagttgtggattaatttttaattgtcacatattttattaggtgtttgatctaggagacaaggtaaaaacaaataataagttaaaaagaaagaaaagctaagattaaaggactaggacacaatgactaatctctgtcttctctaattgtttacgcataaatgcagttgtagctttg

SEQ ID NO: 109769 - DNA, 1023 bp, Aquilegia coerulea
  Intron number 1 from transcript AcoGoldSmith_v1.001034m (l ocus AcoGoldSmith_v1.001034m.g) derived from phytozome v7. 0 (chr-ID scaffold_26; pos 2093782 to 2094804 reverse stra nd)
ttcctttggcttttgctgtttggttaactactcaggtactcccttttctttcttataatctttccattttttagctgcaattgcttaatgggtttttactgtatttttttgggtatttttatatgattgggtatgagaattttttgaaaattgaggtgaaattgaactgggtatttgttaagtttctgtgttttgtagtttattatggcagttctgattaatcatgacaaactcaaactgggtaattgttaatttgttgttttagacatttttagtaggtttaccaactttgatcccttgctttctgtttctgttttttttttttttttggttttctacttgtcgcgaaatatacgtattactagaaagaaaactatgcttgatctttaggtgctatacctcattgttgtcttgttgatgcaaaaccccctctaattgttttctttcctttacataacttaatggaataaaacaatcgagtcatagcaatggttgggttttgattgtgtttttctgtcaacaaatcttgcagtaattttattaggtaattgtattagatattggacttcaaaaatattctattttaacaaggattgcggccctcctaatggttttctatgttggacattcagaatatatactaatatgaatgatgattgttttcaatttttttatcagcaaacatgagattccaatgaatgtttaggattagttgcccagttatacaacacactaaaaccataaacttaaatgtgattgtccactcataagaacttcccatctgaagacacattgctcaactgtgaggtattcattgcagcgtggtgttggtaggcttatattttgaaatctgtcagacagctaggataactaggccgactataaatcttgttctcatttgcaaacttaggatgttacaaaattattccttatcatgaatagctttaacattccagaaaatgtgaattatgatgtgagaaagttacatggttcatgatatgaactatcgcttgtctctgcagt

SEQ ID NO: 109770 - DNA, 775 bp, Aquilegia coerulea
  Intron number 2 from transcript AcoGoldSmith_v1.013132m (l ocus AcoGoldSmith_v1.013132m.g) derived from phytozome v7. 0 (chr-ID scaffold_3; pos 8624430 to 8625204 reverse stran d)
ccctatccttttacagtctttgtaggtatgtgttgaaattgttgtttgttctcaaatatctgttggttgattattattcgttggttgtgtcatgtgtgtgtctcactgatttgtttgttttcttatatcttagtacctatgacctttccttagatcaaagtgcgtaatttgatgatatatttattttttctgagtctactattatcgagtggcttataattagcttcttaagtatgtgtatggataaaatagcatgaatataataccaatttattgctttgttatagtagtttaatgcaaggttttgtatgttataaaaaaaaaggatgtgtatttttagataaatcgtatgctatcacttaaccgcacttttcaataaaatcaggaaaaggtgtagtctggattcccttctagaaatttagtcagccactcagtattcatctttatttcccctgtatgctgatatttgactaacttccacctgttcccaatgttggctccactaccatttcatgatcaaatatcaatttcattcatcttttatactttctcactccagagttcttaggttttatcatgaggtctgacatcatgaccggaggtgtttaacgtttgtgatttactacaacactgcatgttttagataactaacaaataacaatatcatcaaggaccaatatttttctgtgatagcatcttatgcctctttaactcttatctaactcttatcttcatttctgttacttacataaatatcttggaataggttattgtg

SEQ ID NO: 109771 - DNA, 748 bp, Aquilegia coerulea
  Intron number 1 from transcript AcoGoldSmith_v1.012371m (l ocus AcoGoldSmith_v1.012371m.g) derived from phytozome v7. 0 (chr-ID scaffold_88; pos 196495 to 197242)
aatatctctctcttggaccaatcgatttgaatcaggtaatctcttcatcagttgctatcaatctgttcatccgtttctatgttaaactctcttccctctttgtgtaatataacatcgtattcactagaatttgaggtgatttggtgtttgggcaagttgtagatttgtagggtttgcattgtgaaaatattttagtgcaagtagatgtattgtagttaagtttgtgtttttagttcataataagtagaacagcctgcgaatgcctttgttgattttgcagaaatttattgaaagagaaggttttcgtaggttttagaacaagggaattgttgattaggagttttacggtgaaactgagcgagtccccttcctttttattgaggtcggactgcaaaatagaattgattttgcgagtgatttgttcagttgatctgaacaaatggtgcaataatgtgtcagcttttttcccttgttggtgtaatagtgttgttggtgtaatggtgttggatctaaattgattgcaaagaggtgttttatccataagagcttgcttaactttgttcagtgtttagtaacgctgatgataccaagcttctattcaagtccagctttttcgtttgaatgtttgggtatttatacttgacagtggcatggtaatatctggttattttatagttattgtcaataccctccctattttcttatcactttcatcttctttttatacagattaaggtttctctacaca

SEQ ID NO: 109772 - DNA, 269 bp, Aquilegia coerulea
  Intron number 4 from transcript AcoGoldSmith_v1.012371m (l ocus AcoGoldSmith_v1.012371m.g) derived from phytozome v7. 0 (chr-ID scaffold_88; pos 198032 to 198300)
aatttccaggtaatactttgaagtccattagtttatttggtatattaaacttattttcttacttttgcattttatcatggcccaaattaagtaatagcatgttatatagtgcaagaaaacagatcatgactcttttgattgagtgcaatattatttgctgttctagatcagcatggttcaaaatcttgtagttgagtttcttgacatattcttctttttgcttattgcctataattagtacctctttaacagttgatccttttctgcag

SEQ ID NO: 109773 - DNA, 937 bp, Aquilegia coerulea
  Intron number 5 from transcript AcoGoldSmith_v1.012371m (l ocus AcoGoldSmith_v1.012371m.g) derived from phytozome v7. 0 (chr-ID scaffold_88; pos 198332 to 199268)
gacagttcaccgggaacctaagaataattttggtaaatgtcttccatacccaacatctttttcatgtgatttcaatagatacctaaacactggattctaaatgatttattattgctcttcttcaagtttttcttttcatttgcttttattcaaagttctcaaatattcaagttagtagtaaataagtcggagaatatcttcattaggtcaatataaaataacaaattattagactgcataacattaattcaattaaaagaggcctttttcttgtattaataaagggtagatagaaagtggatattaatttagggtttttcatcctttatttcaccggtttaagttgtgttggaaggttgtatattagattagttcccaggttttacactaaccttcttttcatacgaaattaatctcatctttagctttttaatatttgtgtttgtaattgatagcttttattatgaattcgtcgtatttccatcttggcatacccttgcacagtaaattatatatgtgcacgtttcgattcagagattctaattaccctaattacatgattaattttgtttgatgaaaataatagtaaacaagcgtagtatgattttcattatggttatactacagtaatgggaacaaataaaaataataggtagttgaatgtcaagtttgaactccttctgggtattttaatctaaaagagtcaaatttgagaaattgggtattgtaaataagatacaaagcctgatcatcacgcagttcaaactttaatatctacttattatgaactaaaggtactttgttgttggtaaagttaatttaatataggttttttattaatttttgttagatatttcatggctttttagttaattgacatgtttctttgtcatctattttgatttattctagatttccttgtctcagtggactctac

SEQ ID NO: 109774 - DNA, 358 bp, Aquilegia coerulea
  Intron number 9 from transcript AcoGoldSmith_v1.012371m (l ocus AcoGoldSmith_v1.012371m.g) derived from phytozome v7. 0 (chr-ID scaffold_88; pos 203608 to 203965)
agctgaaagataaggtacatcttctcttttttctattgtactttaaaattttaatctatattataacttctgatgcatcagcttacaagaatgaatatcaaataaaatgtataatcatatcagataaaatgtatataaccagagggacaggtgtttaaagaagcactaaaatctggacagatgttactattgccgattaaactttgttgcttaattgcctaatctggaaaagtgtttcaagattataccttctctccatttgagtgattcatggtgataacttataaacacattattaagtttgattattaacactggtttattgatgtatcttttgacaacctaggtagtgtggaca

SEQ ID NO: 109775 - DNA, 494 bp, Aquilegia coerulea
  Intron number 3 from transcript AcoGoldSmith_v1.011547m (l ocus AcoGoldSmith_v1.011547m.g) derived from phytozome v7. 0 (chr-ID scaffold_3; pos 1653506 to 1653999 reverse stran d)
caagacagaaccaacatactgcgtatttaagctgtcacttgatttctctctattatttctatttcactggttaattaatctctggaaggtcaaacacttttggatagtgaaaatagttataattttttttcttctcacaaagtggtcaatcagaaaatgtgcattctctgattgtgtacttccatgtttaatcaaaaaaaaataaaaaaaaataaaaagggaccgtctactgaccctatttcttatgtatcttggtgaaatattatcccaagggaatgattattccacatttcacaagagcacgagagattgtatttgcacattttcatctcattggcctggacctggaaattccctttgacagtctcagaccctccatgtgtgtgtgtgtgtgtgtgtgtgagatagacagacaaagcaattaagaattgtggtttatgtgcatatatgaggctctaaattcaagtttgttttattgttgcagtcgactcaga

SEQ ID NO: 109776 - DNA, 522 bp, Aquilegia coerulea
  Intron number 2 from transcript AcoGoldSmith_v1.011547m (l ocus AcoGoldSmith_v1.011547m.g) derived from phytozome v7. 0 (chr-ID scaffold_3; pos 1654086 to 1654607 reverse stran d)
ctgttggttgctgctttgattcttttgatagttgggtaaatccatgatatccttctccctcccattttctgtaccagcatgataagttttttgtggaccaaaggttttctcgcgaaattcaggacatgcctaccctaaacgagcaatcttcagtaataggctcgctgaaatcagttctattggtcggtctgtgtaaatatatgttctatagagctccaactaacacagtctgattattatattaataggtgtgacgtccttggcatcattaaggccatcgatgttctcttatatataccttatgctagatagtatcatcaatttgattaagatcaatgaagatgagttaatttctttggtcgtctgttaaactaaagccagcttgaatatcatcttggtttaatatttgtttaccttttgctaaaccttgatctatattgtctatggagggtacaaaacaaattagagtttttatctgatcattgcttgctgatttgcaacaggtttagtgtcggcttggtt

SEQ ID NO: 109777 - DNA, 587 bp, Aquilegia coerulea
  Intron number 1 from transcript AcoGoldSmith_v1.009261m (l ocus AcoGoldSmith_v1.009261m.g) derived from phytozome v7. 0 (chr-ID scaffold_58; pos 1061872 to 1062458)
tttgaagacgagttagttctttctttcttttgatttaattttgtttattgacctttgacttttaaaggatttctgtttttctttaatcacaatgtatgtatatatggttcatgagatttctatgtttctgttttttaaattccctttttagcaaggaaggaaaacagattcaatgaaccaaacacaactactatgttaaatctattcaaaagtcaatgttcttttgatctagcattctagctacttttggttatcagtggattcaacatttcaacttacaaaatttaattacattaaatacccaacaatttcgccgttttactatcctatctaacttcaattttgtataatttaaataaataatttgagaaagtcgaattacattccagctgttcttaccatataatgtctttctcaaattgataagaactagatttttttttttattacaattattccttcaaaactcataaacttgaatgctttaagttctagtttctttatatgttttcacttactaatgacataatatgatttgggcttattgataatctcatcattgactttgtgtaggtgtattttggttg

SEQ ID NO: 109778 - DNA, 794 bp, Aquilegia coerulea
  Intron number 1 from transcript AcoGoldSmith_v1.010125m (l ocus AcoGoldSmith_v1.010125m.g) derived from phytozome v7. 0 (chr-ID scaffold_26; pos 908629 to 909422)
agagattctaaattgaaggtaagttttcatcttcttgacttcttaaactctatcattcaattttttttttattgaaatttgattgttttttggtaccttttttttttttttttttttttgtattttatgtatatgaagaaatgatcagtatttattttttgtaatttgaacttattttgcaaattttttcatgattggggtttatggacttatggggttttcatgattaatgggttttgttgtctttaagaacatatcaaactcttgaaggataagaatgttaatgtttgttgattcatactttgtaggaaatctgatgttactagcgtgttgtttgccatgaagtagattttaaggatatagtgtgtgtattagagaagatggggtaagtgtttaatcttatgagttgataaatgcgaaggacaacaggcaatgtaaatgcgatcttccagtccatattttttgctaatcagaacaaataaatgattgacttatgataaatgtacaatctagtcattgtgcatcctcgaacttctcttgttttcattgtctagtattcgaacctgtgcaatactaaattattgaacaagagtataagactatatatatgtctctgaagtctggaaagctccagttcctttttgtctaacaacttaatttgtaattacgctgtattaaatcttggattttcttatgtggcaacttggatgatagatttatttctcattgttgatcttcagcttatctaatgtcttgtgttttaaatgtactgctggttggacagacttttccga

SEQ ID NO: 109779 - DNA, 842 bp, Aquilegia coerulea
  Intron number 2 from transcript AcoGoldSmith_v1.010125m (l ocus AcoGoldSmith_v1.010125m.g) derived from phytozome v7. 0 (chr-ID scaffold_26; pos 909448 to 910289)
cgtacgcactatcgatctaactaacaacaaaatcggtaagtctgtcacctttctcttgttctcactttgtctaacaccttattcatcagtccactcatgtctgtttccattaaacgttgctttcatacttctatatgtacataaaccatccaaaatttaaaatgggatacaaaaacagaaaagcagactgagatactctttcagtttaattttgttattttccaatttcagtgttccgttgttgtgttatttactttgaaacgtacgtttgaaggtactgaaaattctgcttcattctgagattactgtctgattagttttttttttatgaagaccagccttttgagataagaggttgccaaggagaagtatggttgggtatttataacctgtcacgcaatttgttggtctcacatgtagaagtggggtagggtattgtctccatcactgagagatagaggacttggtttcaaacattttagtcttgttcacatattgtaataacaacatactatttggtgggcagttctaatgagtgtttcttgataacatcttctatatgacctttagtgtaacctttcttcttaatgcttgctcacctttttttttttttcttgtatttttttgtagaaatatatttctgtacccttcctttggttttgttgttacctttatatcaataagtttattcattaacacctcctccctccaacatcaacaagaaaaaaaaagatattgataatcatatagaggcttactttgcatatcatttacacacaaatgtctgcctttgactcatcatccatttcatttggtgcttctgttttgcagttgacattcct

SEQ ID NO: 109780 - DNA, 604 bp, Aquilegia coerulea
  Intron number 1 from transcript AcoGoldSmith_v1.012935m (l ocus AcoGoldSmith_v1.012935m.g) derived from phytozome v7. 0 (chr-ID scaffold_13; pos 601859 to 602462)
ttctaggtttgtcttcttgtttccctagtttctatttatttcctaaaaaaatgtttttttacccaaaaattaggaaaaaactcaatctttttgcttatatcaagatgatttctataaacatggtttctaaatctttttgttattatatgtctaattataatctgctttagaacaatcaattaatcccaagtaagattttgggggaaaccttaacaccatgacatgctatttaacactatggcttttaaatctttttgttattacatgtctgattataatctgctttagaacaatcaattaatcccaactgtgaaatgtcatggatcacactatgaattttttgaacgcatccaaactttcaaggaactgtagatcagttgttttctatttttttttacaaccgtcaacttcttcgaagaatatgtggatagtagtgttcaaaggtatttgatgtatgacattgccatgtaattaagtagggttcatcctaaagaatgttagaagagtagatgcttgcagcttgagtagttcatgtagaattcaaaaatcactagctaatctcaaactttttttaattaaatttgaacagctccaaataagggaa

SEQ ID NO: 109781 - DNA, 744 bp, Aquilegia coerulea
  Intron number 1 from transcript AcoGoldSmith_v1.003257m (l ocus AcoGoldSmith_v1.003257m.g) derived from phytozome v7. 0 (chr-ID scaffold_13; pos 1890965 to 1891708)
ggcttcagtatcaccctgaggtagttaataatgtttttgtttgtcaattaagtttaatgttatgtgatgaaatgacttggttcttttgttgttaaatggattttatttagttgaaaatgttatctttctttcattttcattaagcctaaatacaataaaggctattgagttagaattagaattggacaattggtctacccaattcaagtgaatgatatgatacttttattaccagaaggctcaaattagcataaagtatcttcgattaatgtatattattaggtaatatctgtttggtcttttttggaagcattgtttttgttcagtcattttagtgagttgggttccctcaccctttccctctattttacattgtctgtatccctaattctggtctgtagtattacttgccagctttgcgtggctacacctacacgttttgttcttccagaaattgagtgttcattttcctcaactctttagttcatttagagtaacagtacttgaagaatctactcagaatagtcaaataaattccttcagaattaaaaacatagtattaattaatatgttttggcttgtgattgtatgacgtttaaagtaatcattctcattattttttcgttgttatatatgtgttttaccgtcttaaacaatactgttaaagagcactattatcaataggactgcaagaggttttgatttcaactgatttccttgtaggtgacacattctcctgaagga

SEQ ID NO: 109782 - DNA, 610 bp, Aquilegia coerulea
  Intron number 3 from transcript AcoGoldSmith_v1.026155m (l ocus AcoGoldSmith_v1.026155m.g) derived from phytozome v7. 0 (chr-ID scaffold_34; pos 1948017 to 1948626)
ccggtgggatgtaagtattaaactgggttgatttaactgaaaatagtatttcctgtttggtatcatgcataattttttgttttcttgtccataagatcccaaaagacccctttaggttggtggttggctgtgttatttattagccaaggactatgacgagcaaaccactaacttcacttaaaaaaaagagaaaaccactaaaaacagcctagcataggaagaaccttccatgtacaaaccattttgtggacttctctttctctttttagaccaccaccacaagtccacaacaacttcctatgttctttcacgaccaacaattgacaccactgccaatcaccaccccaatcagcttataaaatgtattgtgctttacacactattcgtgtgcaaaacacaacaaaagtaggtgaggcaaaatcttattctattattgtgatcttcacaagaatcaagattgaaaacttagatttatgtattatgatgtagatataagtctgatatgtatcaataatccattcatttttaaatacgtatctttgattttaaatggtagtttctatggttattgatattgaattattctggtctatcacaggaaaactttgtg

SEQ ID NO: 109783 - DNA, 669 bp, Aquilegia coerulea
  Intron number 1 from transcript AcoGoldSmith_v1.011403m (l ocus AcoGoldSmith_v1.011403m.g) derived from phytozome v7. 0 (chr-ID scaffold_16; pos 3423319 to 3423987)
atttgtttaaggtatgatttttaatctttatttttgtgttacaaatcatgggtttgttctagatttagttaaagttgttcttaaatgttggtgttatgtttgtagatctatgtgctagtttgattattattcattagattatcatgggtttcttgatcatatgatcaaagagcatattgaaaccagtttagcaaaaatttctcatttggatgtttaagcccttgtgctagaaatctagggtttcaattttgttagactgggttttctcaaagatgggtttattatttgtggattttaattgatcttagatggaaacctaggctttcatcaaacaaattttgcatgatgttgttgaaattggtataaagcatttgtttattgttctaattattcagagaatatgtcgattgttcatgaggagaattatagggtttttaactttacttttttctgctgttgatctatttccttattgtagaagtagcgtgttgtcttttagatttactaaattaataaaaaactttgatttcatatttgatagttggggaatttttaggcttcttatgttgaggtttttctctatgaatcaatcctgaagaatgcaatctgtaaatggcatttttttctttcataggaaaccgaggtgaggagaaggaatatacagctagc

SEQ ID NO: 109784 - DNA, 1031 bp, Aquilegia coerulea
  Intron number 2 from transcript AcoGoldSmith_v1.015676m (l ocus AcoGoldSmith_v1.015676m.g) derived from phytozome v7. 0 (chr-ID scaffold_3; pos 7422437 to 7423467)
tctcctgggatccggttccttctcacttcttggatgtatgtgatttacatgtattgcatttcatgttacataatataccattttaaattgtgcaaattgctgacccttgtaaaatcaaaacattggagtgatgtgctggtatatgcaaggtcattgtgtaaattggaggtcatgttttgatccccacccacccacacacacacaaacacagatcacccataacattccaacttttatttaagtatcacccaattctagaatagtgcaaaatgcccttgtaaaagcaaaacatcggataaacgcccctgtgtctgtgtgtgtgtgggcgttggagttagatcttgtcatgttttattattattttcttaacataccacacacccatgaagtaccggcttttgtttaagtatcacccagtattagaatagtgcaaaatcctgacccttctaaaaacaaacattggatgaatgccctggtgtttatgtgggcatcttgtaatttggaggtagatcttggcgtgttttcaattttttccccaactgtcatatacccataactttccagtttttatcaagaattgcccaatatcacttgtatagatgtctatcaccaagatggattttttttccccataatttcctgatattcatggattctcctgaatttaataaaaactcgttagtggtgactttcttatcattggatgctgataaatccgtgctagttgcaaaagaaatatttctgcatattatggcatttctacaatgatttctactataatgtttagtattattttcatgctttgtgtttaatgttgcattcactgaaaggaaatagaagtccattataaatatataaaaatgaatttcaattccagtttataatatttcaagtgaacctctatagtatgtctgtccccttattcttaatcttccataatctcgtatgtttcctttatcttttgtagttactttttcttctaattgtcctttacagctgataggaatagagaaactaagaaaaacaatcga

SEQ ID NO: 109785 - DNA, 855 bp, Aquilegia coerulea
  Intron number 1 from transcript AcoGoldSmith_v1.008910m (l ocus AcoGoldSmith_v1.008910m.g) derived from phytozome v7. 0 (chr-ID scaffold_2; pos 365672 to 366526)
cagatcaagcttcaacagcccaaaccatccgtgaggtttgttttacttcttcttcttcttcttttgtttgtttaatttattaaattgaattcatcatcatagttaattgattgataagttagagaaagtttgattacaagtaccttatatacattacatgctcttcttatatacaaaccaagcgacatttgttatgtttgataaaaaaaatacttatttgaaaaggaagtcttctgctctgctctagttggtcaaagaaccaacaaggagccgtgtaattcaggctcaccaactatgtatagtgtgaaatacctgaatatatacctgtaccatgtgcatccaaagcatctttgaaatcgtgatttgttcaaatgattgatttaaagtctcctggggtgcaagttttacgaaacctttgctagtaggcagtggttgtaatattattgtggataatgtgtacaattctttatgatcgaatcatttggtagttgtttgagtaagacaaagtcgggcactggtcccctggctcgatcagtatactaatttaacatacatataacccagatttcgctctgcaaatcattagtacgttttctaattttctaggatatcattgacaaatcagtttacatgatgaatgatgaatgaatatgtgttttcataagtttctttaaattggttttgagaatatttatgattcttctgtaatctctatcaatgatccacatgaactctggaatttctgctgtatatatgagttggctgttgctcttaggtctattgacttaatgcagcttttgggtgcaagtttttcttttttccaatgttataactatgaaagtgtttatttcaggc

SEQ ID NO: 109786 - DNA, 1017 bp, Aquilegia coerulea
  Intron number 5 from transcript AcoGoldSmith_v1.002933m (l ocus AcoGoldSmith_v1.002933m.g) derived from phytozome v7. 0 (chr-ID scaffold_7; pos 6809244 to 6810260 reverse stran d)
ccaacttggagcaattcgaggtctggcaatgcatacttgattgtatttatctgcacgtgtttatacgttttcagttcgttataggggaatgaatttcagtaaagttggttattgtttctatttatttagttggttgttctcgataccttccttgttttctcagtaactgttaactcgctcatgtttgcatgtgtttctttcactttttgatgcttttctacatatatatactagattatttggataactaaacacttcaagattttatatgaaaaatcatagcactttcttttcatatttgcaaaacactggataataaagagttgcagctggagggtatggacgtatggctggcaatttactaggattcttctatcttttctacctacatatggacttggcatgggtaaagtcgttaactctgggtttgggggggtatcctttactggtacttcttttgaatgttaaaaatgtacataagtataacaaaaactgaaatcgcaatgaatattcctatgcattctggactgggggtagtatctgagtggaagatctgtttcaaaaatcttttcttatgttcaggcattgcttttgcaagaaacaattcgcaactgctttgccagttctagttcctaatatcataatcttatgttttacgattctgtagagtcccaccatgactagctgtttggttgaatcctacaattttagtagtttgagtatattaatttttgaactgtgtcactaaaagaattagtatttaacccaaatatttgaactaccatgttgattaaatgagtaattaaaacggtctaattctttcccactatattgggaagctgttaatttttttgacgtgtgtgtgtgacaaaacagggctttatttgttacttaggaataggacaaggattataacttggtcaaatgttcagtcacatttttatcatttaagtgaatgaaatgacaattgaaaatgtactaactgtttatggttttctctttccactatgcagaagg

SEQ ID NO: 109787 - DNA, 712 bp, Aquilegia coerulea
  Intron number 2 from transcript AcoGoldSmith_v1.004555m (l ocus AcoGoldSmith_v1.004555m.g) derived from phytozome v7. 0 (chr-ID scaffold_3; pos 3277650 to 3278361 reverse stran d)
gctttggcttctcaagcacaatcacaacttaacaggtacttctaagattatctactctgtttaaattggagcaactggtgggacagtgaattttggtgtggcaaattgtactccctccgtcccaaattataagtaccttttggaatattctacttattaaggaaacatcatttattgtttgtctactaactctacttcttaatttacccctatttaatactaattacaatgcctaacttgtaattagaataattactctctcaaagcaagggtagtataaacaaatgaaccatttaacttaattaatgtgtgttcaaaaatcaaaagcgaatctaaaatggaataacgtacttataatttgggacagagggagtattatttttcctttatggtaatggagtgaaattaaattacaatgagactagttaaaggagtaaaaaaaaggaagaacaaggtgtccatggaatcagttttcaatgaacaaaacaccagtcatgaagtgcaatatcttgagaaagaggcaattctgtatttctatgctaacatcaattgtatttgctttcatttatgtatttgcttcactttgatcatgctttctttatcgtcataggaaattttctatgtaatttttttgttgtttggaagaatgtagacctgaggaattgtggttttatcagattgaggttccttgggaaagtcataacagtagaaa

SEQ ID NO: 109788 - DNA, 1028 bp, Aquilegia coerulea
  Intron number 1 from transcript AcoGoldSmith_v1.025147m (l ocus AcoGoldSmith_v1.025147m.g) derived from phytozome v7. 0 (chr-ID scaffold_87; pos 615935 to 616962)
aaactggagaaattggcatcagattaccatccaaggtgagagttactgtctcttcactcttgtaatgttttatttatgaaacattagagcacatatcactagaacgcatctgcatttaggaatactttaatggtgtcattatgagcactgttacttgttatgatttcaattgcgtacctgattgcacatgaacgagaactccctaaagcactgctttatgcgtatgtgcttgccaacacatcttaccagcttttgtttacatttaacttttaaggaatgtgaagaattgagaattttgttttgatattatgtagtttagctctacgaaattaaggattatatgcacgttctatcaggattatgatgcagtcgtgcataaagatatgtactttgaaccgaattcaaagaactacgacgattttcgggattcgacaaccaatgttcttaaccaagaactcacacaaagagaaactcttctcaaaacacacaattcaattaaccaatcaacacctaacttggccaatggcctacaactctttaaataggaaaaacaatccttggaaaacaaggaaacctaaacctagaccaattctaatgaaaatagaaaacataattcgaatttaaaataaccctaaaatagtaataccctaaaacacctaaaaacatcaattaaacataaacctaaatatccccaataattctaaaaacatatagtagtaatcttagcacaaattaggggttttaaaccctagaatgcatcagattactattagagtagactccgtcaccttctttagtgatctcttagtaaactctagaacatattttgatgggttttggagtaaatgcagttcttctcgagcttacatcaaaatggattcttaagaaaagattatctggacatgtaggatggtcttatctttcccaaacacacacacacacatatacatatgagtttgtctgatatctaagggattgataaggtttctgttggattacctcatgcagagtccgtttctactgtgttg

SEQ ID NO: 109789 - DNA, 985 bp, Aquilegia coerulea
  Intron number 3 from transcript AcoGoldSmith_v1.011508m (l ocus AcoGoldSmith_v1.011508m.g) derived from phytozome v7. 0 (chr-ID scaffold_35; pos 1264739 to 1265723 reverse stra nd)
tgatatagtacaagaaaataaaaagctcatacttggtaagttcaattcagttcgaagtgattcttttctgatattatagacaccctatttaatagctggtaattattcttttctgagtatcaatcaattatcattccaagtaaaaattacagcgtaatacatacgcaatgtgcttacttacaagaaccacacgcaaagaaacctttctactacaaagagaatagagtgcttatttaataaaaaaaatcttttttttaaatttttttactacatcagaagtaaagaagttattgatgaagatatcaaccactaattgaaatcaaagcatccatcataattagactatttgtttacatcataattagactatttgtttacaataaaaataattgttccttacaggtattctaatagggagtacgtgttcacagtaacatatttggtagattgagctggaagtcgaaagctcaaacccaaaaattgtaatctgtagcagagattatacttaccatctcactcttctaatatatgttaaaatcaaatatgtaggtagaaatcacaaaaaatttgcaacaaagaataacgttcattgtgcaaaaggatgtttactacctgttccatggatcgttaattgaattttttttcttgctttcttttggcttggccattcaattggagacctagactagaacattctttgcaaaatcatgttcaagtgcacaatgagatccacttatttactcacaaaagaactccatctaacatcacctgatttagttcacaatatgaatttgtattctaatctgatttacttctttaggctctttcaagttatatgggtttttggattagcaatgtgcttattcaacttctaaagatgttaagatatgccagaataatttgatatgattagtcatactgctgaactgtctttcttctaccatgattaggcaacattttgcacattgggtgccatatacgcaat

SEQ ID NO: 109790 - DNA, 540 bp, Aquilegia coerulea
  Intron number 1 from transcript AcoGoldSmith_v1.026430m (l ocus AcoGoldSmith_v1.026430m.g) derived from phytozome v7. 0 (chr-ID scaffold_3; pos 6822769 to 6823308 reverse stran d)
atagtgaaaagatacctctgaggtgagtgaagcatgaaagttctggtggactttatttcccatagaagaaatcttagttacctctttgcaacgatcatgataaagaattggtttactgtatctagttagattgcagtgtaaggtccaatcataccctattggtgaatcttcttaatatcatggggcatgccttagtacttcatgatccggtggtccaatagcatgaattcgtttttgatataacctataactgccatatgtctcaatttgattatttccttattctgtggtggacaccgtgttctatttatttttatctgtagtagaaattgtcttagccattctaccgctataaaatatgaccttcaagcctgtgtaaggtgtgttttatggtttgtgggttgagttcagcttaatccatagtactgtttttctacctctcagttgtgttaaatgattaccacagaattatgatttatcactatcttcaagaacttacctccttttaataagtaattgattgttttgtaatggacagtt

SEQ ID NO: 109791 - DNA, 621 bp, Aquilegia coerulea
  Intron number 1 from transcript AcoGoldSmith_v1.004983m (l ocus AcoGoldSmith_v1.004983m.g) derived from phytozome v7. 0 (chr-ID scaffold_58; pos 291430 to 292050)
tccagatttaaccaaaccctcagaaacgttcaagggtatgtgtatgtgtatgtctgtctttattttttctctctctctctctttctctctctctctctctctctctctttctctctctctctctctctctctctttctcttagattgattgatctaatttttttttttacttctctcgcaatctcgcatacttatatatactcagcatatgacaatcgcagtagtcaatgaaactcattttgaattcgagattatacgatctacctgagaaaatttgcatacgcatgcccgatctcttgattctctgagaattctctttttatcttgaattccattaatggggttttctccaactatgaattgaatctttttttttcttggaattttcagatttataggaatttattcacatctgatttttattactgtagatttagtttcttagcaaacttgaacttcaatgtacatttgtatagacaaataaaacttgaactgtcaaattaccacaaaatgtaaatttttttttttttatattcatttcggatttcaatgtattaagtttgctttggttctttttattttctagattgctacaaggtcgcagctttcctggtaaagttt

SEQ ID NO: 109792 - DNA, 478 bp, Aquilegia coerulea
  Intron number 1 from transcript AcoGoldSmith_v1.004227m (l ocus AcoGoldSmith_v1.004227m.g) derived from phytozome v7. 0 (chr-ID scaffold_55; pos 1252101 to 1252578)
cacatcacaaagttgtctactcctaaacagatcttgtaagtatctcaatcttcttgatccaagttttaatcatataataataagataagatgatcaatttcgtgaatttttttgggtttagtaatcatataatttattaagttaataccatttcagaaataggaattgggttttttatcgatttttattgtggaaataccaaattaaatttatttctgttgaatgaagtttgtagtttagaaatgaaaaggggttcaatatcaatttatgctcatagtttcaattttcaaatgcaactgccttatttgaatatggaatttagattctggttaaatgtagttatctcttatcattatcactaaagatctatggtgccagagatatattgtaactgaggtttacatctgtttagtattaagactgacttaaatctgtttttgtaggtcatttaacccaaataaccgtttgatatcagtga

SEQ ID NO: 109793 - DNA, 1046 bp, Aquilegia coerulea
  Intron number 1 from transcript AcoGoldSmith_v1.002684m (l ocus AcoGoldSmith_v1.002684m.g) derived from phytozome v7. 0 (chr-ID scaffold_24; pos 3157728 to 3158773)
caaatagaattatctcaattcaatcggatattcaggtttttagtttatctcatttattgcttttcaatttattaactgtttttcttcttctaattatgtttaatttattgaaaaattgaattaattaatatatttagggatttgatatgatactttgaaattaaatgtttttatattataatgataaaaaaaatggtaagttatccttgttttactccaaatgagattaatctattgaggtttaggcattggcattgctgaatatgaaaatggtttttaaaagattgattagatttggtttggggctttgattaaggtatgatagatagtttggacttgaggaaacttgtgtgtctcaaggtgcctctggtgtttcaatgtgtggagagggaagagtcaagagtggagtgatataatatccattgcttgattgaattgattctccaagctctatatagtgcgagcgagaaagagacagagagagattaggagttttggaagataaacagatggtgagacagtactcagacttggaatcatttggggtttttctgaaactataatatttcgtagtcggaaagcttgcctttgcaaattttacaaccaagcgcgtgtaaagactacagatccaaactcatgtataagtttgcaaagacaagtttttcgattcaaacaagcagagccttatgtcatcttaatcaacatatgtatatatttccattaacgtgctactggtggaatttcactaattttgtttgattccttcatgctggaatttttttagattcctcgttttttctctaaatgctgggtcggtataagtttcataactagtgtccagcagactaattggtcagtgtgctggtggttttacaggggtggtttttattacctggtgtcttagcattgaagcaattatttttttccagcaagcttcagttttttagtactggatatggttatgtttgacatatgtatttgatttgtggatggatttttacactactaacattgtattctttatcaggggcatctgaatcgcacaa

SEQ ID NO: 109794 - DNA, 1005 bp, Aquilegia coerulea
  Intron number 1 from transcript AcoGoldSmith_v1.025516m (l ocus AcoGoldSmith_v1.025516m.g) derived from phytozome v7. 0 (chr-ID scaffold_3; pos 10262455 to 10263459 reverse str and)
gaactccattggcaatctttacaatttacagcaaggtaacatacatcattttcagtttcaaggattgcaaaattgcaatatgtctggaaataatttggaatttggccaaacaataaaatcaaataataactagatttagactacatatgctactgcagtactgctagctgtagttgctaccaaacatcatgcacatgtagagactttcagaggcgccaaattccaattactagcacagcaacaacaatcaattaaaatttccaactcacactttcttgcccttttctatgaatatagtacagtgtgtctgtatggggaaaactttttgagtccccactaaaaatgaccaactgcactagacattagacaatatgcacttaccacatgccacaagcttttcatgttcccttaagaaaacagttttaaaacaatagttttttgggtatttttcagaattcatcagtacttttttatttacaccactctaatttcaagaaattttaatgaaaattctgcaaaatctgcactattttcaggttcttccattcaaaaatctggttttctgtatatttttgtttttacaacacaactataccctaaagcaaaagcaccttgataactcactctgtgataatgctcctattccttctgtgagcagcagagagatcacaagattcctatgctaacaaacaaacattcacatatgaatatgtcatgagacaacaaccacaacattcaaaaagaaatagagccattcttgtcttaaccaaacatgacaagctgtatcctctcaatatctatccaataacatcttgacacctagtactacttgaccccattacacactctcattacacctttaaagaaatcaatcatatagtccatcaaaacccactcatcccctcatctcatctgccattcttactcttgtcactcacattctagagtaagaaaatgttatcatcatcattcatgacttctttttgctctattttcctagtctta

SEQ ID NO: 109795 - DNA, 874 bp, Aquilegia coerulea
  Intron number 4 from transcript AcoGoldSmith_v1.002588m (l ocus AcoGoldSmith_v1.002588m.g) derived from phytozome v7. 0 (chr-ID scaffold_2; pos 8165528 to 8166401)
ttgtcgaggtatgccacatttttagattgattaaattagtttgtggtagtaaccttttttttttttttatatactaaagcatcagttcaactctcttaccaaattacaaatgtcaatgtctatggtttgacacactgaacggaatgaatttcactcaagtaataaggcaaaggtacaatatgacagactgtctttgttgcacagttgactaccgttgtctatgttgttttagtttttttttttttcttcagtttcaagtcaggttttgatcacactatgttccttggacagttatagtctaatgagtttggactcctaaacttgtgaggtcccaaatatattttaccagacaaacatgtctaagtgtccccaaatggaaaagttcattcagtttgatgttttgttgtcatttaaaatattttatttgtcaaggtatcaagtgaccagagaatacttaagttctggaacttggattttaagtcatgtaggttcatcaaaaatcagagaatgacatggttcatgtgtttggtggacaaagggacttgtagagttatggtttaaatggtttaaccttgactttcaaagttggtgtttgttataggttattctattaaaacctagaacctgaaacatcttttcaatattgttaattgttctatattaagttcacaaggtcacaccaagtaaaagaatcagtgcatgcacgagtcttctttctcattgtttaaatccttacatcggcatataatattttctagttgtaagtagatacgatttttgtgttgtatgactttcctcattagatcaggatatattgttattatttgtttcacacttaatatgtaatatcattgacaatgtttatattgtaggt

SEQ ID NO: 109796 - DNA, 510 bp, Aquilegia coerulea
  Intron number 2 from transcript AcoGoldSmith_v1.018145m (l ocus AcoGoldSmith_v1.018145m.g) derived from phytozome v7. 0 (chr-ID scaffold_2; pos 6543142 to 6543651)
caatatttacaagtttaatcctcaagatctagtaggtatgtatggtatactttcatttttttttaattataacttcattcttattaagtttttataatatttaggttttatgtttgtaggtatgctgaaatttatttttatgaatatgtattgatacttttatgaggtttattagggtttgagttgctacctgttttaattttgtttatacttttttttttcttttctttttctgttacagttgcatattagtgtatatgtgaaggtgtagtctgtattcaaaattgatagatacaacaaaactactaactctttccattgttttcttagtgaagtgaagtttctaatcaccttgcttactgtatttcaaataaattctttgattatatatatatctgagtatagcaatgctactaacaaagttttgtttttaacaatgaaaatttaatatcttatttttgtttatgttcttgtttgtgtatttttggttcatagagaaattcaaaatat

SEQ ID NO: 109797 - DNA, 468 bp, Aquilegia coerulea
  Intron number 1 from transcript AcoGoldSmith_v1.003467m (l ocus AcoGoldSmith_v1.003467m.g) derived from phytozome v7. 0 (chr-ID scaffold_13; pos 577776 to 578243 reverse strand )
aatcgccgaactattatttacgtgaaggctggaaggtaaataagtactaatttctttttttctaaacttactccctacattatatcatgttttaatagattaacgaattaagtcttgataagataagaactgaacatgaattggttcactttcttatggattaatttttaaagaaatgatagatgaagtttgttagtcaaattgttgttcagtgtcggtgaagttattatagatagtgctacagttgggatgaatagtgtagtaaaaaaggccaaaaggaatttatgtccttgtctccaaattggtaggctttagtagaagtcatgcagtgaagtttctttcttttaagtcctttgtcaatgacagcaaattgtctttttgctcttcctctttataggaactattgttttcaccaatttaattagatttgaattaataagttaatattaatcttttgtgtttgtaggt

SEQ ID NO: 109798 - DNA, 618 bp, Aquilegia coerulea
  Intron number 1 from transcript AcoGoldSmith_v1.014244m (l ocus AcoGoldSmith_v1.014244m.g) derived from phytozome v7. 0 (chr-ID scaffold_2; pos 4002836 to 4003453)
aaggcgcacgtatgtgttgaactatatgcagtgattaattaaatcccaacaacgtcaaacaacccgtaacctagatattcgtgagaacacatcatttgcaatacaggatccgttttgtcaatgaagtcaaagattaccaaacaataaacaatagtataagaagaataaaacaataaagaacaataataccaaaatatacgtggttcggcaatgcctacctccacggggaacaatgagaagatttcactataagaaaagaaacaccgattacaataatctccctagtatctttctcaagatcttaatctctcaccttaaacccaatacactcttggctcccaaagttctctcttatttactctttctatctctatgtttctattgttttctactctcttgtcttatcttacaaataccgggtatttatagtctatggatagaaaccaaatccatataggattacttgttcaaaactgagataaataggaaaccgagtccaataagaactcctgcacatatatggtttccttaaccaatataggaactgatcctatggatcacaccttttgtatggtatgatcctgtgcacccaactattgcgagccaatatacaacagt

SEQ ID NO: 109799 - DNA, 732 bp, Aquilegia coerulea
  Intron number 2 from transcript AcoGoldSmith_v1.016639m (l ocus AcoGoldSmith_v1.016639m.g) derived from phytozome v7. 0 (chr-ID scaffold_25; pos 2513502 to 2514233)
aggctgatcggttggacttgcctagtcttgttgtaagaccattttatacgtgcatgatgctttatttcgtcaataagagttcctccatagttttattactgctcttctttattttgaagtaacaatgttcttttacttcctcaaatatttttgagcttgattaagtttcttaaattttgattggtttatcttttgacaaaagtttccattgataacataagctttgtacatgggaacaagtagttataagtggatatgcgagtatgcgacacagacacaacaatactactataccagctacatttgtgggtaaacaaatccttcatattaagttggttttattttaaatcatggggacccccttcaacggttatgtctttcctaagagcttccttgattagtactgggacaattaagatatggaacaaaaggtttagtgattagggaatttcttatgtgcagtagggccattctaatttatttcaatttcttagatatattgtagtcctcctttaacttaatgtcatgttctcaacaaatttaggttgaatgtttcaccaactaggacaatgaccaaatgttgcatatatcagatacagcttatactatgactcgtaataatatcctgagatttaatatgtggtagtcttttccttgaatattttgttgtctaaaatgtacttttccaattgtataggactgggtggtgtttcgacaaggagtagagtgtgg

SEQ ID NO: 109800 - DNA, 502 bp, Aquilegia coerulea
  Intron number 1 from transcript AcoGoldSmith_v1.003874m (l ocus AcoGoldSmith_v1.003874m.g) derived from phytozome v7. 0 (chr-ID scaffold_22; pos 1153805 to 1154306 reverse stra nd)
gtctcttgataattggattgtaagcatacccttttttttttctttcattattttttatattcatgctcacaaatcacaatgcctttgttctttgattaaagatttatcatttttgtagcaaatatggataattctagttatttactagatatatgaatcttgtgactatcttatacagaaatacttttaacgggtcactgtggtagtatgaacaactatggttttctacttttctttgagtattggaattgccgtgtgcaaaaaatttagtttcgaaaacattgagtaccctgttagtattgtttcagaaactacatattctaatgtaaatacgactctattgattatttagtgtactgacatgtccttgtatagattaattctttcttatgtgttttcttctcttaacttatttgagttcatatcgatataatcatcattaacatatatatcattttatatttcagaaaaagaaggacgatctcattagcagctctattcc

SEQ ID NO: 109801 - DNA, 1059 bp, Aquilegia coerulea
  Intron number 1 from transcript AcoGoldSmith_v1.005776m (l ocus AcoGoldSmith_v1.004967m.g) derived from phytozome v7. 0 (chr-ID scaffold_13; pos 4161400 to 4162458 reverse stra nd)
acttcaagtctcaagttcctcttcacaagattcctgtaagaataataataataatatcttgatcctctttctatctttctgcaatttcaattttgggttttatgagttagttgattttgtatagtgggggttgtttgattgatcaaataatgatttgggtttcaattatttttattatttttttctaattttcctacaattggattgacttttgaagtgggatttgtttgatctggagtttcttagttgaattatgtactatctttgttttcagttcaacactgctggttactctgaaaggggtatttgattgtatgctcattgatcgtatgttctcttcctattctcgagttaacatctattgtgctaagttttatgggatgttcaaaatatagttgtatggaagctgatctgtgctatttgacaattttgaattgggttttacttcgatattgctgaccattataattgagtcattggattttttttcatcctgtaaatttggagctttagcgtatgatctatgcttgaataagatctctagtctagaactattcctgcatcattagtttaaaaattgagctgcatcgagtgattactatactactatactttctggctttctgcatcaactgctttcttagctaaagtttggttatcagaagtaattactacctttttctacttttatgcagtggctagagatcactttatgaactcttaagtacttaaaagtgagtatgtatgaatgctcactattatccctgtaactgaatttcaagattcagaaatggaattgtaaatcactcatccctctgatcagatgctaaaaatactgaaattggttttccttgatataatgatatgtcaactgcatacataatgtcaattttattgtacatttcccttttgttttgtcagattgttgcaaaggttatggttttgtagggattgtatataattttctagcattgaggttccttttactgttctatcgtgatgacaaatttcttggttctctcagattgggtccaagctgtggcgatattacgattttgg

SEQ ID NO: 109802 - DNA, 776 bp, Aquilegia coerulea
  Intron number 1 from transcript AcoGoldSmith_v1.002661m (l ocus AcoGoldSmith_v1.002661m.g) derived from phytozome v7. 0 (chr-ID scaffold_13; pos 169205 to 169980 reverse strand )
attgccttggctgccactctcgtctactctcataggtaaataccaaattcaattaattttctacaaaaccaaaaaccctaacatttattaaattattattaaattacaatgaaagcttttcgatgcactaatacttgctcgtccaattcttcttcttcatctaattcatctttaaagcttataccagattctggttgtagctttttgtaatttctacaacgcatgtgcctttcattctaggatgtatgatttgcagatgatttactatctactctttaaaattacatactttggaaatcaagcatttgggcatattgacatcttggtccatcaactgatgataatcatttaagacttgctctcaagtgacctggaattcaataggaaagtgtgtatgaaaggcatgatattgtcatgtcgagtttaaggaggataggtggattataccaatttgaatttagtaaatgaccaaaacaaccatatttatttgttctgcaacaaagtaatacaatatacattgaatggaaattgggaactgaatccatttatatgatccttgtctacaatatatccacgttcattatcttagttgaattaagatggcagtaggggatctatgactctatgttgctagaatttttattttccgttttatttatatataatgttttatcttcacctaggattttactattcactacttaatgagaaatttgacttgggtttcttctctgttattaggggcagtcttaaatcaccttggtctcggaagagaa

SEQ ID NO: 109803 - DNA, 652 bp, Aquilegia coerulea
  Intron number 1 from transcript AcoGoldSmith_v1.007586m (l ocus AcoGoldSmith_v1.007586m.g) derived from phytozome v7. 0 (chr-ID scaffold_2; pos 7609599 to 7610250 reverse stran d)
tttcaggtaaaaccttaccctttttctaagatctatcaatttagttttaatttcatgaattagtaatgtgggttattttgttaattatgttttcatcttattcaattcaatttttattatttgacactgatgattttttttttttatctgaaatggctgtttctatctgtgttagtcgaaattggaatgcttgtgcatgtttttattgattaaatatttcttttgtctattgcaattttttcaaaaagtgccgatcttagaaaattgatcagaaagcttgttgctttatttgtcaagagggaaaaaaaaaaatttgatctcttatttttattgaagttaaaatgcttgggcattttgcacttactcattagatatatttggtctgccgcatttccttgcttatataaaattttgttcactcctatgaaaaatgatgatttaatttggaaaagttgttgttttaggtggcctttatttcctgaaaaagggcattctcttattctagtttattcttcatttgtgatctgaacttataatatgattttgatattcgggtgtttggtttatttcttagttcttgtttcacaataccgttttgtcccaaatgggtggaagaggaattcattagtgtctttaatttttgttactacag

SEQ ID NO: 109804 - DNA, 754 bp, Aquilegia coerulea
  Intron number 3 from transcript AcoGoldSmith_v1.007786m (l ocus AcoGoldSmith_v1.007786m.g) derived from phytozome v7. 0 (chr-ID scaffold_3; pos 7709145 to 7709898 reverse stran d)
aatatccaagacctctttagcaggtatgcgcaatgtcacgtttatatgtaattaagtagtacagtaaatgttatttctgctattacagaatttctcctcaactaaacaaaaaggatttgatttgatgttcttttggttgctgaagtagtcagaaatcatcatatgttcatattaataattacgtcaccgaatgagttgtaaacaaatccccccactccccctttccttggcataaatatctcctttgcattaagctgaagtaccttatcactacgttcttaactcttccttcaaattaaacaccccaaaacaatcataaaaacaggttcatggatacaaacaaaattactcaaaacaattatatgttgaaattatttgatctgcatatggatatctcactaccctggcattgaataagacaaaaagaccatttttacattttttttaaggcaaggatggcacgtgggggaaaaaatattggctacaatttaatagtgcttgcgctgctggactaaatttgtagtggggcccgaatcacattttgcattgcagttcctgaatttaacataccataggcattgtatgttctactgttttgattcgacacaatcagtttttgcaataacaataccttaaagctatttttaacttataagttaataagttggattttgatatgactgctaattctgactaaagaaacccttgttcttttccagcttctttggaggaggtgggggtgaagaagaagaag

SEQ ID NO: 109805 - DNA, 1059 bp, Aquilegia coerulea
  Intron number 1 from transcript AcoGoldSmith_v1.000372m (l ocus AcoGoldSmith_v1.000372m.g) derived from phytozome v7. 0 (chr-ID scaffold_58; pos 351143 to 352201 reverse strand )
gtaatcggccttctgtcagaacccctaattctaatgtatgtgtttggtttatttcattgtttttgaaattttgagtttaattttgtttagtgcattggtagtagtaatttttattggtggaattaaatatgtgtacacacatcttcgacattttaaatcacaatgtaaagcatagaactacagtgatggaaaacaacaaataatagttagaaaacataaataaatggtgattatgaccaaaaaggttaggtagaaaacagtaaagtatatttagaacaaatggcagccggaagaacaaattattttgaaaagaaagattttttattaaaccgagattttactgtcagtcggcgcatgtatttcgaaacagtaaatccgttcctcacatgcattcgacagtctgttcaccattgaagtccatttcaaactcatcagcttccaaatactccaacaacgataaaattagtttacattttaccatatttcttcaagaatgacaaagaagactatgaaaccctatatgtacacatgttttcgttaaaaaatttaaaaggctataagattctgtgtatatggggagggaggtgatgttcatatatactgtacatatatgaagatcattaagtgattgcttgatcaggatggctcttcttcatatggatagggacccttccaacctgctgctttcgtgtggaacctttagatgtgaccttatgaccttggaactatattctgcaccaagagaaaggccttatttaacttgttagatctcttacattgagaatgtaagaattgtatgttacagtttggcactagatatattttgatgtctagcatagttttatattactaatttattctaagcaaaaataatatatagcgacaattagaaggcgtgaatttatttatagatagcccttcatatatgtctatctgcacattttcagccaaagttaattgaaaaattctcaaattccatttagttgaactgaacttattagtttcattcattcatttggtgcagtcagttggtgcaggcctccgtcgttctaccagaaa

SEQ ID NO: 109806 - DNA, 913 bp, Aquilegia coerulea
  Intron number 4 from transcript AcoGoldSmith_v1.007442m (l ocus AcoGoldSmith_v1.007442m.g) derived from phytozome v7. 0 (chr-ID scaffold_8; pos 7013807 to 7014719 reverse stran d)
gaccaaaagctgcactgtttattaaggtatagaagcaggtttatccctgtaagacttcttctcggtctttattatatatttgacttaaacttttattaaggtatagaaagtatgtttgatgtgaagcatgtgtcgaagcccaagtccaataggtttagagtttattatatattctactccatagagaagggtttttattaggattagggtaacttggtgttcaaaaatgtcaaggttttgtatgtgatcctttttcttttaatctatggttttaatcccaatctttgaatgaatacgagtatgtttcttgtttaatcacttcctccttgcatcataatttttggatttgatctaaaaacaacctattatccacaaggtacaattgtcatcctcgcttgacagaatgactttgataacacaatatcgaaaagaaattgtcataattgttgtatatggccctttgtaagaaatatctcttggagaagtctgtagaaacacaagcttttgtcacagttggacaaaaacattaatgcaaaagtactcgatgcagacatgaaatacagaccattatggtgatattttgacgtctttaagtcttgttacaagttgtttttggtttgttgaagcacatctatttttgatgcggtgcttcaatactatgaaaaaccttgtgttgaaaatgttgaattatcaaaatttaagcatccagaattatttattgagaaaccttccatttttttgttgaattctttcatcttgtttgtttgttttgttctgaaattgaatatgcattattaggtttatgtattggtaacttgcataacttccgtcatgagtgcaacttttaggcttataatatcattgttatacttaaatgtatgtattctttattacatttgccttgtgttacagg

SEQ ID NO: 109807 - DNA, 978 bp, Aquilegia coerulea
  Intron number 1 from transcript AcoGoldSmith_v1.007442m (l ocus AcoGoldSmith_v1.007442m.g) derived from phytozome v7. 0 (chr-ID scaffold_8; pos 7015404 to 7016381 reverse stran d)
agacgggtctttatcttccaactagcgatatcgatgtaagtatgaagtatcccctttcttgtaatctgagtaatttggtgtttttttcttcccatttgatggttaccaatgaaaacacatattaaagattttgttacacaagatcttagtttgtcgtacaaaatgttagcttttacaactggacctactctttttgcatcatgccatttaaattctactctttctggttgcaataacaaatgtgttaaatctatctcagtttaaataattcgtagaatgttcataaattagactatgcagttgtaaaataggatatctatttttcgatttttacatatatacatatagaaactcacatcactgtgaagtttgggctctggctggtataaagcaaaatatttaatagcaaacattggtttttaacagtgttcttttgtggttcttgatttaattcccaaatcatgccatggatgccaaatccaatcaaattgttgtgtcatgccaaatccagtcatatggatgtacacagatacatctgtggtacacatgcaattgcttttgacggtcaagtgctaattagacatctctccattagcacttaacataatcataagctagatataatccaaccactttgtccttaggtatttccgctagggaaaaacatttgacttagtggctgatattgcaatgcgcttttgaatggttttattatttatataaaagagcagcaatattgcacctttttctttctttctttctttcctttttctttattgcacttgcatcatcatgatagaaattttagtagtgaggccaccttggtttacttctatgttgacgaacaagcctatttttaatttgattgcatacaaagcaaccacagtattaggcgtgaatatattgtggactgggttctgatggtggatgccatttattgcaggttgtgatttttgattcacaggttaaaactccaca

SEQ ID NO: 109808 - DNA, 838 bp, Aquilegia coerulea
  Intron number 1 from transcript AcoGoldSmith_v1.005100m (l ocus AcoGoldSmith_v1.005100m.g) derived from phytozome v7. 0 (chr-ID scaffold_36; pos 710022 to 710859)
tcaaaatttacttgctttttgagctaaggtatgaattaatcgaaacccattataattcatatttgaatttacaaaacccctaaaccatttcctcaaattttacattttgtaacaaattataagttctaactcgaaaccatatgcatctgtttgtaagtttgtcggacatgtgtgtggagtgtctgagtatccgacatggattttgttaaggatatgatttgtccaggtgacatatcttatgaatcaaagacttaatgctcgtgaacgtattcacgaatcaaaaactttttccctcttatgcaagttgatgtcagtatggatgttgatgtgtttggttgttatctcctacattgacattagttctatataaattgtgctatacttgtataactgggtatatttgtttgtataaaaagaatgggatgatatacaacagtaaatgcataactaaaagaatgtagggcatgccaatccatgtttattatggctgagatcaatgatgtactttttctggatgagtgcatccttatataaacctttttcatggtgaatatgtcatgactcttttaaaattgggtggtcgaataggcattttccaaatttatttcaagaataagaactcagtttacctcaagaattttcgaccacatactataataagagaaacagagggaagttagactagaagaaaatgtgacgattttcatttcactagtaaatcaattaattttaaaataattttcgtctttagaattgtatatcaattaaatgccatgatcatgttttaactcacgttggaacatatctgaatttgatcttcttcttgtcaaccaggtac

SEQ ID NO: 109809 - DNA, 856 bp, Aquilegia coerulea
  Intron number 2 from transcript AcoGoldSmith_v1.021289m (l ocus AcoGoldSmith_v1.021289m.g) derived from phytozome v7. 0 (chr-ID scaffold_16; pos 4328079 to 4328934)
ggaaggggaatttgtgattgaatatattggtgaaggtatccgtctttattttcgtgtatatttcgttttgttgtgcttgaattcgtttcactatttttttttcttctcaaaaccttttttttttgttggtcgagagctacctcaattctttgctcattaatttgttcctgatatcatctatggaggctttccctttggttttgtttcagttattatgacttgcatgttgctgccaactaagttatatacgggtggttgtattgtagttactgtctttttaagtagaatagtgttgtgtacctttgatatgatggatggtacagtttattattagactgaatgaaatgaaagttggtgttgaattttctgcaaggttggatcctttttaaaataattactattaatgtgatctttttgcacattgaagatttgattggattattcatcttattacaggaaaatgaatatcagttttttttacggatcaaatatttgatccacttgtatgttactctaagcttagtcaaactatattaacttccaacctccatttcaaacttctgctagatgtgtgctagttttagagccaaactaagcaactatccttcaaaacttgtttaggtagctttaagtaatggtgagttcttgcgccaacctttaatgcgcttttcattctggctttggtatatcattcttgtcagagttattgaatacgctaaacacgaaggttttgagttttggtatagcctaaacattcattgaaaatatactgataaagataatatgtatataacctttagatctgcattttttgtaagctcaattaagttctcattgcttctgtatccagttattg

SEQ ID NO: 109810 - DNA, 958 bp, Aquilegia coerulea
  Intron number 1 from transcript AcoGoldSmith_v1.016900m (l ocus AcoGoldSmith_v1.016900m.g) derived from phytozome v7. 0 (chr-ID scaffold_2; pos 1337818 to 1338775 reverse stran d)
tgctggaatcatacatttccttcaaaaggtttgttttttctcactttgcttttgtttatatgttgattatgccagactcactaaaagaagataattgtctgcaacagaccaatttttgaacgaaaataagaatgaaacgttgttgaagtaatacagtggactaatgggttgtaatgacttagttctcaatgtgcctaggacaagacttatatttataagggaaagggttacaatgactaaactctataccgcttttggtctgcggcctcaatatggtttgaataaattggtattatgtaactcaaagcataatacgcccaaaggaaacataaggctatcaacataatgacttgatagtgaagctgggtgatttactgcgattccacactaaagtatcctattcgctagtatcaataaggggtgatttgtccggaggaaagaaatggatgatgcttcttccatttccaacctgaggaatcactctcattattccggttcactgctgcagtgccttgctttggattgtccactctgaacagtgaacatccttgggagtctgtccttaaagattacctacccacaagacttctaacattgagtccctcattattgggtttacatacaatcagccattcacttggtgtattagagatggtggatttaatgagtgtcaaacgtgggtttttttatatttttaaacactggtttcttttctttcgacttactacctgtcaaaaacttaaacaactaatcaacaccacaaaatgggtagctgatgaggggttttattaattttaactttcattattgtgacttatattactgttttctgcagatgcatatgttgaaaattccggtaagttgagcttcattccaaatcgagtgaatactcaatgtatgtattaattgcattttatgtagtaaaaacatgttatcaatcttgattattgtgcagaaa

SEQ ID NO: 109811 - DNA, 980 bp, Aquilegia coerulea
  Intron number 1 from transcript AcoGoldSmith_v1.016496m (l ocus AcoGoldSmith_v1.016496m.g) derived from phytozome v7. 0 (chr-ID scaffold_8; pos 4533738 to 4534717 reverse stran d)
agaaacttcaagaaaggtgtggtggaggcgtgaactgtgggtaatttgtatgctggtatgatgggatctcttcatgacgtaatagcttcacaattgtttcaatgaatactttatattttaccagaactatgtgaatatgcacgcgtccagccgcgtgctgaaaaaacccaatttacttagaaatagtccagcccaaacaacttaatctataaacaattatactccaattaatataactgaattaattagtaggacccacattaagaaacaacacacacaattacgccagaagaaagaaataaaatcgaaaagtataaaaaaagtgaatatctggagtcgaacgaaaccaatggttacgtattaatttcttattagttgttacttgggctttcactgtagctaattacaggccgcttataaagtagtaaagatgtggtagaattctttcttctctttattgataaaaagttaacacttaggaggtatggtctagaagaggtgaaaacgattggggatctttgttagtacctattattgcttacatgctctgatgcacggacacctccctaaaccttacgcaccggtgtccgacacgtcctggacacgctgggacacgtgtcggacaccccaaattaagtgtcctacttgaaaaaataaaaattcctaatctggacacttccggacactgcattaggacacttccggacactgcattaggacaccttagttaggggatagttttgtaattttaatttttttataaataaagtggggtcaagaataaagtaaaaaacatataaatgtggagagagaaacaagtcaaacatgaaacttctctcacaagcttcacaaggataaaacttctctacaagtctcacctaccctctcttcatcttctactttctctctctgctactcttcatctttctctattcttttctcttcatcttccatggcttcagcttcaacagcttcaacag

SEQ ID NO: 109812 - DNA, 740 bp, Aquilegia coerulea
  Intron number 2 from transcript AcoGoldSmith_v1.011303m (l ocus AcoGoldSmith_v1.011290m.g) derived from phytozome v7. 0 (chr-ID scaffold_16; pos 3050162 to 3050901 reverse stra nd)
tattgcagcagccaaagtaagttcttacatcaatctttaaagtaaaacctaaatgatttagttttatgctagagtggtcaactatctgctttgtcagagctgcagtaagtaaaaatacgtgcaacttgtactgaaatgtagctgaaaagtaaattttaaggttatcacatatagtgctaaaaccattctctctggtccctctatagaaattccgtgcgagttgagactatataatgttaacaaaataaattaggtagagttcaaacctaatttactcctcttatccatggacctatcatgagaccagatcaagaatggacaaccgagtgacagaatctgatagaggagattacctcttcagtattgtatcttatttggtagcagtgaaatatcgtgctaagataattatgcgaccatacactgctagaaagggtcaaaattgtgttatttttaataaaggtcaaaaaaattttggaagcaggcagtttgatgcctactataagattatgccccagtcaaaacaaaatctgttgatcgtctatattgaacttgcgttagatactaggatgacctaagtagatgatatttaacgatttaaggacacgaaaagcatgcaagtacagtgtttgaaagtccagatgcatgctcatatacagattcccctttctttatgtttttagatgtttttctttttcaagcaattatcagttttgctaaaatgaacggaacattgtaacaga

SEQ ID NO: 109813 - DNA, 718 bp, Aquilegia coerulea
  Intron number 1 from transcript AcoGoldSmith_v1.012974m (l ocus AcoGoldSmith_v1.012974m.g) derived from phytozome v7. 0 (chr-ID scaffold_2; pos 1516189 to 1516906 reverse stran d)
atgtacacttttacaaagtttttaaaaagtatagttcatgagttcatacagctgctccaatgtccatccgtaaatgtttaattttaaaagggtaccatgctggtggggttgaattttgatatgaaataagccaatcattttttaataagtaaaattggaaaagtgtgtgggtataatatttgatttttctttatttttttatgaccatgatcttactcttatcctacaaccatttaataatgaaccattaaagatgccccagggttcgaaattggtgcgtgactgcgtgtttacccgaaacccaatacgtatgtagggtttgggtttgaaaatatgcccaatgccctagactctaggagcctgtatcttctgggtttatttcagtgctgacttgggcctattgtgggctcaagttgggtctaaattaaagcccaatcgaatccaccagcttgggtttggcctatacacagtacagagtggagacgagagtgtgagagaaattggaaactcgttggcacattctgtcgtttagcaaagcacataccttcgttctcctccaaaacccctttcgtcacttcccgccttctcactttcttcgaaaccgccaaacaaagttctagaaaccctaattttcatggcagattcattacttaacaatctcatttgagtaacagagttccgattctcaatctgaagtttgatagttgcaaacttaagc

SEQ ID NO: 109814 - DNA, 790 bp, Aquilegia coerulea
  Intron number 1 from transcript AcoGoldSmith_v1.026755m (l ocus AcoGoldSmith_v1.026755m.g) derived from phytozome v7. 0 (chr-ID scaffold_61; pos 130418 to 131207)
ttcgtggtagtttacatcacaattgtgttcacattgtactgctttctattgtatttgagcttgaagtttggattcttgtggcttttattgttgttttcgagatgggttagcttaatttgtagaacataagttactttttgatttggtgatatttttcatatatgaatattaggtattttgcttgtttatcaaatgttcacattgtactgctttcttatattgaattttaagatacagtcagcgataaatctctgttaatagcttaaggacgcaaattttccacaaaaacttaactaagatggagactgtgcattgagcactattaaatttgcttaagatcacttaaaaagtttcacatcaagaggtgactagatgagagttgtattgtgcttgaatcacatcttggggttcagcttttatatggttttgcagtagctaaattggttgggtagtcaatcattcattttccttgatatgcgagttacttgttggttgtaacggtaagaaattaggggaaaaacgaaaaaaagtatttgactcgatgcatttcttgatttggtcgttcatgctgactaacaacgcaccaacaaaggtaccaagatgtcttgtaatattttgtgaagagaggttaacaattttcagtaccttttggatattcctatgtttctctcattttccaataataacttaaaatgattagtttgaaagatcagcgcccagtcttctatagcaatacttattctaaatatttacaggtattacactgggtatccgaaggatcttgggcctt

SEQ ID NO: 109815 - DNA, 264 bp, Aquilegia coerulea
  Intron number 1 from transcript AcoGoldSmith_v1.011551m (l ocus AcoGoldSmith_v1.011551m.g) derived from phytozome v7. 0 (chr-ID scaffold_2; pos 6922616 to 6922879 reverse stran d)
agagagaacttgcaggaactgattcagaatcacaggttttcttttggctcttcctcattacgtactttcttactttcttgatcagtaatttccattctttagtgacatgcagacaattttgtttatccaaaagcttgagaccgaatgtttatttttgtacggattcaatttgattttctcttttttcctttctgggggctttaaacgtagagattaacatattggtttatgaaatcgttttgtagggaaactggtctctggaat

SEQ ID NO: 109816 - DNA, 623 bp, Aquilegia coerulea
  Intron number 2 from transcript AcoGoldSmith_v1.003499m (l ocus AcoGoldSmith_v1.003499m.g) derived from phytozome v7. 0 (chr-ID scaffold_3; pos 8938149 to 8938771)
gagtcccagcgtttgggataccattgcccactctggtttgttttacttccttcttttgagatttttttttttattttttcttaatttagagcagcacctgttactacaaaattataacaaacactaaagatcttggtgggaatcctgaaatacacattaaggtccattgatgtcaagaaaatatctatttataaataatctgtctccactcatttacgtgggtggtttaatttatatctatctatgtttaggtaccttctttgaatcctcaacagtataagcttcatttgttattatacttgataagttgataggatacattattgttacagaactggctttcctaattggtctacgctattagggattgtgattgttgtgttaagatccaaacttttatctgaagtcgcaatacattatgtctgcaaagttagtaggttccaagggctaatccccctcattagccgaatgataacatattccaagaaactcaatacattcgaatatttaatttccttccaatgttaaatgtatagtagaagaggtactagctcgtgacgttgtctagttgatgtgtcagtgttctaaattttgcattgcaggagaattgaaggacgaaacca

SEQ ID NO: 109817 - DNA, 612 bp, Aquilegia coerulea
  Intron number 1 from transcript AcoGoldSmith_v1.009280m (l ocus AcoGoldSmith_v1.009280m.g) derived from phytozome v7. 0 (chr-ID scaffold_8; pos 2257158 to 2257769)
tttatcagtttgtatggaaatttcattatttcaactatttatctgtaatttgcgctttttgtatattttaagaattttgcttcaatgattgagaaagtttagtgctatgtaagaatgaattatacgcatatagtctccattgtataaagattggattttgttgcaatttttttttagaagtagtatttctctaagagactgtttctctgcattattgtaaatttgtaacaaactttagaaaaacctcaagaatcattagtgtctcttgttgtagaattcaaaatctgtaattgatttatcaattgtgtagggtataaagttgtagctttcttgaatgtataggaccttggttttgcgatgatgagttcatttttcttgatatttcagacccaaattagttttgaagtgtgattctctttatgatatgtatataaaaaagaaaggggtcttttgcattacaatgttaaggggaaaaaaccgaaaaaaactttatcaacaaattcatatctagccatctaggggacttgtggtccaggagaattagtggctacaaactgcttcttatctttcttattatttctactctcctcttgctgcagattgtggaagaaa

SEQ ID NO: 109818 - DNA, 753 bp, Aquilegia coerulea
  Intron number 2 from transcript AcoGoldSmith_v1.009280m (l ocus AcoGoldSmith_v1.009280m.g) derived from phytozome v7. 0 (chr-ID scaffold_8; pos 2258126 to 2258878)
gtctttagcagctgacattggatccaatctgcaaggtttgtatgatttttaagatagttgtcataatttagagtagaataattccagtatcctgctgaaaatgacaatttattttctttcatagatagcttttaactaccttcacaggagattataaattacccgcgctcagtactttctcatccttgcttttatcatatataatattagtaaccaacaaacaccactgattttggtaggagaagaacgttgtttggtttctttactacaagctttggatggatatcaaaaatgcagttgagcacgaaggatgttgtcaacttaatcttgatcaaccttgcaattattttcttgctgaattagggatttggttgagtttatcttttgggtggacaagcctgaatgtgatgatatttgagtttctttttgggttgtttttcagttacatatttcgagacaaaatagtagatcgtatgccttactataatttggcatgagttagacatataggcatatatccaatcaaatgggatatctcacaattgaagcagaaagagagagtaggaaaagagtcaaatacagtaagcacttgatatatatttttgtgcatagaaattggaatgcattcactaattgcgtgttttggaatagtctgttggtcttcgtttcatcccatgttttaatttgttgcattttaacacgatccaatatattgcagtacccacatttctatacggagcagcccatcaagaa

SEQ ID NO: 109819 - DNA, 661 bp, Aquilegia coerulea
  Intron number 3 from transcript AcoGoldSmith_v1.005670m (l ocus AcoGoldSmith_v1.005670m.g) derived from phytozome v7. 0 (chr-ID scaffold_34; pos 2005737 to 2006397)
aggttgaagatatagctggtaattttatagctcatcttgttcattctgtagattgataaattttactccagtttttattctacttttcacatgttgttaagatgttaaaatttttgtgattgtacaaagtaaatcaaccatgacttttctaacttaaggaaattcattacggcattttttttttttcatctatcaaatggtttgtatgcttttgcattagtttcttatgttttttactagcatagaatacctccataaatctaaccaataaaagggtttacgaagccagacctaacaattgatatcttaccatttcactgaagttttaccatcctgaaatagtgaaattattaagactaattatcttcagttcatcgatttgggtaagtaatcctgagtgtagcatttctgatatacattcttatttaatctcttttcctctctttcacctcccttggcgtcctaatttttctattcttatttcatgtcaaaataaatcaaattctaagagcattgtttatttatgttcttgttattgtattgatgataagagcttcattagcttacaggtgtttgtaatattcttattcctaaaaaaattatgattccactaggaaatgcagtttttctaagaatttgctcttaattgtttgtagggaag

SEQ ID NO: 109820 - DNA, 864 bp, Aquilegia coerulea
  Intron number 1 from transcript AcoGoldSmith_v1.005440m (l ocus AcoGoldSmith_v1.005440m.g) derived from phytozome v7. 0 (chr-ID scaffold_36; pos 2255860 to 2256723)
agcatacattcaaggtaacatttctcttctggtttcctcttgcacttatgtgaatgaagtatctgcaatataatttcaaattagtctaaaagctgttgaataagttagattcagtttttgattattcatatcatggaactgcaatacttggttattaaaatggttagcttctgtgcatataattgataaatctttattcttttaagctactcatatggttttgaaaggaaagtatctaagtaatagagctaggaagcattattcttgttccagggaaacaaagagagagttcaatatatctataaaatcaaattcagttgctttctagaatagtggaagcaactaactgttggatgttccatatttcctaatcatttttttctttttggagaatgaacaaaattgtattgttttaggtacttctacatgtggtacacttcataattttatagtgtagtgttgttgtggtatatttttcttttcggacagtgagtttgttcagcacttcagtccacatactccttagtcgggtcgtgttttggataagatgttcttattgacagagagaatacctaattaagtattctctctgtcaatagttctaaacttctattaagtgtggaaaatcttgttctttgtgcaatgttcatacacctagcaaaattgaaactattgagtacaattctctttcattaatcacacgccttttatgttcttataagcatacatcttaaactagacatagtacactctaatgtgatgcatacattgcttaatgttccctaccctgttctcttaagttttatcataattgtttttgaaatggcagggactggatcgtgtaattgcagaagctagaaaaca

SEQ ID NO: 109821 - DNA, 509 bp, Aquilegia coerulea
  Intron number 3 from transcript AcoGoldSmith_v1.010362m (l ocus AcoGoldSmith_v1.010362m.g) derived from phytozome v7. 0 (chr-ID scaffold_34; pos 622383 to 622891)
ttaaagtgaggcaaaggtgtgatttctaagattttgttgatatagtttgaatgtagttcttaaggatgtttttaatgtgttgttatcgacgaaatgccctattttttttattctatctctacttatatatacttgaaagcaaatatgtgttgaaaatgaatattcccatgtaaaagaaatcgaggtcaatatatactccccgagataattaggtttatactgaacattcagatgaatggtacaaatcaaatatgatatatgcagataaaactctcagagtcatgagtttcagaacatctcgtaatcattttgaattgtagatactctatgtcagtggtttatttctggttatgcttttgaactttataagcatgaataaatgattgtcttcatcttctcatcttatagattcattgcattgattgttattgcaactttaactttatgaataatagtaacctctagaatactgatgtttattcagggtggtcgctactgcaattacttat

SEQ ID NO: 109822 - DNA, 598 bp, Aquilegia coerulea
  Intron number 4 from transcript AcoGoldSmith_v1.010362m (l ocus AcoGoldSmith_v1.010362m.g) derived from phytozome v7. 0 (chr-ID scaffold_34; pos 622895 to 623492)
cgacgtgtttacacaaggtatgtgaacatatggtgcaaactttctactttctctatcaatataaattcacttacatgttagtttaatactctaaacaacatgataagacattaggttagactgggcgtataaattggggtttgtctataatgataatatagttcccctttttattccataaggagagttaagacttcagtttctaatcttgcctttttggtgtacaacaaatggaaagtggtcgatgcattgatagatatgagctctggtctgatatcagaggttagagagctgcataactttatgataaattactaattagaaagttttgttaaagatagatcaaaaatatatttgcaacatagaaaagctgttataaatatggattctattacattactctttagattctttttgttgagattgtccacacttgttatatccagtcaattttcttttcagtgaacactttcaatttctgcagattgcatgtgtaggtgatcctttctgttaaattcattctttcattcacatgttggtttgatccctatattgtcaattaaaagtgatcttttccttttcttctctcagaaaaagc

SEQ ID NO: 109823 - DNA, 682 bp, Aquilegia coerulea
  Intron number 1 from transcript AcoGoldSmith_v1.003939m (l ocus AcoGoldSmith_v1.003939m.g) derived from phytozome v7. 0 (chr-ID scaffold_16; pos 2955364 to 2956045)
tcccactacaagaaaaactcagtataaggttcaaggtataaaaagtagaaaacccctttatccaaaagtggaagaatttcaataaactcagttatttttacattttttagttttaattatgtaaaatggctaattatatatgttcttatgactaaccccttttatgtcttttgtctaatcccttttgattatataagtttcttgtttatgttcttatttaagtttgtgattttaactctagttcactagctagttggttgaacttggatcatgaaatgggccagttaaagttctttagctagagtttagaccaaatttttaatgaatttgttaagcaaggatcaatttttcttgatcactagagttaactcaatatggtacatatacattatataacctactgatcaattcaaaagattggacaaatttagaaaacccaaggaattctgaaaaaaggactaaaaaatattttataacatgtataaagcaagatcaaccctgccttaaaatgtatatacctaaattcagtttcatacttacatgggatccttttcatcaaagattgcacgatacgatcattttcgttggaattttaagcctttattcttatcattttattgtgatggtaataatgaaatttggtcttggagcagcttgtacacaacaagaggttaataaagtc

SEQ ID NO: 109824 - DNA, 887 bp, Aquilegia coerulea
  Intron number 1 from transcript AcoGoldSmith_v1.003569m (l ocus AcoGoldSmith_v1.003569m.g) derived from phytozome v7. 0 (chr-ID scaffold_8; pos 3599261 to 3600147 reverse stran d)
aggaccttgcagagctcttcttgctgatcttactggtaatttttttttttttttttttcttcttaatttctagattttttttttttttttttttaatgtagtagactagtagtagtaaatttgatgtccttgttagagtttggtggttgaggatttaatgtgcttgcttatgtcgaaatcgacagatatttttagtatgtactttgcatattcattgtttataagatttgatgttcgattggtcataagtgagtctaaggtgctgtttgttgaggatttaatgcttgctggagttaagatgagcaaatagaatgcattttgcattgtctgtaagatttgattttcgattggtcatacatgagtcaataattgagtggggtctaaatcattcaaaggttgtcagacatgtaagcgttagttcaccataattgtaggcataaatccctttatcaaggttgtcagacctgtaatatgatgtatttccgttgctttcgtgattttctgggatatggttagtttgatccctgtttgtagctgctctatgtgttgactttatatactgcaaatttacgcatagagtaggatatgatcgaagtgccttaaaatttaagcagttgcaaacataatctacatagattatattgttatggttctctctattagaggaccagtgaaagcagatgatatgtaattagataagatgctgataaaggaattaatagatagttcatttactgcctttgtaaacagccaagtagggggaacaaaactttcttccctggtatttagcaaatttatatggaaacacctgcacatgctttaatacacatttgttaaaatcagcaatacataatgtgcaacttcttcttgattttccattccagggg

SEQ ID NO: 109825 - DNA, 943 bp, Aquilegia coerulea
  Intron number 1 from transcript AcoGoldSmith_v1.020803m (l ocus AcoGoldSmith_v1.020803m.g) derived from phytozome v7. 0 (chr-ID scaffold_86; pos 103701 to 104643 reverse strand )
ggcaggtaaaatatcatgacttgatttaattaaaggctaaatagattatattatacattgaaatagaacacctactaaagttgcattacatcgtgagaattacctgttttcaataagaacttctttccaaattgattttggtccatatatgttttcaattgttagtctaaggtggttgaaaactataaggattttttattaaaaaaaaaaactataaagatttgacttacaattactatttttttttatgaatgatttactattttagttagttggaattttcatcaatatgtaaaatcatgtaagtgattggtttattaaatgaaattagaattcaaatattattagatacctggttgtagattctagatgtgcaacacctgatttcattaacaatacaacatgggtctggtaaaccatgatatgaataaacattattcagtgaagtccaacgtactaccatctttaccaatggcctgagcattaacatccacaataggggtgccaagtttaaaatgtaatcagaggagctaaccaagctagctaattagtaacatatatttgttcaggcaaattctcttccctagaaacgtttttgtcctttgaaataggatatgatacatgtacctacagacaatatgttaacgttgatgttgagaggtagatgttacataccatcactgtattattattattattattttcatgtattaatttctgttaatatagatgttgacaggctcttaattatctgtgcaagtgtgggtgttatatttttagattcttgacatcttcgactaatattatctattggttatttgattttgcatattcagccatttacacgatagagttccagaaaagaggcttaccgcatgcacatatactaatctttctggatggagcagacaagccagatacttcagtgaaggtaaacaagatt

SEQ ID NO: 109826 - DNA, 821 bp, Aquilegia coerulea
  Intron number 2 from transcript AcoGoldSmith_v1.025867m (l ocus AcoGoldSmith_v1.025867m.g) derived from phytozome v7. 0 (chr-ID scaffold_57; pos 400292 to 401112)
taaaaattttgagaataggattgttggctgcagccgtacgtggtgtgcttataccagtcttcgggctctttgtctcgactgcaatccaaatcttttatgaaccgccagatgaactccgtaaagatttgggcatccatgtttgtactgcttggtgtcctcaatcttgttttcataccaataaagcactacttcttcggagttgcaggtggtaagctgattcaacgattacaatctctgtgttttggaaatatagtctaccaagaaatgagttggtttgatgaccctgcgcattcaaggttcgtttgctttttctatacacttatagctgctccaatttttgtaattccatgactgataaaagttatcttctttttttagtgatgcaatatatgcaaggttatttgttgatgcgacatccgtgaagagtcttgtagacgactatttggccctgatagttcagattatagcaacagtcatagcagcacttataattccattcaaagctaattggattcttgcattcatgggtttgattctgttgccattggtgggccttcaaggatatgtacagatgaagttctcaaagggtttcagtgtagatgcaaaggttggtctccacctcacttttaaagaaacgaataaataattatacaaaggatagtaaaaatcatatatgttagatagagaaacactacggaaaccatgcacgacctttctaaacatgcatgaaagacttgtattgtgtagcaacaatctattatgctcatgcaatacttcaaaattatgccaaaatatactaaatcatattgtatatgcagaag

SEQ ID NO: 109827 - DNA, 550 bp, Aquilegia coerulea
  Intron number 2 from transcript AcoGoldSmith_v1.005536m (l ocus AcoGoldSmith_v1.005536m.g) derived from phytozome v7. 0 (chr-ID scaffold_3; pos 3915328 to 3915877)
gaggtctcacacctttgtgcatcgatagcgttctggtgagatattgaaatcttagttttttgctattttattgattttttttttacaagttttcatatcttaaattcttaaaatatattcactaataataaaacatgcttatcattaagttagaagatatgataaattatgtaatgctatagtaagcatagttcaagatgcagaatttgtgcgaatatcccaatcctttaaatacggtttatgccaatttattgacaccagaaagcaatcaagaatttaagtgtatccaaatccgagtgttgaaatatttaacatttcgatatctgatttatgaaaatcgaatcaattaatggaaatttcacaaaatgttacggcattttgaactatgataatgagtagtcagaactttatatttgtcagaacagatgattgttcttattgttcttattatttgtttttgtgtggtgactggtgaagttacaggtaactatctattttcttaacaataatgtacatattcttacgtttcctttacctgtttcagctggaa

SEQ ID NO: 109828 - DNA, 685 bp, Aquilegia coerulea
  Intron number 1 from transcript AcoGoldSmith_v1.018203m (l ocus AcoGoldSmith_v1.018203m.g) derived from phytozome v7. 0 (chr-ID scaffold_7; pos 6987826 to 6988510)
tgaccaagcttcttcgcatcatcattatctgcaacgtaattattattcaaccctttcaattatcaaattattctccattattcaattttgagtttatttatatataaaaatgttttttttttttttttttttcttatttacaactccttagtgaatagtgaatactattgccatttgcctgaagtcaatttttcaattgaagattttatacatctttacatgaaaaatgttagttatactgtcagctttagatattgatgtttatttgagttagttagaaatgggcactgtggaaattatgattagctgattctcaaaactttttgtctcaattacaattgcttcgatttataaattagaaatttgacaactcctcatcacttactcttctgtccgtattggcgacatagataagaaccatagataggcctggatttttgctcatgttcccatcattgaactcttcaacctatcccacttttgtataagttactgcttcttgcctccttaccatatcatagtgagaaattctgtggatttatgccttccttggctacatactgtatgtatttatgtgatggagttataggttcatagatgtgctatcattatgtgttgaatgcgcacattggcctgtatatactgcacacatgtttattgctttttatggttgtgcaggttatat

SEQ ID NO: 109829 - DNA, 823 bp, Aquilegia coerulea
  Intron number 1 from transcript AcoGoldSmith_v1.003258m (l ocus AcoGoldSmith_v1.003258m.g) derived from phytozome v7. 0 (chr-ID scaffold_2; pos 9978954 to 9979776)
accggcttcattattcttcattggttctctcttgggtaagtattttattaatttcaaattaaaccaatatttcaatttcaactcttaagaaactttgtaattaagtatcatctataatgcaaaaaatgttaggatctgacagggtgcttttcaaaactctagttatttgagatgatttcgaaacagatttaaagctcataagtgataacaaagaatgaattttaatttatttttgataaaggtaacaagattaataattttaaatattattaattaaatttttatgtaaaaccaaaaaattgttttcttgtcagtggtggtaagcaagagtattgtggcaatatcttgatgattgagtcagaagtccctctcttcacctgtccatgcatgttggtatatatttttgatgaagtgtgtggaagccaaatgtttacctgcatgttgcaaacactatggtgcacaaacttggaagctatttagtggacaaagatgaagttggtaccaactgtaatctaacttcaatgaccttcggaacactcactttagtggactcgtgatttttagcactaatttgttcttatacacagtatgtccatggactgtttgtccaaattaataagtgttcccatttatccatttaagcaacttaaccatacacatgaaatcttcaagatgttgtttaatattactgtattcatcacgatccatataaaaaaaatcagattacatatttacatgagcctgtatgtatgtgaactgtcagctaaaccaaatacaataaactatcttgtgttttatactctctttgcaggctctgtggtct

SEQ ID NO: 109830 - DNA, 917 bp, Aquilegia coerulea
  Intron number 1 from transcript AcoGoldSmith_v1.003925m (l ocus AcoGoldSmith_v1.003925m.g) derived from phytozome v7. 0 (chr-ID scaffold_3; pos 108012 to 108928 reverse strand)
gtcattgctggacttgcttttggaatcgtatgtcattttcttaaaaggttgcagtacaaattgtttagctgaatttattgtgtttttcttctgattatgataatatggttatcttattgattgttataagtatccataagactttattgattaaattggtaaaaaaaaaaaattgcttatgtttttattgaaatccctgaaagagtttgattacacaatgagcttgcatatccacctgtgtgttacggttgatggtagggcctttacggttgttataagttctcacaggtttttaatttggaggtctgttttgtatattgagttaagaagatggagaattcatgtaaccatattacaagttaaagtatctgcaactcataagaggtgctgcctaatgtcattcgtcttttgagttgcctccttatgttattgttgtttgagtatgagttccctttcttggtctaatatgcattgctggaaaaattggaaactgcagttttattatctaaatgtaggattgcatagtgacctgagggatggaatcttttttagggatagtggtttgacactgtgacaccatcttccacatgttctgtttgtaacattttactttgtttatgctaacaatcgttctagatcgtaatgttttcaagttatcggtcatatgaaatgctgttataacattctccctccctttttttcctctatcatgcaattcaagttggtttgtggaagcataaagaaacgtcggcatataatattgactatggctagctctaaattagatttataaattttaagtattttttagatcaatttatgtcaaaattgtacataaaccaactagtgtactcttaagtcttactcaatctgaatcagtaactttagaatcaaattttataatgttgcagttagga

SEQ ID NO: 109831 - DNA, 1022 bp, Aquilegia coerulea
  Intron number 2 from transcript AcoGoldSmith_v1.000014m (l ocus AcoGoldSmith_v1.000014m.g) derived from phytozome v7. 0 (chr-ID scaffold_58; pos 1414739 to 1415760)
aaagagaaatttggcatccggtttcagaatttgaggtattcatctatttttcttatatatcaaattatatcactgaagtgcaactctgacacataacaattttactactgggcattgcattataccggtacacgcatgcctctggcacaccaatgtcttttggcagaaagtatttcagttattatctccaaacctcttgttgcaacaagcaactgcaaattgtggaatgctatcatatttactaaggacaacactttctctctcttcaccgcttgtcacaaccgttacttaactcattttctattatatttattatgcccttattatatatctgcccttcacactcacgtattcacagttgtgtcaatcctattgatttttgtgggatataataggcgttgaatatatttgtacgttgatgaataagttgtagtaccctaatcataatggctattggttcatctgtttcgcgagaaatgctcagactccatattatatggactttatgattagaaagtaatggtctttttacttgaactgtgaggtttttttttttttccagagaactacaatgagtgtataagtgtattgccattgggttgagagctttaggtacacaagtcattaagatagttcttaaaaatgatataaagtctaatagcctaatttacatgcatggtggagtcccaccacaatatttgaaactcgagttgcaccttagaatcagagaaatagaaagtcttagaaatgaatgattgacaaacaaatgcacatgaatgtgatagactgcaattgtgtaagcgggtatgaaggtctttaatgttcatgtctgttaagggaaacattgattcagttccacttaggtatggtcggatatttgaatctcatcaatgaaaatatattaaagaatgcaaattagcagtgaagcttacattctctacctgtcttttgcttccctattatttgttgcttctctatgttattcgtagggtttacctttttgaattgttcatgtccatagg

SEQ ID NO: 109832 - DNA, 758 bp, Aquilegia coerulea
  Intron number 1 from transcript AcoGoldSmith_v1.000338m (l ocus AcoGoldSmith_v1.000338m.g) derived from phytozome v7. 0 (chr-ID scaffold_2; pos 9321092 to 9321849)
aagaaacactacttctgatctttcaacttacgaaggtttgaacttgttttctctactttttccagatcaagtgtttttagttcttggacttcttgttactttgaactaaagctagtcttgtttagtaatcaaacaagtttacaacttgaaatgaaacatacggcgatcattttattttgtttaaagaagttgtgaagcttgaagctccatttttttttgttggggtttgagttttctctctgttgatgttccgtacgattttttttttttttttatatagacataccaatttcttttgattttttttaactagattttgatctaaacttcatatatcatgcttttgtagtaaaataaaccgctttcatttccagtcgcaatgtatatgattaaatgattgatccttaaccaagatcatgtgtatatgattgatcttaaaaatatcacattttcggcttgttttgttttaccattggaccagaatgcagattatttgttcctggtttttatcccctccttgttttttttttttttttttttgcattttcttgaatcggaatcaatcttctattaaaaggcttttctttacacaacaaatgcagtctgaggctttttaagtgttaattatttcatcattcccacgaagcacagtaatgttacaattctttatatatactgagttgtatttgcattttgatgatcatttacttgttatttatcttacaggagagtacgtagagtgaggatacgtggaagtc

SEQ ID NO: 109833 - DNA, 907 bp, Aquilegia coerulea
  Intron number 2 from transcript AcoGoldSmith_v1.022829m (l ocus AcoGoldSmith_v1.022829m.g) derived from phytozome v7. 0 (chr-ID scaffold_48; pos 773865 to 774771)
aggtggatgtgttaccaaatttaaaatctatcttactatggctttctcttctctaatacaatatgtatgttttttttgttctatataagttcataagaagtgtctgcccatttcttaccatctccaaaggagtgtctttaaagtgttcaagaagggactgggtttgtccttgttcataaaataggacacgtatttgactgtccgacacatgacccatcatagatgtgtattcgttcaaatcgttaggttgtgaaaaagtatacagtattcgaacaaaaataaattgatgatcataaaatttccaaatgggtatgcattcaacctagcttttttatccatttcattaaaccatttgtcagacgattgaagtcctctatttgaaagattaccttatgctccagaaagggtctaacgatttagttttttcattttctcattgcttgaatgtatagtctgctcttcggaagaatttcaaggcaaaaagtccaaggaaactcacaagctagtcatggagatcaaagaacatcttaatggggttgtaaggtgtttagttggtgtcttttcaggactttgtaatcagttggaatgaaatgctagtctaaatggggttttaaggtgttttagttcgtgtcttgaagtattgtaactgggtgtgtacagggggtttgtgcttattaccgtgctaagtatctatcatgagcacataggctgtaacttctttcaatgccaatagaatacctatttacagtacagaccgagctggattcacagtttctgatgaatatagttttatgttcatattgcgatttaattgatacactattttttttcctctaaattttgaatctattgtatttctgaaaggtcattttttgtataatgttgttaggaagaggatctttttaca

SEQ ID NO: 109834 - DNA, 740 bp, Aquilegia coerulea
  Intron number 1 from transcript AcoGoldSmith_v1.011502m (l ocus AcoGoldSmith_v1.011502m.g) derived from phytozome v7. 0 (chr-ID scaffold_13; pos 635573 to 636312 reverse strand )
ttggttcttcttcttcttcagcttcgacgaataaggtatgaaatctttgataaatacagctaatggagtatttcatatgattttagttgattaattgatttcaactacttttcttctaataattgaactatgatcggttgctgtaactagtttttgatttttatgaaactctagttagggttagtttctcttgatttgtttgaattattaactatttggaacttaagatcatgtgtggaaaagacgatcaagaagttaagtaacttcttcagggcagattggcagaaacacagacatgtgaaaggcagtgaagctcctatgaaatagattgaacttcttaaacataggactgagcacttataaaataggtggtttagaaaagggatttaaaggtttcaaaaggatcatggattggatgtaattggtgtttaatgcgctaaataaccaatgagctatcctactgtgcttatggtgtatttaataaaaaggaagaaagatgaataagaggagaatgaattagagtaatttagtaagtcagcctaggtttctggcacacatcttctaatatcatgcttgttcattactcatcagagaagccaacatcttgtcaactgtccattattattttaatgaatacgctatgaattgtcagatgcgagtgaactttccataattgatggaattttttggtggagctatttgaaggtttagagggagatattgacttgggtgatctgcta

SEQ ID NO: 109835 - DNA, 452 bp, Aquilegia coerulea
  Intron number 3 from transcript AcoGoldSmith_v1.000230m (l ocus AcoGoldSmith_v1.000230m.g) derived from phytozome v7. 0 (chr-ID scaffold_2; pos 4483130 to 4483581 reverse stran d)
caattagtgagaaggtttgttttttcaaattttatccgaattccatggatcctgtttctttcattaccatcttttagctgatctcgaggaaaaacatttagtttgattgaatttatttagccgttagatttgtcttgtaaatggattctgtagagtctagtctctatctagaattgacatgaagaatggcggacccatgaaggattctgtaatttttggcgcatgttagcaatcatgtgttattatgcgcatgtgctacctttttgaaaagtttgatattcaacaaattctaaccccaccttaatggattggtcacgttagttttgggtgtttgggcacaaagagacgagagaatagtttagtgataagacaagtggactaagttgtttttattctggtttgattgatttggtttaggttgggaacttcatacattatctttcaacatttct

SEQ ID NO: 109836 - DNA, 883 bp, Aquilegia coerulea
  Intron number 2 from transcript AcoGoldSmith_v1.004669m (l ocus AcoGoldSmith_v1.004669m.g) derived from phytozome v7. 0 (chr-ID scaffold_48; pos 422941 to 423823)
gcctatcttgctgcacttgccgccttttacgccaagtatgtcttgtttttttttttttgtgtttaagaaacataaattctgaattttgcctttcaatcattgaaccaatgtttcttgttttcttcttcaatatttaagtaataatctgtctccaagttggtaatattcaattatgaattatacattagtactcaaacctacccttgtcttgctaagttgtatgttctctgttgtgatccaaatgaagaatttagattttctgaatatctttaaaagggataaaataaagaaaatgaaaatgattgttcaatttcaaataccacagacctcaaccttatgaagtacaatttttttttttttttttttgttttcttcagcatatataagtattattagttgtttcaattgggtgatatatatatatattcattcatattttactactaaaaattcaaccttatgaaccactaactaatttttttttcacacatatttaagtattagctgtctcaaatgagtgatattcaaccatttgttttgtaaaagataatattcaaatttggatatactttggtgcccgaatataatttttctttagttttataaacactacagagttttcaaagttcctttttgagtcttatatattttattttgcatagtgctcccatcagccagttctttgcatatgaattaattgaaagagttcttaagtgcgcctattttaatatctattggtagatcttcaaaaaaagtttttgcttttacagaaaactttgaatcagattcaaggttagctaagatttcaatattagatgtatgttcattactgatctctacttttttgatattatgtaagcgaagagagttggaggtcggtctg

SEQ ID NO: 109837 - DNA, 1004 bp, Aquilegia coerulea
  Intron number 1 from transcript AcoGoldSmith_v1.013084m (l ocus AcoGoldSmith_v1.013084m.g) derived from phytozome v7. 0 (chr-ID scaffold_16; pos 2883225 to 2884228 reverse stra nd)
aaccagttattagctaagggcctaacggattgtccaaagatgcttaatctctaactttgggtgtgccaccgcgcacccaagcactgccatcaccgcatcaaaatgctatatattgtatgaaatgctttagtttttttatttacataagtctatgcatgtttactaatcttaatctgagtgccgataaaaaagaaaaggtcgggtttatttcatgcttatctatcctataaaaattaacattcaaactcatattagcattggagttgctctaaaaaggtaacatgccgtgttgatatttattgtataatagagagtaattatggttatttacttatacagttcctcagtaccattactgcaaggaaacctacaaaaggaccgttttgatgtttacaaattaagataatatggaaatctacaatctggaagctcacaaactggaggagccaaattttcgcataggagacgacattctttcacactccttcgcagcaggttggtttaggccaaatcgattttaaagcagactgtctctgtctgcctgattttatttacttgaaaacatgtatacattattttgttttctccctgattgcactggagtctacattcaacataatattgcatgttgtgttggtgttggtatttagaatgagcagattgtttgaactcaaatagtagtatttattattaatattattctatttacattaattatcagtattttttgagtgacacttgtagttgtattaggagaagattacttataacaagccatatcaaacatagatagatgtttctaattaagatatctagtttatttaggaaacctaaaagagcatatataaaagaaaaaacctaaacctcttttcttcagtcttcctagttcctaccaccccttctcttctttcagtactcctgtgagatttagacaggaagaagatgtcgattcagacgaagatcccaaagtggtctgaacttcctaaggaactccttacgatcat

SEQ ID NO: 109838 - DNA, 797 bp, Aquilegia coerulea
  Intron number 1 from transcript AcoGoldSmith_v1.020662m (l ocus AcoGoldSmith_v1.020662m.g) derived from phytozome v7. 0 (chr-ID scaffold_34; pos 2571925 to 2572721 reverse stra nd)
aagtcctacttcgacaatttgtatgagttgcaagacaggatttagtttcctgcgtccgggtgtgaaacaataattgactgaatgagttgctagttgttctaatcaatatcaataaatattgggaattgtgaattcttggccgaattgttactagtatgccatgatctggtcatggttccatttatgcattcttagttgcaggcaatcttttgtcctggtttaaattggcccactaatatatccgtattttttttctttgtaattgatgccattttctaaacacttaacagatcgaagataacagaatgttgtagctcttatctgtcaacagaatgttagcccccccaccccctgccgatatttttgttaggttaaaaaggaacataatcttgtttacgtttggtttagctttacttctacattgcccctccttccgattaaatcacagccactagagttcgtctgtgtcatgtgtaacagataagagacatgactcctgactcctcatcattaactagcacttgtcattttcgtagaaataaatctttttacgacgttcaaaacttcaaattttggtaattgcttttattagtaaatcttcgtagaatgttcacatgtctaaatttggtgcaccaacagcaaggctatcacaactaccatattttgattaaatctgtaatgatcgcattgatataattcaatattgtttttgatgtatgattaattataatatctattggaatagtataatttacagtcattcttacttgtttataggtttaacgaatttggtgttg

SEQ ID NO: 109839 - DNA, 955 bp, Aquilegia coerulea
  Intron number 1 from transcript AcoGoldSmith_v1.008567m (l ocus AcoGoldSmith_v1.008567m.g) derived from phytozome v7. 0 (chr-ID scaffold_2; pos 9919027 to 9919981 reverse stran d)
tcccgcttgccgcaacaagcagaagacgaaaccaggtagtttcttcttcttcttcttcttcttcttcttcttcttctccttctctctctcatcgctatctgttcactatctctgctctgttatcgttataattctttttatttttttattttttcactagaaaaataatcaaaaccctaaaaccctaattcttaactcttccatcaatccattaaaccatctctcaactttatttttcttcactccaatcattaattacactccctatcaatttaattggtcgaattcttcttaattgtgtgtggagtaacattttgattcaaaatatcatctttaattttataatccaggttttatgttaattttcttatagttgggatttattgtttgtaatgtgttgtttttataaatttgtgtgtgcaataactggttgatagcatcagtttgctcatctcctgttgttcaggcaaaaggggtgtattagccttggaaactgttgttttgttacttgtattggtgttagaatacatttgttcattgaggtgcttataatatgttttaatctgtgatgatttattggtacatgttgacgttgattaatttgtagtcaagttatttaaattggagatatagtaagcttctaggaagatggtttaaatttgttatgttagggcattactaatttgatttggaggaaacaaggatacctttttggcagaatttactggtcagaactttttattaagaacgatccatataagtgtgtgaaactttgctagctaaacaacttccaagcatgtcaacaagttgatctatagggatgtagttgactagcttatatgtactattacagatgtctaaatattttttgttgctttcatcactcatcagttcataaatcatttgaatttggtgtacaggtttcaagttctgcttcttgttgttcttcatcttt

SEQ ID NO: 109840 - DNA, 659 bp, Aquilegia coerulea
  Intron number 3 from transcript AcoGoldSmith_v1.001538m (l ocus AcoGoldSmith_v1.001538m.g) derived from phytozome v7. 0 (chr-ID scaffold_35; pos 345540 to 346198 reverse strand )
agtgacagaaaaggaggtggaagccaaggctcgaggtaacttgcacacaattttgcatcaatccttacttttcgatgtgctgcagtgtccagttctgccctgcatctttttcttatgatgtccacgatatatattaggtcatctgatcgaacagaatgtcaaattaaattttaaatggtattacactcgtttgtgtatttctcagctaaatattcatggtgttatacacttttggtagtcctttgcaagtcagaagagacgtgtttagtctaggttcctacagacagtgaaggttacactgtgctgtttgatgttttgtccttcactgccttttctatttgttatacatgtctttatgaaccacacgaaacaaacaagacatttttgtttaagaagacctttcagtggtcaacccaaacaagtatctttaatgtaactagtatgtcagtatatatatatatatattgatagatgtatggcgttgttccttcactctccacctttgatccaaaatcatttcttggtttatccttgttgctggaattataatatgagatatacaaatagtcagattatgacactgaataaacacctttgattttcattatttgcctatattctaacttgtagattcctttggataggaataccatttactg

SEQ ID NO: 109841 - DNA, 907 bp, Aquilegia coerulea
  Intron number 2 from transcript AcoGoldSmith_v1.021638m (l ocus AcoGoldSmith_v1.021638m.g) derived from phytozome v7. 0 (chr-ID scaffold_13; pos 2843551 to 2844457)
gagctattgttttcaaacagatactaattcaaaaggtactgctatactttctttccttgagttagatttattctttctttggtatgtaatattgtaatgaaagttgatgtgatccccaaatataaatcttccattattttttattgatttcaaactgcctctgacaagttccatgttgtcatactagatttttttttagcctgtcactcataattttcagttttcacatttgatgaaatttcaaaaccaatcctacaattttctcactggggctagaattaaagcttctgcatagcaaagactccgaagtcaacaattattgtaaagaaaaatctgtatacagtacttagaatttgtgaactttaatgttacttgatgaataatgacagaatctggatatagatttccacaatcaacctgatatagctttgctgattaatgtttttgtattagtatggatgaactatactcatgttgtcatcatttctattagattttattatattgttcactacttatcataatcctcaaaatgcaaattttgaagaatggagagaccgtttaccttggtcaagtcactcaagggaaaggcccaaggaagaactgagactaccatttgttgaaattgaaagcttatgcataacttccttaagttagtaaaaaaatgacatctcatgctttattgataaacaattcactgagtataagaccataaactatcctttcatcttataactttctatattttgtttatatattaatatatcaacattacccggcatttcagtagtgacttatcagaatgcttttcagtagtgtcatattgatcttaatttggtggagtgtaaccctttgttttgtatcctacgtaggttgaattttttgaccggtacaaggtgcgaacata

SEQ ID NO: 109842 - DNA, 930 bp, Aquilegia coerulea
  Intron number 1 from transcript AcoGoldSmith_v1.026304m (l ocus AcoGoldSmith_v1.026304m.g) derived from phytozome v7. 0 (chr-ID scaffold_2; pos 3066638 to 3067567)
cggtgctactgcacaactttatatttgaatttcatgtgagtgtatgatgtgaagcgtacgactcggtgctactgcacaactttatatttgaatttcatgtgagtgtatggcgtgaagcgtacgactcggtgctactgcacaactttatatatgaatttcatgtgagtgtatggcgatgatgcgtacgactcggtgctactgcacaactttatatatgaatttcatggattaaaattgatagatttggattgatataatatgatggattggaattactggataaggacttgatctgatattgcagactgattaattgattgattgattaattgaaatagattttgattatttgattattggaactggaaatatgattgacattacggattaccagagaatgatcttgttgatttattgatcactgtgttaaatgttaaaataaattaattattatttataattgttcatctttaggatgcgcggattctttttctgggaattaagatcgaacctcaagttctgtaacttgttggcgtttaacgtcttccattttcccttttcaggatacaagtgttttagagatgaagtattcgataagagcttggtggaggttgtcttgagttgctcataggtctagttggagtttgatgagttgtaaccttcgggcatgactctgatgtatatttatatttatatagtttgtattttgtttagtcttccgctgttaatttagtatttgttgtttattttattatgctcttctgtggtctagaggtgtgatatcacgtgacagtagtgtgaccctacggtccatggaggacatatggagatcattatgactccgttgcccgattttggtctggccagctaggatcggatttcaggggcgttacagcctcttattggctttggcagcgttgcctatcctat

SEQ ID NO: 109843 - DNA, 449 bp, Aquilegia coerulea
  Intron number 1 from transcript AcoGoldSmith_v1.003039m (l ocus AcoGoldSmith_v1.003039m.g) derived from phytozome v7. 0 (chr-ID scaffold_13; pos 1229346 to 1229794)
gaaatcccctttatttccaaaaggtcacttagtttttctcttatcttatgtttatatgctatgagagaaaattttggtaggttatgtaagttggaatgtgtttttagggctttatttgtttgttggtaagagattggtgagtttgccgaattcacagtcaaagattcaaattttatgtgaaaatcagaactaaacaatttgatcgaatttgactaccttacccatcacttctttagtggtatagatagtttagaagatggatagaggataatgtagttgttcagatgacagtggaacattaatgaagataaagtaaccctgaaacttgttgtagagtagacaacattatgtagtactatgtgcactgtttttgccacattattttttggttctgaatgttctctattgaccctgtttttatctgtagaatacctgagtggatcaaaagc

SEQ ID NO: 109844 - DNA, 629 bp, Aquilegia coerulea
  Intron number 1 from transcript AcoGoldSmith_v1.026409m (l ocus AcoGoldSmith_v1.026409m.g) derived from phytozome v7. 0 (chr-ID scaffold_3; pos 5181793 to 5182421)
gcacccatttttaaggttaaattttgaattcatcttacatttttttattataattatgatgatttttactttttagtatatggtttattgaattcatctttgttcaacatcctctttttttttttttttttttttatttattgttcgaagtggtgagctggtggtcatgacatgcttggtcgtccatggtagcgactacatttatttcaaaaataattttcaaaagttgtataatttgaatcaggaattaatacattttatttatatgtaaaatgattcaataaaatttttagggaaaaaatgagtgttctaaaaaactaatagccacatacatgaccatattgttctacaaagacagagactttttacttccaaaagtctacaaacgtttagaaaatgaatttgtcctttgatcagttgtagaatagtcttcatctggttgttttgtatctgcattatgcaataataatgaggactttctccatctcctgaggtaagagaagagatgaaatcaagaagcagaagaacaacacacttgttacttttattacttaccttgttgttcttcttctactactactctaactctccaagtcatctctgctttgctgctgatacaatctcttcag

SEQ ID NO: 109845 - DNA, 771 bp, Aquilegia coerulea
  Intron number 1 from transcript AcoGoldSmith_v1.009027m (l ocus AcoGoldSmith_v1.006371m.g) derived from phytozome v7. 0 (chr-ID scaffold_13; pos 405548 to 406318)
ttgatcctacttccaattctctatcccctaatccggtaaagtttttaatctttaatgaattttcttctcaatgtatgtatatgattgagcattggatctgaaatttgtttcatattgaaatcagaggggtttttttttattcaattaggtgcaaaattacgacttctacaaataccaataaacagcattttatcgataggaactaaagttttgttaaaaaaacagactttaatttgtttgattaagcataaatttgttatggaaagggaggggggagggggggcgtcttttcttagacaatattaatgcaaatttgatttaggatagtgaaaatcacaattttccatttatttgtattaagatcatgattgttgggaagtgcatctattgtatatattcaaatattgtatcatacttctatgaaaattcatacctaaaattgatttagttgtattgaactttcaatttaactcagtaagtgccatatatgattaaatatgcattttgtaatactgaatcagatttataattaatgcctctgttgaactttgtactgtgttagacggaaattatgggatctaggaaatctattttcaatttttcatgaattagatgtggtctcagaattatgtgctcgaatgatatccaattgagctacaattatgcttgtggtcgtataaaatatagattgtatcattgattactagatttagctgttctttctgggtagattgctcaagttaaaagagtgtactgtaccttatgtctcag

SEQ ID NO: 109846 - DNA, 985 bp, Aquilegia coerulea
  Intron number 1 from transcript AcoGoldSmith_v1.017954m (l ocus AcoGoldSmith_v1.017954m.g) derived from phytozome v7. 0 (chr-ID scaffold_34; pos 940007 to 940991 reverse strand )
aaaagaaaaacaaaaccagagcagaaggtaagattttgccgacttttttgtgttcattttttgacataaagcatggccaaccaaaagtagtttattatatatattgtgttctgtaaaattgttctttctctgcagatattgtgaaccgcctgttagacacacacacaccccaatttacagcatacatatatgtatagagcatcctgttccggccattctctatacatggcttctctgagtttataacaggttctaatcacttatataaagatgcagctctattatattatcgagaaaatagcaattttggtccacaaactttcacaaagttttcattttggtccacaaagtttcatttggtcaatttggtccgcaaactttcattttgtttgcaatttggtctcaaatcaagtcataaaccaaataaaagttgcaatcatttgagaccaaattgcaaacaaaatgaaagtttgtggaccaaaatgaaaactttgtgaaagtttgtggaccaaaattgctaatcgtcttatattgtctgtagatgcattaatgcatagatacaaccttgaatctggctgaagtcccctcccctgtactctctgatcagtaagtgtagccttggaacagagtttctaggatgtaactatgtaagtatgaggggtcacactcacaccatcccattgtacgccttttggtagacactgtacacttgccgttcaagttaaaaggggtaaaaattatataccaacacttgcatgctaaactccaacataatgttatggaggggagcatgggacatgggagaagatacaataatctttttggtgattatgtttatggttactaatgacgacctgatgcttgcaggcatacctgccggactaatggccataattggtgagccaatcattctttattttacttagacccctttattatctctctagtatgatgtgaacttacttaatttacttcatctaggtgt

SEQ ID NO: 109847 - DNA, 709 bp, Aquilegia coerulea
  Intron number 2 from transcript AcoGoldSmith_v1.007499m (l ocus AcoGoldSmith_v1.007499m.g) derived from phytozome v7. 0 (chr-ID scaffold_58; pos 822014 to 822722 reverse strand )
ggtgagagcggcatttttaactttgaggatttattttattttgttggtatatagattgttacccaaggcatcactaatattgcactatttaatcaaataagtatgaaatagcttaattggactgattgctaattaaacatgtcactatttatttaattacggtagaatgtcactattatttatctaaatgatgatcactattttttttatatagagatttttgcacttacccctatctaaattttcttttaagaaaacccccaatataaaaaaaatttgaccccaacccctcctttcaagacgtggttgtaggtgaaccgtatagttatttgatgatagatggctcacatacaatcacgtcttcaatatttgatgattatcatgtgatgtgtgtaaagaatagtcgaggattattgaagtttgtatatatacactaattttagtgtataccaagttatgaagttgagattgaaaatgtgcgggaaagaagtgactagaatgtttattatgatagattttccacagaatattaacataataactatcctaacagatttgtttcccttttttttttttatatatattaatcaatttacattcaatttattttctttttaattagttcataattacctcaatattagggatttatatgataacaacattaatttgagagattttactaatacaattacttacaggacttttt

SEQ ID NO: 109848 - DNA, 722 bp, Aquilegia coerulea; identical to SEQ ID NO: 109540
  Intron number 3 from transcript AcoGoldSmith_v1.019072m (l ocus AcoGoldSmith_v1.019072m.g) derived from phytozome v7. 0 (chr-ID scaffold_230; pos 7426 to 8147)

SEQ ID NO: 109849 - DNA, 619 bp, Aquilegia coerulea
  Intron number 1 from transcript AcoGoldSmith_v1.020329m (l ocus AcoGoldSmith_v1.020329m.g) derived from phytozome v7. 0 (chr-ID scaffold_34; pos 1934005 to 1934623)
aggacacttgttggtcaggtatgtatattaattaggtcctatcctatgaacattttttaattaaaaataattcccaaatgaatgtatcgcgcaatattattaaatttggtatatattttgatcatagcctaacatttcatataaatgcatgtcgtttctttactaccacaacctaaaacacatagaagagaaaaaaaaaaatgaattccgagtgttttgagtcattctatgtgtttcaggttcacgtagtgaagaaatagaaggctacattgggaaagacttcaaagatcattgaatgaataaaatgtagaggtgaaaattaagtttgtgaccgtaattttttattttagtggcattagattctcatagagcaacattcctagctgtccaatgaatctttagattgaaatttataatgcacatatacaggacatataatctgatataggattttcatatcagaagtatagacctgacgcttggcaggtccgatagggttatacggcgaaacatctgtttagactgagtgctaataataggatgctacatcactattcattacttgtttagtgtttttttgctttcctaatcaatgaacattgctatttattttgaacag

SEQ ID NO: 109850 - DNA, 655 bp, Aquilegia coerulea
  Intron number 1 from transcript AcoGoldSmith_v1.019481m (l ocus AcoGoldSmith_v1.019481m.g) derived from phytozome v7. 0 (chr-ID scaffold_83; pos 76344 to 76998)
cttgtagctggggtagagcttctctgcttaatctggtatgtaaaatctccaagtaattggatttgaataccaacattggatttgatctgatcatctgcataatatcttatcttgctgacaaacattagatttgttctgtattggtgcaactcttataagaattgaagtagtcttatttattctaatttgtttgcgatatatttttattctgtgaacatgttctatgtgacacaatgctccaatctatatacttagtttcattttacatttccaatggatctttatgtctgacacttttaatgggttaaaacaaaacctctttcgatctgatcagttggtgttcaggtgaaaaacatcaactgtttgatgtcgatctcaatgtattgtttttctgcgtttttaaattgtctgttctatgaactatggtttattctgtttacgtttgattttgattgcacattgatataggtggatttaatttgatttctcaattcaattcagttaatcatattcttggcgtactatattttgggacgatttggcctggtttccttgagatgttcttcttcttcagaattttaacaactttaagtggtgattaatactaagtcattttgttttctatctcaggatctcaataacattattttgttga

SEQ ID NO: 109851 - DNA, 730 bp, Aquilegia coerulea
  Intron number 1 from transcript AcoGoldSmith_v1.017808m (l ocus AcoGoldSmith_v1.017808m.g) derived from phytozome v7. 0 (chr-ID scaffold_44; pos 1585463 to 1586192 reverse stra nd)
tcagactgtcattgttgttcttgaattcactgcaggtatgttagtctgaaaatgatcatatcatacagtctagttttattattaatagggtttagtttgttttgcttttggttattagggtttagatcaatttttcttaatagattattattaggactaactataaatacattgatccatttttttctatatactttattataataattaagcatttaattgtatttaatttatttttttcttggtaaatatatttaacattgtttgagatttaacaatggcatccgttcctaattttgatggaattgctagattgtttagaagtcagaacagcccttatatagttgcggctcagttattgtcacgcggtttttaccattaacagggtttaaattcaaagggaaacagcatgttagtgctacaatgccaaatttcaataaaaacgtcaagaatgtactataatatttacaaactattcagtatccgtaagccttgaagaccataggatacagcaaaatacattcgtactagctacctcaaaatctaatagatcatgttattatttgtttgtcattcataattttatttatattttttggtgcatttcacaactcggctgaagataaaaaatagatctcactaacaaactgggttgctatgtatattttttcattaaacaatgaaaaattggacaggtgcaactttgtgcaaaggagtgaatagaggtatt

SEQ ID NO: 109852 - DNA, 958 bp, Aquilegia coerulea
  Intron number 6 from transcript AcoGoldSmith_v1.023876m (l ocus AcoGoldSmith_v1.023876m.g) derived from phytozome v7. 0 (chr-ID scaffold_2; pos 6442411 to 6443368)
cattgtttgcttaggaagcatttcaagatcattcagttagttttccttcaactctgtatctagattctaaaatagaattggcttccaggtaatatggctttaacatatagaacatttgaactttaatgatggagagggagctggggtttaatagattggaagtgtgagatatctccttttacacttcaaattacttttgatcagttataatatatttcacctctatggaaagaattataataaaatagacaggctatgtgtttcggattataaagagatattactgtaaataattgcttcactctgtttaaacataatggtactttgctttttcctaccatgatcttctgtgtcaaccatatgagatgaccagcagactcaggctccttacgatttgacttcaatcagctctagtattttctccagtctaataacgtatagataattttaggctagaatttctaatgcaggtttcatctctggtactacatggaattttctttgtttaatttgattggtactattttatggttctcagttttttttttcttcccttggtagattatagaccttttaatgttaaagagtatcaaatatctaccaatatattcacataattgagtagggtgcaagtgcatactaaattttacagcaataatcttggttagttaatttcttgcggttcccttactaatatgatcagtttctcgtagatgaaaaagtattaatataaagagcttatgttcttgctataattgaaaaaaaaattgttgtggggaaaatagtgaaacgatcttgatttgattttttcagcaatttcataaaattttccagtttttttcttttgagttgattgggtgaccatttatgcagtaagcaccagtgcttttcattgatctattttacattatgtttccctgtagctggtgttgcgagtggagcaactagagcagcttta

SEQ ID NO: 109853 - DNA, 412 bp, Aquilegia coerulea
  Intron number 4 from transcript AcoGoldSmith_v1.008233m (l ocus AcoGoldSmith_v1.005887m.g) derived from phytozome v7. 0 (chr-ID scaffold_2; pos 9761276 to 9761687 reverse stran d)
cttttatacctttcgaggagaatactcctctccaggtatttgcttaacctttattcattctgcttatatgaacctatgaaaatatttgtttttagtacattacacatcaatagaatagttttgactttaaataaaccagtccttatgcattgttaccaattgatgcatgagaaaataacgtagatacagttgaccaaccttctttgacaatccaaactggagagtagatgttcatatgaaaatggctgtgaagaattatttataacgtaactttccaatagggattttagggttttctttactctgcattcggaaattgaggaggaagtattatcatattattttatcttgttattatgggattgagtaaggcattctgatttatgatttatgctatctctcagagagcaga

SEQ ID NO: 109854 - DNA, 166 bp, Aquilegia coerulea
  Intron number 4 from transcript AcoGoldSmith_v1.009844m (l ocus AcoGoldSmith_v1.009844m.g) derived from phytozome v7. 0 (chr-ID scaffold_58; pos 604193 to 604358 reverse strand )
ctgccttagtccagctcaggtactaaagaaagtgatacatgtctatttcttaatcatatatcaattgggttcttatctttgtttttatgtatgtaaaattctagctttttgattccttttcttgtctgcagactcaaaaggagcttgcagtgaaggttaagatagc

SEQ ID NO: 109855 - DNA, 900 bp, Aquilegia coerulea
  Intron number 1 from transcript AcoGoldSmith_v1.005397m (l ocus AcoGoldSmith_v1.005405m.g) derived from phytozome v7. 0 (chr-ID scaffold_34; pos 971766 to 972665)
ttgtgtttgcttgtaagatttttttctatttttttttttcaattttatctgaattttaaattgatattgatttcgtttgttgaatatctgtaagttgatttgtttgtttgtttttagggtttaagaaggattttttttttttttaaattaaggttttaattaggttttggaaactgttgaattggtttatgatttgatgaatttggataaattacgatgaatgtgttgttaaatgcatagtgaattagtggtggttaatttgggataattcaagctatatatacaatgttacctgtttactatggttgataatgtatttattttctggaagaaaaatgttgcctcataagtaaaactcttaaacaactgctttaattaggtatcggaaacagtcaaattggtttatgatttaatgatttgggagaaaataggacaaaatgtgttgaaagtcactttgatgattaaattgggttaaatctagttataaatcactttaggtgaaaaactacctttctttgataaagtatttattttctggaaagaatgtattgccccattagttaaacttttaaagaactgtcttatttatctctacgtgtagcgtgaaggatttaattcggcgtggattttctgatatgtccatgatggaaaaccccagaaaccttttgttcaagtgtttgtcatttaaacagtgaaaatgagcaatatcttttagctatttgaactaatggatttgttttgatcacaaattgaatcagtttcctgaattgtggaagtttgttccataaacgcttttttatttctttggtttcctttaagtttgtcaatgtatgcctggctaatagaattttttattgattttcagggatcttctctacaagccaattgtacttggtaagt

SEQ ID NO: 109856 - DNA, 583 bp, Aquilegia coerulea
  Intron number 1 from transcript AcoGoldSmith_v1.001391m (l ocus AcoGoldSmith_v1.001391m.g) derived from phytozome v7. 0 (chr-ID scaffold_7; pos 6197193 to 6197775)
aaataaaaggtgagatttctttctttcaagttttctttttcccttgtaaagcttagaatttttcttatgtatctagaattgaatattagtcttcgaaagcatcatttatttgaatcaattttccaatgtggcttcaaaatcagttagtaaaaactgtttcataattttgcatcctttaaggcaatcttgtgattttcattttctttgaatgccttttgatgtcctaatttgtttttaatgtatatttttttactctttaaatagaaagatgaacataagttcaatggctttcactttgtgggatttcctcgtttacatatataaaattttggtttcttctcttttcatggaaatcatattctctgcataagtgtgttagcatagggttatttgtttgtagattttgagatgaattgtgtttatcaccgtggactgatcaggtaccctgtcttatttcccataataggcaactatgactttgattgtattcatcttttgattgtacaatagccaaaattatatcgctaatttatgaagtaaattgccatgcagaaaactcaaccaaactcattcaagctattac

SEQ ID NO: 109857 - DNA, 586 bp, Aquilegia coerulea
  Intron number 2 from transcript AcoGoldSmith_v1.001751m (l ocus AcoGoldSmith_v1.001751m.g) derived from phytozome v7. 0 (chr-ID scaffold_2; pos 7249476 to 7250061 reverse stran d)
aaggtcagcgcaaatatgatttttagtgatttgcaatttagcaatctatgtttccttgattgttttctgttgtctttgaatgacttatggtttataatcgatataatcaagcaattttgcaagagaaaggacagaaggttctatagttagatatactttgtggataattgtgacgaaaacagaatgctaatgtaccgataaaaattaaacataaactttgtagaattgttggatgaggaatggtttgatatgcttgggattaatattacatacaaacatcacttaatgggattctcaaacacgtaatgcggaaaactgtgaaagcctagaggggaaacaagacttttcagcattttgcgttcagtacaacatttatttgaagagcactagttcatatacatgtatgtccactaatctttgagtgacctgagctcaacttaattgttgccactcttggaaaagataaaaaatgataatttgctggttttcgtttcaaaatgttttcttaccattttcatttttttgagtattatgcttacatttcttcaaaattaaaaacaaatgacagctcctggtctgcaaacca

SEQ ID NO: 109858 - DNA, 638 bp, Aquilegia coerulea
  Intron number 1 from transcript AcoGoldSmith_v1.002202m (l ocus AcoGoldSmith_v1.002202m.g) derived from phytozome v7. 0 (chr-ID scaffold_2; pos 6730520 to 6731157 reverse stran d)
gttgttgacctcttagccatcggaaagagatataagtaagttttcttcaacaaatctattgttttgtttaggttttgttttatttttgaatctaagttgtttctgatgagttcttttataaagatgagatttttttcttgctagatttaggtagaatttggggcttttagggattttgatgtttgggtttctaagatttgcgatttctgaacttaatttgattttagtttaatgggtagatttgttctcttttgttcaacctttttatctaattagtctagggtttgagatttatcaatttatggataatttgtgtgtgtgtgtgggggggggggactggaaagtgatgaaacatttggggattttatttttctgatttcattttggattgatgatttgtttagagggagatgttggattaactgtgaagtaccatgtttctgtaatttgcagatttattgatttatagctatcaattaggataatttgtggggaaagtggagaaacattgggggattttcttaaaaattagatttttatatttctgttttcattttggatcgatgatttgtataggggagatgttgggttaattgtggagtactatgtttctgtaatttgcagatttacagctagtg

SEQ ID NO: 109859 - DNA, 741 bp, Aquilegia coerulea
  Intron number 2 from transcript AcoGoldSmith_v1.013443m (l ocus AcoGoldSmith_v1.013443m.g) derived from phytozome v7. 0 (chr-ID scaffold_24; pos 2814564 to 2815304)
gaaggtaactttttttgagggagaaattcccatgtcattggtaactttaagaggtcttgtaaagttagatatttcttgtaacaaattgtccggggagatcccagtatacttagagcagcttcaagatcttggctatttaaatttgtcatttaaccagcttgaagggcagcttccacgcaacgggaatttcaccaatgcaagtttggtttggaaaccataatttgtgtggaggtacggacgggttgaagttgcttccatgcacttaaaagaagacaaataagaaatttgtttctctcaaagtgattatctctgactccctgtaattattgggagcctttccttagcattcttctccctaatgtactcttactgaagacgaagaaaaaaaacattgttcaatagtccattgcactagaaattctcttacttgagctcttcaaagccactgatggattctctgtggaccattgattggtgttgggagttatggacttatgggtctgtgtttaaaggatctttccaagagttccaacagactcgaaatcttcttaacgtcataacgtcttgctccaatgtggatcttaaagaaaatgattttaaggctctagtttttgagttcatgccaaatgggagtgtggaggggtttatttatagaggggctaaaatgtggggggttaagtccaaatttccctaacatagttacattaatgtgacattgttaaatgaattgcagagtacggc

SEQ ID NO: 109860 - DNA, 675 bp, Aquilegia coerulea
  Intron number 1 from transcript AcoGoldSmith_v1.018264m (l ocus AcoGoldSmith_v1.018264m.g) derived from phytozome v7. 0 (chr-ID scaffold_3; pos 2719508 to 2720182 reverse stran d)
ttgtttataacacggcaaaggtatatatatatatatatcttaattttattctcaaaataattggtacaatttgcattctacttttcgttacatctacaagtatttattcataggttttttgcactattaaaatttgatggtattaccttatagtgaaagcaaaaagaagaaagggaaaattagacttaaccccctctattttgtcaacgttttgaataaccccccccccccccccccccccccttttggaattgactttacccttctcgtcactcccgtccaagttaataccgatttatattttttcatcctaaaatacccctccctcgttcttttggaggggttaagtttaagaaaaataagggacattttaagaagaaaaaatgcaaataggtgttaacttggatgacaactgacggaagggggtaaagtccaaacttagacaaatgagggagtttattcaaaacgtggacgaaatagggggttaagtcaaaatttcccaagaagaaatgccttagatagtagaacaggaacaagttgtagttttacattttattcattcatagtcttagatatatgatcctccggagagtgtcagagattttaaacagtaagtcctcatagatagtgatagtgataatggagatataatttgatactgaggtatattttgac

SEQ ID NO: 109861 - DNA, 971 bp, Aquilegia coerulea
  Intron number 2 from transcript AcoGoldSmith_v1.024115m (l ocus AcoGoldSmith_v1.024115m.g) derived from phytozome v7. 0 (chr-ID scaffold_2; pos 8451646 to 8452616)
ggaaacgtagtgagccacttcgtgctgcaggttggtattatcttatattagcttttttatggcatctcttagagcgattttttagaattcattaccttcatcgcatcaagcttacgaacatccaagcttaagaacaaacagagctagttatctgacctgaggctgaggtgcttgtttgaatccacgaagttcaggcatgacctatataatccttttactgaaacacacaatgacgatgcggaaacttgtttttttactaaacaacaattttggtgataggcatgttatacaaaactgcaactacagtaggacaaattaggtgcaatatcaagttagtactagcaaacctgaaatgatatatacaaaagtttcaaattccacataattcattatttagtaagggccgacaatcacataatagcacctattttaagccactgcacctatccactagtcttttttttcctaccttggaaagcattttgctcttccaattccaacataccagtcttgtctaaaacattttcagcacagaattctttacagacttgttttgaagctagctcccacctgcaggttccagtaatggtacagtaatgaattaatcttgctttccataatcaatggcaagttatctaaagtatttaccacacacacaggaacaaacagaattttggcgcagtaactatcaaccccatcatacccataatagggatccgttttagggaagcatctctctggagaacagtatcatgggctaatcgaagaatgctaatgacacttatccacctgagagtcagcgaaccaataaaatagtctcaattgcccatttaaccttaagttatttatgttctaaaatgtctatcatttgttcagcggaagcatttcgttgctgatgtatatggaagtattttgatttgcacccctccccttatcgtggttttggataattgattaataggtgctgcaca

SEQ ID NO: 109862 - DNA, 763 bp, Aquilegia coerulea
  Intron number 1 from transcript AcoGoldSmith_v1.018258m (l ocus AcoGoldSmith_v1.018258m.g) derived from phytozome v7. 0 (chr-ID scaffold_97; pos 474534 to 475296)
tctattgagattatttgtttggaaagtgtttgtaaaggaacaaagtcgcaacaattattatcttctcttaatactgtataattgtaatattttgaggctacaattaacggtcgtattaatcccataacttgtgtaatacattgaagtcatcaaaattgaacctctgaatgcaacttcactttttgatataagtactatattttctgaagtaaattatcacctgttatctttactgttctaattaatcctaaaagtctcttaacccaattagatcatttatgattttatgccacatttgtgcttatttattttaagattgagcataatatgatttgagtatatactacatgtaatattgttccaggacatacctgggatttgattagtggcatgtgtattcttgttaagacaatttgattggtgtgagttccttgtggatagtataatttaagttattaaggggagctgcaacgccggtggacgcacagtttattttccatccaacgtttcttgaaaaattattaatgttagaagccattaattgtttgttacattgaatgtgtcgagctgccttgtgtcgataacaatttgtgtttactttgtcataaagctttttaattcaatcttttggcagaaatgcaagggtgtcgtcagacaactttaatctaaatatgcaggggtgttagttcacatagcttggatttcaatggtaataaattcctatgtttggtgggtgaattgtttcattgtttgtaggagttct

SEQ ID NO: 109863 - DNA, 382 bp, Aquilegia coerulea
  Intron number 2 from transcript AcoGoldSmith_v1.018258m (l ocus AcoGoldSmith_v1.018258m.g) derived from phytozome v7. 0 (chr-ID scaffold_97; pos 475441 to 475822)
agtctcaacactaaaattgaagatcgagccacgtatatttgccgttttctgtagcattattatctaatccttaaattttgaatcatgattcagttcattgatctgccattttttcttaatttcaactactgtaaaaggttgtctgttgtttgttaaaacttcctcaatatgtttgaggattagttcactcattttggcaaaaactgaataaaaataatagatgttcatgtttatgctttcagtggatctataagctcaaaatggaagaacgctcataaattgagaggttgatggttcaaatccatctagatccagttatattatctttcttaattccttaatgtcatggtattggttttctacagtttctgactttctgtag

SEQ ID NO: 109864 - DNA, 1032 bp, Aquilegia coerulea
  Intron number 1 from transcript AcoGoldSmith_v1.002412m (l ocus AcoGoldSmith_v1.002412m.g) derived from phytozome v7. 0 (chr-ID scaffold_13; pos 5058458 to 5059489)
atcattgtcagcatagacgctctaagaggtttaattcttagctttttttttttttttttttcccattgtgtttgatctgtttttattgatttggttcatttggggttggtatccatagaatgtattggttagtgtagggtgtgatgattttgtgtgaaggggtttgggggcgacaaccggtcgattagtagaaaggttttttgatgtggggactggggattggcatggaagacattatagtattaattaagattttaggttagagatagagtgagatcaaagaaaaaattgtggggaaaatgtgaaatatatatttagagactgattatttgtgaggggttgtttctccgtttttgcattgtcagaacttggtgaaattaatatttgattttgggttcaattggatctcgaaaagtgatcaatatcttcatttgatacattgtttgtgttttagagtgcacgtggtaggaaacgatgtgtaactctttgacgaaatgctgcagtaagctaaattcaaataaattttattttactaaaattatgctgaacagaaatcacaacaatttggtcttgttgtgaacaattggcatttttgcctcccatcttgtagttctagcctcttggatactggatttgtctgcaagtcctttgcaatgactttgacttaggtttatttattggctcattacatttatattgtgataaatcgtatgcatttgcttatatgttatattctgccctgtgggaaaggtcctgggtccatgccacagaacccttaaggacaataattgttcagttactataccttagtctgattcttctaactcattttacctgcaaatcgtgcttgtgatatgttatgattacctcctttagaattggctccggacctctaagacagactcgttgtgttgagaatgtagagcttaatgtatgtctaatttgtaattcagatatcacggcttattttatctgatgtatataatagtaattaaaagttctttcatttcagtgcttctgattggaacttgg

SEQ ID NO: 109865 - DNA, 817 bp, Aquilegia coerulea
  Intron number 1 from transcript AcoGoldSmith_v1.017513m (l ocus AcoGoldSmith_v1.017513m.g) derived from phytozome v7. 0 (chr-ID scaffold_55; pos 842176 to 842992 reverse strand )
gttccaaattgcaaactgcaggtagaaataaaagctcttgtatgtcatttgaaaaacgtacaaagtgcattgtaaacagaccatgaagtcatgaacaatgcaattggtgttgttaagcatacaagtggttgaagatgagatattactattgttcaccgaaaacttgcctagtcaaacaactcacaaattgtgaagaagaaactaccctgccaacggatgttttgtgagtatatcaagcatgttattaatacgagaatgaagataagtattgtgttaaggaatagtgatatacatttaatagttgttgatattgatattccgataaaattattgagttagattttcaagttagattatagtttatatttactaagtattccttaatattacttatgtaagacatgggaggaaattgaaagctacaaacatccataacattagggttgatagcgttgagatgtcaccaaagagttttcaacatgttaataacatgatttcagcccaatacaatgagccgatcacagcccacataatcaaccaatatattttccagtgattctcatatgtatattccaacatgatattgagaaagtatgtttgacatacatttacctattataactgaacattactgtatatacattcaagagatggaatgaaacagtcaatcaaacatttctttaactaacatggtatcaaaggtattagagcggttcggtctttggaggtcaaagattcgagtatttgctgcaacattttaaaatttggtactacggcatcactcacccgtgcaatgacattgttctataggtgagtg

SEQ ID NO: 109866 - DNA, 799 bp, Aquilegia coerulea
  Intron number 1 from transcript AcoGoldSmith_v1.001555m (l ocus AcoGoldSmith_v1.001555m.g) derived from phytozome v7. 0 (chr-ID scaffold_86; pos 742042 to 742840 reverse strand )
tctagctttggattcaaccaaggaaatccattaaggtataaacccacttcattttttctcatttcttttaatgggtattctcaaatttttgattatttttgtgaattttctattattatggatataggatttttgcttgttttaagttaagaaatttgttaatttgtgaaaataagaaatgcccattatattttagtgtgattttgcttggtgagtagtataaaatttctattttgatggtgtttgctttgtttgtcgaaatgaagttgtagagtcatttgtactagtttgtgcttttcttatggtttgatctttaattgtttgcttgttggagtgttccaacttccactactctttagttttctcaatactcttgaagatttctcatggtggaagctgagtatacactgtaatgatgaataagtgtaagttaatacctattactcatggtggtgtagtgggtggacatcccttgaaccaacaattttatagtaggaaaaacccccaaggaatctgtctgtctgtctgggtatctctgtatgtgtcagaatcaaggaatcgattccttttgaaagcagtgttgtggggttcagtccaattataagtcaacactagtctgtaatcaatcacattaagctcgtggactaccaaactctgtgaccatgtatggacagagaatgttaatttcacaaagctttaagttgtggactattaattagaatttgtatctagctgaggttttatgtatgaatttcctcttataatcttgcataatgcatatatcttaccaggctaatac

SEQ ID NO: 109867 - DNA, 973 bp, Aquilegia coerulea
  Intron number 3 from transcript AcoGoldSmith_v1.006918m (l ocus AcoGoldSmith_v1.006918m.g) derived from phytozome v7. 0 (chr-ID scaffold_19; pos 1356487 to 1357459 reverse stra nd)
gaagctttcttcctaaagatcacccacttagactggtaatgtaactaactttggtctaaagttttgatccttagtactagtatttcgcttaattaacttgatttttttcttgttaaattctcttgttttttgtatgttaaatgctgcatttcatttgaaccatgagccttttgagttttgtctatgggaattgtgaaagtcgattagccttttatttggatatggaaacatcaaatgtgacagttctgaagtttctgagtgtacaacctttcagaaaaaaattgataataacgtattggattcaagattcacttaagaatccgatgtccatcggcctggtcttcatctcactttagcccctatttataataagagttaattggtgtaggaataattaaatggaagtgtttgcgagtgatcagtttctattttggtagactctcttgggaatgaaagtggcaagttctgtcaaaatcttatgaccaatgaaccaccaagtttgtgataatggtttgctggaattcacctacaccaggccatttattttgttgtggccctttttgtagtatgacatcaatacaacttaagaaaatatttattgtagcaaaattctgtcacatattcttttcaaccatgtaagatgacaactctgcaagtcatgggtgtcacaaatgatattgaagtgttaatagtgaagtgaagcgcataaccatctaggaggacaacacttttgactttgagctaattttattgtgaagtttttttaagtcaaaactgctatgtgaattaattatttgcttccaatatatagatccgggaaagttatatttgaaatctacagactacatttgactagttgcttgatttctagcatgctgagatggaggtacctgtcaatttgagctacaagtaatatgtcatgtgctatggtgaaacaggatcctgaattctatcttcttaaagaagatagctc

SEQ ID NO: 109868 - DNA, 644 bp, Aquilegia coerulea
  Intron number 2 from transcript AcoGoldSmith_v1.007015m (l ocus AcoGoldSmith_v1.007015m.g) derived from phytozome v7. 0 (chr-ID scaffold_7; pos 2558202 to 2558845)
accactgccaatatttcctctttcaggtgccgttcttgttcttactcttttggaggcattcttggtagtttttcggtggtcttttgtgaaatttcttatgcattctctacagaaaatttctaagtagtaactggactagaacctttagtttcgtcaatcacatgtgtttcttagcctcagatttttgttttcagaatactaatgaagttgttgtctgcatttttgagttatattgcagtgtatttaagtagttgttagatataccatttttctttcttcagttgtttttcacaaagatgacattttgttagtcgcctgcttgcatttggaatttgttatgcatttgttgtagtgggatttcagattgttattcttgccatttgccaattatattgatcatagacttgtcaggatgactcctgtttacactctacgcattagttgaaaaacttgcatttaattgatgtacatattgtttaaatagtaacaagtgagcaatgtctaggtggccttttgttgttggcaaataggggttagaccaataactcaattagaataacgtttgaaacatttgcaataataatggaactttctaatcgctaaatgcagttgcttcgaggcctgaagtatctccattccgcaaa

SEQ ID NO: 109869 - DNA, 917 bp, Aquilegia coerulea
  Intron number 1 from transcript AcoGoldSmith_v1.020287m (l ocus AcoGoldSmith_v1.020287m.g) derived from phytozome v7. 0 (chr-ID scaffold_13; pos 4706730 to 4707646)
taaatgtaagtgaatttggttttagaacaagtcggagaagatgatcggaatttagtaggggaaggagatgaagttgtggaaatggctgagctatctgatttagatagttgcctacgtatctgagaatgacttagtcccagaatcaagcccacgtagttcattatataggtgattgggacaacggatagctcattaattgcccaacggaatggtcaattaatgggcggatattttggatctgacaatatattgtaaccgtagagaatcaaaacgtaaagtgtttgaataaggacgatgtagctcgagtaaaagtagctctacgtcgggtgagctcggataaaaatgggcttatgccgagtgaaggcttttgaaggtcggattgtattaacatttgtggtgacgacgtgagctcgagtaaaagtggtgttacgtcgagtagagtcgaatataattgggttcacgacgagttgtgtgaataggtatatacagtttgcatacatataggcatgtctcctgctcaggtattttggactttctcatagtcacatattacaattttggtatcttctacattaaaaggatctccatgtgtttacaatacagatgcaactttttgatttaagaaagaagaaactagagagactgagaaacaaattaagagcacatgcttgtacgagttatatgcattttgaaaatttctttcatctttatttactttaatagagccttaacttgacacagatatgtgaattgaagaagaaataatgtataatactactactaatactttgagtttaattattacaaaatgccttattcaataatgagcttcagcaattagaccatgtaaaaattaatttataacatgggacctgatcgcaggctggtcagcatttagatcaattaccaaatcttac

SEQ ID NO: 109870 - DNA, 342 bp, Aquilegia coerulea
  Intron number 1 from transcript AcoGoldSmith_v1.020176m (l ocus AcoGoldSmith_v1.020176m.g) derived from phytozome v7. 0 (chr-ID scaffold_26; pos 2345555 to 2345896)
gttggttagaaactatatatatataatggtgcaaagaaactcttgcagatcgaaaaacctagagtctatatatagttgattagaaggtcggctccatcacctatctcgaggtttatctcactccaaatccaacggataggatataacattgattcagttcatatatataacctttattttaaaaaacaacttcatattaagaaagcatgattaggtgttggcgctcaaaagtcaccaccacgtcatggagaaatttgaaatttctttccaatccaaattcttatttttgcaaattgcaatgtgggttttcttcccaatcagctgaattagttgttgaagaag

SEQ ID NO: 109871 - DNA, 1036 bp, Aquilegia coerulea
  Intron number 2 from transcript AcoGoldSmith_v1.008232m (l ocus AcoGoldSmith_v1.008232m.g) derived from phytozome v7. 0 (chr-ID scaffold_2; pos 1403363 to 1404398)
ttgaagaattccttcttgctaagggcatttctgcggtattgtttccaactgagctttaattgaaagacaaatttgagaatatttcattgcatacccctttaaacatcttttggtggattggtagaatatgaaattactgaaccttgccctttactctaagaggaaatggttgttgagcatttggcagggttgaggatttggatttggctttggacagaattatagcagtgttgtttttctttaagaacttgttatgatctagggctaaaggaaactcaagatatatatatggacttcaacatttgtaaaaccatctccaaagccatttcttgggcactttggaaggagaggaataagatcatatccaaattggaacacaaggaaagtacatacatgatatacttcttgaagtcataaatcttgtttaatttatctaagagattgacctttagggctgcaggatttcgagcattcagctgtaattgagataccttgtctgtataagggggtgttagttcttttgtgtgttgactgattatgttatgtcttgatgccttgctaatgtaatactatttgcttgtcctgaatttgagattctacaatcttctaaatgaaatttgtgtctgttttatgcttttcttaatggcttgggtaagcacttaaaaaaagagttgccccatatttagtagtttggatagaaaatttaggtaaggttaattctttttataagaggtgggatcgagaaatatgagtgacctaagagttgccacctagtgacatgtcttagtccatgcagatgtcacattaccccctttcacataggcgtatgtaacattgtaacgtttgtagttatgcattctttatattttttatttgagaataaattatcatactgaagtcaggtttctttaatattatacacgtgtgatactaaatactataactgttgtttacttattgatcctttgatctatgcttatatagaatctcttatattacaggagaagatacttgaaattgaatacataaaggctgt

SEQ ID NO: 109872 - DNA, 795 bp, Aquilegia coerulea
  Intron number 3 from transcript AcoGoldSmith_v1.008030m (l ocus AcoGoldSmith_v1.008030m.g) derived from phytozome v7. 0 (chr-ID scaffold_2; pos 5827035 to 5827829 reverse stran d)
aaattgcacaacaactgagaaataagcttacagaggtagctccagcaaactcatttaatcatacttaaatttgatattattgaaactagattttatattttgaagaatttcatatccaccaatctccttgatctaatattctaatcatccagttttagtaactctttatgtatatcatcgaattggtataaccaaggtcggtttcaaaatgtctaaacccagatacttgaatgaagagataaaaacaagtaagaacacagcaagatatgatttgtaaacaacaaacaagcccatttgaatatgcttgcgaagggtgcctttcgaatagggtccgatatggttttccaatttttacccattttgactcttaaaacagatgatcggacgaagatttaaatttcttggcttatgattacctttttttttttttgcataccgcacacatgataccatctattaagaaatgctttctaccatagaagcttaaagtgtctgcctattaggaagagcaccaagatcagagcaacttgacatagttttataatcactatcagaatcttgaagttaatcgagaattcaggagtctctttacaatatcttgagcattgagcaagatactttgacaaaaagtttctgatcaaggaataacgtgttcatatgtttgaagactccagaataatacatgtctatgttaattctcttgtaaaggaagcattaaagagatgagtggaatcattaattgtttgttcactattggaaggttgaagcagaggtgataaagcaacaggattctaa

SEQ ID NO: 109873 - DNA, 535 bp, Aquilegia coerulea
  Intron number 1 from transcript AcoGoldSmith_v1.001887m (l ocus AcoGoldSmith_v1.001113m.g) derived from phytozome v7. 0 (chr-ID scaffold_2; pos 9942945 to 9943479)
acaatccacctgaattcacgcttggtggagtaaaagtgaaaatgttaagatttggttttctttgtatttctttcaagtgaagaactcgaaggctttagtgtctccctttttccatactagtaaagaccttactgccttagtgtctcctcatttttcataccagtaaggcttcagagatgtggctaactactgaagagtttgattgaattaagtttcctgttactttatgtatttataaataattgcatttctatctacacttttgcttaagattttctcatttgttcaccatttatgttaattgcaagtcaccattgcaaatagaatgaaaatatttctgtgagataaatgcctccaggctgactgaaaactctggaatcaggaactaatttatggccttagagcagtatttggtgtaaaagtattagcctccaataaatccttgttgatttccatgttgtactgtttacagttcatttcctgtctccttgcgacatactgaccttgaaaaaataatgcaggactatcatcccga

SEQ ID NO: 109874 - DNA, 750 bp, Aquilegia coerulea
  Intron number 1 from transcript AcoGoldSmith_v1.010451m (l ocus AcoGoldSmith_v1.010451m.g) derived from phytozome v7. 0 (chr-ID scaffold_34; pos 1054219 to 1054968)
aaagaatcacctggttagtttccttgttatttgtttctgctttaagttgtgttcatttttaagatttttgtaggctaaagtctaaaactagtgtttctttgttcaatagaatgacatttttgcaaaaaataatatgttttgattccactttagagaatagtttgtaatgcagttctagtattgttctttatccaatgctttacgcaataccctttttcctcttaatgcattttgtgattcttttttgaattttacatcaattgatcattgcatgggtaaagttattgttgatcttatgaaaaatgtgctgtttcaaaattctgcttgatttctctgcacactgttttacattcctgcgaaattatttttctggttgagagcaacaataattacatatacatggaaggtaaatgaggggattttctttgcttgatcacttgtatattcttctaaaattcgatgaatccagatctctatctttacaagttagtaatttcataaatgacaatagtttcataccaaatatagttatagaattgggggaaaaacattaattaattgctgtacatagaaagattatgcatgtagtctgtaatgtgtcagtgatgggggcaaattcatatattttgcgaagcatgatgtttacctctcagatacatggtactgatattatcatccactttccctctcataggttatagacttatagttaccctcaatctcttttttttcttcaggaacatctcgcat

SEQ ID NO: 109875 - DNA, 749 bp, Aquilegia coerulea
  Intron number 2 from transcript AcoGoldSmith_v1.008622m (l ocus AcoGoldSmith_v1.008622m.g) derived from phytozome v7. 0 (chr-ID scaffold_32; pos 2724754 to 2725502)
gtggtcaattatcggatttgatactacagcttcaggtaattctatcggaacttgtaaattaatggggataaaattaaaaaagctctgggtgaggattattttcaataaggatctttttataaccattagaaaaaaaaaataaaaatacatttatggatgtgcaagaagaaactaagtcaaatttggaagatcccatccaaatatggggacctcatatctatttcatctcataaaactgccttaaaattttgaatgactttcttctctgtggctgggtcttgtcgtgaaagatttatttttatttttttcactccaaatgctcaaacagattgcatataggatcatctccaaagcacctgaaaactaagggtaggcgatacctccttgtgtttgttgtccaagagggacttatgagaagattcttggaaactgattctaggtaactagtagtattatcaacaactatagaaaattagaaattacactcctaaaagagttgcagaatagtctcttagtctctttacgtccattcatagcccaactattcaccatcaacttccctatcattttaaggttgtaatataaagtccatccaaagctaaaatgtttcacaaagaagcacacatatttttcccaaatccttttctatggtctgttggggaattcgaaggtgctttccggaggactttacttatttatattttgtagttgcgataattgtacattggcctatctcttactaggattta

SEQ ID NO: 109876 - DNA, 661 bp, Aquilegia coerulea
  Intron number 2 from transcript AcoGoldSmith_v1.002767m (l ocus AcoGoldSmith_v1.002767m.g) derived from phytozome v7. 0 (chr-ID scaffold_91; pos 284477 to 285137)
ttgccattatcaaggtaaattttatgcaatttgagcttattatttatggttgatttgcgacatttgggaataattatttcttttgaaccctattgtgtaaatgtattatctctttaattgtatggggtatatggtttatcgttggaaaattcatttttggaaaataaggttttgagaaactttggaaaataggttatatgatcaaggtacaaaatatcaatatcatggtgtaccttagaatccgactggactaaaaacaatatatgcacgcaatatgtcatttatattaggacatttttagtgttgatttttttatttaccttgcataatgcgagaaggcccatttaatacgcaccactgaaatggagggagcaggacttctcttcttttctacgctttaagcttcataacaacttgtgtaataggggaaaaaatgatgttaatgatcagttcatagatgtcaagttgtcaacatttatgtgagtcccccattaaaaatcccacatgattgcaagaaactatagtatagtattactgttgtcggtatataagtttcagtaaatttgatatttcttatttggattttgttctttacaattttactgttgattggtcttaagacagatctggttcttgttgcaggacattactctgggaaaag

SEQ ID NO: 109877 - DNA, 798 bp, Aquilegia coerulea
  Intron number 1 from transcript AcoGoldSmith_v1.007996m (l ocus AcoGoldSmith_v1.007996m.g) derived from phytozome v7. 0 (chr-ID scaffold_22; pos 3821907 to 3822704 reverse stra nd)
aacatcacccaggtatgaagtatcatcaatgttttcatggcttccccagttgttatttacttattatcaattgaaccagtcctttggattgaaagagcatgtcatcattcactagaattctgaatggtagacattattcaacatattgcagtttatacaaagcagtttgtttatttgaacaatttatatatgtttttcatccatgtatagtaaattcaggtaaagcaatatatcactattaaggagattgaagaatccgattgctttttatgcttatcgacgctggctggagttaggtccctatcagattgattaatagctcaaaatagacaacctaaaatgtatatgactaatagtctaatatatgaagggtttattttgaatgtctttcccgtaacacaaaattctaggagttttagaggttaggttatacttcagaagaagcgggaaggacttgcttcctaaaattgcgcctccaaaaggggtgaaatttttaggggattggattgcagtcaagaaaacatgtaaaagaggtaaacatcatgtttaatgcctaaaaatttcactcctttacataatgtgaaaacccctcaaaacttccatttacaatgtttgcctttaggcttaaaaaaagtatctagatcaataattctaaccaaaaaaaaaataaaaaaatctgctcgatcttagattgtttgtctaaataaccttgctaccctttcaacattgttgtatctcacaacgtcacatccattaattgcagtcgttcaagtggaaagcattgcagtgaagaataac

SEQ ID NO: 109878 - DNA, 963 bp, Aquilegia coerulea
  Intron number 2 from transcript AcoGoldSmith_v1.020956m (l ocus AcoGoldSmith_v1.020956m.g) derived from phytozome v7. 0 (chr-ID scaffold_16; pos 4084466 to 4085428 reverse stra nd)
tggattgttcgtccttcttggcctttggtggcttggttagaagcaaataatctgcaattgtactatagttgacttaaggtggaaataacaaaaaaattcaatgactacaatcctgtgtagttactccgatcttatgatgttacagtcgcatactctcgttgatgctttctatgtatatggcttggctattcatctctttggacagctttggtaacatcaaagtcactcattacttaacccctacctattgtgtgtgtttgtgtggagatgaaccctcatctctgagacccattcaacattaagagaataggaaatggacacgaatggtctttgttctgattctgaccgtgtgaaacttttcagttcaaattattaggcataagccagtgatgtctgaaacctggtgatatggcaaaacaatgggttgactgcagggtatacaggtggctgtgcactgcatgtgtagaagaaataaggaggaagcagtctggacgtctggtgcagcaacagctgaactctgcaacagcaaactcttggtttgtatctggttgtattttgtttttctgcatctgtaaggctttcttctgggtttaactggcggtgcattgcgcatgccgaccagtattgtattctatggttttattaatgaaacttttaagttttacctttgataaaaaaaaaataaaaataagccagtgatattattttagaagtcttgatattatttttcttttgataagcctctaggtataagagtctgcatctaacatctcttaaatagaatggagcatagggttgaacaataaaggacactggcgagaatttgtgataccagtgtcccgcgtagaaatccataagattgttactagcacatttactttaattaattaacctaccttttacatgccaaggaaaatctttgatgcagtttggccactaactgctgttgggatcgaaccaagg

SEQ ID NO: 109879 - DNA, 738 bp, Aquilegia coerulea
  Intron number 2 from transcript AcoGoldSmith_v1.017852m (l ocus AcoGoldSmith_v1.017852m.g) derived from phytozome v7. 0 (chr-ID scaffold_24; pos 2194102 to 2194839 reverse stra nd)
cttaagttgggagactcttctagaagcttccgtaggtcatcaaagtgttcctcgtgatcatgtattctttcaatcatccgttggatatgatctgagattcggaaatcattatgggtactagtacaagtgtgatgaccaccagaatgatggattgcaaatgcaagtgtatagtcacaatcctttccaacacccttggaggcttggactgggaccaactacaatggtgtttgtgcagacgagcctacttctccatgaataaacattttgtgtgagcaatacccttgctccttgctcaattttttttattacaggttatacaatgataaaatttattggaattcattaagcaaagcccaaacatatgaaataagaaaatggtgaatcaaataccttcctattatttcgaaagtggtgacatcttagagatcaactttcaatgactaatctcagtatcactagatgcgctagattattcataataatattcatgttggagagagttatgatgtttagagagagagagagtccaacttctctctagagttgtcttagccttatctatttttaccataagtagactgttttgagtggttttgtttttttttcttttcatttttcatccaaactttcttgtttgggtaatttttagatctgaatttgtgaatttttgtgtgattcatggcgaattcaatcttcggtttaggtgtaggaagacaacaacctttcttttcgaagggg

SEQ ID NO: 109880 - DNA, 1030 bp, Aquilegia coerulea
  Intron number 1 from transcript AcoGoldSmith_v1.010441m (l ocus AcoGoldSmith_v1.010450m.g) derived from phytozome v7. 0 (chr-ID scaffold_26; pos 2138356 to 2139385)
atttcatcatcatcaacaacaaggtagtatcattctctctcttcttctagctttctttagtaatctctactgtatttaattcagttgtgaatgctgctgcgcctgcatgtaagaaaagatcttagattgaatagtcgttgaccgctagatgtttgtttagtagttttgatttctctttcatcaatcgattagagatttttaaatatcaattcagtctgattttgtttttgtagttcaatttgattttgtctcaaattacaagctgatgatcatgttgatgaatgatgatcaattgattttttattaggtagtagtagtttgatatttagttcaataattcgattagtagtgttttattgacagcgcttgctagtagtttttttcttagaaataattgtataatgtggtgaatttggttaattaatttgatagtttatccttaacttgatgaactatagttttttcttggattgattgatttttgagaaaatttatgtacttgagttgtgtgtgaaattttcattgtactgctcacagtcagacagtctatgtgtcatttgagcgttaatgtgatatgagtgtaccaaaatcgtgtcaaccaataaccagtgtttctctatccatagtttaggagatgtgattttggtagtgttagggcaaaatcgtatagataatgtcagacttgtatactgcacattagagcattcttactctggttacaattaggcaacattaggacaacgtgggatgcagaacagtgatagaaggttgtcaggtgtgaaattgggatttgatgtgagaagtgcgagggtgatgagaaacaatgaacaacattggtgggagcatgagatttttgtgttctctctctcaatgtatttacaagctggacttaggcagaccgacctgttatatacaggccggtcttttcagagatgaggctagattgacacactattgtaaacttgaagatccggttctgttaacctaactagtctaaaaatgaccattgcaggctctttaaagaagaaaa

SEQ ID NO: 109881 - DNA, 647 bp, Aquilegia coerulea
  Intron number 2 from transcript AcoGoldSmith_v1.022040m (l ocus AcoGoldSmith_v1.022040m.g) derived from phytozome v7. 0 (chr-ID scaffold_2; pos 3687543 to 3688189 reverse stran d)
tagacagagtggtatttatttcatcgacaaagctggttatagagaagaactgatgttcacttggccaacacctcccccaacaaagtcatcaaaccaccccaaagctaaggaaatgaggcagattgcagaaacacaaacttagagacttataagatgggcacttatatatatacctgccttggaataattttgctataaattatatagaatttgaattaatttttatttcaacttgtttttttatgtgtgtgtataattatgttgcacaaaatacatgtatctgaaaatgatgatgtgaattttgtgtggatgtctaatcttgaaaaagagatatatgtatatccacaaattcgacactagaagatcaaaaagctttacaaagagattgttttgtgttgatttattcatatatatctcgatatctgatcgatttctaaaaaatcagatacattttgtggaatattcacacatatcaaagatgtaagtgatattgttataagaaataaatgccttccgatcgatctattactttttatgtccttaatattcatgtcacaatttaaaaattccaaagaacactccatatatattacactctaaaatggtaattacaagtttacaactccatatataaattctttggttaa

SEQ ID NO: 109882 - DNA, 661 bp, Aquilegia coerulea
  Intron number 2 from transcript AcoGoldSmith_v1.000903m (l ocus AcoGoldSmith_v1.000903m.g) derived from phytozome v7. 0 (chr-ID scaffold_68; pos 338268 to 338928)
ttccaaatccgaagttgttggtgttgtatttgcaggtatatacttcactgtcgagtagttttagtatgcaattaagttgacaagtagtttcaactttcaagtgtagatgctaattaatctcggcctttagcttgaaaaaaaatatcatttagggtctgtttgattcaaatgaggatacgcaatggaattaaaatttatagtcggagaagaagatagagggagatttgacggagaagttagatctcttcttatttttgttgtgtaattactactctgcccctctaaaagcacccttataggatctttctccagtttcatttcaaatacaaaaattttgcagccttcagtaacatgactagtctgatcttctccggccaactgaaaacggggaatttttgtcagggaaattataacgagtccaatccttatcctgcaaataaatattaaatagtaagacgaggcagagtttcttcagttgaatctgtttagaattgttaaattgtacaactgaaatagatcaatacacatactttaaaggaacaattacgcataattttaaagtagttagaagaatagttagtaaaaatccatgatacaaaaacaatatttacttatttagtttagtacttgattctatcatttacactttgtgataacagcc

SEQ ID NO: 109883 - DNA, 849 bp, Aquilegia coerulea
  Intron number 4 from transcript AcoGoldSmith_v1.007161m (l ocus AcoGoldSmith_v1.007161m.g) derived from phytozome v7. 0 (chr-ID scaffold_2; pos 1842615 to 1843463 reverse stran d)
ggattgtaagaattttcattttaaacaccctttgtttttgctctgcagtatagggagattagaagttgcatagcttagttgtttttgttgagatgctagattatctaaattatccttttcttctttagttcattgaaaatgttacgacttcaatgaaataattgtgtaatactgtatatatttaactagaatgacttgtgctcaagctgtacattctggcgtgtgttttgcctactaatatcatagtattttgcatattcggcacatacggatgtaattatagtgaatgcttcagggtatacttcatttcccaggaaatttttcaatactaaaatcccactgttcagtaaagtaccctcgtgatataggatacatgcgtcggagaatattattactttctaaaactttcgcggggaattttgaattctcccatgtgctccctatttaacttcccagatgaaagatccatacaaaagttcttgagcgtttaagtggaatttatgcttcctaaagcatgaagattctcacgaatctcacctatttaagtggaatttaccattttcctggtgcaatctaagactccctgttcctggtaccttagtttgaagggtataactgtagaagcctaagggtataattttattaatcaccttcattttaacttttatatcgctatagagctggtgtaatgctgccatgatttttgttttattaaaagattttgtcatttctatgatagtcgtccctgatacttttaccacatctgtatctctatctgttactcactgtaatttatcctaagatgtgtgtttattataaattctagggatctagggtggcaacaaagat

SEQ ID NO: 109884 - DNA, 902 bp, Aquilegia coerulea
  Intron number 2 from transcript AcoGoldSmith_v1.006721m (l ocus AcoGoldSmith_v1.006721m.g) derived from phytozome v7. 0 (chr-ID scaffold_7; pos 1565414 to 1566315)
actttgggaattgtttgtccaagcaggtcctgttggtaagttctataattttgccattattactagtacatttacaattactattgaatagtattgcttcaacggaatcgcatagttacattttaggccctgcttggttaccccgcaaaactttgcatgaaatttagcctaatttaatatgcttgaaactcttgataattagttttatgaacaaaatttatgcaaaactttggtgctatttcaaaagtgcaaaaattttacacctttctctaataagtaggggaccatctatgattatctcatgtttatgcaaggttatctcatgtttatgctaggtttaagtgggggaccaatagggtttaaggtaaaataggtgggggaccattcaaatcaaagagtaaacttgggagggaccactctaactatagatgggtaaatatttgcattttttgcagcttaaacaagcagggccttagaagaatgtttttgttgttgatcttatatgaagacatgtttttgttagttagggttccgccttgtataggattatgttttgaaaattctttgtaactaagaaaacaaccattgtctttaagataatctacaagactacaagaggtagtgttaacaaaaatagaaaatataaatgtggatatactaatttttaataatccaaacaagtgttactcgagagtcgaaatatttttattgtgcaactaattattgttttgtgatgctcttttccttttttaagttttctacatcaacaactcattttttatgtgttaggaccaattagaaaaatgtttcaaagtatgaacagaagtacttttttgtgtttagttatttcaaattgtctactcacagactcactgtttatttgacattttttgtttcagtaa

SEQ ID NO: 109885 - DNA, 527 bp, Aquilegia coerulea
  Intron number 1 from transcript AcoGoldSmith_v1.020918m (l ocus AcoGoldSmith_v1.020918m.g) derived from phytozome v7. 0 (chr-ID scaffold_48; pos 1279087 to 1279613)
attgactaaatccactaaaaagaagtcatttttcggtatgtgttgcctgcaaggaaagataaaattgccactacttacaccattaattgccttctgctattaaattgttatacgaaggaagaaattcactggcaagatctttcaggaaagatattagatcctataatgctgctaatgccttctccagtttgggtgtttcgatggacaaacgtattctaaaaggtcgaggaccaacttctttcacaattcatggtcaattgtcccatcaaattggatcgttgttaccggaatcagacaaatctccaagttattcacagctatatatttatgatcctcatattgcattggattgccgacagaaaaggaaccttcacttaaatccagctattctgaaaataattcaagaaactctattggaatcaaatgcgttgtgcaaaatatacaaaggtgcgtatgatgttctgaaatcagctaatagcaatggcggtgaaggtatacctataaggttagcttatacgcccactact

SEQ ID NO: 109886 - DNA, 533 bp, Aquilegia coerulea
  Intron number 1 from transcript AcoGoldSmith_v1.013066m (l ocus AcoGoldSmith_v1.013066m.g) derived from phytozome v7. 0 (chr-ID scaffold_8; pos 4469697 to 4470229)
agagctgctacatttgttcttggtatatatctttctctcatctccttctctttttctttctttagtttcttaatacatacatacatacacatacatacaatcatatacattattgtgatcacatatattctatcattctatgctattgatcttcatatctttgaatcacaaacagttaccctcactcactcaaataagaaattatttcctttatttatttatttgtcgatcaagtcaactccactaaattgtgtagcactgttttagtgcactagaagtgtttgggttggcaatgatctctttttttttgtccattaaatttgcttattttgctattaagcttgttggtcttcctctacatactgtttgagtcattataatgctagttttatcatgatcaatgatcattgtcaaaaaaaaaaaaaaataatttatttgttaatgtgtttatagcttttttttttttttttttttttgacttttgtgtttgtgaggatggtgattttctttcaggccttctagcatttgaaatc

SEQ ID NO: 109887 - DNA, 814 bp, Aquilegia coerulea
  Intron number 2 from transcript AcoGoldSmith_v1.005802m (l ocus AcoGoldSmith_v1.005802m.g) derived from phytozome v7. 0 (chr-ID scaffold_3; pos 3034044 to 3034857)
ctgatccttctttcttgtttaaagttgcagctgaggtatgtggagtttctttcatttgatttttatgcgttaaatttgttccatttataaggtccatgtggttctactgactctacatgtgtatcacagttcaagcttagcaatatattttttttttcttacaaaaaactagcataaggataaaaggttagaaagaaataaaagtcatattctttggatagagcaagattgcttgaaatatattttttaatcgaggaagaatggaagatggtgtatttagcttgtttggcttaagagggaagtcctatagacatatagtattataggcatgacaagattgataacacaatgaagttcggttctaagggtcccatttggcattgctcaagtaaaaacacttcttatttaaacagtttttaggcacaatgtataaaatgataagtattcttcatacaaatgtagttatacgcaagctaacaatttagaaagcaaataacaaattcaataaaaacatgcttgtctaaaagctgcaagtcttgttaaatctgaacttttgtggtgatttattatccttaatttgctgtgtaggcaaatgaaaaaaaaaacagaattgtcgtagccaatgccaagtgtggcctaaatctctctagcaagggctaacctactatgatatttaaaaatggagttactgcctattggtttattaatctgctaattgtagccacatgtttggtttggatcacgtcacttgctatctacatgcaatggttgtacatatattcacttaaaacatgttgcaggtagttattgattc

SEQ ID NO: 109888 - DNA, 542 bp, Aquilegia coerulea
  Intron number 1 from transcript AcoGoldSmith_v1.003290m (l ocus AcoGoldSmith_v1.003290m.g) derived from phytozome v7. 0 (chr-ID scaffold_91; pos 365632 to 366173 reverse strand )
cttaatttcgctcgtgatcgattcgacctcataaggtgataagttttcaactttttgtataccatgtgtttgtacatttgtctttgagaagaattattattgcattttctctttgtttaatttatcattagtactttttttgacttgtttctagtttgatttgttgaggacaattgtgattggaataaagtttggaaatcattttttgcatgttatataatacaaaacatatagtgtctgattggtggaggagttttgtcgaatttttttaatgcccgagaaaacttaagagttgtggcagtgaatttgtggattaaaaggtggttgttgtgcttgacattgttgctacttgctagtagtggggtgaaggctagtggaaatacatttaagtgtccttgaatatatatgtaaaacaatgaaaaagaaaaggcatagtacaagtacacttagttctgcgtatgtctgtttattggtggtatatgcttctcaccaatgcttttgctgcagagacatctctaggaaagacatagcagttattctgg

SEQ ID NO: 109889 - DNA, 460 bp, Aquilegia coerulea
  Intron number 1 from transcript AcoGoldSmith_v1.009103m (l ocus AcoGoldSmith_v1.009103m.g) derived from phytozome v7. 0 (chr-ID scaffold_7; pos 2109895 to 2110354)
gtaatctaattcaacgttgttgaaatcaaaaccaggtaaaacccattacccataattatgtattttttctaaattaggaagtcaagtgatatttgaattagtagttcaattagatattttcttcgttgatgatgatgatgcaagaagatgttatgcaagaaatactactccgtcttccagtaaaatcgcttgctaagtgtacatgtttgtcaaaaaagtggaatgctttgatctgttataaccaatctttttgttataactttatagctaagctttctaaaaatcgtatgttcttgatgggttttttcttaaaaagtgatgaaccaattcatttcttgcctacctcctctcctgaaggatcaaaagttgcgaattcaaagaaaaggaaatgggaaacttttttgaatagtgatgttggttgtcatgtgttaggggatttattcaattgtcctgtagaaga

SEQ ID NO: 109890 - DNA, 1028 bp, Aquilegia coerulea
  Intron number 1 from transcript AcoGoldSmith_v1.021823m (l ocus AcoGoldSmith_v1.021823m.g) derived from phytozome v7. 0 (chr-ID scaffold_16; pos 2107729 to 2108756 reverse stra nd)
tgttggcattagcgcaattttacagaatcgtgtaggtatgcagtatttctgttcctaatctttatcctgaatttgtccttctttgaatagacacagaaacatctttcatgtagctgctgagtgttagcctatggttgtatgaatctgtatttgtgcactgttcactactatgcaagacaaatctcttcttgtaacactaactataggaaaagctacttcatgcacaagaagtgcagattctcaagtaaaacacacaaacaagttcacttccttttataacaatggcagaggataacaatgatcttttttttcccttttttttctcattttattttaaaaatcatatcaagagacgaacaccacatggaagacttttagctcactaatcaagacataactggcctcaagagaggacgttgcaacatttcgacaatgtatggtttgctttacattgttgctcctcctctcttgaatttatgtttagattattttctcaataccactattgaaatgattttagttatggatttatctacagtagaaaaaatgagttttaaaggagttggatgggtttttttgggtatatgtgtgttgtgttggactgttggggggggggggggagagatttaaaagtcaaaacagaacctccactcctctctaaatctatcttcatcagtactccaactctccaagcctcccttctcccccccccgcccttctcacgcttcttatccctcacatgcatttaagtatcctctgcttttggtttcaatctcaaagagaaatatatacatgaacacgaatgttgagtttcgagttaactaatcgaacatagattttatttcattaccaagaaaggatatgtaattatgtatcagacaatattaattttctttatgcaactctcatggagtcatggttaccaagaaagaataatcagctgcccctgagatggaagtgttaaactctgtgcttgtcacatctaatgtgcagcttccacggaaaaacttcaggctcttattttggca

SEQ ID NO: 109891 - DNA, 1037 bp, Aquilegia coerulea
  Intron number 1 from transcript AcoGoldSmith_v1.023219m (l ocus AcoGoldSmith_v1.023219m.g) derived from phytozome v7. 0 (chr-ID scaffold_58; pos 1138021 to 1139057)
ctacccaattctcaggtaatgtgatatgaattgtgttacattgaatttttttttttttttttttagttttgattgctaaattgtaatgtggaatggtttttatttcatcaaatttagattgttttgttgttattgatagaaattattatgatgtcaagtgggatggtctgaaggcttaatctttatatcatgcagatttttatgttctaaacttctaattattttgcttggaagggtcctaggtgtgtcaggtgtgtcatgtgtgtttttctccatttcaatttgaaaactatgcttttttaggttttgcagactaattgggaggattgaaacccattgagaggaaggttacttatctagttaactgaaatccactttttaccaatataagacttttgttaaactgaaatccactgctagactagtataccccaagaggttttaatttaccctaactaataagattgccttttgtgaagttgcttgcactaaacaactacccaaatggttttaaaagaaaggaatatcaatataactctacgggtgaagacgctttaacatttgcattattgttagaccagcataccccaagaggttttaatttaccctaactaataagattgccttttgtatttagtatttacactaaacaactacccaattggtttcaaaaggaaggaaaatctatgtaactcacttggttaatgcgagccactaacattatgagcttgtttattgtttctgtttgtattaaataattacactaatgtataagctccacatggatcccctactaatattcttggcaaggaatattgcttttagttttaggtagccataaaaattaaattgatgtaagctttgtcttgttgctttgtttctcttaaatttataacttcttattgagtttgcatgagtaaacttcgtagtaagcaaaaatttacatggttgttgtgcaatttgtttttttagtccacttaatatggacattgtttttatcaggcacaaccttcaccaacaactgggacttttccatt

SEQ ID NO: 109892 - DNA, 985 bp, Aquilegia coerulea
  Intron number 3 from transcript AcoGoldSmith_v1.001493m (l ocus AcoGoldSmith_v1.001493m.g) derived from phytozome v7. 0 (chr-ID scaffold_13; pos 345763 to 346747 reverse strand )
tggtgcagtaacactttcttttggaaggcactacggtgagttctctgaattataatcaacctaatcgtaattgtttatctttttgatttttattttctaaaattctactttcgttatctatataatacatttgcttggttctgatgggaataacaaaatagtgtttgtgtgaagatgatctcctcgcaacagagacccatacaagatcatcatcgccatcatatcttgagtacctgatcgatacatattaattacctttagtctttaccaccagtccatgatgatgtttgcattgcaatttgtactatgttagtatagaagttgttcttttcatagaggttgttatagctttagcgaaggttgctgttgctgttggtcgttgaggttgtattcttactagttgtagacttgtagtagtagtttttattaggtgtttcttttgatgatcacagtggtcaaggggatgtagtggtgatgtgtataatgttggagattgtgttgcttattaaagaagatgagagcaaaaagctccatttcagaagaattataaaaaattgaaaacattatgataatgatagtgttgaaagtgtacattttgtttatgttatgcctataattcttttgttcttcagaattgatgatctgtgagatgtcatggaaatcgttatctttcaattttgttattgtatgcaaagtttggcctgactcatcatatctaagctctacatttctgaagttgttgtgtactataagtatataaccatgtcctctatgtattcttagttcttcttattaaaaatgtactagtcctcatattttttttttctcatggacctctaactctaagaggcatgtttttagtgtgggtgacctttagtggttacattcttggcagtccctggactccactggaattttaatggttgcatgctgctatatgctttgtacaggtcttgttgggagaaacggtacaggaaaaacaact

SEQ ID NO: 109893 - DNA, 167 bp, Aquilegia coerulea
  Intron number 2 from transcript AcoGoldSmith_v1.027550m (l ocus AcoGoldSmith_v1.027550m.g) derived from phytozome v7. 0 (chr-ID scaffold_13; pos 2463447 to 2463613 reverse stra nd)
ccaagtgatccacatttgagggagcaccttcactggtttgcattacaaaaccacctttttattatcatatgttttttgatttttcttcaatgagaaactctgcttaattattcactaccttcacatttcaattttcaggcttgttacaaacattcctggtactactg

SEQ ID NO: 109894 - DNA, 643 bp, Aquilegia coerulea
  Intron number 1 from transcript AcoGoldSmith_v1.006884m (l ocus AcoGoldSmith_v1.006884m.g) derived from phytozome v7. 0 (chr-ID scaffold_3; pos 5622215 to 5622857 reverse stran d)
ctagagatattatttcttgttctaataataaatcggtaagtttagcttaatttttaatttctttactcaattttcagatttttagatagatctatatgggtttttttgttgttgactttttcttagagttaagagttttttgttctaagcttctttgttgattttgtttttatgattttttttttttttttgtaaattatggatttaagttgaggaaaatgagatttgattatgtgatttaagtagaaattagggtaattgatttgggtaattcagatctatagttgattacttgtttagggtttcaatcaaattaagttcttgacttcttcttcatagtagagttgattaaaggatgatgtggaaagctagaaatgggtactaatctgtctgcgagtgattacttagctattaacctttaatcggaagagcaatcatggaaaaattagcatggtttattaagtaatccaacatattgtattaattcatcatgtttatcaagtaataggacatatttcattcatttggcatgttttatgataatatttattctaaatttatgagttttagcaattgaggaagcatctaacctttagttgtttttgtttttttctggatgtgaagctctccaacatcataacag

SEQ ID NO: 109895 - DNA, 681 bp, Aquilegia coerulea
  Intron number 2 from transcript AcoGoldSmith_v1.009978m (l ocus AcoGoldSmith_v1.009978m.g) derived from phytozome v7. 0 (chr-ID scaffold_56; pos 652767 to 653447 reverse strand )
tggtgagttataacagtggcaatagtttcaaagtttctgtagttttcattcgtaatgtctgtgtacaccatgtttgagccctatgtgacccattttatatgatttccactcctttagccaatgaagttccaactccaaaattagatcatcaacatgtatttagttatttgctcttgaatggaggaaaacctcaacactatcaaataataggtatatagaacagagatatgctcatcgattattttggtctttggccttgaagattttttgtgattccatttaatggtcttgaatcctctaaatgtatgccactgaacttctcttgcatatggtctaacaaacttaaaacaaatgtatatatactgtacgttcaatttcttaagtactctggtgaaccatatatatgagttctttatcgaataaacccagaatattacaaacctatgtgtcatgtaacatcctgcctggaaaatttgttaggtaacatgtggaggttgtcaaagtgcacatgctgcagctgttggtagggactttcatgatgcaattactttgacattatctcctcaatatgaatttaagtttttttttctacttcgttaactacatagaaggtattgttactaaatttaatttgcatatcatgcagctgtctgttgtgctgagagaggattaacatcacat

SEQ ID NO: 109896 - DNA, 588 bp, Aquilegia coerulea
  Intron number 1 from transcript AcoGoldSmith_v1.020308m (l ocus AcoGoldSmith_v1.020308m.g) derived from phytozome v7. 0 (chr-ID scaffold_79; pos 136945 to 137532 reverse strand )
gtctggcccaagcccacaaatagaactgtcactgagtctggcccaaagcccaagatctgaattatcacgaacagcagtcagcaacagagttctcttcttcgttgaaatttctaatcgaaaccaataacctctctcttgctctctagtctctacactataaatcctcgatcattcttctctctttttattaattccaatttctatttttaagtaagttctctcacatgtattaaattaataatttcattaaatctaatatagaatttgatttttcttttaataaactctaactttattagtagttaatttattgatttatttattaaatgattgattttgtcttattagatattgattttgtcgttttgcgaattaaatagtgtgtgtttgtttattcttttgttttgtttacagagatgaaaaaatcgagactcgataaaaattgtcgaaggaatgatactgtattcacaaagaaaactcacgaaggtgcttccggttcaatggttcctactcaaaatgttcagaacaatgatgaagtggaagtagagcctacaccaaaaaaggtaaaattaaattgtatagaaatta

SEQ ID NO: 109897 - DNA, 602 bp, Aquilegia coerulea
  Intron number 1 from transcript AcoGoldSmith_v1.020112m (l ocus AcoGoldSmith_v1.020112m.g) derived from phytozome v7. 0 (chr-ID scaffold_7; pos 6219389 to 6219990)
tagctacgtggcttttgagaaaaaggtcggttctccttcccctctcttctcataccaaactctctcgtaatgaggtttcttctttcagacatagtacaaaatatcgttatcgactaatatatcgatctccaaaaaatagatatatcgggatatattggaatctatcggtggatattttatatggaatgtatcgactaatatatcaatttgttatacaaaatatatataaaatcaaatttggaagtatattttcatagtatttacctaaaaaacatcatatctactaaaaatagaataaacaaattatttctaaaaaaaaaaatttgaaaaaaaataatatttccagaaaatatcgaaaaatatcagtaaatatcggaaaatatcgaatatatcggaatatatcgaaaaatatcgcccgatattttacagatactttaaggcgataatttcgggaatttctttgaaaaacgatatatatcacgatatttcgcgaaatatcgcgatattttgtactatgctttcagagctacttctatcaatggagaacaacataacctaaacactgaggacaagaaagtggttgttgttggttctggttgtgg

SEQ ID NO: 109898 - DNA, 425 bp, Aquilegia coerulea
  Intron number 1 from transcript AcoGoldSmith_v1.026294m (l ocus AcoGoldSmith_v1.026294m.g) derived from phytozome v7. 0 (chr-ID scaffold_36; pos 1508184 to 1508608)
ctctggtacgttcatttagatttttacttttgtattacaatattgttatagttactgaaccaaataaaaaagtagtctcactcaatcatttcagtcggttgggtctctctctctctctctctcaaagattattttgtcactttggccatgttcattcttttgtggattcaaccaagtgatagttagtttcctaacctactaataaacttactttggtagtccttagggacatggttaggttcctaaaggtcatgagagtgaattctaccatcgtcactcataggagataacattatcataattaatatttgtgtgcaattggtttagtaattcttctttgatatgtgtttattgtttataaatcaagataaatcattgtatttattggtggtaggtattttgaagaaagctagggcagctacaga

SEQ ID NO: 109899 - DNA, 490 bp, Aquilegia coerulea
  Intron number 1 from transcript AcoGoldSmith_v1.004112m (l ocus AcoGoldSmith_v1.004112m.g) derived from phytozome v7. 0 (chr-ID scaffold_34; pos 1886743 to 1887232)
tgaggttcatatctacacttcttcttgtgtttcaggtaataattcatgctacccattttgatattttgtcttaaaaggtagaattcatgagttttttcaagtcttcttgattgggaaaattttgaagtttgttgaagtttaatacccatgttttagatttttaagctttgggtatcaaaatgaattgggttcatcttgttattaattatctgaatttctttctgttttgagtatgacttttttttttcccctcagacttttatactaattctgagtgcttaatgcagtaatttgtatgccacattgtatatccaactgtctacaacattgaaagctaaaatttagtttagtttagtttgttacttttattttctctgaataaacgtaaatggagtggaggattaaccccttccccccccccccctccccattcgtatactaagtggataagtagctgacactagtttccattcttgatacatggaagaag

SEQ ID NO: 109900 - DNA, 1047 bp, Aquilegia coerulea
  Intron number 1 from transcript AcoGoldSmith_v1.001602m (l ocus AcoGoldSmith_v1.001602m.g) derived from phytozome v7. 0 (chr-ID scaffold_22; pos 1096508 to 1097554)
gatcattttcaaggttttattaattaaaccctaaacttatagatcatttatgtcttatttttgcttgtttaagtttgttattaatgtgattgctatgtgttttagattcatttcatgttgaattatttggttgtttgatataattgtctatattgtctggggttttgtgggtttaagtagataattaacatttctatttattttaatatgtttttggtcatattaggatatcatttcaagcaattgaaagatcaacagcattgttgtatttataattttgaataaaaatttcaagtattttttggtatttttattggaaagaaagtagtaaaggttatctgttatttaatttgccttattttctaaattatgccacaaattttatgccttttgaaatctcaccatggtggttgtaacttggtttgtctgagtataggacaataacatgacgatcgactccacaatgattataaactataattctataaagaagagtggaatgacgtcagaccttctatagttctactaggttaggaccttgttggaaggttatgattttttgtcctacccagtgtacccatgagcgggtaggataacataagggcaggaaaggtatcaccaaccaatgataaacaagtgtagcaggctgatcgctagtgttctgaaaatgtggttccaatcttaggagttctctttattttaccaaatgatataggaggatttctttaattagtaaatgcttcaaggtttttccagatctgatgtatctcgattttatcgagctatagattcagtgttgttcagacttagaatcacctgactccactctataatgtttaatataataatcgttgaatctatttttcttacctgatatctttatatacataaaagttttgagtttcatgtgtttcttggttttgctgtatattttgcacctttgtactttttacctttacaaaatttgtagagaaaataatagtaattacttgatattttggccttctaccagtttagaagaagcatacgaggcactaagaactttcc

SEQ ID NO: 109901 - DNA, 346 bp, Aquilegia coerulea
  Intron number 1 from transcript AcoGoldSmith_v1.000202m (l ocus AcoGoldSmith_v1.000202m.g) derived from phytozome v7. 0 (chr-ID scaffold_3; pos 4570417 to 4570762 reverse stran d)
atacgcttcgtgtcgtttccaaggttcgtttctccacagacacttcttttctttttgacctccgagtttgattttatttgaaattagacacaccaagatcttgtccaatggaaaatcaaatacattctgaaagttaacaaacaggactatcctatgtattttatagaccaaatatttgtgccccttgtatgaaagattcactgattttatcatggattctgaatttattttatgagatggtatttaaaattaatgtcaaattaagcaaacacaatcgattgcaactactgaatcatggcttttgacttcaggtagctctaaagtttgttatattgggtatcggagc

SEQ ID NO: 109902 - DNA, 730 bp, Aquilegia coerulea
  Intron number 3 from transcript AcoGoldSmith_v1.002151m (l ocus AcoGoldSmith_v1.002151m.g) derived from phytozome v7. 0 (chr-ID scaffold_32; pos 1194287 to 1195016 reverse stra nd)
aagggacaaaaggtgaagagatattccacttactattgttatattcctttctataggattgtatatgtgttcacatcattcactgactgtagcgatgactacccttaccagataaaagggagataactgtgagtctgtgactacaatttggatgaatcatcatacaaacaaacaactggtaacacactcacaagtcacacttattggcatgtctgttacaccaagtactgccaggttgtaattggcatgatctgttttgaccagtgaaagtttgtgtcctacctaagattttaaataagaagtcttaagaaattgtagccattagttttacggccttaaacctaacagtcctaactttcagggcatctaagctacactaaatcactagatattttgtatgaaccaagcgatattctcttgtttgctaataattcacatttacatgtagtcagtatcacttttcctttccatcatatcatctttactcacaacagtaaatgtgggtgattcatttcatttaaaatcgctaaaatctgatcaaggctagggtttaaatttctggtatggtaaataataaccacctaacaaggtcaaagctatggatgatgattttgttattcactatatttatttgagtaattgatggatattgttatatacctttgagacaatgcctcttctattctgttttataggtcagcatcaaatttcaaattcctcgaacttgtga

SEQ ID NO: 109903 - DNA, 427 bp, Aquilegia coerulea
  Intron number 1 from transcript AcoGoldSmith_v1.002151m (l ocus AcoGoldSmith_v1.002151m.g) derived from phytozome v7. 0 (chr-ID scaffold_32; pos 1195454 to 1195880 reverse stra nd)
aactcgaggagattatcagaatcgatcatatcatcgtatgtgttacgcttcactttaattgaccattctttcaatttttcttttccatattttgttcaactagtagtagttaactattttactttcaattttgtattaaattaaatcaaattagctgttttcttgttcaaatttacaagagttttactctctttttttgtagatctagggtgaagtaatttgtcaaaaatctctcaaaattcatttcttattctaatttattaggaaatccaaagcaccaaagtatagaaatatgaaaagggtttaaagtgggagcttattttcgatgaaacataattttcttaaatgtatccactgttttttttttttttttttttttcccgttaatgcagggcctttagaggacaaaacccttgttagtaaatct

SEQ ID NO: 109904 - DNA, 658 bp, Aquilegia coerulea
  Intron number 2 from transcript AcoGoldSmith_v1.015614m (l ocus AcoGoldSmith_v1.015614m.g) derived from phytozome v7. 0 (chr-ID scaffold_2; pos 619963 to 620620)
attatcttcaatatttgaagactctcttctgacaggtgaatgcttatacaatagataacactatacggatatttaaaaagttctgtgttgtatcgaattctgtttctcatgtacaagttatatcaagaaacatttcttatagtgaactggattttatacattaacatgatatgaatggaatccacttgaaagtgagtcaatttgtaagttattgatgaaaaagatctctccgccatggagatcatgttcttaaactatttctagaacttcttatcatgtgatctaatattattgtcataacctggattatcattctacatactcttggtttattgaatgaactaaatttttggtgtaaaacaacgatataggttgtcataggttaaatgtagtggttgtttgtttgatttgattttttgaacttgatctctgttgcgggagttgatcaatgggagtgtggggctactcctgtaagcactaatttcctctgatactgtgtttgtggattttattggcatcaaatgaaattcttgtctgcatataaagatctttatttcgtgctgcttcattaactgcagtagttcactcatttttttttctcaccccctactttctttgtgcagatttcctcatcttgttcttcacagaagctctcttc

SEQ ID NO: 109905 - DNA, 802 bp, Aquilegia coerulea
  Intron number 3 from transcript AcoGoldSmith_v1.001481m (l ocus AcoGoldSmith_v1.001481m.g) derived from phytozome v7. 0 (chr-ID scaffold_8; pos 7323243 to 7324044)
aggtactgtactacattattcatttgtggctgatgtccaatcacgaagatgatgtctttattttgagaattttcaaaaggatgttaattagattctgggcatttgttttctatctcgtgttatttgtagtgctaaatctttatgaaccaaaatttggcagttattaatgatcattattgtaattttaacctataaaactattttttcttctttctttgaatgactaaaaactttaaagtctaaactactaaaactagttaaaaagaccattaatgacaaaacaattcgattagttattcagcgagttcgaaggacttggttttcaaatgattattgatactagggtcttattgcaccgcttcttattaggaaagtattggaggactatgaagaaatgtgcatacaggcagctgttattcagataaagtatattctttgggtttgccgtgccaatagggtagtttaatgacaattgaaagtgtgcataggtttggtctgtaatcagaaagtttgttggttcagaacacaacttaagctaaatgggttagaatttgtctggtacggccatacggtgttaatctcttgttatgctggcatactctctcacatctttcattgaacatgtatctcagtgtcgagttttctttgtgacagtagttagagagaatttcacactagcttttgatgttgcaattctgccttctgtttctttatgtcttcttgaattgaagtgcatgttgacaattgagtgtgcggaagtgttgcaggtagatctagctaagcgccattgctttcctgttta

SEQ ID NO: 109906 - DNA, 745 bp, Aquilegia coerulea
  Intron number 1 from transcript AcoGoldSmith_v1.015951m (l ocus AcoGoldSmith_v1.015951m.g) derived from phytozome v7. 0 (chr-ID scaffold_52; pos 750609 to 751353)
tgtaagaagggtagaaaaggaaacaaaaaagtctttgtgcttgtttgggaaaaactttagacttgttgcttatttaggaaagttgtgcctaatgttgtgcttatttgggaaattacccaaatttgattgattaaaattaaaaaaaataaaaataaaattccaacacgtcactgctcccaactgaaaaacatgcacgaagtgtgtgcatgcacatagtagtagtaatcgaccgactttaggaggtccattatacttcgggtggaaccaaaattcgtattcgtccgtccactttgtgtgttttttcttcttctctcatcttcctctctacttcaacctctctttgttcttcctcctcctctctttctccttccccttccccttccccttccccatctctttctccctcacaacccaaagtaggtccccaccatttcacggttctatatatttataaatgggctatctagctcgacatagttggaatgatagccagaccatcgtatttactagactctagagtgagacaccattaggcagggccaaatatttgggctcatgttgggcttgacgtgatactgtgatagatcgggagggtatcaaaaaccatatacagtacagtagtgtgtgtccgtcttcttccattctctctatcattccctcttctaattcttctccactgaaacgtagagagagagagagagagattagtgacactgatcagggatggcagcggcaattggttggt

SEQ ID NO: 109907 - DNA, 830 bp, Aquilegia coerulea
  Intron number 1 from transcript AcoGoldSmith_v1.016506m (l ocus AcoGoldSmith_v1.016506m.g) derived from phytozome v7. 0 (chr-ID scaffold_79; pos 366318 to 367147 reverse strand )
gggggttacttaacggaaagggggttaacgccaaggtaggacaacattgagggatttacgccaaacccggtcaaaatatagagggtttgaccgagtttcccaaatatttaatagaaatagaaaatagcagtgatagcatctctaattacatgcaaacaagtctaaattttcatttctcttttcaaaacacgcaaacatcttgtacagatttctccaaaaaccaagctataattttattaatactatgtaaaatgcaatcagaccaacttcatttgttaatgacaagtatttcagaatggcaccaaacatatatagactttttctataaccaagttgacatacagtcaaacgtacagatttccaaaatactgtacaacacttcaaagtttgaacaaaatgttttctttgtagtatgtcatgactgccttaacaaaattttgcgttttcaactatttttggcacagctgcctaattatatatttgtgccgtataagtaaattcttagtaagtttgtaaattagggaggatgccaccaaggcacagaccccatgcaagattagtaagtttggacatgtacttggagttggaggtagctgttgtattaagaccacaccaccaaaaaatattacttgttcttttggttacactatggtcaaggtcaactctcccgccaaagtttccctataaaatcccattcaccattcatctttcttcatcaccatcatctcttaagaccttttgttttctcattcaaaaacgatcttcttaacaatctattaagcctctcttttcctatatctgtattctagttacacttttatttcataaca

SEQ ID NO: 109908 - DNA, 396 bp, Aquilegia coerulea
  Intron number 1 from transcript AcoGoldSmith_v1.023038m (l ocus AcoGoldSmith_v1.023038m.g) derived from phytozome v7. 0 (chr-ID scaffold_84; pos 430518 to 430913 reverse strand )
actgtttttgtgagttccttcctatcttcctgatcaaaactatcaatctttaatgcttttcaatggcataggaatggcatatctcaatagcttgtgcatgtttgtattcaatcaaaatacatactcaaaatgattttgttttgtaaattgttttgggttttaactttttgtatacctggatcccttgctttatatgcatctatatgtaccattaaactgttatgtcagctgtttatatacagctgttagtaaaaagttaatgaagaacataaaagtcatcatctcatacgttattgacagtgcacttaaccatgtacaattgtactatgtttataaaagtctacccctgactgatttatccaaatactttttcaggtacaaaaccttcttcagcag

SEQ ID NO: 109909 - DNA, 946 bp, Aquilegia coerulea
  Intron number 1 from transcript AcoGoldSmith_v1.017586m (l ocus AcoGoldSmith_v1.017586m.g) derived from phytozome v7. 0 (chr-ID scaffold_24; pos 2830902 to 2831847)
ggaagtgctgctggattgggagtttttgatccaaggtataggctaggcagctgctgttagcttggataaagggatgctgcctgtttgtaggtctctgttagtcttattgctattttcttttaattttctttgttcttacccgacgatgcattttcaaaatgtaggctgatcaggctttgtatctttattttggttttaatagattgctcaaacttttatcaaaaaaaaaagaaaaagaaaaaaagatctgaagagatagattgagctggaaaatgggaacggtttctaaatctacaactcttggtagcagaagcatcttgtaatctatatacaataatttttatcatattttacatcctcgtaattttctgtctgcgtgaaaataatatttgtgtgtgttcatcctttaatcgtctcattgtcaatacgtttattggtaaaattgtagattgacgcggtattagaacaaagaatgctcaaacaggattcaggaccttaagttttcttgacatgatgattctgtggataaaaattaaagagtgtgagccacggttgaatccaatgaaaaaaaatcaaacaagaccaaaaagatcagtctctatttatgaatgaatggatgccatggagtctatgtatagcattaacgtatgaactggacttagagtcttagacttaatgtatgtatgtgcttcagtgcttgactacaagtctttcatagtaatatttcggccagtgaaactctatacatatatagcaattaaactcatctatacatatgtagaaggcatttaagttccatatatcagccatggagttggttccacatgcaatatctactcagttttctttcaagcaattaatttggttgttctgttttatatgcatgattttgttaagttcattcaaatcaggctcagtagcactagtccaagcttcttcacgaaat

SEQ ID NO: 109910 - DNA, 772 bp, Aquilegia coerulea
  Intron number 1 from transcript AcoGoldSmith_v1.026489m (l ocus AcoGoldSmith_v1.026489m.g) derived from phytozome v7. 0 (chr-ID scaffold_3; pos 6661020 to 6661791 reverse stran d)
tggctcaagtgtacgaggatatagatcaatcgcttaccctaagttctttcagacatttgtaattgatgatgcttaaaaatattattgaataataaattaaagttatgtttgattagttttttttctttttcaagcaaacaaatatattttattgattgactcaaagaattacacaaaagtagaggacaagcgcgctacaaactgcattgcaagccctttgataactatatgttttgattagttgtaagttgtggctgagattaacaatttaaagggatgtagtcgtcaattgataaatttattatccaccattagttagcaaaaaattgaaattttgggccatattttaaagctaaaatatttgtactgtacataacactgtaacagtgtgtgaatcaccaatgataacaattgtgtctcaacgagacaatcgattcaataaacaagtcgataatcaatactgttttcaaatgatagtgaattagtgaataatcaatactgttttaactttgtctctttgttttatggtggtgaatttacaaaacgtggctgttaatagcataagtcatgggtgaagctaatcagagattcagaggtggaagcagaagaacaactatcacagttgacagttccaatcgaaaccctaacacttaatggtactaaatttgatcgttagatgagttcttcggtggtgcattggtaatgtttttctgttaattgtttgcttatttttctagaaatcgattaaaattgtggctagttttaaactgtc

SEQ ID NO: 109911 - DNA, 438 bp, Aquilegia coerulea
  Intron number 1 from transcript AcoGoldSmith_v1.010253m (l ocus AcoGoldSmith_v1.010253m.g) derived from phytozome v7. 0 (chr-ID scaffold_26; pos 1575967 to 1576404)
agagagaagaagaagaagagatagacgatcgcaaggtatcttttttctctcgtcgttgattcgatttcttctcttattaagaataattgtataagaaaacaaaaaaaaaaaaaatctgatctttatatgtttttgatattatttatacacactggtttgttaattaagctttaaaaatcgattttttcatttttttttgattaaaaaatctgatcttttgaattgatttgggggtttggattgtatttgttgtttagatttcctccccattagtcaattgggtcgatttgaattaaaaatttgattttttttttttgggatttaattcattatttatgcaaaatacccatcaaagaaatgtttgatttattgaattataaaaattgaaattaaaattttgatttaattttattgttattggattagaaattggtaaca

SEQ ID NO: 109912 - DNA, 846 bp, Aquilegia coerulea
  Intron number 1 from transcript AcoGoldSmith_v1.005103m (l ocus AcoGoldSmith_v1.005103m.g) derived from phytozome v7. 0 (chr-ID scaffold_2; pos 9094164 to 9095009)
caggaaagaagccgagaattgtgattgtttacagggtataaactttctttcttttgtgctttttaattaattattgtggttaatttgtttgatttattgatgatgtgttgacatgatttgaatatatgtttagggttgttattattgttataataattgtatgaggacctagaatgcttaggttggatagcgcagaagaattttcatttatgaattggtggttgttgtggaatgtttctgaattgttgatgtttgcttttcatacaaaatgttagtcaatttgcatttttgggaataatgggaattctttttatatggtagaaaagtgaccttattgccaatgataatctcattttattcctagtgttgtctgctaaattaggcaattcctttagttatgtcatagcaatgtatttggaaaacattttaagaaatgtgtcttatggacaatgcgatagtgaatggtctgcttgatagtccctatgcattggtcattttgactcatcaacttataatgttaatagaaaggaaagcactgagccactgcctaccaaaaaaaaaagcactgagcaactgattgtagattgatattttgaagttttacaaggcagtgcagaaatgcattatgatgtttaggtgagagaatcttctctttaaattggaaggtatcgtaccaatctctgaagaaataagaaatcatatgaactatttagcagtagcaaatgagataatgattcttcctaatagaatcagtacattatttttgattgtcatctcattgttccctgacagtgtggttcctaatcttttgcctatggtaaatgaatcttctacagggtttcaagt

SEQ ID NO: 109913 - DNA, 1009 bp, Aquilegia coerulea
  Intron number 2 from transcript AcoGoldSmith_v1.004894m (l ocus AcoGoldSmith_v1.004894m.g) derived from phytozome v7. 0 (chr-ID scaffold_2; pos 5087189 to 5088197 reverse stran d)
ttattcacctggtaattgcccacccgatttttttttcttgcccctctgcggagctttaagttatatccagatgatgatgttatatgtaaatacttctatcttcttaactattattgattgggttatacaagctaagtaaaggatgaaggttatttatctagacagttacagtaggtagagtactttttcacttctaggtgataatataacttctggttgacccactctgcatggatcagcaggtccatgttaacctggagaaatccttggtctcagcatactgcattgggggatataacatgaatggtacttcttttaactgctcttggcatgttatgcttagttcaagttgtaggactgtagacctgtatgtttatctcaaggggtagaatgcattgccttattcatccttgttttattaggttagatccactgatcgaaaaaacatcgcatgtttcagttcagacattaaagttcttggataaggcgatattggctggatgttagtttttagatggtcccttttgataccacaagtcttttctggtaaaacacagtttcatgttgcaaggcaaaacttaagtgtcaaaatgaaggttcaaaagtcaagtcatgggacgggctgatccgtttttttttggtaaacaatattgggaagggctgatcttgtctttccagatttaggataagagctgggtggacattttcagtttgtgaatttctgtttggagatgactagacgagtaaatgacatcctatgtgttgttccattttgactcgacttttcaatttagcttcttatgtacttttgtttgatgcttgtattgctagttcacgttttatgtttgtgtttgttaaaatactcaaggtgactttcactttgtaagagaaaatatttccgagttaatgatataagtatatcttctgatgatgtagttttttctgtgcaattgtctaacaatattatgctctaggttttctctgcctttgggtttgtgcacaaaatcgc

SEQ ID NO: 109914 - DNA, 792 bp, Aquilegia coerulea
  Intron number 1 from transcript AcoGoldSmith_v1.027147m (l ocus AcoGoldSmith_v1.027147m.g) derived from phytozome v7. 0 (chr-ID scaffold_8; pos 7202880 to 7203671)
gactaacactaacagtgtcatttggagagaaactggtaaacatggaactgatatgaagaagacgatttataacgacacatgtaccaatcattataggcagcttgccgagatcacgcatccgttttgaacatatagagtgaaatcagatgtaggattcttaaagaggagcatatctgggaaaaacaacaggtcggtgaatttgatcttcttcagcaaatccatggaaagaagaagatgcaaattaagaagaaaacaatactaattgagtcacctgaaacttgatgatgaagcttcggagataagagaagagtttaatttggtttgaattcctagcaacacttgatgaggcttcgcagagaagagaagaaagagtttaatttgttttgttttgtttcgttaggtttagtttctaattatatccccaccgtcagattaacaatttatatcctatggtcttagttgtttcctaatctctgatgtccatctatatcagatttaaaatcagacggtctaaaatatttttcaaaattgtctttcgtcaaaactgtctccccaacttatgtaccctttgtgtcttataacttagattaaagtacaatacctgtgatatataatatcataaatatcactgtggacatataggtgtgctttaaactcaaaaaccgtgatatatatttatgccaaaaatatatatcacaataattatagaaactgtggtatataatttttagcaaccgtgatatatatctacttttttgtagtagtgtgatcttctccgtctaggcaacatta

SEQ ID NO: 109915 - DNA, 883 bp, Aquilegia coerulea
  Intron number 1 from transcript AcoGoldSmith_v1.008651m (l ocus AcoGoldSmith_v1.008651m.g) derived from phytozome v7. 0 (chr-ID scaffold_7; pos 214962 to 215844)
caacaaaagggagactgtaaatattgctggttttggtatgtatgaaaagtatcttagatccatcatagtatttttttgaatatgtatagtgtagaagtttgtttgtacatgttctcatctcatatgtgtgatatttatgatttcttttcaaacttacacattttttatttatttgaaatttatttagccactccctgtttcattaataaaacgactatttagccaaacaaataacggttttaaatggtttattagaaggttacgacaattttaaattttgtccatgatgatttgaacgatgatgtgcaactcttcgttttatgtatttttctgtacacaattttgcaaatgtatccccctttggatgctccagtatattgtcctgtttgcaaaggggttataatgtagttatactattcaaacatcactgctttttcttcacagcttgaagttttgtcactatttatagtcaaatatgatggataagacgatcattcagattttcactctggatttcttgaagattgatattgtttacacagtagtaacaaatccctatattcacaattgtaaatagtagctaacttttaaaacaactaaagtgacaacatgaccataggcccagcgtgtaatttcaggctatacaactggaaaaccactaaagaacaaaataagatagactgtcccgtaatcatgtgtttgactattaattagatgaaatatgtactcgtggaaaggatttttttttccttttaatgtctcatttttttatgaagtttatagattagtgaagactctttttgagcaagaatgtctctgtttcattagtaatatatttaatgttgtaggacaagatctcttacttttaaaagagaagtttgca

SEQ ID NO: 109916 - DNA, 623 bp, Aquilegia coerulea
  Intron number 2 from transcript AcoGoldSmith_v1.012130m (l ocus AcoGoldSmith_v1.012130m.g) derived from phytozome v7. 0 (chr-ID scaffold_84; pos 92315 to 92937)
gtctacacactcaggaggccagcaaaggtaggtgttttccgtccaaattcttatttgttttcttttagaagttggattattagcagacactcttctctgtcaagaggaatactattaaaatgttgtttgttagaccaacatgagggtttaaaaccctctccagcactctattttggcttcttcttgcaaagtgggtggagtcatttgaatcattgtaattattcttccctgtagcctccgcctttgcataaagtggcagtgactcttcaactatacaggaagccacagttaggggttgcacctgtgtctgatgaacagagacaccctagactgcactcccggacacacttctaacgatgaagatggttgggacaatatgttgatggttaggaaaatggacatttggataattgttgcctcctttcaataaaaagaaagggaaaaaaaaaacacttattttagaattgtatgcgtctcactaactcactaaggacttcacaagttggggatgtgcgtaaaatactgacttgatcatccaacaacttacacatatgttatccaacaatctgacttttctttactgtctatattgcttctcattatttagttctttctgcagcatt

SEQ ID NO: 109917 - DNA, 875 bp, Aquilegia coerulea
  Intron number 1 from transcript AcoGoldSmith_v1.014651m (l ocus AcoGoldSmith_v1.014651m.g) derived from phytozome v7. 0 (chr-ID scaffold_2; pos 4080090 to 4080964 reverse stran d)
cagttcactgtgtgctacttccaacttccaagtatgttagatggtgaacttttttactttttggtttgttacaatgttttatggaattatgggttgatgtgagttccagttttggtagtcacttttatacacacacagaaggcttgataagtcgtgaaatgtcttcaaaccttgagaactgagtgctcgagacggttcattaccataatggaagttatagctccctctcaattgacctggggttttccttctctcttattactggacagatattggtaaatgctgataaaattttcaaaagcacattcaaggaaagctggctgagaacacactcaacacagaatcacagattttggaatggcagaatgcataattcaaagtttctaaagagttgcattaagaaagaggaatgggattagttggttgaaaaaattgttagcaagattaagatgagaaaggttagggagctagttgacataatgaaggataaaaaaaaaagttgaaataatgaaggagaaattaacttcaccagaaaaaggcctaaaaaggttaagagaaatgactgaagaagaaagtttagaggaagaagaacaagtaataccagtccagttacaaagatgtgtgtttgaagtattagaccaagaagagagctagagttcattgggtcttcaatggaactcttgaaggtgattaaaatgtttcttataatgaagtggtaccgtcaaagcagttatttgggtatttcatcatcaagaattactagaggaacagtacttatggctgcacaaagggatggttcattagtttattatagaattggtggagatcaatgtgtgtggacatctgtttctccaggtactaagaaactttttttt

SEQ ID NO: 109918 - DNA, 639 bp, Aquilegia coerulea
  Intron number 2 from transcript AcoGoldSmith_v1.001049m (l ocus AcoGoldSmith_v1.001049m.g) derived from phytozome v7. 0 (chr-ID scaffold_34; pos 1795392 to 1796030)
agctactgttgagcaacagtttgacgcggctcctggtatttctttcttcctgagaattaacttccatagttccatgtactgcttcatacattcacgctgtatcctgtttctctcaatgcatgaattgaaactttccaaaggctagttagtagttcttttcccccggaaggtaggtaggggtcaagatatgctagttgcctagttcttcaccttttttcactagcagttgatttgattaccaaaactccaaacccatttcctgctaaggccatgatttgtttctttaaatgcctataatttgtgtcctttttttagctcttgtgtgtatatatacatcttgtacctgttgaaatttctcatagattaggcgattagctaaagcaaacacccttggaagcttaaatagaaagaacaatgattaaccattgattaccagactggtgaagtgtttattttaactcacatttacctatttgaggtaatggcctcatatatcttctcaaccttgcagatttatatgtgcacacacctcacatctttagtctctaggtgcagtgaggttgttttgttacagttaaaagaacctgttctgacaactttattatccttgacagcaataactactgaagaagagaggtt

SEQ ID NO: 109919 - DNA, 308 bp, Aquilegia coerulea
  Intron number 2 from transcript AcoGoldSmith_v1.025856m (l ocus AcoGoldSmith_v1.025856m.g) derived from phytozome v7. 0 (chr-ID scaffold_93; pos 470299 to 470606 reverse strand )
ttgaggtcagcattttttgctcaaagggattctttggatcttctgatatatgagctttagcaactctgtttttcaataaattgttttacatggagaaactatataatatctagcactctgattggtttgtcggaaatggtggggaagttaaacaacttggttcaagattaacttaattctattatgaaagtacacataatattggtgcaaatactcacatgttcatttgtgataattccttaagaaaaaccaaacaatttatttcttatgcaggctgcagaagacgacaagccccattatatagggaa

SEQ ID NO: 109920 - DNA, 1064 bp, Aquilegia coerulea
  Intron number 1 from transcript AcoGoldSmith_v1.020910m (l ocus AcoGoldSmith_v1.020910m.g) derived from phytozome v7. 0 (chr-ID scaffold_19; pos 3406730 to 3407793 reverse stra nd)
atcttggctttgctttacctccacctcctacccaggtgctcaaactcattgtatttctttgtagacctaatatatcttattttattaaaatacagtagtttgtttttattagacagtgttgcttgggtttattttcctttagggtctgtttgattcgggcgggaaaagagtttaccgggaaatagatttaccatgtgcaaatattcgggaaataaaattttgataaaatagttataatgctacattgatcatgaatttttttgaaaaatcatttaaatatgtttgtagtgagagttcgacaaaattgagctctaatttgtcccaacattttaacttatcatgtcattttaaatatttaccgcttactttccatttaatcaaacatgggaaattaagatttcccggaaaatctatttcctggactcgaatcaaacagaccctaaatagttaagattattatctagtattatcccataaattgtaattagagaaattgtagttgtcatggtatggtagaaagtataccactaccagtataggtaaattcatttgtatagatgagagacagatatgttccttcctcccttcccctatatatccccattgtagtaaattcaatttcaagaatttttttcatttcaaatcatacaaggttatgaaaaaaaaaattaatcagatgattttattgctcataccaccttgatgcctttgccttgcttccactgctaaactgtctctgtttatctccttataactacttgggatatcataaaataatgtacatatgaaacccagatattcgagatgaatttttgaaagccgaaagaatattctggaactaagactaattacattttctccgcttatttccagtgacgatcctttatatatatgtaacttgcaaacacactttgtgctactgttattcccttatgttttttttacttttctgataaatgctactgatatttatattcatgtggcctctctttcttctatgactcatcagctaactccattttaatgtaggaggatcttcaaagcttatccactaccacaggtga

SEQ ID NO: 109921 - DNA, 652 bp, Aquilegia coerulea
  Intron number 2 from transcript AcoGoldSmith_v1.021451m (l ocus AcoGoldSmith_v1.021451m.g) derived from phytozome v7. 0 (chr-ID scaffold_7; pos 5128382 to 5129033)
tggattggaaagcccataaaatccaaacagtggaggtaaaaactttatcaactactttatagcctgatattttataacaccataagtgtttttataccgtttttcgctaaaagcttcattgaccttggttcttgccttcaatttgatgactcgtttgacttatattaaatttgcttgaagacatgcagtatatcgttgacaattaatattcatgcagggattcttattatatatttttatatcaatattatacatgtattttaaactgagattctgttaaagatgttaacttcaagtaagtgaccactgcatgcttgaaagttgtttgacttctacatatacagttttttctaagaaggagcaaagcctccgtccaagccatgaaaccaaaagtattttttatatttaatagtttagtttgtctccatgtttgcctaggattattattatataagttgggttttagagctttgttttgatttgagaattggatatcacagaattgcatttcgggttcatattaagggcttcactctctttcatgttggattgttgttttttctttctttatttctttttttgtttgttaaacattgtatgtatttggctgtgtgcagaggcgcaaacatatacaaactgaacttgagaaatc

SEQ ID NO: 109922 - DNA, 685 bp, Aquilegia coerulea
  Intron number 2 from transcript AcoGoldSmith_v1.001158m (l ocus AcoGoldSmith_v1.001158m.g) derived from phytozome v7. 0 (chr-ID scaffold_22; pos 2529776 to 2530460 reverse stra nd)
gacgacttatcaatttgtaattctattctctttagtatatgcctttgttttcatcttgtgccgaaaatgctaattttactttcggtagaatgcatagcgcggggggttatgaagttgagagatgatgagtttggagagatattgtttggatttgttgcgataaatatgctattttacgtttcacgtgtcgttgattctataccagttttagtacaatgtttaagaggtacttcttatggtattgttttggaaactgacagtcaacaacttataactctcctaagtcgaagtttctacttctcgaaagttgctgaataggagttagttttcttaacgtaaagtgctagacattttttaaagttccacccaacattaaactaaaagtataaagtagaaaacatgaagaccataacttttgcaactcttcatcatcgcaataatcttccaacgtcccaaccttcttcaaaaaaaaaaaaaaaatcacgtctgttttgattacatgccggtatgttaaattttgtataaatgattcaaaagggagggaagtggtgtgagaacttgctgcttaagtgaatggtgtgtgaaatagctgaattcctttgtgatgaatgtggatgatgctttaacatcataatttttctcttttgtagtcttcgagaaagagtccaggtggagcaactcctcc

SEQ ID NO: 109923 - DNA, 791 bp, Aquilegia coerulea
  Intron number 1 from transcript AcoGoldSmith_v1.001158m (l ocus AcoGoldSmith_v1.001158m.g) derived from phytozome v7. 0 (chr-ID scaffold_22; pos 2530514 to 2531304 reverse stra nd)
gcaggattgtctactgcttctcctgtaagtttttttttcatgtaattcggcaattgaaattgaaattcaagtttcttgaataatgtttttaagtttatttggttgtattgatttgtgcgggttttttttaatttctttgttgttagaatgtttgattgctttgatgtttgcaagtttaaattggattagattggaattaggaatggagggatcaagttgaattgccaactctaccatattgtgatatgtaaaccaaaaaaaaaaacggtgttgtttggaataacttgcaccaatgcaaatatacattttatgcaccaacttatagctttaatgctctatttaaattctttagaacaacccaccttgaatatattttcagtgcttagatgtgtatctgctaatcctggagatccagatagaaaatggattagctgttattttggaatactttagttcaaatttaacacgaatgggtcacttttctagttgaaaatgtgtaattgtatatcaccaaattaatagtgaagcatgttatggatgatgaaccatattgtcctacagttttcattgtaattatatcagtctgcctgtgtactgattaaaatgaaaagaatgctgggtctagacacagtctcagtcctggcgcctgcttccataggtgtgcgttgtgggtaactgggtattgggtttgtatgcagtactagtgtaattttatgttcattgtcattctttttattcccacctttttcgtttcaggtggagactattctggataaggacaactacacatt

SEQ ID NO: 109924 - DNA, 726 bp, Aquilegia coerulea
  Intron number 1 from transcript AcoGoldSmith_v1.005013m (l ocus AcoGoldSmith_v1.005013m.g) derived from phytozome v7. 0 (chr-ID scaffold_16; pos 2485032 to 2485757 reverse stra nd)
tttgataaagctacagaacagcagttagccagaaggtaatacaataagcaataacccacaagcattgaaagctagttctatgataggaattgttaattccttaaacttaaactgtctatagggttgagatttaaggagcaaggatgatgatggagcaaacgaagccaacagttcttgctactgttttttgttttttttttttgataggtaaaattttattgatttgagtaaccaaagaatatacaaaactgaaacaatatacaattgtactgtcagattgagtcccctataatattaaagaaacggaagcattagtggcacatcttttagatgataatgacttaatgagtcttttagatgtttacgcgacttaattcatggcacatctttcccttctgctccattttatgtgctcactagtcactactaacatgcttgtgtccacaacaaaaactgaccatcaataacatgggcccgacttatattttgggcaggcgtatgcaatcaaacccacgggcctagattacatggaccgaagttttcatattaggcccgttcgggtttagattttttacatgtgttttcccgccatttgattacactttttccaattttttgcaattaatacgagcgaaaagtaaaacaaacacacactctctctctccgtttctctcttcatcatggcgcctagattatcagaatacgagcgaaaaagacttgaaaaca

SEQ ID NO: 109925 - DNA, 676 bp, Aquilegia coerulea
  Intron number 1 from transcript AcoGoldSmith_v1.009345m (l ocus AcoGoldSmith_v1.009345m.g) derived from phytozome v7. 0 (chr-ID scaffold_55; pos 720309 to 720984 reverse strand )
ttagccatattaatacccgatctcaggtttttatttaaaactctctttttcttatttattttttatttttttgtttgattgatgttttatcatggggttgttgagattttgattataagctgattttgatctagggtttttttttttttttgtgggggggggggggggggggggggatatttttaaatctcaaatggagttaaagggactacttaatatgtttgattaatacaggggtttgttttgtagtatcatttgcttgttttctagatttatttgttttttttttataaatattggaatttggttcattagtaaatttgtttgttttattgatatcgaaatgtggaagaagagtaatggcaaataaaaaaggtttgtgtcaaaatgaacttttaaaatggtggttttaaagtgttacaaatctggcgtttctctagtttattattttccagaagaagcgaaaaatcacctgaaatagttgatgacttgtatgatgagtcttgaaggattacaaaactggcctctttgtccttgggtttttcgtttaactgtacatagatattttattaggggttatcattttaatggttatatagctgatttctcaaacactttggtttcgtttttttttttttttttgatctggggcttggtttattaggttactggttat

SEQ ID NO: 109926 - DNA, 150 bp, Aquilegia coerulea
  Intron number 1 from transcript AcoGoldSmith_v1.007213m (l ocus AcoGoldSmith_v1.007213m.g) derived from phytozome v7. 0 (chr-ID scaffold_34; pos 1206048 to 1206197 reverse stra nd)
atcttggagaagcaattgaagttgttaatcaagtaaataacaaacaaaccctttctcaataataataatattcttctttgttttattttaattttatctgaaagttttgattttttttttttctgttgaagttagattggagactatcag

SEQ ID NO: 109927 - DNA, 429 bp, Aquilegia coerulea
  Intron number 2 from transcript AcoGoldSmith_v1.008433m (l ocus AcoGoldSmith_v1.008433m.g) derived from phytozome v7. 0 (chr-ID scaffold_3; pos 9865062 to 9865490 reverse stran d)
agtgaaactcgtgaggaggttctttctaggcacaggtaatgttttctgattaagtttaagtatgtcatcgcattttttccccctgagttctttttattgtagtcatgtattttctttgccgttaggaagatagtcataatcattggctgagtgttttttacttttaggtagtaagtagtaaccaattactaccaaaaaaggtaggaaccaattacaaaagacaagtataaatggatattaactgaaacaactcacagaggttcaatttgagtttcgttggttcaaccatgtttagcaagctatttgttgtatctcgggttatattcgtaaggattcatattactatttttaacttttcagcaaatgcttgaatcttagtatattttgtttacaggaaagagattacgcagcttcagcacaaagaagtgg

SEQ ID NO: 109928 - DNA, 883 bp, Aquilegia coerulea
  Intron number 1 from transcript AcoGoldSmith_v1.008433m (l ocus AcoGoldSmith_v1.008433m.g) derived from phytozome v7. 0 (chr-ID scaffold_3; pos 9865560 to 9866442 reverse stran d)
agctccagctccgttcaactgactttcgaactcaggttctcattattttttaatgttactttgctataatattgaataacttcgttctacgtcttttattttttatatatttttttaatattaccttgtttgtgttttcaattttggtggtttagtggtttttacttaatggggtttgcttggctttaagttttatagttgtttttgatggattaatttcgaatttgggggggaaacttgtacttggggtttttctattgtagacataactcataagtttggaaatcttgacaagatattaaaacttacatcatttatggtataaaaatatatcaatttgttgagtttttttttttccactgataagttaatttgaaactataagtgattagtttgtgtttttttgtttaatttacaaggtttttgtgtaatgtacaatagctcgacgagtggacataccccccttttgttattattgatgttttatctcttcccattgtaaaattacctttagggtatgtttgattcgaggcagggaatgaacgtgtagatgatatagttctgaattttgctgtgtgtgattccaattttgcccttaaaaattatttctccgcaaacaattcctctgtaatcaaacagagtaacaaacccttcatgatcttacgtattttatttttcgaaaaaagaagaagcagtagttaaaatttctatcttttcaaatctaggtgagttttcttcgtagttatatctaccagatatctaaattatgcgataagttttgtctttaatattcacaattgattgtttgatatttttgctacttgtgtctcatatgtttcttgcatgtttaataggtgtcttaatccaaaaataacatttccca

SEQ ID NO: 109929 - DNA, 613 bp, Aquilegia coerulea
  Intron number 2 from transcript AcoGoldSmith_v1.005654m (l ocus AcoGoldSmith_v1.005654m.g) derived from phytozome v7. 0 (chr-ID scaffold_91; pos 592590 to 593202 reverse strand )
tcaggaaaggcgaaaagctatctgggctatatgtgagtagatggaacaaaaacatatattgtacattatatatatcttccagttctctcttcaaaattcaaatttaattttactgaaactataatactccaatagattcatatatatatttacgttcaagggtatgtaagttaattatttatttctaagaacaaaagtggaatagagatggttggtgtcatgaacagatttcctcatacatatgtattatgtcataagttgatttatcaataaataaaatggtataaacgtactgttgcttaattaaaaagttacctcacagtaagatatgatagcttagattatcaatagcaagcccccctgatgattgatgcagcacatcgtttcaataagattgctgatgaactagtctttttttctggaatttattataaaggctttctattagttcatctcaatttattttatttaacagctaacttcaaaaatacaaagtctgtggaattcttttaacaatattcttgtaaagtgtaaactaacaataatgatggtagaatatatgtgatgtgaatatgtgactgtcttttctatgcagtgtggtgtcgaaggacag

SEQ ID NO: 109930 - DNA, 629 bp, Aquilegia coerulea
  Intron number 1 from transcript AcoGoldSmith_v1.018323m (l ocus AcoGoldSmith_v1.018323m.g) derived from phytozome v7. 0 (chr-ID scaffold_68; pos 358192 to 358820)
ttgtcagtgctgtctttgaaggtatctcttcgtttcataatgcctaagtgcatatacatgaaattacacatcctaatgctatttctaaacaaatgataaaaatcagttattgtctttaaaaagatcatcaaatttcaataaacttctactgagatctctgcggttagtctcctaggtatctgatagacctgccagctgatagtcaactacctgtctacctgatcatgtttctgaacacgtcttattgccaatatctggaagacgctactcatttctatcgaaccttccattactccattagacagttgcaataccaaggtgggctctgaaaagtatttctcacataagacacccaaattttgcttttattttgttatttatgttttctgtaaaatccaataaacacctcagaagagtgcatgtaaagttattcacccttaaaaggtaaacaatctgaagtaccttatactgggaattaaaaggcctacttctagttttccatcagagctacttcgtagttttcaaacttacattatataatgatccttaaacttcatacatattgtttgtgtgcattcttgcgcttaatgattcatatttttcttttgtagctgtaaatttgttgaaag

SEQ ID NO: 109931 - DNA, 387 bp, Aquilegia coerulea
  Intron number 1 from transcript AcoGoldSmith_v1.002678m (l ocus AcoGoldSmith_v1.002678m.g) derived from phytozome v7. 0 (chr-ID scaffold_22; pos 1934454 to 1934840 reverse stra nd)
gaagaagagaaaaaggagaaacagaccaggtaaaaagaactactctacctacacatttcaacactttcctccttttttttttttctatctcattctcaccctttgtttttcttctttcaaaccgcgttttaggtcagtcatcagtcttcattattatattcaaacagaccaccaaaactcttctgcttccttttcaccctttttatatacactatcttacatcttttctcttctcctatcttttcactttcagcttcttcaacttcttttttgtacattctttgattcttgttattctgtaactatttctgcaaaattcagaattttttttttatcaaagtactgactaattgtattgtttttgtacttgggtatttgaagaatttc

SEQ ID NO: 109932 - DNA, 659 bp, Aquilegia coerulea
  Intron number 1 from transcript AcoGoldSmith_v1.026079m (l ocus AcoGoldSmith_v1.026079m.g) derived from phytozome v7. 0 (chr-ID scaffold_192; pos 17288 to 17946)
gctggtacagtggtttgagttattataattttctttggtttacaacaatcacagttctactaatattctagcaagattagaatcacctgatcatttttttcctatatgatccaaccaactcataatctcatcttcttttgtcaaacaatgcaaaacctctgataaactaaagatctacaacttcatatgagcatatgagtatatatatatatatatttcatcctttgtcttcaccttttcttcatctttgacaaatctgtaaaatgaacccacctgattcagcaccaactccattaaaatctgagataatcactaattgtaacagaatctaatattggaatctaaatatgaataaacagaatttgaccttattgaagaaaatctaacagtagtcacaactcacaacattaaccggtaatcggtaatctaacagtagtctcaacagaattagaggtacgtagtgtaggaattaaaataaagtttattgtaaaataattaaaacatttttggaattacattaaactctacatactcatagaattactgttcttttaagtagtttgatacaccatatatagtaaatatatatatttgtattattatggatctaacgccatgccatatacgcatggactcgcagaaaggaatctacttgagga

SEQ ID NO: 109933 - DNA, 978 bp, Aquilegia coerulea
  Intron number 1 from transcript AcoGoldSmith_v1.018612m (l ocus AcoGoldSmith_v1.018612m.g) derived from phytozome v7. 0 (chr-ID scaffold_22; pos 730696 to 731673)
gctttggctcatttgtatacaacaagtaacattatgatggtataaggtaaaagatataccattggctaacctaaatcatgcagaaagtttgctagtaggtacatgaaaagatgtaccaactatccaggagagaatggatctgaagaccatgagcctaggaggtgtcttaaaaattgtaggaccccatttctatatttggactaagggaccacctaatctttgagaaagtgtctcatgtattctagtcttatgaattgcaatctcaattcatcttacagacaaatgaggaaataatagagggttgtgcatcacatgggagagtcaccttcaaccctgcccgagagagagagagagagagagagagagatatcataatcttaggtaattatatctttttgaccattactacacttatactaagtaaaaagtataaccataaactcaagagaattaaagcatttctcaaacaaaaaacatgaccatctttgttttccttgtttgattctactacctttcagtgcaactcacaattcatttggctaaatgtcatattcatttcatttaataaattctgtcagaagtcattttcttcaactcagtgctctctctctctctctctctctctctctctctctctctctctctctctctctctctctctatatcatccatgaaatagaccattattagtgactcctctttctctttctctttatcccttcttagatgagtgagtaggaagtcttgttcattttcttaatgctggtttaagcttctcttcctatttcagttacaaaagttctcttaccatttcttgaatctttcctttgtttacttgaaaaggtttgtaagataataattaaagcatacccatgattctacctttcttttttcttcattttaaccatctacatatatttgtgtgttttcagcttaaagacggagttcccaatcgaagacgactctcccacagcaaac

SEQ ID NO: 109934 - DNA, 356 bp, Aquilegia coerulea
  Intron number 1 from transcript AcoGoldSmith_v1.006279m (l ocus AcoGoldSmith_v1.006279m.g) derived from phytozome v7. 0 (chr-ID scaffold_8; pos 3794828 to 3795183)
ttcttcggcgcattcattctagggcattttccactgtaagtagtttctattcttcttcgtcttcttcatctctctctctctctctctctctctctctctctctctctctctcttttgccaaaaaaagcacattatagttagtatttacagaaaaaccgcgccaaagtcttacaaacacaagttagttcaagtttgttaatttgaaaaacaagtataaatttctttcaagtttgaatttttatcgaaaatgctgctgtaagtcattactatttgaccaatgttacgaaagtgtagtttattttgtagtaattgatttatgtttaatggcagttgaacaaagaactcgagcggaatta

SEQ ID NO: 109935 - DNA, 887 bp, Aquilegia coerulea
  Intron number 1 from transcript AcoGoldSmith_v1.018130m (l ocus AcoGoldSmith_v1.018130m.g) derived from phytozome v7. 0 (chr-ID scaffold_2; pos 7765319 to 7766205 reverse stran d)
aaaccaagtacccgattgtcgaacctgctcatgtaaatattaatttgtgttgtattacattttatttctgttaaatgaaaattggtaatttgaattggacggaaagaaacatgtttatgtgaagtagctcatgtttatcgtttctctctgaaactctaattaagctgagagtgataatgtaattctttatttacttgaacgcctaggtgttcttaaacagtaggatgattggaatcaataaaagctatactgtcagaaaacataaatatgcatatctgattcgtatgcttccacatttttgttgctacaaacagaattacaactaaggcaactcacggatgtttggttgtataattggtaggtcataccactattagaatctatagggaagaagatacagttaaattcaaacttttctgtcattactgaattacaagggcatttagtgggactgcctatcaagacaaccaaagctcagccaccgcagtcctagttgtatttgtaaccgagcgaatcaattaactttgttattctctgacataaaaatgcctaataattccatccaatatgttgactttttactacttgagtgattaaagatgaataatgattaggcataattctcctgattatttgagtttctgttgcggtaagcaaatctgctagtaataacttggatctctactttcttattgtcattagagacgtatgcactcctctgtccaattgtgctatctcatttcgaggatctaaaaaagaatttattctctgaaatgaaatgaattgcaaatcacaatatgttctgccatttcgtactctgatcttattcttttataatttaaaatttgccaggagttagcagaaccatcaatcaaagctgcatttaa

SEQ ID NO: 109936 - DNA, 369 bp, Aquilegia coerulea
  Intron number 1 from transcript AcoGoldSmith_v1.012977m (l ocus AcoGoldSmith_v1.012977m.g) derived from phytozome v7. 0 (chr-ID scaffold_7; pos 1751429 to 1751797 reverse stran d)
ttgcattattatgtgtgtagggaacaatatcatgaccactgtgtagaaatctcgtgatttatattgtaaatcttgaactataaataagagcggaagacttactaatctacacgctcaaaaaggtttcaagcctgttttaacaaacaagatcatacaaatacaatagaatggaatcactctactgtttctttacactcttgtcattacttctggtaagcatggaacccctccgcttcaccttttttatttaacaagaataatttgtttattcaatggtatgttgtttgttattttcttttatatattttgatttaacaagaataatttctttatgcggggtttatctccaacagtttgctagcattatca

SEQ ID NO: 109937 - DNA, 1042 bp, Aquilegia coerulea
  Intron number 4 from transcript AcoGoldSmith_v1.006345m (l ocus AcoGoldSmith_v1.006345m.g) derived from phytozome v7. 0 (chr-ID scaffold_2; pos 9853421 to 9854462 reverse stran d)
ctaaactcctcacctgtaagtgaattttaaaattcaaatgcaattcgattgaattgctagcttaatttttatttctccttatgatatattagtaagatggccagtgttctcgtacatttttgacatatgataacagatttttttgatttacttgggaagagtaacactgttgttagttgttagttatgtgttcaacttgatttcactatccccagtcatatacgtttgattcacatcccaatgtcattgcttttcatcctcctagttgagtgtatacatgagttatattacccgaaaggtgacattcataagagaataattttggtccaaatacgagagcagagatgttattagttttaaactatcgtgccgcagctgagtcagtactcaaccccaatgccagttcctatgcacaacagtcatgtactcttgtactcaattttcattgacttcccccaaagtgctatatctctgataagctaattatacatttagaatgtgacatatagagatcaattaaacaagtgtattttaatctaatggacagaatataagttgcacctgtagcatggttgaccagtaatttttgacatgattttatgacgagtataccttgcatttaaggaatatcagacatgtactttaattttgtttccttttctaaaaggtgatgagttagcaatgtgccagtgtttacttttgtttgtcatgactgcttgtcttgttggaaatgcctgttactatttgacacgagattctgactagtattttctgcctataaggagtagactaatttgtacctggaactagtttctttttctaattggtgataagttggcagtcttttcttgttttcatgtctgcttgtagttttctctcttgttgataaaggcccgttagtgcattttaaaagtgtttatgttatcttgcttgccttattcttttcgattacatgacacattaaaattctaaaaatctgacatatagatatattgatttttctaaaggaagccttgtccccagttggcgcaactttggagga

SEQ ID NO: 109938 - DNA, 817 bp, Aquilegia coerulea
  Intron number 1 from transcript AcoGoldSmith_v1.004255m (l ocus AcoGoldSmith_v1.004255m.g) derived from phytozome v7. 0 (chr-ID scaffold_84; pos 46178 to 46994)
aagatttgggttctaaccagcttaaacaagaacaagtaaacaacttttacataaaccccatttctttaattttaatattatttctcattttttctgcagaaaatttgatggatttttttaatttcttttatcaattttgaaaacccacttgtttcttcttcttgattcaatgtgggggtgttgtagtatgatgattagactaaattttggggttttaattgttagggtttatctttttagaaaatggggttacagaaattcttttatctagatgtttttgaattagaagatgtttcttttgtcttcaaaatcggtcgattttcaatcaaaattgtgtgtgtgtgttttccccttttgagttggttggtagagaacttataataaaactgggagataatctgattttttccgggagaatggtgtcatttacttggtgagttggctcaattatagttatgcggtagggtgaatgtacaagaaaaatgcgcttgggtactctaggttgttaagtgaaaatcgaatcatatatatatattgaatggtttaaacccaaagaattagagtaatgtatgtaaacaacatgcacattgatcaaactattaacactgtttagtgatatgaaatgatgataagtttgaattactttaggtctgattgcattatgaagaatgtggttcattgattcaccgaaatatatagtagaaagcaaaaagtcaaattgatgctttgtgtttgctttatccattgcctttttgtttggaattcctgctcataaactatgataaatagactggctaattatgctagaatttccagg

SEQ ID NO: 109939 - DNA, 1067 bp, Aquilegia coerulea
  Intron number 4 from transcript AcoGoldSmith_v1.017410m (l ocus AcoGoldSmith_v1.017410m.g) derived from phytozome v7. 0 (chr-ID scaffold_13; pos 4684666 to 4685732 reverse stra nd)
tcgaggaagagtctgccccaccgcagatacagaaggtacgaaattgtttttatatttgaagagagggggtttaggttagtggtggcattattatctactgcacacaaaattcataacttatagtcgtattcagttttgagtttctattagatgagaactgttgatatagatcaagtcctaattgaactctgatggtaactgttgtctgtgcttaactaagttgatatttatgctccttttttttgctaataatctacgactgctagttttatactgcatgaaacataatctatagctgttgtctgttgaaacttgaaagtgtgcattagaatatgtgaagctgcattatccattggagtattggattagaagttataagcttttaaggtaaattaacaatgaagggggccaaacctcgtctctgccccatgtaaactataaaaagacaaaggtgaaggaatacattattctagaggatgatgataattaggatgagagcccatgacaacaaaaccaagaagccaagaagagctagttgggtcaggggttagacatgatgcctagtatgacaatgacaaggggtctgtacctgtcgttaacatccaaaaactgcatatatagtctattttttccatacatgcatctgggccctttactgtcttcattttggtttgccctcacttgcattttttaagctcccacattcagaccaaatagttgttttaactatgtaatttgtagattgggtctcactccacttcgtagctagagcttcaacacaatctaagccacagaacattacaagttacagcagtaaagcaagcattattcgttttttcaaccaaaccatttctgtactaattgaaataagtaagatgagaagaagttttctggttaacagctacagcatgggaaatatttgactaatcttactggaagactttacttgtggggatagatgaagatataggtatgacatgctttgcttggatcgtctaatcttctcatatattctggttactgtatgtgcaggaaaaaaagagtcgcgcctctgcaccactgtggta

SEQ ID NO: 109940 - DNA, 812 bp, Aquilegia coerulea
  Intron number 1 from transcript AcoGoldSmith_v1.002944m (l ocus AcoGoldSmith_v1.002944m.g) derived from phytozome v7. 0 (chr-ID scaffold_16; pos 518829 to 519640 reverse strand )
gtttggtatgtatgtttgatttttttttttttttttttttttatttttatttgtttgaatacccttttgattgaatttgagttttatgtgaaaaaaatttgaactttggttgaaatttgagattaatttgatgatgggggtgttttagtttgttgttaatttgaataccccattgagtagaatcgagttttatattgtaattcagtaatggggtcttgcatttgatatttttgtgaaataatttgaacattggtggaattttgagattaatttgatgatgggggtgtttagtttgttgttaatttgaatacccaattgagtttaaaatttgacggaatttgaatggctgaagcgtttttgagcttaattgaatgatggggtcttgttgttgttgatttttttttttttttttttttggaagaagttatggattacgttgttgttctgtttgaatatctaataatgtagtttttgggtgaactgtgttgagcttagttaaaagacaggtagttcttatatcttaatttgaatgcatggtggattgaatataattttattagaaaagaatattgaaattgcattagtgttaaagacatttaagaaaagatgggtagttcttattctttatttgaatgcatggtttggttgattatagttttattagaaaagaaattgaacttggatcagtgttgactgatgagaatatttaacccgagttcactgatgtggttatcatttttttcttatgtgtgtttttttgcttttggaaaaatatagggaatacccgagttgtaggtcagaaagagcttgag

SEQ ID NO: 109941 - DNA, 735 bp, Aquilegia coerulea
  Intron number 1 from transcript AcoGoldSmith_v1.027540m (l ocus AcoGoldSmith_v1.027540m.g) derived from phytozome v7. 0 (chr-ID scaffold_55; pos 355793 to 356527 reverse strand )
tagcaggttattgaatcaggaaaaggtatgtgtttttttttaataaattttatgaaaagacacaccttttaaacaataattagacaactatataaggctttgtgttgttcaaagataaagtatatcgaatcataagtctgtattcaaaacataacagtactgtagataagagagactatttcctaaagattggtaaaatctcattcaagtagagtttgtgttttattataaaagatgaaaatgtcttctccaaatttaagcaatggacaaaggtatgtcgaatgagactgtggttcaatggtagcacccatctcacaaagtggagagatcgtggattcgaaacacgtcaacagcggattgttgatataagttttcacacgtaatttaaaaggggtagggtacccccaacctcgcttgccaaccaaaaaaagaaaaaaaaaacaaattattttttaacttatttatttcatccccttatattttaaaagacacattaaatcagagtatatacaatttaaatcaatattttttagttataaaaaaattaaaataaaatctcttaaaataaccgtattgtaggcacagattttcattagttctcttcaatcagagaagttcagaatggcaaaaagagctgtaaaatactatgtggtaagatactaatatctctctctctctctctctctctctctgattgactcatcactcaacagttttgatttcttaaccaggtcg

SEQ ID NO: 109942 - DNA, 603 bp, Aquilegia coerulea
  Intron number 1 from transcript AcoGoldSmith_v1.024927m (l ocus AcoGoldSmith_v1.024927m.g) derived from phytozome v7. 0 (chr-ID scaffold_24; pos 3668320 to 3668922 reverse stra nd)
gggtgttttaatatccgaatatatgccgtgatccgtaccgtgccgatctctgaaaaaacggaaaatatcgcgaatatccgcccggcacgcacgatattttcacctatgatttgaagtaatgaagtgtaaaaagccttaccccatcaccttgagtcaggctgggtgaaatggacatgggtacttttaaataatgcttctacaggcccaaccaataagtcttaaacattttgttctaaaacatagccctagaaacatatgcccagcccagaagatatatgattttaaatttggaatctaataactaaaaagatagatttaattgcatgcataaaggcaaagccataaatataggaataataatctcaaaagattctcaacaagtcaacaactaaagagatatcattgtaatgtaaatgtaaatctactcattttcaaacaaacaagattttctttgagtagtttgagttttagatctattttaattgaagaagttagctagggttgtgacttgtgaagaaaattgtgcagaacctatggctagaagaagaaaaacaagaacaaacaaaaaactactttcttcttcttcttcttcaaaagttagta

SEQ ID NO: 109943 - DNA, 756 bp, Aquilegia coerulea
  Intron number 1 from transcript AcoGoldSmith_v1.004592m (l ocus AcoGoldSmith_v1.004592m.g) derived from phytozome v7. 0 (chr-ID scaffold_39; pos 2041103 to 2041858)
actttctttctgatcaggtaaccttttacttgtttgtaagcttttgattagtgatacatggagacatggattgtttttggtcctatttcaaattgaaaatttaaatgggttgttttcaattttatgaaatttttagttattgggttttttttagaaattgcaaatcttcaattttgtaaaattatgttatgttggatattatttttgaatgtgaaaaatgggattttgtgtgtgtgtttgtgtgtgtgttttagtgaaaaactattttattgatgaactcaaaagaattacacaaaagtagggaacatgtgtgctattttttttttttttttttttttttgtttttgttttgttgttgataaaaatttgaggaattctactaagttagaggacaaacgcgcgctacaaactgcgctggaagccctttttttgtttttgtgaaaatcttgtttgaatataaattggttgttttccgattttaattgagcttaaaacaaacatgttaaaatctcattcttctccattaccttaattggttgtatagacttgtatgtgttgaggaggccatacaaattcttgatgattatttgtaagtatgcattgcaattgtataggatggtatgactatcagactttgtacccaatgctctcttatcaatattgtttcaaaagaattgttgacttaaaataaatattttgattttcgtgatttttttggcagttggcataccctcgtgatcttagatatcaaagtgt

SEQ ID NO: 109944 - DNA, 1039 bp, Aquilegia coerulea
  Intron number 2 from transcript AcoGoldSmith_v1.014250m (l ocus AcoGoldSmith_v1.014250m.g) derived from phytozome v7. 0 (chr-ID scaffold_19; pos 1509158 to 1510196 reverse stra nd)
gcaattttgtttctgatccctttttatttgttcaggtatgtctatttactttaaattgtatgcaatgctgaatagaaacttgcaccagattgacatgatgatcataagtaggctgtttttcctctgtatcatcttcatatcatgctgcatcgttttgaatagggtttttagaaggtgaggactttggccaatgtgtgatgcattccaatcaaatttaccactttgatgcatatacatggtgcttacaagttgcaacaaatgcagaatgtggacatattcttcttgtctttacatatatcttaaagataatgaagatgcctctgccagaaaatgaagagccattaaaatttaaaagtcttgaaactcatttgattgtttttttttttaaattttctattattttgggccttcagatcaagcttgaaaggattaaaatgtcccagttttacaagatatttttcattccacctccttgacccaaagtaaacaagctaattatattctgaggcattcttttaaatacattttttttttgatagttgttatcattaagaaattaagatcatgtattattgtattgaaatatgaaattaaagatagtacaggactttgaacgtacaattatattggattatatatttgtctttcagggttgatatagaatatcatagtttacttaagtaggtaatctgtatatcaactaagcagatggtttattacgagcaattttacagatacggtactacttcaggggtattcagtacggagtatattttttaagcaaaacgttccctttccacaacaatccagtctcctacagtaattattttcacatggtcaaagatatattgtcaatcaatgttcagtgacctttgtaaatttcatctatatctgttccttttctattaagagggtactcgttaacaacgcatactgattcgagtaaattttcttgaagtcattccttattcgttgtggtggtttttttagctgtcttgtttaactgttctatattgatatgcagtgggacacattttac

SEQ ID NO: 109945 - DNA, 471 bp, Aquilegia coerulea
  Intron number 1 from transcript AcoGoldSmith_v1.010196m (l ocus AcoGoldSmith_v1.008142m.g) derived from phytozome v7. 0 (chr-ID scaffold_25; pos 2821925 to 2822395 reverse stra nd)
tttcaaaacagatttgtcagaagtccgattctaaggtcgatcgaaatctcagttacactgtactttttgtctaatctatcacctttcttccttccttcttatgttttcatcatttcttatcaaatctccttttcaaatcttaattttcttgagtttttcttagattgatttctctaactagtcattttaagaaacatttgagtttgtttttgttgaatttagattctaaaaaaaagaaaaaaaaaggtgaattagtttacctgtttagattcaatcttcttttacatatagtgatatagaagaaactcttaacgtttggtgaattgttgttttgattattatttacagtttttctttttgatttatttatttaaaagaggatattcttttagatttaaaaaagaaaagagaaaaagaaagattttaattatttaattatttttttgggaagtgcagaaagaaggagaaaac

SEQ ID NO: 109946 - DNA, 647 bp, Aquilegia coerulea
  Intron number 1 from transcript AcoGoldSmith_v1.025525m (l ocus AcoGoldSmith_v1.025525m.g) derived from phytozome v7. 0 (chr-ID scaffold_2; pos 3997862 to 3998508)
gtggagattgttgtatattggctcgccatagttgggtgcgcaggatcataccttataagagatgtgatccataggatcagtttcctataatggttaaggaaaccatatatgtgcaggagttctatttggactcggtttcctatttatctctagtttgaattaataattctatatggatttgatttctatcgatgggctataaatacccaagtaacttggtatttgtaacacaagacaaaagagtagaaaacaatagaaacatagagatagatagagtaaaagagagagaactttgggagccaagggttattgggtttaaggtgagagattaagatcttgagaaagatactagggagattattgtaatcggtgtttctttccttataatgaaatcttctcattgttccccgtggaggtaggcattgccgaactacgtatatcttggtgttattgttctttattgttttgttctttttatactattgtttattgttttggtaatctttgacttcattgagaaaacggatcctgtattgcaaaggaggtgttctcacgaatatctaggctgcgggttgttggggttgttaggatttaattaatcactgcatatagttcaacaattgccgacatccaagacgaactaggag

SEQ ID NO: 109947 - DNA, 478 bp, Aquilegia coerulea
  Intron number 1 from transcript AcoGoldSmith_v1.004367m (l ocus AcoGoldSmith_v1.004367m.g) derived from phytozome v7. 0 (chr-ID scaffold_68; pos 433197 to 433674 reverse strand )
gatcatactggaactcaacccaaattgctagagaggtaagactcatcatcactctttttttttatgtcttttagtacatatttttttatgcaattatgattattttatgatgatggattgatcaagtttcttgctttttgcttttgttttatttgaatttgaactttttgataagtttaatgaagagggtatcttttaaaagtgactggattagtgtatagtaagtaaccttgatgatctctctttgatagaaaattttactgatgatggaatttttgatgttttatgatgatgatttgataaattttgttaatttcttttaaaccctcccaaacccatgatgtgagctaggaatgtctttgcttattgtttatttgtgaaatatgtttcggtctggttgattaggattttggttttaaggaatttgggagattaatgtgtttatgtgtttgcagaggtattctgtaaaaaggtagag

SEQ ID NO: 109948 - DNA, 958 bp, Aquilegia coerulea
  Intron number 1 from transcript AcoGoldSmith_v1.019523m (l ocus AcoGoldSmith_v1.019523m.g) derived from phytozome v7. 0 (chr-ID scaffold_58; pos 1167339 to 1168296 reverse stra nd)
gcacaagagcaggtttcttattcttatcgtctattctaacatataaatttaacttttttgttattattattatgtttgtttcctgaattcaatctagtgatctacattgtagagataattatgacattgttatgaaagttttgattttgtttggaaattttgggagatttaattattagtaatcatccatacatttttaatcataataaaattctttattgctatatttggcattgctttcaagtttcaagcagctttttgttattttacaagcgggttagagaaccggagttgtttgcggtttaacaaaaggaggtagagaaaaggcaaatccttatcggaaaataaagagttttatgaattaacttcagaaatggggactaattttaagaaatctattgggcataacaataagctgtattttcatataagctacggattgcaacttggacacgttaaatcagtaatggagatggtgttatgttatataaattcagatttaaaagtagaatgtgggactcatctttgatgttgagcattgtgataggtgtttaatagatcttggatgtgattcgagcatacaacactgtattaggctttgcttggtagaaagcaaagttcgtgaaaccactcatgataagaattgagttttttgaggaattatgagtctgattgcttcttggtataaatctcagtccaaagtcatgccatggatgccaatccaatgaaacttatgtagtgttacagtccaaaaagttttgactgatttcgcataatctttgatacagaattgctggtgggaccatcttctaagatggccaaagccatcaaaacatcaatagctatagttgctggtttacagggctagctctaaattaaaattttggatgtttaatcgtcaatgtataaaatgacctttgttttcttgtttcaggttcgggcgggtattcctacttat

SEQ ID NO: 109949 - DNA, 772 bp, Aquilegia coerulea
  Intron number 1 from transcript AcoGoldSmith_v1.008438m (l ocus AcoGoldSmith_v1.008438m.g) derived from phytozome v7. 0 (chr-ID scaffold_2; pos 5784999 to 5785770)
tttaaacccccaccccctaaaggtattttcagatttctctgcatgattcaccattttttgtttatttattaaaaatttctgtgtatcgattctgaacccaaggtttatttccccatgaaaagccattgattgatttatatagtttttaagatcagagctttgtttatttcagatggttttaatggaagttgatagatagatatatttcctatatttgtaatttatagagtctgaaacagtctatttgtctgttttacttaatatcttcttgaaccaattaattacttcaatcatttttgcatatagatcttgtcgctggctatcttttctctgttcctttgagtttgaattaatccgtttctgatgcgttcaatatcgtgaaaattttgattttggtactaattaatgctacattattatttattggttttacgtttgctaacttaacgttaaatttactattactgtcgtgaatctttgatattaaaggatatatactttcaacaggcaagatttgcttgcatagttcatgttttgctaatcttctatgaacccagatttatgttacgtgagttgagaatatgcatatgttttgattgtgtacctctttcgcgagttctgttatcgcacaaccatcagtttttgaccaacactcttgtagtcctagtccaagtgatgcgaaatgcaaacacttttgcatccctgcataactgcatttatactcatcgttctaatgtttcaggtgggatatcaaacgctctgtttcttgaga

SEQ ID NO: 109950 - DNA, 392 bp, Aquilegia coerulea
  Intron number 3 from transcript AcoGoldSmith_v1.009267m (l ocus AcoGoldSmith_v1.009267m.g) derived from phytozome v7. 0 (chr-ID scaffold_2; pos 4182256 to 4182647)
atcaagtaagtttcttcttctattgaaatcatgtgttaacgagttttgagtgtaaagagtaaagagagcttatggcctgtttatgatgagacaacaagtagtagaaagaaaatgaaactttatagaaatttgagtttaagaatatttgatgtatttatagtactaataataactagaaagtgagagaaacaatacgcttggtatatagaaatttatcagtgtagatgctgtctgcaactctttagttcaactaatttatgtgttatgaaaagaaaataaaaagtttattactgtacggtaaagatctttacaatgttgaatttgtatgtcatatgttggcttggctaagttatgtcctgcttacaacttccttacaggtgcgtcagttacaa

SEQ ID NO: 109951 - DNA, 983 bp, Aquilegia coerulea
  Intron number 2 from transcript AcoGoldSmith_v1.006899m (l ocus AcoGoldSmith_v1.006899m.g) derived from phytozome v7. 0 (chr-ID scaffold_2; pos 5233209 to 5234191)
ctcttctaggcaacaggtgaatataactccatgaacagcatttcattagctgcagcatgtaggcttattaagattttagtgaattttaatttcactatatgtggttcaatcagctgaattcaacttatttgaatacacaagacatatataagtgttttactggccggccggtgtcaacctgatggaaggactactcttcagtacgtcttcactccgtcattttaaatctgggatcgatcacttcgatcagcaacaatgcgtagaagtctagatttttgaagacaaaatatctgaattgccgacattatgatttggaataacacatgaaatgatgaagatgatcatgatgtgatttcattgtgtttttgaatttttcatgaacgtttggacttcatcaccaccaccccagaattggttaagccatgcatctccttagttttaccatcataaatttctttccacatgaactttattgatggtgtgctttgtacaaaagtttgctttcaactagaactagtattactacaagtcctctacaccaactctcacatttaattagagtaacttgaggaaatatgtaccatagcatcttttaattactctcacctacaattcatcacttgttactataaaattttcatttctagctgaatattaataaggagtcttgatgatatacatgatataagtagtcttattaggacagaaaccattttttttttcttacaaatatatgtgggaatatgtatttgccgaactgcgaaaatatcaatagagatttcaacaagattattttgatggttcggaaatacttttattagtttaatgtgacttagaaaatgaggtgtacagtattgtctttgatctacagtatatgaatatactcatataggttgattttttctatggtttcaaacttttttatctgttttggtatcttttcattaggtggtcggctatagctacacacttgcctaagagaa

SEQ ID NO: 109952 - DNA, 1009 bp, Aquilegia coerulea
  Intron number 1 from transcript AcoGoldSmith_v1.000494m (l ocus AcoGoldSmith_v1.000494m.g) derived from phytozome v7. 0 (chr-ID scaffold_2; pos 786261 to 787269 reverse strand)
gtgttaaagatttcttacctctcactgtatgtatttaattatggatctaattggttttttagtttgaaaaaagttcattttcttaggaaaattttaatttgaaatctattttattcctcatttattgtatttggtgccaaagaaatctcttttgcattgaaaataagtacaatgtacgaaagaattggggagatagaggaagagggaagaaaaattgaacttgagggtgagaagttcggatgagtgactagaaacgaaaggaaagtggttgagtccctcacattgaattgaactgtgtgagggatgggaggagaaatgtgaggtgcaagaggaataatcaattagtcatttattacttttagaatttggaaacctaggcgaggataactttctgcaatcgcctttataatctttaggactttcttgcattttcaaataagattttcttttgtattcacacttaggtttatatataagtaacaattcctagtgtttcttcgattggtgactgcaatttctttcaaatgcaatgggaaatcgtaaaattatgagatgaagaagaaatgttgacagaatgagtgattctggcaatgttttatacagttccagtacatatggtaccttgatccgtgtacctgatttgattgatatatattttatgcaccaagcccatctaaaattcctgggtttgagtctgggagtctagtgctttgactgaagttcaagtggagtaccattgccctctcgtctcgtttacaacattatgtacattatttttgctatctttcctttcttatatgtgcatccattccataaaatctaatgttgctcatgttcaaataaatcttttgtacattgcttagttgttgtcttgtcaatgtttgtaattttgattttcttgtattatttttattaaaaatgatttaagcagttctccatcaacagtcattttttttttttttgcttgtaataaggttgattatcaagaaaagcaatttgctcaaggcat

SEQ ID NO: 109953 - DNA, 378 bp, Aquilegia coerulea
  Intron number 1 from transcript AcoGoldSmith_v1.005295m (l ocus AcoGoldSmith_v1.005295m.g) derived from phytozome v7. 0 (chr-ID scaffold_16; pos 3438772 to 3439149 reverse stra nd)
tggtgataattatttctctcaacaagcctttcgtggtatgttctgaataaaaaaaaaatccctctttccctttttctctcttctttttcaattgttgattttagattaccaatttccatttgttttttcataaattcataatgtttcgtttttgatgatttgggatgtgaaaaagttgtaatttttctagttttttttaacatttttgttggttttacagctattgatcttaatagaaatagtttttatgatctgcatttgtgtgtatgatgattttttattttttttgaaaaattttgatttttttttttgggtattgaaaaggaattattaatttttacagcaggattaattactagtgaacttaggagaccagaa

SEQ ID NO: 109954 - DNA, 484 bp, Aquilegia coerulea
  Intron number 3 from transcript AcoGoldSmith_v1.012511m (l ocus AcoGoldSmith_v1.012511m.g) derived from phytozome v7. 0 (chr-ID scaffold_2; pos 5255798 to 5256281)
cctgttggagtcaccagtgcaccatttaaatcgacgtatgtttctagataacattacatatgctggatattttgtgaatttcgagtttctagtcattgtttgattatttggcactttgcacaagtccttatggtggataacattttttcgctttgatgtctcttgcttttctatctaaatatctgcattagggagtcaagagtttgtaaagccagaaggatcttatcttctttctgttgagaccttctgtgcgtctacatcaacagaacattgactttgacacttttgacattatttaaaataggtgaaaagaaacatatactataaattttgcaatttcatcttgcagaatttctgtccagttctttagtaggcattgcatcatgtttgtgaattttgttaattcaggcctaattgcgtcttaactgttttcaagtttattagctcagactagctaacccttgcatgtgaaattgatgcaggc

SEQ ID NO: 109955 - DNA, 491 bp, Aquilegia coerulea
  Intron number 2 from transcript AcoGoldSmith_v1.007766m (l ocus AcoGoldSmith_v1.005257m.g) derived from phytozome v7. 0 (chr-ID scaffold_91; pos 152817 to 153307 reverse strand )
ttgctttcaaggtaatctttcaaataaactttcaactgatcaccaaatctcttctgtttttttttaaaattattgttgaattataacttcatttgtcgattttcaggtaaaggccacccatccaaagaagtatatagtagtcccgaacagaggagttattttacccaagtcttcatgcgaacttatcggtttgtgttattgttcatttttttccactgtctgtgtttgtgtgatgtagttttcttgattggaaattttattggagatgttatatactacctttgacatttattcgtgttttgttttagttgtgatgcaagcgcatcgagtagctccatctaacatgcaacctaatgataaatttctcattcagtttgtagctatggatcctggtcaggattttaatccagaaatggtatttgttttacttaaatttccaacactttgtgggaattcctttgttcattttagtagttatttgagctgaatgg

SEQ ID NO: 109956 - DNA, 684 bp, Aquilegia coerulea
  Intron number 2 from transcript AcoGoldSmith_v1.001230m (l ocus AcoGoldSmith_v1.001230m.g) derived from phytozome v7. 0 (chr-ID scaffold_34; pos 1550364 to 1551047 reverse stra nd)
caattcttggtttagtttcatcttctggatctcaggtataaaatatagtacttttagtgatgttataattcaatcgcttaggggtgaaagattgttgatagacaatgaaagtagttagacacaacgaacacagatataatttcccaatggactcttcaatatccatgacagtcgagctaaatgcttttgtttttgttaagaaagcagttgcatttagctggaatgggtttaccaagagttgaagacataaattaactgaaatttgtggataatatgcataatatttgtcactttcttagcttttcttaccaattattgaattcgtgatggaatgaggtactgcaatcctaagcaatgctttgtgagagagctcagtgtaggatttaacttcctcaccaaaaattttaggcatcactagatcattgattgttacctgttgtttttttattgtgtagtaatttgattaactatcaatttgttctgactttaatagctctattcttcatttcttccatgcgtagtagttataccgtttgaattacactatcatattctcatgtacgtttgagctgcaaggaattcttttggtgtttgtattgtgaaaagatatggttactgatttcatgctacaatatttggtgatttgcaggttgatatcccatccatttactcaaatatcattca

SEQ ID NO: 109957 - DNA, 837 bp, Aquilegia coerulea
  Intron number 1 from transcript AcoGoldSmith_v1.025160m (l ocus AcoGoldSmith_v1.025160m.g) derived from phytozome v7. 0 (chr-ID scaffold_52; pos 854078 to 854914 reverse strand )
aggtccgtgcaattcttctagcaggtcaacctcaggtatttcacgattcccaaaagtttgatatatttcacatatcaactagtctttatttgaaatctagaaaattgaagtattattgaaattctatgtggaactttctcacatctgagtgatagattatcaagctatgcgtgctctgaaacactcaaatagaaagtcaagctattcgagtgtttattcacttgaaattatattttatgaacatggatctcgaaataaaaatttcttacattcctagctaattattaacactaaataaatttctaaacgttaaggactgaaaattaattggtagctcttgtctgaggcatcagttatttatccgagttacaatctgacaagatctcaatatttaatatttctaaaatgtagtttggagtgaaaccccaaaaaatctgggaaattgaagtattattgaaattttatgtggaacttttcacatctgaatgatagattttcaagctatgtgtgttctgatactagaatcaagatcggaatcacaaaagcttcacaaataagtaagataacacttaacaagttgctcttccttccatggtccaaattgatccttcctgtattctgaatttgagatacagtagatgtagcatttttctatcttaaggattattagttaccacttacaagtacaagtagtggtaccaaggaagctttgggttcgattcttactctttgctaaagtttctgagcatgatagagttttttggttattagtacaagaattaatattcatgcttttttgcagataacaaccgaggttgctgtggtgctgttattgtc

SEQ ID NO: 109958 - DNA, 1025 bp, Aquilegia coerulea
  Intron number 1 from transcript AcoGoldSmith_v1.004249m (l ocus AcoGoldSmith_v1.004249m.g) derived from phytozome v7. 0 (chr-ID scaffold_34; pos 903589 to 904613 reverse strand )
ttctctcctcctcctcctccacttatctttacaaggttttcttttattccctcttttttattttctctattaataaagtttgagtttttatggcttattagccattaaaatagcttcataagattgaaattacactttatttaactgtaaaaatatgatttttgttgataggaagacaataaaggatcaattagtaagaattttattcaatgtgaatgagaaaatattgaaatttcaattgattgtgtttctttagtttactttccttactcatcttggttacaagttaaaacctagggtaatcacaatttacgagatagtgttagataatgtggtgggattcttgaatgccatactagaatttaagactttgcaagtgatttgcagttttgctcaaattacgtgagaaaagatattgattttctttatttgtgtgtgtgtgtgtgttccttgattatttgcttccacattgttcaccaattaccattcacaagttttatgggatatttgttttgattgcgttagtgatactgttatgtgaagtatgtcttttaaagtgcgtctaattgtttagagtagcaaattaccaatgtcatgttagatgatctcattaagtacacctgaaggctggacaggacacactcatagtctagaatctagactagtttccccttacgtcaactagaaaagccacttccatgtcagagtgagaaaattttcgtttttgttatagtcgtgagtgcctcattcgagctgtttaaatttgttgaaactatcaaaattgactattgggaacttacccttcattgaagtttttgttcttgcaattccattaggatgacacattgaaaaatcgcttcttttattttaatgcctttttagttgataaatgcttgattgatacaaatacagtaccattttagagctaatctgcaatataaaatttgtctaaataatagtcgaactgatccaagtgcaatttataatcaggtaaaggcaagattttagctgtagcttctgaagag

SEQ ID NO: 109959 - DNA, 762 bp, Aquilegia coerulea
  Intron number 1 from transcript AcoGoldSmith_v1.004569m (l ocus AcoGoldSmith_v1.004569m.g) derived from phytozome v7. 0 (chr-ID scaffold_13; pos 2458777 to 2459538 reverse stra nd)
gcattgcatcaggtcgatcttctgtttctgatcctgtaagtaatttttctctctctctgattcgtttgttttggattcgataatgtgaacgatttggtgtaatttgattagggttttgtttgataattgcttgaaacgagatttagggttaattttagagaacattgagctatgaatttagctattttttgtaatttaattattaattttctgtgtgaaatgagagatctgttaaagctgaattaatttttgagaaattaggattgctagtttgccatttttataatgcatgagcaacctcaagtgtcgtatcttatgattgaatttttgtctgtatagagattgtaaatagaatttgtaattaattcgttggtgaacatagtgagctttatagtttatacgccatataatcccttggccattgcgtattaagcatgtttggtatgtatatttttgcttggattttgtcttccccacctaattttttttttctgggtggaagattgggcgttgtattaaatctaccctttaacaactgtcagcaatttgtttatacatttgggaagaaatttgacttaaacggactattgtaccatagtacattaattaatacaaagaaataaacacatatatgacgtgacatatatggtattttctgtcgcacattttcttacatgtttgtttttttaagttattatattgaaattgcgaatttattatgtatcagggtggggattctgccactaaaagagtaaaggttga

SEQ ID NO: 109960 - DNA, 804 bp, Aquilegia coerulea
  Intron number 2 from transcript AcoGoldSmith_v1.006280m (l ocus AcoGoldSmith_v1.006280m.g) derived from phytozome v7. 0 (chr-ID scaffold_35; pos 1830815 to 1831618 reverse stra nd)
tgctcacttgacctcgttccctttctcgatcccaggtacatacattacttgttttttgccatttttttttcatgatttttactcatttaatgaatctccactacataacagtagctcgcacacgcgcatttttcaaattcccaagctaatgtaacttttagggtatgtacagtagtttaccggaaaatcagtaggacaaccgtggaatttaattttgggtagaacagtttaagaacaaaaaggaacacacttatgatgaagtaactattctgcccctcaagatagatttacctgggaacaattttccaatcaaactgaccgctaaagtttttttttgttggttacatttgtagcataatgtagcatttgtagcataattttccaatcaaactgaggaggtttacatagtttcttggtcacatttgtagcataatgtatctgaatttttttttgtgtattttactatagtaagttataatattttctgaagtaacaattgttgctttctgggtacacccaaaattttgcagtaaactatgtaaacctcgtcagataataggtttgagtttcattgactaatacagctacttagcattattaagaatgtaacatgacaaagataactgaaatctgatcaataccaatttgtgaatttgaagatacagtatttgctatatattgtaaatgatcgaagagaaaatctgttcggtctccttaactaaggggccaattcaattaggatattctattttctatatgcttaaatttgatcatctgtttaggttggaagaggctttacaaaga

SEQ ID NO: 109961 - DNA, 561 bp, Aquilegia coerulea
  Intron number 3 from transcript AcoGoldSmith_v1.009218m (l ocus AcoGoldSmith_v1.009218m.g) derived from phytozome v7. 0 (chr-ID scaffold_3; pos 2994028 to 2994588)
aacaaactccttctcctatcttcagtacgtaattataacaaaaatggtgatttttacttttttttttttttatacaattcgagttggtaactattgttcacaaaaaaattacagatttacagagaaaattttactactaatttttgttctgaaatgggtttatgaagaatgatgttgttcttttgctttcgggacttaaatggctggattgtgtattatgtatagttgttaaatacttataggtgagtatagagagaattgcctatctgtttaaatttcattctaaaaaaaatatttttattatcattgttggtaaaaacttagccacttaggttgtagccttgtaaagccgtcagatttctacattgacctcaaatttctatgaaaccaagcacaatatagaatcaggcaatcagcaagtgtttttcgtactttagtaaataaagatgtacaatgtacttatcgttatcaagaaagaagagaaaacagaatatttttcttttctcatacatatttatataagctccacacaaggttgattttcttatgtttgtgtagaga

SEQ ID NO: 109962 - DNA, 664 bp, Aquilegia coerulea
  Intron number 1 from transcript AcoGoldSmith_v1.015221m (l ocus AcoGoldSmith_v1.015221m.g) derived from phytozome v7. 0 (chr-ID scaffold_8; pos 2232679 to 2233342)
gacatcgtctcaggtggctgctattttagttggtggtgagtacaagaaagagatatcattgttgaatctacgtctggtcgtttcctacgtgtcccagatacagctggtttttatgacccattgcagtatcctcttcttcatccttacaggaactttggttgggatctgcatatctatgacatcaattcccgcagaatcagttgtcgatcttattactcatatcttcttcaggtgacgtatagcattcatcatcttcaattcactatataaatttcttccttttttttttctctcgaatagataaaaataaaaaaatgtaaataaatataatcatcttttcttacctacttaaacagatttgagacaattacgattcattgctcctccgaggtggtcgcctgctacaacagtatgtcttggacaattatgttaagatttcaacacagcaattgcgatatatccgagataatcaaccgcgaatacaagcaaaaatgtatcaaggtcttcgagactccttaaacgctggtgaatctcaggcaggtactaatctatctaacatgcaatcataaactacttaattattaatatccatttaatcattgtttgattgtaattatttgtctacatgatgttttaattctttttcgtttctttcaattagtta

SEQ ID NO: 109963 - DNA, 845 bp, Aquilegia coerulea
  Intron number 1 from transcript AcoGoldSmith_v1.027255m (l ocus AcoGoldSmith_v1.027255m.g) derived from phytozome v7. 0 (chr-ID scaffold_13; pos 4719965 to 4720809 reverse stra nd)
ttcctcttccttgggttcaaactctgtaagtactactaagtaaatctctctctccctctctctctctctctctctctcttagatattttcatttttagttgatcaggtggtcccgtacataaaataagaaactgtgtgtcctttcttagtttgaagttgaagagtagtagtacaatcacaattgtatgctggccggcaatcaattttcaatcaaatggctcatattcttttgacttttctgctttatgtatgtttttgtcttgaagcaagtaggcgaccaaacttaagttttttttttttttttttttttttgtttttaggatataacctacctaacttaagttttccctttgctttatttattaatattaattcaaattttaaattttttgcccaaattgagtatgattgtaatttaaaataatataataataatatttacacaattatatatgttgagactttatggggagatgtaccccaagaactactggcttgtaaatgtaataaggcatttgcccttaagttattaatagtagacctacatattcaaaaaaaaaaaacaacttttaatcagcatgaaatgaaattggtatcaatgacatatacagtttctgtgggtccctatttagtggatttatataattattgaacttctaatcccatctagtgtagctcttaatcagctagtattaaagtatgtatatattgtctttttgataatttattgcatcttgcaaagtttataatctgttttacagttgaaatttagtttggagacaaatgtatatgcctaatatgtggtgtagtaaaatgattgtctatatgttacagggaaaaagaag

SEQ ID NO: 109964 - DNA, 429 bp, Aquilegia coerulea
  Intron number 4 from transcript AcoGoldSmith_v1.010151m (l ocus AcoGoldSmith_v1.010151m.g) derived from phytozome v7. 0 (chr-ID scaffold_13; pos 3704004 to 3704432)
atattcccaccttcttttacttggttcacaacaaggttagtcaatgctcttctttattgggatttgttaattttacagtcctttttgttcttggttgcttcattttattttgtcgcaataaacttttttcttttaattcatatatactggcatttcacatttacaatgaatcttcatggagtgtggctcttagatagtatatattggagaatgtttatcgtagtattttttttttttttttggtgcattattttcttattgttcttgtgatcaccttatttaggtcatcaatgagatgacatttcgagctgactgtgatccctgatatcttatgacttatgccccatacaagataacattccttatgcataagaaacaacgaaaactcaagtactattttcattaatggaaatcaaattttcaggtatt

SEQ ID NO: 109965 - DNA, 556 bp, Aquilegia coerulea
  Intron number 2 from transcript AcoGoldSmith_v1.003122m (l ocus AcoGoldSmith_v1.003122m.g) derived from phytozome v7. 0 (chr-ID scaffold_36; pos 44770 to 45325)
aacaaagtagaccgacctgcaggtataatttctcttttgtttttttctccaataagcaagctcattaaccaagacaagtaactctgcacattgtacttgagaatatttcaaaatctaaagcagatatttatattggatttttattttaagatataaatactctctgaagtttccttctgcttcaattattggctgtcgtttgcctaccctctatgattatctgattaacaggtagctatattctggcatgccatattgtttgagggagtcaatttcttctaatagagtgttctggttttctaaatggcttagttgtagcctgggtttagtatgtgtgagacaacacgcgttgatttgaatctccttctgtcatacgtatgtggttactccaaagtcttcacccttgcttcctttgttctattttaatgccatatgtatcatcttaatttattataccaattatttgaaaagaattgttttttttttttttattctatttatctttctttggttattaatgttcaccaatttctttgattgcagtttctgaagagag

SEQ ID NO: 109966 - DNA, 440 bp, Aquilegia coerulea
  Intron number 1 from transcript AcoGoldSmith_v1.007768m (l ocus AcoGoldSmith_v1.007768m.g) derived from phytozome v7. 0 (chr-ID scaffold_13; pos 5102919 to 5103358 reverse stra nd)
tctacagttctaaaagcttagctcacaacattcaggtaagctaactcattacataacttgggtttaagtttattttcatttctcatggattaatctattaaagttctttcttttaagttttagcaacatttcttatgtgagataactaaaccttaaaccccccacttgaaaattttgaattttttttggttcaaggttacaaaatgttgcatttcatttgtaccaattatatataaagatatgatttttgatttgtagttaagttgatttcaagattttgtgattttgttagctatttcaaaaattaattaattaattgatacaagctatcatcttcttatatatataggttgaagcttgaaatgggtgacattaccactactagtaactggtcaaaccttcctgcagttcttttatggaatattaaggatagattgaat

SEQ ID NO: 109967 - DNA, 575 bp, Aquilegia coerulea
  Intron number 1 from transcript AcoGoldSmith_v1.010601m (l ocus AcoGoldSmith_v1.010601m.g) derived from phytozome v7. 0 (chr-ID scaffold_13; pos 4368778 to 4369352)
ctactacttcttcaagatcttcttctgttaaccaggtataacttccatctaatctaattgtttattcttttttccaatcaaaaaatgcgcttaagctcgtttcaatatcaatgtcgattttcttttgtatttgtatcgatttgtttgattatattgatttgaattgtgtgttgttgaaaacatggaaaaaaaacttatggtgtaaataatgatttcttttctgttaaccaggttatattatatatcaaacttgattgatttcaacttggtgttgagtttcattcttagtttctaaggttttgttcgattgtatttttcaattattgaattagagttctgtgaattgttgtctgcctcagctagattgaaattgtagtaatataagtatctgtttcatttagattgaaacaatgattttgtccgtcattttgaaatgagtaggcacaccttgtttttcttctttagttccgaggcgttggtagattgtaatttttttgttccattttttttttgttactaatgtttggatatgtattgcaggcagcataccgattaaacttttggcaagtctatac

SEQ ID NO: 109968 - DNA, 586 bp, Aquilegia coerulea
  Intron number 2 from transcript AcoGoldSmith_v1.010601m (l ocus AcoGoldSmith_v1.010601m.g) derived from phytozome v7. 0 (chr-ID scaffold_13; pos 4369337 to 4369922)
tttggcaagtctataccaccgaaattttgacacgggttggtatctattctagcatattcagttttttcattcgtattattttggggaagcagttagaactgtgaatatttaatactatagtatgttatacatgtgcaatgcgtatgacatatggcatgctagaaatgctgtcattctagcacttttctattccaattgtgtttgaaaagaagacttgttcatcaaaataatggagttgttatttattgtttgacttgagaatgtatgtggcattgtggcctggtgtgggtttgtactagcacctgatcatgtattgcataatacatctagactttaaatgctttccaaagctagtttgaaatatgggtactcggttccactaataaaagcaacacccagtcttctgaaacccatcccaggcatagaagacctggacttttctttttccctcttgctggttctttctatatattatgaatgttgtattatgtgacctgtcagataatatataccttgggcaataaagttccatgatattttctttacacaaaggatgagcaaaacctctttttgatgtaggctaaag

SEQ ID NO: 109969 - DNA, 669 bp, Aquilegia coerulea
  Intron number 2 from transcript AcoGoldSmith_v1.002338m (l ocus AcoGoldSmith_v1.002338m.g) derived from phytozome v7. 0 (chr-ID scaffold_16; pos 2932813 to 2933481)
ccaaaccagcagttaaaggcgcaactagatcagaggtaatgagtccatccatattagttgttgatggaaaatattgtttttacattcaacaaaacatggatctatgtcagaatttgatgcatttctattgtcaatcttagtctacatttttatgaccatttcaatgataactttcttctcataaccaaccatgcattgtatgtagtggtaaaaaatagtggaaggccataaaacagaagaaaactttgcgaaaattgaatttccataaataactatataatggaaaaaaaaaaatagaggtaaatcagttttaataggatcagtaattccataataataacccattacttagcacaatattttttttttttccagaaaatttctgcatttttcatttatttattcaaacatggaaaatagtgatttcgctaaaaaaaaaaaaaaaaaaatccaggtagaaaatgggcctaaaactcgttagaaaatggactaaaatgggccaaggcccatgtttgatttccaacccggcccaaattcatgtagattgtttcagtttctcttcgtgtctttcttctttgtatatctcttcttcattctcgttgttttcttttgtttttgtgaaaaatcttcaaagttggcgggaagtggagtgtttgctgaaattttcga

SEQ ID NO: 109970 - DNA, 510 bp, Aquilegia coerulea
  Intron number 1 from transcript AcoGoldSmith_v1.026610m (l ocus AcoGoldSmith_v1.026610m.g) derived from phytozome v7. 0 (chr-ID scaffold_22; pos 1309419 to 1309928 reverse stra nd)
gtctatcaaacttagaggtgacaatttcttcggaattaaagaaagttatagtttcatctcttttacttatcaaagaaaaaacatattagagaaattgttttcgtatgtctttctaactctttttcagagaggtgttgataatataatctgtacttaaagctttaaaacgagaatcataataatgtggtgttaccataaatcaaatattttaaacagatatactcatcatgtggagtcagatgaaggaatcttgtccctttaatatttttttttctgtttcttagaatcaattgtggaaagtaatttcaagaggtggccttgcaaatcttaggctcagcaaaaatcttgctcttattataattttggaaacactgaacgcatatttgttatacacttgcatgttctgatagttattttcctttttctaatctatggttctatgattcttttctggcgtggatttcattgttctgatgggagttatgttctgttagattgagactgctcaca

SEQ ID NO: 109971 - DNA, 820 bp, Aquilegia coerulea
  Intron number 1 from transcript AcoGoldSmith_v1.019817m (l ocus AcoGoldSmith_v1.019817m.g) derived from phytozome v7. 0 (chr-ID scaffold_7; pos 5703185 to 5704004 reverse stran d)
ccaaagttcgaaatcttgaatttactacttgcaaggtaacttacttctacatttgcttgttgacaattttatctgtggttagcgtagttttcttcggtgatgtagctagttaatttgattgaatttctatttgcaagtgaagattatgaaattttgataatgcagttgtaataatattttatatgtgtttgagcttttgggtgatacaagcagagtaatgttatgtcttattgtttagtgggttcaagaccatctccaacccatattcgttaatggattgtgcatttgtgctcttacggcagaaaactcgatgaagttcttttaagatgtgaaatcccttacattttaagttatctagcatagtagcatcactaaaacatgttcttaggttagaacacagaaaatacacacctatatgtgttaaaagcatcatgtttgagaaatattaggctattagaggaatatttattcactcttcaaatattagacactttgttgaagtgtctttcggtcaaacatacatagtgtgagtatctgtttgctgtcataactgggtcggatatctacatttatttgaagcactaagctccgttttctttcttttatttaatcatttcctgtgtaagatactaagatgtatctcacatcagtttgtggttcattattttttagtgctacagtattagagaattttgaattgcaatttgaaaatagaagaataatttctgaatactattttctcaactgagttgtgtttcatcatgtttaactggtaacattttcaggaagatcgcccactatttgtccaattttgtgcaaa

SEQ ID NO: 109972 - DNA, 563 bp, Aquilegia coerulea
  Intron number 3 from transcript AcoGoldSmith_v1.025981m (l ocus AcoGoldSmith_v1.025981m.g) derived from phytozome v7. 0 (chr-ID scaffold_92; pos 642451 to 643013 reverse strand )
ctaagttacttactattgatagagattattggcatgtaagttatttaatgtttttggaattttgaattgaattcttatttttaagtcatatgtaagatattgttttacaaattcacatgttggttttttgttaattttgatgaatgattaagaatggttatttgtaaaactagaggtaaactggattgagaatgttggcacctaagttatataaatttgaagtttctccagtttactttttttgatgttttgtaggcatatgtaacaagctcaaggtgtgttttcttaaatatatttataattagagtataatttgcagaaattaagttggttttgattgttagatttgggaataatcttcatgaaagtagagggtatgcaaaaaataataagagatgaacacttgttttgggtgttcctcaattgaggaaagcatcaaacttcttccactatatatatttgcatagagcttctatattctctattaacattatctctatgttgtttgtttgacaggcaggatgaaagctctggccttttgctcatctaattacgtacggtgt

SEQ ID NO: 109973 - DNA, 773 bp, Aquilegia coerulea
  Intron number 2 from transcript AcoGoldSmith_v1.007526m (l ocus AcoGoldSmith_v1.007537m.g) derived from phytozome v7. 0 (chr-ID scaffold_83; pos 706933 to 707705 reverse strand )
gtctctcaaaacaaacgcagatatcaggtatcaacgttactatcgctacaggttttaattttgtagttgcaaatataaccaaaatttgtcgaacaagttcttccttgtgcgtccagtttcatatgctttactttatgattgaaacaaaagattagattccagttatgagtttttctgaggattctcattgtgctgggaagaagcattttagctgacttctatagatttgccttcacatagttaagaggaaaagtatacactgcttttttatagctatgatgtattaagataatagaagttttgaaatatagaaatactatttcttgaacaaccagaaaagggcatcaatctgttcagaacttcatttggttaatataaagatgacaaatgactgcatgataaggaaaaactggtctggatggttcaaacttaaaaggaatgataaaatagttcaattttttattttgactccctgaaaatgttgacattaatatcaaatcaatggcttttaagaaagccataaaagacgataaaagacgtttaataaaggcggttaaaaccgataagagacatttggtaaagaaaactaattttaatataaaatgtcactgtttcattatttttctagagaagcacatcctgataaactgagttatttcagttctcttaccggtcttcctatgttccaatatcttcttacatctcctttgtgatatatatgtttaactatgatctctccccccctttttaaggaaggtggatttgatttggat

SEQ ID NO: 109974 - DNA, 645 bp, Aquilegia coerulea
  Intron number 1 from transcript AcoGoldSmith_v1.007526m (l ocus AcoGoldSmith_v1.007537m.g) derived from phytozome v7. 0 (chr-ID scaffold_83; pos 708105 to 708749 reverse strand )
ctttcgcgcgtgcattgaagctgagaaaatcatctgtaagaacatcaactctttactcacagatctcattttctttctttcattcttttgtttgtttgttttgtttagatctgaatgtatgaaaaagttttgtttgtttctcgaaatgtaattgctaatgatttgaatgatttcaagtttaatttgataatttcttcaatcacattgttaggaattgtagtagtattgaattagattatcaaataaactatttttggagagatgaagttgcagctaaaacgaacactacaagatgaaacatacattttcaatctttttagttagagatacatatatcagatatgatcaagaacatagagacacacacaaagcaagaaaatgttttggagagtgagtatgaaagtgtgattttcactatatgccatctttaaaacctcatactgtattttttcgattctagtgttaaattaatggttgaaataacatgtttgttcaaagtgttgaacataatgttctagactaggtcttgagatttcctgttagattattttaatgcaagaagctttatttaggactatgtatatactgattcatttaaactttttttgtgaattctatcaagtcattaggattaagggtgtaaaa

SEQ ID NO: 109975 - DNA, 758 bp, Aquilegia coerulea
  Intron number 1 from transcript AcoGoldSmith_v1.017274m (l ocus AcoGoldSmith_v1.017274m.g) derived from phytozome v7. 0 (chr-ID scaffold_2; pos 768181 to 768938)
catatcccagggatacaggctacaggtagaaaaaaaacaaacaatactatcagggagatattaaaagaagagattttggcacttatccccatttgaaagtcgaaatttgcgttaccccctatttgaaaaaatatagcacttacccacccaattggacggaaaaaatagacggtgttacaaaaacatggaaatggttctgggacctcattaagagtctataaaacataaatggcccaactaaggcctggtttataatattggccttgattaagtatttctcagataagaaaatactcatttaatattaaaattgtaaaaatagcccttttactaccgataatacctttctggtttatgcaaacaagtctttacattttaagggttatatggtggtggttgttgcgagtatgcaaaaaagtctttgcatttaatgtttatgtatgttatgactgatgcaaacaaggctttacattttatagtttatgtggttgttgttgcgagtatgcaaacaagtctttgcatttaatgttgaattaagttattactgacgcaaataagtctttatattttatggtttatgtggttgttgttgtgagtatagaaacaagtctttgtattttatttttatgtgttgtgactgatgcaaacaagtgtatatatgtgtttgtcataagtaaacaagtctttgcatcagtcaaaaaaaaaaaaaatcttatggtttagttccaatagtagttgaacatacatcaagaagtgaa

SEQ ID NO: 109976 - DNA, 1050 bp, Aquilegia coerulea
  Intron number 1 from transcript AcoGoldSmith_v1.026153m (l ocus AcoGoldSmith_v1.026153m.g) derived from phytozome v7. 0 (chr-ID scaffold_26; pos 841926 to 842975 reverse strand )
tcctgattctatctgttacggtcttcaaggcactggtaatcttatgttatgtaaaactaatttgtagggtttcttgtcttcttatcaacatgatgaaaaactggaataactaagtatgatttattagcttctaattcatagctaaaatatctcaattaagtagtgatcatttacccaaacatgccctaccctaaaaattttacaatggaggatttctgtttacatcatttaagatatattatttggtacaaatattgttttttctactcttcttatcaacatgatgaaagaaaaactggaataacttctaatttatgattggaataacttctaatttataggtactacttagtaatcatttacccaaacatgccctgaaaatcccaatccacttttataaattgatgcatactctagaatgaagccttttccgtatttgttgtcatccctgataatcaacgttctaggatgagaaagaatttgttcggaacctaactctccaccagatgaagccactgtgactttaaattttttgagatttttggacataccccccaatttgaaaaaaaaatttgagataacccccatttgaaaaaaaaattgagatacccccatttgaaatttttttttgagataccccccaatttcaatacagaagcgctttacagccgtaggtaagttttatggtggacggctaagataacaccacatcttgaaatggggggtatctcaattttcgactttcaaatgggggggggggggggtttatgtccaaaaatctcaaaatttttaaagaaatttgtttatatcccaccagggttaatagcacccaatgtttaggtgttttatttgtctaccaatctcaaatattaaaaaacaaaaattaaaaaaattaaatttttttttacaacagccacgttgcttcatctggtggagagttagcttccacattctttaaagagtgtggaacaaattcacactcttctaggattatatatttagttatttatgagttattcaattttttgaagaattggcgtgtgagagaga

SEQ ID NO: 109977 - DNA, 685 bp, Aquilegia coerulea
  Intron number 1 from transcript AcoGoldSmith_v1.002617m (l ocus AcoGoldSmith_v1.002617m.g) derived from phytozome v7. 0 (chr-ID scaffold_57; pos 1480583 to 1481267 reverse stra nd)
aagattttacacttgggagtcaataatctgctaaggtttgaacttgttcttgctatattgaatttctgattgtttttttgattgaattggcttttttttatatggaattatgaagaaataatgtatgttttgattggatttggatcttcatttatgcccataactatgcgtaaaatgattactttaatatacatgggttttgtgattgggatacttagattgactagtttttgtattgaaattgtaagtgggactgaagttgcgtagttaaattgatgtggagatagtgttattgatttgtgtaatgttataatggtatatatggaatgcgtttaagtggttttagagatgttgattgccttgatgttgtttgcttgagtgattagaaatgtgcaaatgccccatttgagtttctctcattgagctatacggatctgaaagaaggaatgcttagaactacagaagaaaaacgggatgcttttaagatatatatttaatcattatttcttcttgttgttgtttgcgtacatgatatgcagtttgtgtttgtgactttgtgttgtatatttacggcttatgttttatagttcttaccattgtctataatcattcattgaaaggcatctgagttggactttttttcttcttaggcataatcttttacattcttccgtgttgaatctat

SEQ ID NO: 109978 - DNA, 732 bp, Aquilegia coerulea
  Intron number 1 from transcript AcoGoldSmith_v1.001401m (l ocus AcoGoldSmith_v1.001401m.g) derived from phytozome v7. 0 (chr-ID scaffold_2; pos 4633642 to 4634373)
aacgcaagtggtcttagctttgaagaactttacaggtttggtttttattttattttattttattttgttgtgttgaatttatagatttatgtgtttaaaatttgtatggaaatttagttagattatatttatatgttttattaggatttatagttttgtcttaaagatgaattttcattgtatgcatcattctccaagtagttggtttattggtatattatctatagactataggcttatgtttcaattattgatggtggagtcgaagttgggttgatgctataattgaaatattttaggcttagtcgacagtgttattaactgaataagcaccatctacaaaaggaagcttttctctatacaacagcaaaacacttccaatcaagaaagtttagacaaaatgctcataggttgataggaatgccccttataactgattttgcatttagtggaaaagaaacttttgacatataggataaatgcagttttagatgactcactcttgcgttgctcttattatttccattaaattttcgcacatgtagaaaaatggaaccaattgtttattatttgatgcttttcttctgatgtgactttgattagcatatttctgtagttccattaattggtgttcattgctcattatcgtcacggttattttgcaaagtgcaatgtttttgtaggggtattaaaatgttacctcctgatgttaaatcatttgttggtttagga

SEQ ID NO: 109979 - DNA, 616 bp, Aquilegia coerulea
  Intron number 2 from transcript AcoGoldSmith_v1.010492m (l ocus AcoGoldSmith_v1.010492m.g) derived from phytozome v7. 0 (chr-ID scaffold_2; pos 1444806 to 1445421)
gtgagagtggtgatcgtctcaccagagctgctaaggtctttctttcgatttcattctttatttttaacattccaagatctttgtgctataaaatggtttaaatgatagtctatcactgttgttaatcttattgtgaaagatattcgatcttctgtgatgaatcttttgatattagaaatagttcattgaatcatttgtttagatatctgttaagtagaaagttatttaaaacattaaatttgttttgagttgcaatgggctctagcctctatgtttaaatactatactgtttggctcttcttttctttttctttccaattgttgaaatgttttattggttttcaatcttttcagcaacattatattgcagtagaataatcatgtaccttttttgataaatggattgttcgaacatatatcacaaatacagatgattgcaaaaattaaaaatcaatgttcaatgttttatcaaagatgataaaatgtctgtaaaaaccattgctctatgctgcatacgatgtgtacttgattcttcttttagtcctcgtaaaattgtcgtgacatgtgatatgtttgtgcaggtcttggaacagctgagtgggcaaagtccagtctt

SEQ ID NO: 109980 - DNA, 443 bp, Aquilegia coerulea
  Intron number 1 from transcript AcoGoldSmith_v1.012947m (l ocus AcoGoldSmith_v1.012947m.g) derived from phytozome v7. 0 (chr-ID scaffold_2; pos 529323 to 529765)
ggttgattgatcaattgggtgctaccgatcatatcgtttcaacgagcttcttcctaccatgccttggaacactgtcatggtaaatttctttgtcttgactctttttcgttcatgttgtgtttaattagtgtatgtaacgtattacatatattcttgcatagttattggtagttttcatccaaaactggttgtggttttttgtgtgttttgcaagctggtttaattttgttctgaatttagggtttatatgttttgatattcgatctttgtctagatattagggttttgtttcttctatttggccaaaccctaaaaaatccggtggcaaagaagatttgcatgttggataacattgtccattgtcgcatttaaatttgtcgcattgaataatctgtcatatatatactaataagttttgcattgcttaatctgttcaggataca

SEQ ID NO: 109981 - DNA, 455 bp, Aquilegia coerulea
  Intron number 1 from transcript AcoGoldSmith_v1.003991m (l ocus AcoGoldSmith_v1.003986m.g) derived from phytozome v7. 0 (chr-ID scaffold_2; pos 7729816 to 7730270)
taaagttgcgttctttagaagcgaaactatcagaggtatgctaatgtatttcattattgatcattatagttatagacgtcttgtatatagaaatttagaagattgagatgatattgaattcactatgaacaattcatctgagaagattttaattgtgaattagattgatttttctttaaaatcccattttagatattttgatttaaatactttccatgaatggtttggttttctgtgaaaaaaaaaagatattattttgaaacttttgatgcaatatccaagtaattatattttttgttattaattgcttggaagatgtttaagtatttattttcagtttcagctgaagtttaggagctttcttatgtatgtttgtgtgaatagtttaagttaattttcaggttttgttattattggcagatttagtgattgtggactgaaggattcttacctac

SEQ ID NO: 109982 - DNA, 975 bp, Aquilegia coerulea
  Intron number 1 from transcript AcoGoldSmith_v1.003509m (l ocus AcoGoldSmith_v1.003509m.g) derived from phytozome v7. 0 (chr-ID scaffold_58; pos 1027419 to 1028393 reverse stra nd)
gttcttggccacaactcccctctcactcttcaaaggtagttatctcttagttactcttaataactaccctttacagtattctgtttctttagcttcaatgagcaaattcagcatatttctgttaattccgagattctcgcatcttatatactcatttctatttttacaataaattttgctaaaaaaaaggggttcttttgatttaggacaaaaaaaaaaaaaaacttatttgttcatgatgtttaagttaagagcaaagataaacaacaaattattttgttatcctatgattcatcaattctgcattccacatttggttccggcgagaaatcctatgaacaagaaatagagtaacactaaattgactatccccaaagaaaaaaaaatgaagcaacaatgaaacaggggctgtcacccttaattagtctaaatactattacaagtacagaacataaattacttagtaaggtttgagtcaggaaacaattttggactaaaatattctttctgcaacatcataatgaatataagctggctttcaccaatggcatggtatgtgaaatcacgatatcaccaccgttagccagctttcttatgcccctatcgcctgtccttcactctcgtccctttccatctcgtacgaagtcctaaagtgccatacaagatgtcctcattgtgtaacctataaggtatgtttatacagttctattaattagactaatttgtatgggtttcaaaagactaaatgcaagaatgatgaaagtcttgtaaccatcgatttgattgtccatgggttttccttctcttggaggcttcccgacttatcatgttggagtactctgatagtctgatgatccattttcttctgtttctatcattttcattctcgagtgcttaaaaggcctacaattttcttttgtccttcgtgccacattttttggttttatgcatcaaacttctcatacatgtgtgcag

SEQ ID NO: 109983 - DNA, 708 bp, Aquilegia coerulea
  Intron number 2 from transcript AcoGoldSmith_v1.000263m (l ocus AcoGoldSmith_v1.000263m.g) derived from phytozome v7. 0 (chr-ID scaffold_2; pos 3482362 to 3483069 reverse stran d)
gctggtaatacttctgtaactgctgttttttttttttttgtttttttttattgagaagaagagtttagtgctaagattttactgagaaaaaccccatgagctcatggacccacactagtttgtcttcttggagactcagagcggctagaacatcaatctccctgtcgttaaacacctaatctcattttccactaggacaaagttattaaaggtaagttttttacaattggtagtgcaatagagatctggatatgaaggggtctctccctatcctaggtatcttcttaaaacctcactctatcccctcgaccgatactaaacctacatttgagctaaagtcctcaagttcctccataacacccttcaacaccacacacccgttagagatatagataccgcccgactctcgcagcccaaaagatttaacccatgtttagtgacaatgaccctctccaaagatgatcaatttcacttccaaactgccacaacacataccctctcctaactgctgagatgacagtggtgaatctagtatttcatagttttttttattgacaatttatctctggagatgttactctcttaaacttttcatgctccataagtttaaggaattactgtatgcatatattagttcttctaccgatagtaactttggcagtcttgctattttgactctttttaactgggtttttagggggatcggag

SEQ ID NO: 109984 - DNA, 382 bp, Aquilegia coerulea
  Intron number 1 from transcript AcoGoldSmith_v1.002127m (l ocus AcoGoldSmith_v1.002127m.g) derived from phytozome v7. 0 (chr-ID scaffold_7; pos 1066556 to 1066937 reverse stran d)
ggagtatcttcaggacacaaacattctaagaggtaaattaatgctttctttgtcagtttattctctgtttctttctatgtcatctgtagctggtgagtggcctgaactgtaaacaatcttgtaatgcactattaaaacaaaaggggtatgctttattacaggtatagatatcaatgttttggcaagaatgaaatgatcatacttctaataatatcaaagatgtaatgttattaaggtcaattagttaaattaggggaaaacaataagaatagttatagccttataagggttctttgagaaagtagagattattaactaaatggtatatgtccactatgttgagcttgatggttgtttcttgtccgatttcagtgaacctgat

SEQ ID NO: 109985 - DNA, 847 bp, Aquilegia coerulea
  Intron number 1 from transcript AcoGoldSmith_v1.021806m (l ocus AcoGoldSmith_v1.021806m.g) derived from phytozome v7. 0 (chr-ID scaffold_34; pos 1586343 to 1587189)
tctggtatcacatgatagaggtagaggtggaggtgtttgattttttggcctcgtaacataaatacaaggttctattaaactaacaaaaataggttttctttgtgatgaatcaaggaattaggaataccataatttggatacacacttaaatctacatagtgatttgagaggaagttttttgagtatggttggtataagatcaaacggaatttcagaaaaatcagcacctctgtagcttgcttcttattcttattattcttttgtcttgctgctgctgttgttgctattttgtatatcaggctgcttttcttcttcttcaaacccccacaacttcggagattgtaccttttctcttcaaattctcttttcattctcgtgcagtagtgttttaatggttaatttgcttaatcaaagcaagcaaattgcaacttagatatatctaagttataagacacaaagggtgcataagttggggagacagtttataaaagacaattttgagagatattttggatcgtaggatgttgatattttggaccgtaggatggtttattaaaataataaaccataattaaacaccctaattaaacattaatttgtaaacaatacgaaaccctcctctcttctcaacaagcctcattctcttctcatcctcatcgaatcaatacagtatctgttgcgatctgttgcactggtctctgcgtttctctctcaaccatctccagcttctgccttctcaattggcatctgtacgtctctctctctctctatattgattttggtttttaagttttttttgtgattttacacagcaggacctaaggattggttaagagagcagaagaag

SEQ ID NO: 109986 - DNA, 746 bp, Aquilegia coerulea
  Intron number 1 from transcript AcoGoldSmith_v1.016040m (l ocus AcoGoldSmith_v1.016040m.g) derived from phytozome v7. 0 (chr-ID scaffold_3; pos 6197261 to 6198006 reverse stran d)
gaattatttctcttaaacttcaaggtcagttcttcctttcgacttcgatttgtgtattttgatttgggttttctattgatatttacttgttgggtgcgttttacatttaaatatttaatttagatgagaaaattattggggatttgaagaaatttgatgaacacaaacatatgtgatatactagactatataagaacagtagaactcggcaattggaattttgagcagattccaactgtggtgttttataattctgtttttcgcctttttgaaaccatttgatgttacgaaggaaatagggatgaactgagcatagtataaataccagtaaatggattaaccacatcacacacaagaaaatataaaaatgttacgtgtgttggtgtctgcatgccgaaactgctgagcatagtatactgcttttcatcctttgatggagaaaatatttaactgggagttgctcgatggaaactttagtttcctttgtctgttgatccctccaccaacatcttactagtgcttacgaacgaattatgcacaaacaatcattagtaaagtttctttttgatctcatggtttctgatcaaatcaatttttcagaaacctttctcatgctctgccaagtctgacaactcactctcaaatgaatttatggttgtctttgtatgcaccaatgccatcgtttatatctggtgataatcttgttgcaagtctctctctctattgtcgattttacctcgaggata

SEQ ID NO: 109987 - DNA, 1017 bp, Aquilegia coerulea
  Intron number 1 from transcript AcoGoldSmith_v1.003239m (l ocus AcoGoldSmith_v1.003239m.g) derived from phytozome v7. 0 (chr-ID scaffold_3; pos 10200991 to 10202007)
gtcttcagtatcaccctgaggtactttgttttgttttcgagttatttacttttatttttgtgttgataaattgattaaacaaaattgtggtttctgtttagtatctataatgtttatatacatttatattagctcaagtatttgcattgtaatatctttaaatttctgtttccatgtgcgtttcaaatgtgtgctactgagaaatgctttcggtagtatggatttatttgcatttttgagatagtggagtagctattgcgaacaagtgtttgtgtgataaaatgagaatataacatattagaaatcatacgaggctcatgctccctggaggatcgtaacagattctagtagctaaacgataaatggtcctacactcctactgttgatattggaaattgatgagtggatagttctctgtttagatcgtatacatttaggtgagcttttactgacaagtgacatttgaggattgaatagctctttattttgatataagtttaatatatacacacagcttcatttgaagttgaggcttgtgagcaggtattattttcttccacttaatgcctgggatggtattttttatcttcaagtgtcttttcactacattggtgccttaatcctcacattggttgggagtgttagctactctgtttgtcacatatatcagattggatgtaagcctaggcattttattctatatcgtgggagtcatttactgtcactaatgttttcttaaaaggttgaatattgagctattatttctcaattcctttgatccatgatatgagtatagtaagaatatcagagctatggataatcttgatgcgtattgagccacttgttgtaaatgatgtgggcatgagagtgagtatagtaaaactatggcattaggctacaactttgtcgtagatttgattttcatgagatatttaagaaaccaccacaatttatggtatattatgattggtggtgatttatgtgatcttcttttaggtaacacattcaccagaagga

SEQ ID NO: 109988 - DNA, 741 bp, Aquilegia coerulea
  Intron number 2 from transcript AcoGoldSmith_v1.016610m (l ocus AcoGoldSmith_v1.016610m.g) derived from phytozome v7. 0 (chr-ID scaffold_34; pos 1573323 to 1574063 reverse stra nd)
tggttattttctcagtgaaaccacaagttggtaatttcactactccctcttcaatcaaatatattttttttaacattgattatagacattttgcaatgttacccaagtttctcatgtaatttgtcaaaggctttttttataatttttcttccatgtatgctaagtttagagttagtgtgcactgccactaccacaaccacaattcagtgtgtccagtctttcacatcataaaccacacggaaaactataatatagaaccgtgagacggtgggggacagactttagaagaaaaataggagagggacaaagagaagaaggagaattaagagagaagaaagacgaagagaagaaggagaattggtgaagaaaggtttttttttttttttttttgaagtggacggagggacactgttttttcccccacccgaagtataatggacctcctaaagtcggtcgataatgctgagaaactccttattgaacgtaatcactgtcattatattgtggggtacttttttgataattatatgagcgaatgcttttttgccatactgcgcgtctgcgcatcacatgaaaaatggttaggccttaattgtatcattcgaaagtgttaattctaaaaataagtgtttgtattcatatatcatgagtaccatttgattatttatgcacatatttctcttactacggattgctaccattgcagttcaaaaggtggtttcccaattaaagcctctgctt

SEQ ID NO: 109989 - DNA, 239 bp, Aquilegia coerulea
  Intron number 1 from transcript AcoGoldSmith_v1.016610m (l ocus AcoGoldSmith_v1.016610m.g) derived from phytozome v7. 0 (chr-ID scaffold_34; pos 1574067 to 1574305 reverse stra nd)
aacaggttagatttcacaaataaatcaaatctgatctctctcttctattgattgtcaattgatttgatcagatcattctcaatttatcaatcttcttagaatttttattttttttaaaaatgaaatggattttctctgtgaaatttgttttctttttctaattatgctttgtggggtttctatttcaacaaatgtggatttcattttctgtggtggtgtacaggttgttgaaaacagtg

SEQ ID NO: 109990 - DNA, 867 bp, Aquilegia coerulea
  Intron number 2 from transcript AcoGoldSmith_v1.012103m (l ocus AcoGoldSmith_v1.012103m.g) derived from phytozome v7. 0 (chr-ID scaffold_2; pos 575279 to 576145)
aaaccaagtacccgattgtcgaacctgctcatgtaaatattaatttgtgttgtattacattttatttctgtttgatttggacggaaagaaacatgtttatgtgaagtagctcatgtttatcgtttctctctgaaactctaattaagctgagagtgatagtgtaattctttatttacttgaacgcctaggtgttcttaaacagtaggatgattggaatcaataaaagctatactgacagaaaacataaatatgcatatctgattcgtatgcttccacatttttgttgctacaaacagaattacaactaaggcaactcacagatgtttggttgtataattggtaggtcataccactattagaatctatagggaagaagatacagttaaattcacttttctgtcattactgaattacaagggcatttagtgggactgcctatcaagacaaccaaagctcagccaccgcagtcctagttgtatttgtaaccgagcgaatcaattaactttgttattctctgacataaaaatgccaaataattccatccaatatgttgactttttactacttgagtgattaaagatgaataatgattaggcataattctcctgattatttgagtttctgttgcggtaagcaaatctgctagtaataacttggatctctactttcttattgtcattagagacgtatgcactcctctgtccaattgtgctatctcattttgaggatctaaaaaagaatttattctctgaaatgaaatgaattgcaaatcacaatatgttctgccatttcgtactctgatcttattcttttataatttaaaatttgccaggagttagcagaaccatcaatcaaagctgcatttaa

SEQ ID NO: 109991 - DNA, 649 bp, Aquilegia coerulea
  Intron number 1 from transcript AcoGoldSmith_v1.009457m (l ocus AcoGoldSmith_v1.009457m.g) derived from phytozome v7. 0 (chr-ID scaffold_13; pos 304353 to 305001 reverse strand )
gcctcaggtagtgagatttaatttgtctttaatagtttcttaaatcttaactcaatcaaacaaacaattctcatttcacattattagttctttcaataatttttttcctttttcttttgagcttaaattatgattttaaaagtttgagaaagctttattgtagtacaaaagattttcttgacaattatcattcaattctatgtagttcaaaagactgtcatcttgagaaattttatgtagttcacttgttcttggaagtactactactacatatacttttccttttcttcactctttatttgttgtttttttgtttttgtttgagtgataaaggaatggaaaaagctaatatttgttattattatttcttttttgctagtgtaatctagaaagtataaagcatgctaccttgttttgttcttctgtctttcctttcttccttttttcctctgatcatatatacactatctttactttcttttagttaatagtctctagagctatagtgatgattgattctttacttctggtatttcagctcttagatctatataactaggtgcttttaaatctgcaagccttttaataactttgtttttatactttggctttttattaggagattggtctggtgaaacccattgaaggg

SEQ ID NO: 109992 - DNA, 830 bp, Aquilegia coerulea
  Intron number 2 from transcript AcoGoldSmith_v1.008364m (l ocus AcoGoldSmith_v1.008364m.g) derived from phytozome v7. 0 (chr-ID scaffold_13; pos 5236904 to 5237733 reverse stra nd)
gttcctgaaaacaagaacgttttctattcaagaaggtttcctgcttttttttcttcttcttgcattagttataacttcactccattgctattcaattgcttattttgtttatcatagtaatgaaatgaataataagaatataagatgcattgagcattaaatgtaatcttacaatttatagaattataggatgaaatacgctcatggagtaatcgtgtgagtgggaattttttcccttatacttcaaggcacaaattgttccatctatgcaaggattgctagagatttgacaacatagattgttagcgtgttttgtcgtagtaaagtgataattgagaccccttattccgtttatctgattttgtcaaatgatatatagtcatgggtaggaagattgatcttctaattaagtgtaaggttttttttttttttttttttttatggataaattgttctgagtgagattttcatgggagctagttagtcgttatcaattattgttcatttgatatgtgggagacagaggttatggttgagctatctgttttcataccctttttgagacagactaccattttgtgagaatgaaaatagatagttgcgcacttgcacatggattcattattagatcaaatgagtggctgaactgtgacattgcatctcctgagaataatatcagattttgtgttatatagcattttttcttgtgtttgtgaaaacagttgcacatatcttgttaaatttcgagtttttaatcacaaaaggaatcagaacatatggtaatatagttttgtcaacttttgcagtgagtttgtctttgatctcaatag

SEQ ID NO: 109993 - DNA, 850 bp, Aquilegia coerulea
  Intron number 1 from transcript AcoGoldSmith_v1.005744m (l ocus AcoGoldSmith_v1.005764m.g) derived from phytozome v7. 0 (chr-ID scaffold_35; pos 195550 to 196399 reverse strand )
taattgataattgtggtcattcggccatttaaaaggtaaattattattgtttcaataccagtaaccactaaccactaaccagtattgtatttaaattcgatcgtttttttttcaacaaaacaatgtatgtttgagttgagttcagtctgctgtactgtttttttgcaaattgattcgttttcttcaattcacttcactttgtaagttttctataattcgctcgtttttaattcaaaattgtttgaatgaagttatgaattttagatctcgaatttatcagttcatttttttgattccctttgacactactagaatagtttcccgccttttctgttcatcatctttcttcttcaactcgtttttaagaaatagaaacggaactctttagtctttactcttcagttttgttttggtagcgtacttggttttgacaaactttactctcacatttcttttcttttgggattcttcttaaaacttctaagcttctttctgttatgtctcctcgaatcgtgttctctcctgtcagtaatcaggattcttaaaaaaacttttctgttttctttttgccttttttttttggtagaacttcctttactttaagttttcgtgttctctttgagttcaatttgcacactttgttcattattaaaccttgttattgccaggaagtaaagcaacaaaaaagtgtctctctctctcacacacacacacaatttccgtgtttgattatgttgctttttaaattaaaaattaattttgttttgattttatcctgttctgtctctgactcgtgttattatttatttttgcagagatctaaaggaattgacacggtacttagctagct

SEQ ID NO: 109994 - DNA, 953 bp, Aquilegia coerulea
  Intron number 1 from transcript AcoGoldSmith_v1.011525m (l ocus AcoGoldSmith_v1.011525m.g) derived from phytozome v7. 0 (chr-ID scaffold_34; pos 2328999 to 2329951 reverse stra nd)
gtattgctcaaacaaaacccaagaactgaggaaaggttaagtctctcattctttcatcaatttcacaacctcatcatcacatctgcaccagaagcaaaaaaaaaaaaaaaaacccttttcttttatttttgttattaattcaaatcatctctcttttctttctgcagtagagcaaaaatggtaacaaatctatataaagttataattgtttcttttaaatcagttaatagtcttcatcaatagttagatctgaaatagtagcactgtagtagtttggagtagtagaataagaacagaaagatatatcttttctctttcacttgaactgaagttcatctatttcttgttactggtgagtttctgatcttctctctctttttttctctttatctctttacatacttcttgtttctttaactttctggatatagttctcccactactactacactagtcactagtgtgtctatttcatctgatctatatattttccactcaagtttcaacaatttccatctgaattcctttctctacagtaagtcaatacagtttttcttctaatttcatgtgtatcttcagctttctccctagctactatatctatatctggtttgttcactctctacagtactatctttcaatctgttttctttctcatttctctattcaagtttaataattatatattatagaattatattctctattatttctccttgtctctctctctagtcttgatttagatcatttatttctaaccataaagagtaagtactaaaaccctagatactaaaacattttgtgtaatataattaccaaagagtaaacaattaaaatatttttttatttatttattaacattaattaatgtttacaatttattaaccaatatcacttttgcaggatccaagaaaactactaaagaagaagaaaaaagaagttagaaattctta

SEQ ID NO: 109995 - DNA, 800 bp, Aquilegia coerulea
  Intron number 2 from transcript AcoGoldSmith_v1.000294m (l ocus AcoGoldSmith_v1.000294m.g) derived from phytozome v7. 0 (chr-ID scaffold_26; pos 699406 to 700205 reverse strand )
aaccatcacacataacaacaatctcagtttaattggtatgtagtagtgtatttctattttcaatttgtctcaacagtgtgtaaatcttatttataagaacttgtaattctgtagtaattatggttgattcttaagttatctgataatatcatttttatcgaaaacaatggagatttaaatcaaaagcaatgacttggaagcaaacctttccgttagataagtttaagtgaaatatcacaatagttatgttagtttgttgaaaagtttacacacgaacttgcgctgatggaaactattttgttatttaggtaagtatttgtacttcagtccagtttgttggatttgaaatgttgtgtactaaactgtttggcttgacttggtatatatacacgagttgatttagcgaccttatcataattgtgctcagtttgctatttaataagtttccatatattttagtgaaaggtgtttttgatagttgctctggaaataataataaaattatttttttccatagttccaaatatcgtcagatttcaccaatatccgatgacgtatgccgatatttgagaaatcggatatatcgtgtgtcagattggattggtgacgacataccaattggtttccagtgttgtcggcataatccctttttttagcattcgtaaatcgaaattttgccccaaatgtgcatcttgaactatgtttttttcctcttgattttattttatagatcttgacagcaatttcaattattggatatttggtttttggatgttttcttccagaggttgtcaaaagta

SEQ ID NO: 109996 - DNA, 718 bp, Aquilegia coerulea
  Intron number 3 from transcript AcoGoldSmith_v1.024700m (l ocus AcoGoldSmith_v1.024700m.g) derived from phytozome v7. 0 (chr-ID scaffold_16; pos 156879 to 157596)
agcagcgccagaggtagacctacattatttatttgtgctgctttttcaaaataaacaattactctaagggagaccacatggaaatcttttggtaattttgattcacttgatagaaatccttacttttaagtcaatgtggatcatatactcttctgtatacaatatttgaaaacaaggaataggacatgtgacatgtctgttattacatgtttgtgtgcgagaggtgataaatatgactgaaacgttaataaatataaaggtaatatgccagctgcttgattttttttgagtgaattggttggagtgctgaaatttgtgttactgtatgtctatctgtgcaaacaatttccatgcacatgcttttagatgatatttcgattaagttatgtagagtgtagacatgtttgatgtggaattttgggcaactcacctgatagaagtctttacttttaagtcgagctctggattatatatcgtgaaaacatagactaggacattgtctgttattacatgtttatatgcagtgaagattaatatgatcgaaacattaaaaggtaccatgccagctgcctaattttgtctgagtgaactggttggattgctggaaaagaaacctgtttctgtttgttaatataacacagtatttcttagccagttaacactttgtgctgaagtttgtttaactttatgtctatttaagtaaagaattttcttggac

SEQ ID NO: 109997 - DNA, 663 bp, Aquilegia coerulea
  Intron number 1 from transcript AcoGoldSmith_v1.026441m (l ocus AcoGoldSmith_v1.026441m.g) derived from phytozome v7. 0 (chr-ID scaffold_56; pos 1353970 to 1354632)
aaggtctatttcattcctttctagtgtaattcttgaaaaccatatgaatataatttgctaatatttaagttgttttttttttttttatttcaatttctcttcaattgtttagcttatacgaattttaatggttacccaagcgttcaatttgatcatttaggtctagctttttttaaaatatcgtgtttggagccctaactgatactttgatagtacattaaattgatcaagttgattaccttttttgtataaacaattgcggttgaagagattctgcgttcttttttcagatatgaagtttattaatgtcttgtggtagatttattgcaatttgttcttgaattgtcaatattgtgaattatgcgtattatgttaatttttttcttgtttaaattgtcagaatatagtatccatcatatgtattagggttagaatggatggtcatggttggataattgattgggaatttgggatgatttcctatgggaatcgggttgccttgtttatgccttggttacatagactattttcaattttgttaatttcacatgttattctatttaactttgtatatctgtcttgcctggaagttaagtgtttttctctttttgttgttttgaacattcagtgactacgtgctgtttagcaagagaagctttgaat

SEQ ID NO: 109998 - DNA, 464 bp, Aquilegia coerulea
  Intron number 1 from transcript AcoGoldSmith_v1.013378m (l ocus AcoGoldSmith_v1.013378m.g) derived from phytozome v7. 0 (chr-ID scaffold_7; pos 451942 to 452405 reverse strand)
tcacttactgaaattcgcaagttcaaagaatctgctgatcataaaacacaaagtctcttgttgaaactgggttttggatttggtatattctttttcatgttgattattttgtccgtgttgctgcattccatcatatggagtatggaatgaaacattgattagtaatattgttagttacctggtgtacatgatttgaagattgtgattatatttttaatcttttattgatttctatttgatgtttgttatttcagtagttacacaaaatatatggaaagttggatcttagatttgtttctcgagtttctgactgtcgaattatgttgttatagattttgattagcggaactctacagaatgttttcattaacttgttcttaattattcaatttgctttacatacttttatttggattgtttacaaattaggggtactgtaataatcgacagttctgtggatttgt

SEQ ID NO: 109999 - DNA, 162 bp, Aquilegia coerulea
  Intron number 1 from transcript AcoGoldSmith_v1.010617m (l ocus AcoGoldSmith_v1.010617m.g) derived from phytozome v7. 0 (chr-ID scaffold_8; pos 4422485 to 4422646)
cccagagtaagtttttcttctaattcccttcaatcttcatttttattgactattgttcgtgttcaatcagtgtacttaatctaaagttgttgattttgattatgtgtttttttttcctcatgattagctatcggagtcgggtttaaagaaggaagttagaga

SEQ ID NO: 110000 - DNA, 979 bp, Aquilegia coerulea
  Intron number 2 from transcript AcoGoldSmith_v1.008671m (l ocus AcoGoldSmith_v1.008671m.g) derived from phytozome v7. 0 (chr-ID scaffold_3; pos 8523200 to 8524178)
actactatatctgcagatttcaggtatgttttgttcaataccagatttctggtttgttatctttctgatgtactgtagtagatatctgtttgaaattttgaattaatggcaggaagaaaataaagaacattctctaattatttttactcgactttgctttagattagaccaacacaatttctgtatcacagtacataatttgttgcctatgttttcgaacaaatgcttgagccaggacactgggttggcctgcccctttcttaccattggcacatatgtaaacatgctcctcacacaactttaacttatgaagctggcatctgttgctcttagttattaaaaatgcgtttcatctatgatgtttaacatagataagctagaaggcataaaataactaaataccttgtctcgtgtgacctcttgtaaaaggacttgagtgcagtattctggcgtaaacgcctcttggctagccaatacagtaccaacaatctatactgcaaaagtatccaagagatgtactgcaaagtgattaatggttaggagggtttctttgaacaaggttctagattgcaagtttacacaatatgaaaattctgacatggtgtcttttcatacccgcggtgatgtcaaaatgtctgagtgaactttttttttttttttatggaaatgcctgtcatatatatatatatattatattagaatttccattgaagtagtttatctttcatatataccctctaggaaatataatacagtagacaagaatctcctgaatgggtttggaagccaactttgaagtgtttttcattggtgaattgcaaaccttggtaacattagcaatgaagttagcaacccctaattggcatactatttctcaattctcctgggatggattgcctctttttatgatatgatttctcctttgacatattatggtgcaaactgcaggagccaggagtaattgaagctgagttttttc

SEQ ID NO: 110001 - DNA, 310 bp, Aquilegia coerulea
  Intron number 1 from transcript AcoGoldSmith_v1.005197m (l ocus AcoGoldSmith_v1.005197m.g) derived from phytozome v7. 0 (chr-ID scaffold_39; pos 453633 to 453942 reverse strand )
ttattttgatctataaaggtttatatataaataaggtatatacctctgtttttcttttcattatagcaaaaatcccccaaggtttgtttttgagtttttaagtttttcttcatgttttttttgttaaaaattgcatttttattggtttagaagatttgggtatttagaaaaactgctaaaaaatggtttttgattataaagttgtgatttttattactttaagtaagcttttgaagttgggtttgaagtaattttgttgtttgattgagttgcagagttacagaagaagaagaggagttagctaaaaggg

SEQ ID NO: 110002 - DNA, 139 bp, Aquilegia coerulea
  Intron number 1 from transcript AcoGoldSmith_v1.026388m (l ocus AcoGoldSmith_v1.026388m.g) derived from phytozome v7. 0 (chr-ID scaffold_2; pos 8920441 to 8920579)
atcctgttcatatcaagaaataccgaggcaagcgcgtaagttcttctctaaaaatcattcatttctttcttttttttcgacattatttgggggtttctattgtcttatcattatacatttgattgataggttggaatcg

SEQ ID NO: 110003 - DNA, 482 bp, Aquilegia coerulea
  Intron number 1 from transcript AcoGoldSmith_v1.013389m (l ocus AcoGoldSmith_v1.013389m.g) derived from phytozome v7. 0 (chr-ID scaffold_26; pos 749486 to 749967)
aggcatcctggacactacaaggtacatgatggcaacattttactgacattgatgggatttctttcccttcatctcatgtttaaatccttatctgtggttcagtacttgattacattttgttgggtggaaaaagattgttccactacatttgttttcatgcttaaatagatgtcaaaatcacaagacaaacgagtttttccatttgcaatgtttcattttgtttataagatgaagttttggaacttggtggttttattatgttttaatctgtttgattatccaggatttaatggcacaagcttttatttatttattcagtatttagtgtgcaccataactttacaacaagtagatgttctcttcccaggcctttcttgatacaacttcaactaagtatgtatagctattgataatgtgtattgtttccatatttataatgtgttcttcttcataggtctataacttgtgcgtagaagaaagct

SEQ ID NO: 110004 - DNA, 1031 bp, Aquilegia coerulea
  Intron number 2 from transcript AcoGoldSmith_v1.011040m (l ocus AcoGoldSmith_v1.011040m.g) derived from phytozome v7. 0 (chr-ID scaffold_35; pos 664755 to 665785)
tggagtgtgcagttgagggaattatagagacacaggtactttttatttaaaccaccccaaaacccaaaccaattgttgcttatttttagcttttcatatcatgccaagtatatctacattctaaaagaaataaccctctatatatttgtatggaagaactgccactatgggtctgtctatttgattcagtagagagatggaactagaaggcagtaaatattgaagtacactatgggtgagcagattgaaagaacctacccacccttaaatgctttcctggaatatcatgaaacagaaactgatttttttgatcattacttttcctattatgcttcgtggactgtaattttactaatttaatttgatgagtgatttttccctgagcatcacatgttaatttaatgttatttgtcaaattggttttgagataggatcttgttgacttcattatttgataagcctaatgacatggggacactgcaatcaccaggggcttgagtcccttgggaacaaagtgttcaaatcggaaaaacatagcaaatagaaagaccctgtggatttgttcaagaggttgcacagtgaagaaatgaaaaaattcaaacttgagaaggaaatagcccagatatctctaaagcgactcttatcagccgactttgcattttgtcttatatagtatataagtaaacattttaccctataacatggtttatgtgatggtaggtaactaggtactgcatatgtgaagtacagactgatacaaatagtaatctaacactctctgctacaaataaaatcattcgaaagggtgaaatataatatattataactgctaaataatacctttagatacttttgttatgatgatgatgattatgctattgatgtcttatgattcaatgaaagtgtatgataaatatatccaaaatgttgcctatatgtatgtcagtgaatccctttctaatacttccccctgacgcctatagagaatatgtagaattcccgaatttaacaattgagtttttccttgcagt

SEQ ID NO: 110005 - DNA, 712 bp, Aquilegia coerulea
  Intron number 1 from transcript AcoGoldSmith_v1.012750m (l ocus AcoGoldSmith_v1.012750m.g) derived from phytozome v7. 0 (chr-ID scaffold_2; pos 5211597 to 5212308)
ctttaattggtggaacatctggtgtttttgctcaggtaactttctttatttcatttcgatttttaatacttgatttgaaaatgcaatataattagtttatatattataaacttgatctgagctttcatcaatggattgcaatacaagtactgtaatcattccattgctttgatcaaaagagtattactgtgaaatttacatctaatgccaaaaatcatcttccataagccctatgttcgtcacattgaatggcagaacatacgttttctttagtttatttgctaaaagataccaaacacttggttaaatggtatttttttcgggtctgtttgattcaggcgggaaaaaagtttaccgggaaatagatttaccatctgcaaatattcgggaaataaaattttgataaaatagttataatgctacattgatcatgaatttttttggaaaatcatttaaatatgtttttagtgagagttcgacaaaattgagcttcaatttgtcccaacattttaacttatcatttcgttttaaatatttaccgcttatttaccatttaatcaaacatgggaaattaaaatttcccggaaaatctatttcccggactcgaatcaaacagaccctaaaagattctacactataaactttgaatgatttttttacttttcttcaagatatagtttgtggcgagtcctgctgatcttgtcaaggttag

SEQ ID NO: 110006 - DNA, 728 bp, Aquilegia coerulea
  Intron number 3 from transcript AcoGoldSmith_v1.026239m (l ocus AcoGoldSmith_v1.026239m.g) derived from phytozome v7. 0 (chr-ID scaffold_3; pos 10072260 to 10072987 reverse str and)
ctatcgaggattgtctgtatttagtggattcagaggtatgccacttaggtaatttcaatcagacgattgctatctttgcatactatcactctactataagaaattctatatgtccgtccgtttttattacaatctgagtgtgtgtccgcgtttcatgtgattttctcagtcgagaaggttattttgcatatcttgaaaggtcttgcctcgttatttctgatgctgaatatggtgtatggtttgagttctatattgaaaaatgtagattttatatatttgttctttctaaaaacccaccataagaaggtaatagtttttgtagccaatctaataaaaatttgctaaaccatggaggaatttcaaacatagatggaatattagtttttaatattttgttgaactggctctttcaagttttgtacaagtggcaggttgaagtagcttgtagggtacaaagactagatggagaggcatggtttaattggtgatttgtctaaacatagagttgaataagtttgttttattgactcagtaatatggataatgcacagactgcaatgataactggttgattgatgcaataaagttcactacttttcattccttgttgtgtttctttcacttcctttgcctcttcttataacattttaccctggatttttgtacaattattgtccacgtttttgcatgatctattctgtcacttctaatgttttctgtgaagaatc

SEQ ID NO: 110007 - DNA, 657 bp, Aquilegia coerulea
  Intron number 2 from transcript AcoGoldSmith_v1.005315m (l ocus AcoGoldSmith_v1.005315m.g) derived from phytozome v7. 0 (chr-ID scaffold_3; pos 8815722 to 8816378 reverse stran d)
ttaatcctattggttagtctttcttcttctttaagaaaaaaacaatttttgatttggagttttttgtgttaaatctcttaattttcattataaaaacaggaaattaatgatatcaaacaaactcatgtggaaactgtggcacctaaggctaaaataggtttcaactactctcatcataatgaagaaacttagatcctcttagtttgaccataccacttacaatcaaatggtttttcatatttttcattaaccttcttttagctaaagttggttttgctattttggtagtcaagaagttttgttcaaagacatgaatcatacttttggtaatgtactatctatctatggaggtatacaaacatatgtgtattcattttgtatataatgaaatagtttgataccaatctaccatcaatgtgtattaaaaagattgttcatcaattattatctatgcaataacagattcaggtccatttgatatcaattctatatgggaagtgtgtaccttgttccggtagcatttgattcattatttttcagttcagtatgagcctcatgttatgttatttggttggttggtagacaactttaaaaatggcctaataatatctgacacaatgttgatttggtggtcggtgacaggtgttagaagctgct

SEQ ID NO: 110008 - DNA, 832 bp, Aquilegia coerulea
  Intron number 1 from transcript AcoGoldSmith_v1.008909m (l ocus AcoGoldSmith_v1.008909m.g) derived from phytozome v7. 0 (chr-ID scaffold_26; pos 2276501 to 2277332)
ttgttgtcgccattgttccctttccattgaagttggttagtagttataacattttccttttcttagtcattcattcttttttatatagattatcatcaatccttgttcaattatcttataataattcacgttgtgtagaaattatgaactctgagatcccagtagtttgattttcacttacccaattagaacaaacaacagaaaagcaattttgaggaagaatataatggtcagatcaatatcacccaacaacataaaactcgtatttacaattcacaaggtacaagttgacaatttaaaatccattcacaattgatgatttgatagatagtactttgtgttcatttttaggattattcttgatattggggcaagcgaaacattcctaactagtattgcctgttatacaaatgataagcaagatgtgaagactagagaccagagtcgtcaatgaattgaaaggagttactctatcaaaataagggccctaggccctagctattcatttattggaggctacacgccacggagcttgatcaatagaggaaaataatatcaatagtgttggatgatgtagcgtgtaggcaaagagtattcttctggagagggaagaacagttttcgtttttttattgttgtatagaactttttttcttttttcttttttctttttcacttttgttataggccatctcgtcctacaaacatttttctgttaggtatcaacataatttcatctctactttgcaatttaagccaaataaatataacatcagccttgaaaaatgaatgacttctcatctttgaatttcaggtgcaaagttacagttcaa

SEQ ID NO: 110009 - DNA, 520 bp, Aquilegia coerulea
  Intron number 2 from transcript AcoGoldSmith_v1.011422m (l ocus AcoGoldSmith_v1.011422m.g) derived from phytozome v7. 0 (chr-ID scaffold_16; pos 2843904 to 2844423 reverse stra nd)
actcaagttgacaatattgcagagttggaaagaaggtaataataatgtaatatagttgatcttctttacattttaaaatcttagtttaaattaacactagaatctattgatttgttttgcaaattgattaaaagcagatctcaattagaattcttcaaaagttttgagctgtggtagaagtgaagttattgtattaaagaaaccatttgggatctgacatttgagctgtaatgttagctaagactagactgaaacagaaacatagtagtccggtaggagtcctccaatcgctaatttgcatacgggaaatttgtggggatgccagattctttgcattttatgcacttaagtaaaatgttagaattgcagaagtcactcccataagtctgatggttgaatcatttcatatgaatgactgtgtttgattatgatatttgttgcattttttgctagaatgatgtttattatccgtagttaataacattgattttgttttcttgtcccttgtgtaggctcgagg

SEQ ID NO: 110010 - DNA, 950 bp, Aquilegia coerulea
  Intron number 1 from transcript AcoGoldSmith_v1.002984m (l ocus AcoGoldSmith_v1.002981m.g) derived from phytozome v7. 0 (chr-ID scaffold_2; pos 3121025 to 3121974 reverse stran d)
atttgctgtccccttcttcaccttcttcttcttgggtaactttcagaactctttgtctgtctctttctctcttcaatcatttaaagtgaattcttgtatgtcaatatggtagaaaccaaatggggttatgggggttgtaatttgtacttatttctccattttatgaattgggtatgtttgataatattgttttaataactagaaagttgtaattttgtgttaatttgctcatatcatgaattgggtgtcaacaattgcctatttaattgatctatgatctataaactgtaagaacagaaaagaaatgaattttgtagtagttgatgatttttaattgcacatgggtcttctgtaatagtaattttagaaacctaggaaaataactattaattagtagtagatttatgttcatttactcattatgtgaagtgggtatgtttaaatcttcatgatccaataataatagtaggtttaattttgctttcaaaatcttatcattgttcaacaaccaaaaaaaaccatctaagataaaaaaataatagtgggtattttaatttttttttttcttctattgagatcatctaatgtactataactgcatgagcagaaaggtagtaaatctataaagaagaactagtcactgatgtatgaccattcacatgtggccatttgtagtttagatatgtctacaatttggtcttagatttacaacttttccatattcttgtataattgtttaaatgatgatgagtggggtaaacttatattagtagtagagaaggatcttagactagttaataatagtgaagaaaattgaaagttatatatgaaaggagaccaaagcatgtgcactccccctcttcttcatctgtttcttaattggttatatctctttgttttgtctccactctaatcttcttcacttggactagcaagtggactgggatccc

SEQ ID NO: 110011 - DNA, 1029 bp, Aquilegia coerulea
  Intron number 1 from transcript AcoGoldSmith_v1.013409m (l ocus AcoGoldSmith_v1.013409m.g) derived from phytozome v7. 0 (chr-ID scaffold_2; pos 485734 to 486762)
gtgtaacggcttatcttacacacttaattacgcaggttagaaatgctcggcactacatcttggatggtttaaatttggtatcatgagttatatatgtgtttggtctaaatatctgaagcagtagtgatatttcgatgcatatgtatgtatgtaggtttttgttcacctgcaacatcctttccaatgtttgagtagatttattgataaatcaggttgaattcccacccttttcctttacagagatggcctgattatccaaatgagctccgatcttaagcgttaatgatattgaaataattgctcgcacatttcattcccaactttgtatttatcagaagctaattagctttgattgttactgtggatgctgattgaaccttttagagacaaatgataaactgctgtttgatatatggttaagatatttaagagacctgtaaatcatgtgaaaaattggttgtaaacaaactctgcagctaaagaatgacaacaaaattaatcctgcaaacgaggcttgtaacagttaataagattaaactacatactgactcccaagtgatcaaagaaaggcacttgttaaaagagacaatgatgtatttagttcacagaagtactgaaaagactatcacagaatttagcaaagcagttgaagacccttactctttttgaattggagtggtagcagcagagatgtgtagagtagtaggttaatagtgtacttctaagttcactattaaccacatattgtaattccattgaatttgctcgtggggctctgtgctctactcttggttgataatggtcttgttttatcttaatcgatcgatagtaccaggtgagccatgaattgtatttttatgtactatagccattgcactataagtataaaatagagttatgataatgttatggcagtcgtctcacctttttttttttttttgagaaattttagtgcatgttttcttttgaaaatataccataaacacagcactatttcttaatatttatgcatgctctcaaaattttcag

SEQ ID NO: 110012 - DNA, 436 bp, Aquilegia coerulea
  Intron number 1 from transcript AcoGoldSmith_v1.014965m (l ocus AcoGoldSmith_v1.014965m.g) derived from phytozome v7. 0 (chr-ID scaffold_16; pos 4076566 to 4077001 reverse stra nd)
tgaagctactgtgatccttgtttatactgtttctggtaagttcaattcttcaatgtttcaatgtctttgtgttggtttttgcaattctttaattagggtttttcttcttctttaggaatttgcatcttgtttggtgtattgatttgctaattagtgctgcatttcgttgtcttcaattacaagtgttattggcttagttagtagtaggttctttgtttggagtcttgaaaccgtgtgattctgtactttgagttgatttacttttaatgtcatgataagactgaattttccttggataattgattattaattggtgtccaagcatctttgattatcaatgttcactacttgtctaagaacatttagtgactcttctgttcaagaggatattaaattatggcttttcaaactgattccaggtcctgctgacaagccc

SEQ ID NO: 110013 - DNA, 444 bp, Aquilegia coerulea
  Intron number 1 from transcript AcoGoldSmith_v1.021846m (l ocus AcoGoldSmith_v1.021846m.g) derived from phytozome v7. 0 (chr-ID scaffold_13; pos 4101618 to 4102061)
tatctgttaaacgattcaagttctcacctggagttagttattacttttattgcagtttattgatcaagggttttaagagatttaattatttttttaatatgaaattttagtttcatctttgagatggtagatatgttaattaggcaaattctgctattgaagatttgattgtccttggctggggtggaatttgttcttttgacattcatgttatgataatttagtgatcccaaacttcatgcaagagagagttttattttttcagcttgggggttgatttttttagggtttttccctgagattataatgttcaattctctatatcagacaactttgaaattttgatctttttattgtttgaaatctttatttgtttgtggactgtactattttgagctcttagatttgtctgttttctttcttagttaataaagcagagccagg

SEQ ID NO: 110014 - DNA, 1053 bp, Aquilegia coerulea
  Intron number 2 from transcript AcoGoldSmith_v1.017693m (l ocus AcoGoldSmith_v1.017693m.g) derived from phytozome v7. 0 (chr-ID scaffold_34; pos 2722018 to 2723070 reverse stra nd)
agcagaacgacaaaccttcctctgcacttgagtaagttgctttatggttaattgttttatattcattaaagtatttctagttaaggattggatgaaaccaaaaccattaccgtcagcaatgtctgtctcttgtgtgtccttgaccaacaccaagtagtatatcatcacttcaagaagtggtgctgtgcttttttttaagattttgggcagaaatatcacatatacaagtccatgtataatgttgcagggtgctgatgacttgaatgcatgcgtttacttgcttgatgtggattaacagttattgcagattatgatttccaaatttcttttggaagtttcctgtgtagcactcatacatcaatatcacttttttgtgactttgtttggtttggcatgtttatgcttgatttattgtatatttagacaattcacattggaacgttctgtagaattcacatgttactcattttcacatttgattccatgtaagactgacgctttaaagttgaaaccgggaaacgtaacatgctaatacatgagtacaagaaaataaactctcaatgaacgataatcagatacttttggcccacctataaaatcaacatttcgtagtgtacatatgacatgtccatactagatactttggccatatttatccatctgaatattgttttatcaacattggattgaatgtaaatggtattcaagagctcaagagttatcctcgttttctataccggtgtttctatagtacgagtattttgcatcatatcaatactcctgattagcgcgtgaatcattgtcctcgtgttctatacaaggtatttaagagaataggagttgtcctgttttatatacctgtgtttctatatcatcatttggcatcatgtccgatacttcccattagcattattctctttgtccctttttaatttatgctcttttgcaatcctattgatgtggctataacttccaaaaatgtggacgtggtttgagtaacttttcttctcattggtaggtttgttcaacaaaagttaggtggtccaacaattt

SEQ ID NO: 110015 - DNA, 669 bp, Aquilegia coerulea
  Intron number 1 from transcript AcoGoldSmith_v1.014412m (l ocus AcoGoldSmith_v1.014412m.g) derived from phytozome v7. 0 (chr-ID scaffold_26; pos 2490220 to 2490888)
ggacctgatatccagaatctcagtcttgtagccaggtatatgaaactgttattacattcccatgcattttttttttctgtaaacagaagtcaaaattattattagtagtactacatacatgttaaaatattctgaggactactctactcgatctcgagttacttctacttatgaatgacactgaccccttaaaggttacggagtattaaacataaatattcctgcaattcttcattctgtaacaagaaaagcctaggtagaaagagcgcgtactgtacgtataatctacattgtgaatgtagtgcaaacagccaagcacatatttggttttagccgctttttatctgatcgtttcaaagttatatattcttaataaactttcgtcagattgaatcttagatgtgaatcaataacaataagaaacttaaagcatgatccaagattacttattcaggatcaaaagattatcaagacatactgtagtaacagatggttgtcaaattggcttaaccttattttttctatttacagttctattgagtattgacacttgtgaatgaaaatcttatcgaataattaacctccagacattttaagttatggtaaagtaatgttcacactcttcttcttacagctttgagactaaagatcggttaagaatccaaatca

SEQ ID NO: 110016 - DNA, 957 bp, Aquilegia coerulea
  Intron number 1 from transcript AcoGoldSmith_v1.014236m (l ocus AcoGoldSmith_v1.014236m.g) derived from phytozome v7. 0 (chr-ID scaffold_2; pos 2100582 to 2101538)
taccgcaaagagtgactggaaaatcccttgtactggtacagttaacacttgccaaacctgtaaagccacagaatagtgtaggaacagccgaacaggtgcccaatatggattcattaattttttcacggacctggtagacaggtgatagaacttgccctctgtgtataaggttacccatcttcaatccatccataaatttgagatttccataacgtacttgtctataaagagatccataaagttatgacgtttgctatggaaagaattttagaagcacggaatttttagtgtcgcgcggaactgttaatgtcgtcttgtgttaataatccagcaactacgacactaacagttccgcaacggacctcctaatttttggaatttctattgtcttttagctaaattttcccacaaacacatattctaggagatggattgaagatggtattgttagtgtctttttggttaggtggaattatttatagatggattgaagatgatctcaggttcaagctttggtcttgccttgttcatttttgggtttggattgtatagtacttttgttgggcttagtttgagtattgttaagctagaaattattcacctgacaagtaagattctgaaggtaagaagtgagaggccaagtaggaatatgagtggcatattctatttttctttctttgtatattttggtatttttgtagaatatccggtatttccattgtatttccatgtatagaagagtgattttgagtttttgactatttaacagactagaaagccctcacctcataaagcaaaatactgtagtactgtacaacaaaagaaagtggtcactgttgaagcttgaagtgttgagtgttgacaacatcaactacatgcaaatgagttgtaaacttgctctctctgtaatggtgtttgcaatgtgcttaggttgctggtctgtttcagcagagcatc

SEQ ID NO: 110017 - DNA, 725 bp, Aquilegia coerulea
  Intron number 1 from transcript AcoGoldSmith_v1.005613m (l ocus AcoGoldSmith_v1.005613m.g) derived from phytozome v7. 0 (chr-ID scaffold_7; pos 4510035 to 4510759)
tacttacgaccactctgtgttggttccaaggtatgatcctcttccaaagtttgattcctttttgttgatttgttttctaaatcttcatttttggagattggttttttttttatatgttgatttgggatagtgttgaagtgttgattttggagattggttttttgttgtttagtgattttagagaaataaacagagattttgaagtttgggttttgtttatagtgtgatttggagaatgggtttctttttctttttggcattcatttagctgaaagcctgaaagtcatattttgtttcgttggtttttagtaattttaggctacaatcgcatttcagagcgttttaggttcatggattatattgtcaattgtcggatttctgttgcaaattttatttttgttcaaatggtacattcaatggaaattttttatattggttaagcatatgatggtttaaggtatttataataatcttccattgaaacctacttgattgaaaaaagatttgaaactaatggggaagctttagacttcacaacttcatttgtctaccattgttgtaatattactctttcagtatttttcatttttttttgccttctatttagtactgttgattttgatgagcaaatatttgggattttatatataactggtggctctatataagttttttgctattacttttatggcttagtaggttttgggttgcagtgaaacttcttt

SEQ ID NO: 110018 - DNA, 340 bp, Aquilegia coerulea
  Intron number 1 from transcript AcoGoldSmith_v1.022936m (l ocus AcoGoldSmith_v1.022936m.g) derived from phytozome v7. 0 (chr-ID scaffold_68; pos 652859 to 653198)
gctcttgctatttctttcaacgataaagatctcaagttaaatctatactaaaaccctagtttttcttttgcttatgacttgtttggattaccatttcttctgtaaaaaaaattggatatttaattgctttgtttttaatgtcaatccaaacaaaacctttttttctgtcaatttcatttaatatagacatgggttttgcttcattgctagtaatttgtgtaaagtttgaatttttattgagattgttttgtggtgtttttttgtgactgagttaactcaatttgaaatgttggtttgtttaatagggactttgttggtggttttcacaagagaaagaaga

SEQ ID NO: 110019 - DNA, 727 bp, Aquilegia coerulea
  Intron number 1 from transcript AcoGoldSmith_v1.020045m (l ocus AcoGoldSmith_v1.020045m.g) derived from phytozome v7. 0 (chr-ID scaffold_3; pos 3623339 to 3624065 reverse stran d)
aaaaaggtgttctgttgtcaaaaattattagggcttagctgcttactcactgctatccttctaaacatgaatgttctatattccttgcaatattgcagatatgcagcaatcttaattatggatgatcccaaagcataggattcatcagtagaatcatgcaaatcttaggctattactggactgggcttgtagctcaagttggagcagtctcagctctcaactctcatacgttgtgacatggaaccatcctgtcctgatattccgtacacagttttgaatttggattacaacaccaccagtccaccaccatatatatatatatgttttctaatccaactttttagtactactctagctttgctgtatactataaagatcatgaccaccttgctttgattctcttatcttctaccgaattgctgattccccagctcttttatttcttctcgttttcaaacttttttttttccaacttcaatactattcttcaagctagcaaactacaacaacttttttaggtttacaacaatcttaactcatccaactccgttataattttctttcttctagctagctacttcacaacaaaacccttgattcgattatagttttttgtttttgttattaacagtagcaactactttatgaaaactagttctgttgcttcttcttcatcatctacttctatgaagaagtaccctgtaggtccagagttttatcaactccg

SEQ ID NO: 110020 - DNA, 656 bp, Aquilegia coerulea
  Intron number 1 from transcript AcoGoldSmith_v1.023794m (l ocus AcoGoldSmith_v1.023794m.g) derived from phytozome v7. 0 (chr-ID scaffold_86; pos 77921 to 78576)
gttgccttattatcatcaagtggttcagcaatgtataattctatcattttatatttcagattttttttttatatagattaaatggctttagaaattagctttgattttgctgtttttccataatcattttaattatgttctgtactactttatttgtatatcattttctttttcttggttttattcgaatttagatcattttctcaattttacgcgacaaaaatattttttgtgattatgttattgtcggtgaatctttccctagcagtaacatttatcttgacagttttactcttctccatgttgtaatagtgtaataccgacaatgttgaagagtaaattatgtgacagactgacagaggaaataaaattttcaacaggttcatgttgtttcaagaaaaatgttttggtggaaaatagttatgtttctgcaaatgtggtcgatagatttattgttgactattggtggatctacccccatgtttggttaggactgtgggcctaactgtttgtacggccctgtgacccagttgagagtgtggcaaagtccacctccgtgtttggttaggcatgtgcctaccagtttatacggtattccgattgatatacaagttcgagcttttttacaacattgacattttaatcatacaggtaaa

SEQ ID NO: 110021 - DNA, 975 bp, Aquilegia coerulea; identical to SEQ ID NO: 109299
  Intron number 2 from transcript AcoGoldSmith_v1.002136m (l ocus AcoGoldSmith_v1.002136m.g) derived from phytozome v7. 0 (chr-ID scaffold_34; pos 2392989 to 2393963)

SEQ ID NO: 110022 - DNA, 1041 bp, Aquilegia coerulea
  Intron number 1 from transcript AcoGoldSmith_v1.017686m (l ocus AcoGoldSmith_v1.017686m.g) derived from phytozome v7. 0 (chr-ID scaffold_3; pos 5259107 to 5260147)
gtgcagtgttttggaagaaagggaacaaaatgtaagtaaacttactcaattccaccataaaagtgatcagaacaggatactttatagggtcaatcaactgtaggtatatgtgataaaacaaactgtagaagcctgtattatatgtcttgtatgtactggattaataggttagcaattcagtctattcccttcttgtcaggtcttacttcatgaattttgaaatgaaaataccacgtaagttcctccaaattattgattacatacaactgaaattacaaaatgttaccacagagtatcgaatctggacagattcctcaaaaccctttaaccaatgttctgcaatccctctttaacccaaggaactaaccttcggctctgatgccacttgttgtgcgcagcggaaacttatgcaccaatacccaagattggaatagtgtatgaattaaacaaaacaaaatagagaagatgaaactcctactactatcaaacaaacccacacaaaacacaagatttacgtggttcggctaatattgcctacgtccacggacaaacaaatagaacttttactattggagaagatagtacaaagctctcaaacaaatggagaaaccctaggtttcctcccttctcaaatcctcaccaaatctctcaaagagacaatcacaaattgaggatacaaactctctctcacatccaagatcctcacaactctcacaaggagacaaacaactaatatggattgaggatactaaaccaatccctaagaccttatatttatagcctttagggtgtacaaaacaaattactaataggaataccaaacttaatcaaataggaagtcatattccaataccaaattctaaatctttaatatggacttagaaatccaaatatgaaacggattcccttataaaaaaccggtttcccaacaattctccacctcggtgaagatttcccaaatctgagccgatcttcaaaaaaaacccgacaaacaaccaaaccaaagcggccggaccaactgctcctctagtctaccattca

SEQ ID NO: 110023 - DNA, 881 bp, Aquilegia coerulea
  Intron number 2 from transcript AcoGoldSmith_v1.002421m (l ocus AcoGoldSmith_v1.002421m.g) derived from phytozome v7. 0 (chr-ID scaffold_2; pos 8904649 to 8905529 reverse stran d)
tggctgctcttggagagcttggttttcattccccggtaaactattacgattttagaaaccaatggctaataatttttttgtcatttgcttcatttataatgcaacttagcttcttttggtccatcatatctcttcaagtgtgaactattttttgatgatttgctttttgattcaaatatctacatcaaagtttgaatacgaaaaataactattaggggcgacaaaagtggatgaagaaatatgatgcagccatcaactctagacattctgaaggagtctttaatattgtctctgaattggtgacattgatgaataatgtccatgactaattatacagactaattagtcctagtaatcaggatatataactccaaaggcctgttgatatttgtgttctactagttatttatagcttatcatggagctttcctgcctcaaaaaaatatacattttggattactgattgcaaaaccattgaaaggtcaacatctttgtaaaaaaaaagttgaaatgtgcgtgcttttaacagtttgttatctgtaaattctttaagaagctatgtttgaatcgtagcttagtaaaacagtattctttgaaggcattgtgctctatacgttttgcatgaagagaaaacactcaaacagccttctcttcgagtgcttcatgttttgcaggtttaagaattattacttttttttctcttgattactttctttgctctcttgattgctgttaagtttcccttgcataatcaaaacaaaagttccccttacaaacagagaaatttcacatttgaagctgtctgtcactgtcctatgctaagtcactgatcttgtggtattgcagagccaagcagaaaaaaggtcgacatctttgaaaaa

SEQ ID NO: 110024 - DNA, 1036 bp, Aquilegia coerulea
  Intron number 1 from transcript AcoGoldSmith_v1.005081m (l ocus AcoGoldSmith_v1.005081m.g) derived from phytozome v7. 0 (chr-ID scaffold_13; pos 2678454 to 2679489 reverse stra nd)
tcttccttccttcttccgactgcaagttctcaaaggtaagatctttaagattttctatttttctcaatttcatataattttgttaactattgttcagcaattcatcagatctcatcgttttagtttctgatctattgaatctttcgaattattattttgaaattgtgaatagaagttaaatttatctctattttttcgaaaaatggtttcaattgttagtttacaagttaaggatgattttgttgcaagaaattgtggttatgtaaacatactcattaaaacatctgttttttcttcaatgctaatagaaattgtagaataacaaatttatatacataaattcctccgcaaggagacagaatgcgagaagaaaccttccttttactgcaaaattgtaggtttttatgatttcgggacaaaattggaaaaaccagcttcgaaatagggcattaaaatgaatgataattctagttactttaattgttgaccccttaatttaattattttcagtaccaatcgaaaagttcaaaataacaaaccctaactccatagggatattggtctaaattaataaattaggaattatattttacatttatagcttcttctaagttgtataatctatatgtataccatattcagggtgctttataaatattgcgccacacttacctgtaacctgtgtcacacgccagctcagatgttaaattcctgttactttagttagtaattataatgtacctaatgtctaaagtctactgatagagtacaggagtgttacatcttcaaccattacaataaggatagagagaagtactgtgtgtaaaaaaaataagttggtgttttaaaacaataccctttaggtgtattggatgctgtttggaagttggaactacatatcgttaaacttagttgtgcccattttttttacctttgtctgtcctgtttaagtaggctcacttttttcttctaatatcgccaatttattttttgcctttgaatgtatttaaatgaaggattagtaacagcttggaag

SEQ ID NO: 110025 - DNA, 413 bp, Aquilegia coerulea
  Intron number 1 from transcript AcoGoldSmith_v1.001534m (l ocus AcoGoldSmith_v1.001534m.g) derived from phytozome v7. 0 (chr-ID scaffold_13; pos 5707442 to 5707854)
ttggtgcattctttgctgtcttcacttctttcttggtacgtaaatacggattttccattgattactctttctcttctccttacctcataatcatcaacacttcttaacaatctgaaagaatgatttaagacagagaatcactcaaaatgattctgcactagctctagtcttcaaagggttgcttcatttagaatgattttcagccactggatgttgttacttgtaatgtcagtaattgcctaattgttttgacttgaagatcactatcatgggacccttggatactagaatccatttgttaagtccaaataaagattccttgctggctggtagataagaatccatttgtttatattgataccatcttctgttactgctgcttattcacatttctttatgatcaatgattaggt

SEQ ID NO: 110026 - DNA, 1061 bp, Aquilegia coerulea
  Intron number 2 from transcript AcoGoldSmith_v1.011181m (l ocus AcoGoldSmith_v1.011181m.g) derived from phytozome v7. 0 (chr-ID scaffold_35; pos 2248704 to 2249764)
gttataaagcctggaaggggctctcttggggcgtaagtgatacactgatactcttccttaggttgtaatgtttggattctatctggtgaaattcgaattttacatgatttaatttcaattgggtgagttaattcatatttcatagtagcttatactaccactctaccagtgcggtatttcaacaatataaaactcttattgagtttcacaatggagacaaccgtagtcactatctaaggttacatcccaatgcacacccttgattgttaattgagtttcacattaacacaaatttcaaagttgtagtaaactgttgtacacctcaacacagaatcatggtatgcagtaggagtagataggttacgcttcctgtcgtcttgtccttactcattttatgcatgtcagattcaactttttttctatgggaatatatgtacttaggaggaatctgtttaaaaggagatttgataaggtcttatttgttgaaagtttatttttatgtgtttaccaatcaatgaaatgtcactataaaattttatatttacatggtttactagtacatatttcctaattttatcattcccgcagaccccttttacactgttaaaaatagctgacattttcacgagcatgaactgagataataaccttgttctttttaattatacaacagaaactgcatggttgctattcttcttttctttggaaacaagatggggtttaggtagaatcccctactatatacaattatatttcaagaaaaataaggaacaattttttctcatttacattgttgttttttctttgtttttgagtactagtatcttacatattggaactgtgtatcaagtttccttcctagcggtatcaggaagcatgcattttgaaaagcaaaataagtttgtaaaaagatctaaattcagggattagtcagaaaatttcattctagtacaaatatatatattttgttcttgatatcagtataattccatcttggaaatttaattcgttttgtttgtttaattggcctaggtaccactgctaggtggagctttttgtgc

SEQ ID NO: 110027 - DNA, 757 bp, Aquilegia coerulea
  Intron number 1 from transcript AcoGoldSmith_v1.009709m (l ocus AcoGoldSmith_v1.009709m.g) derived from phytozome v7. 0 (chr-ID scaffold_13; pos 4329313 to 4330069 reverse stra nd)
ctcgtcttggcaataggtatggtattcattgtccatatcatctttgatctcaatatttcttttcttatgtctaggaacttctcaatcatctatgtcaatttcaaaggtatttgataatttcgacatggatgattctcgtacataaaaacatttatggttagggaaataaaatgagctagacctgtgtttagagctgcagtgtcatatcttatatatgatggtactgtatatataatagtactgctgttcaattgaatatagtttgatcaaagacctcaatttcataaaacacaccaatttggattcaaattacctcattgttagtgtttttttgaaatgctgatgtgataatcaagtccaaaacggtttttaatataaagaaggaattgaagaaccataatatatattatgttaatttctggttatttggccctaataaattcaaaaagtaatattattctagtgtaaagggtatatatatatatcatcaactagtactgcacaaaaaaggtgatcccttttctatgttttctaacatttttcttagagtctacgccttcactgtcaatatacctttcattttactttttatcattcttttgattaagatgttgcttaaagaagatagatagtttatatatacttaaaaagttatataataatgtataattagtggatcttttaaacattaatcaaagtaaatatttcatggttggcctttcaactaatattatgtgacatattttgtttgcttcag

SEQ ID NO: 110028 - DNA, 180 bp, Aquilegia coerulea
  Intron number 1 from transcript AcoGoldSmith_v1.008348m (l ocus AcoGoldSmith_v1.008348m.g) derived from phytozome v7. 0 (chr-ID scaffold_88; pos 305420 to 305599 reverse strand )
aaatcggatccttttaagattggtaactggaattggtatgtataaaattaactgaacttaacttgttgtttgattgaattctttgtttgtttgtttgtttgtttgtttttttttttttctgaataattgttttcttcttatctaggcatttatcagtcgagaagaatcgaggtgtgtata

SEQ ID NO: 110029 - DNA, 903 bp, Aquilegia coerulea
  Intron number 2 from transcript AcoGoldSmith_v1.016532m (l ocus AcoGoldSmith_v1.016532m.g) derived from phytozome v7. 0 (chr-ID scaffold_26; pos 2581320 to 2582222)
ggaaccattcggtggtattactgtagttttagggggtaatttcaagtaaactctacctgttattcctaaagatccaagacaagaaattgtttgtgcatcactaaaaagatctcactgtggaaacatgttgaagttttaactttagttaagaatatgcgtcttaacaatgatgacattgataatgtgagatttgttgaatatttaatacatgtgaaactatattattttctttttttaaatatttgttttatattattttgttaaatatttcttttatatcaatgcaaaactttaatgttaaataatacaaatcattttcctttttcaggtgggaacatatccaaaaaaaaaaaacagttgaattacctgctgaaatttcacgttgtcagaactctacagaacattttcaaagtttatccaaaattaaatgttcctaaaactgctaccctaaagtatctgcaagaacgatccattctctcggccaaaaatgatgatgtcggattactcaatacgcaagcaataaatcaatggaatggcattcttaaatcaatgtcaaacagtttggttggagtgaacccaaaattcgaagttgcttgatatactctattactgtattttttcatgtgtggaatttgaagacatatgaacaacaaaacaaatgttaagacaacaaagttcagatttcctatttgatttaagtatgtttaattgtaactcttacaagagatactcttttgattctttctatcttaacttagaagtgagacttctgttaatcagtatttgatgtcaatttactcattcttcccattgttccatctggaaatcagttactcattaacttcaagagttccagatgttttgacagtgttatgtgaagcacatctatagaaaaactaatag

SEQ ID NO: 110030 - DNA, 770 bp, Aquilegia coerulea
  Intron number 2 from transcript AcoGoldSmith_v1.008527m (l ocus AcoGoldSmith_v1.008527m.g) derived from phytozome v7. 0 (chr-ID scaffold_2; pos 8573499 to 8574268)
ctggagcagatatattggtaacttcatcataccaggtattttttcaattgatgttttaattatatttttttaattacatttacaagctttaatcttttgaattttgaagaacgattttgctttactttaaagcccctgacttgatttttagtttgaaagaaattttttaccaacaagtttgatttgagctaattggaattggatgttcatctaatatgtcaatgtctagtttacagtttaagagggaattccgagcaataaaacatttcgatctaagaaactgatgattctaaattcaaaaatattggactgttatttgaccatattgacgtaatggagtttggtactataccatactatacatttggtcaagtgtttaggttaacaggattatgcatactttggaagtcattcgcaacaaattcttcatttaattggtttcaaattattctaatgaatcttatgtttacagtttacttctctagtatttgtcaaacatgataatgccatttaaatgttgaatttacatcattatgtaaacaaacagtatgtcgtatatcagttttcactaagacagtctcaaactatatgctttgatgccactaagaaaatatttcatgaagttctgtgttcagaattagttaggttagatgactaaccagtgtattattgtacaagtggaaataaatgcattttggtcatcaatagctcaaacctccttttgttactttacaggcaacaatcccaggatttttgtcccgaggtctgac

SEQ ID NO: 110031 - DNA, 348 bp, Aquilegia coerulea
  Intron number 2 from transcript AcoGoldSmith_v1.000939m (l ocus AcoGoldSmith_v1.000939m.g) derived from phytozome v7. 0 (chr-ID scaffold_16; pos 2350593 to 2350940)
ctcaggtttgtttaattttaacaatttttcgataaattattgtaatttggaagattttctgattgaactattaataaagtttacaccttttggatttagacttgtatcttgaacatttaattttgagaataataggtaaaattactcatagaatgttccatttggtccatgagtgaaccaaagttaatttaatcaaaacatgcaggtcggattttttgtaggattattgtacatttagcattgtggaaattatttgtattcttactaaatatgtggtatattataagtaatttttttttctgtttttttgtactgggatttatttagtttggttggattcagggttgt

SEQ ID NO: 110032 - DNA, 897 bp, Aquilegia coerulea
  Intron number 1 from transcript AcoGoldSmith_v1.027787m (l ocus AcoGoldSmith_v1.027787m.g) derived from phytozome v7. 0 (chr-ID scaffold_16; pos 4855211 to 4856107 reverse stra nd)
cttaattatagaaggactggagtagtagtagaaaggtaggatttagctgttgaattataaaatgcaagctatagcagcctataatgatatatgatgatggatgataatgaagaaggaagatgatgatgaattgatgatacagtgcgaggaggaggaggaggaggaggagtggtagtatgactatgaatacagactttgctcatcagatccggtgataactaaaaccaaaggcatgtatatgagtgcaaatcattcattcttctgactagagaattgatgctgctgttgctgttgctgctacagaattgaacaactcatccttcctatcttcattctacattcccaattcccaatttcaattccatttggtatgtgcgtatgtatgttatgttgaatgttgatgagtagttggagaaagaggtaatttatctatctatctatctgtgatctgctgctactactgctaccctaaactccaacacacacacacacaggtttcatttctttttcttcaaatcaaaaccaacaattattctcttctctcccccagtccccttccctaactaagtagtaaagtggctgggaaaaaaaagacagccagccatttcattcattcaattcaattcatagcttttgctttactctctctcaactacccgttgcttactttgctttgctttctcattcacaaagtctctttattattattattattattattaattataatcaatcaaccccctccccccattctgtacccccttgtctttcaacaaacattcatgaggcttcttcaaactctctccaaccttctcttcttcttactcccatggattatttcgtcagctcacctcaaagctcaatcttctattcctcctgcctcttccagatcccttg

SEQ ID NO: 110033 - DNA, 432 bp, Aquilegia coerulea
  Intron number 1 from transcript AcoGoldSmith_v1.010161m (l ocus AcoGoldSmith_v1.010159m.g) derived from phytozome v7. 0 (chr-ID scaffold_2; pos 1009339 to 1009770)
ctaccggcggagacattcgattaatcgtttttgaggtattttatttttttcgatttgattaattattagattaattctgaattattcttgtatattgataagaaaaagcaacctaaaaacattatttcctattatcaaatctctttcttctatcatcaaaccttaaattcccaatatctgtctctctctctcaacaaaacttaaatttcaattaacctagcactctagaaattccatcggagaaggcattggttggtcgatttccctacttgcgcaagttagtgattctttcgtttttttttcttttttattcaatttaatttcttaattagacttaaaaagttaaatttatttttatatttagggtttctgaacacaatgacaattctgtggttgatgttttgaataattttgatttcactgcagataatt

SEQ ID NO: 110034 - DNA, 776 bp, Aquilegia coerulea
  Intron number 2 from transcript AcoGoldSmith_v1.010161m (l ocus AcoGoldSmith_v1.010159m.g) derived from phytozome v7. 0 (chr-ID scaffold_2; pos 1009878 to 1010653)
tgttttgttactgacatctgttcttttccttttaggtaagttttctcaacatttcttgtgtatttatgatgagatatgccacattacttgtgcattgacgatgagatatgattttcgttgctctatgtgtgcaatgacatcttaaatgacaattttcttcttccttttctatatacggtatgattgttgtattgggtatgaactcaatttgtttcatgtttgcatgttgtattgaatcagtttggagagtggatactttgaataactgtaaagaagtttatattcatgaagcttcatttaacttagtaaaatgattatagggaagttgtcaacattggttttacatgaaaactactcacactcatatattttccgatctccctgttttattgatcctcaaagctaattaactttcaaaattgtaaacttttccaacgccaatatctacacctagactaccatgagacattggaaatttttttagttgattgattaaatgttggtggaatgaaaacttacactaggtacttcacagtttttagaaagtgatgtattatactcctttcctccttaatgtggatgttctagtgtaaaaattcttcgtgaataggttttcaatcttatccctcgtcaacctactagtgcattacataaattgttgctttgaaagaatatgtatcgatccaaaatttaaaaggagtgccctttgactaatatattgtctactgtttgataatgcagttcgcatattgaagcgcacaaaatccaacaccatt

SEQ ID NO: 110035 - DNA, 969 bp, Aquilegia coerulea
  Intron number 1 from transcript AcoGoldSmith_v1.010480m (l ocus AcoGoldSmith_v1.010480m.g) derived from phytozome v7. 0 (chr-ID scaffold_2; pos 9105860 to 9106828 reverse stran d)
aaggaagctctcttcgtgccctacttgtcatctctgtgagtattaatttacttctcatttcaatttaaagttctctgtattttgaaaattaataagttttggaaacattagctgaaaaattgcagtataaagttgtaattgattgattatcatttatgaacaatggcttcactcacattacttgtcgattttgtcagtaatttgttgataattcttaattacgagtttggatacatattcacaaagacaaacaatatgaatagatttcagtttacaactctatattgatttgtatggaacaatttatcatgactgattgcactcgaaattgttggatatctagtgataactttactgtcacttctgtaaaaaatccgtttagtcaggactgtcgccagtcgaaatgttaagtatctacaattgagtattgatagctttgctgtgacttgtcaaatgtcaccgtaatactgtatatcttgttaggattttgtgtatcttcagatatagattttacaaataaaggtattctttagttttatagatatttttcttcagtaatttcagaaaatttgttaaataatggttcattttaactttgaagatagaatccttttgcttatttctctaggccaaaattttgatcaatgagaatacacagtccaaaatgtatgctcacctcacgtctgtgagttccttggaaactagtatctttcagaacaatcgccttactagcttctttgattttatatctgtatatatttaatgcattttaataaaatctggggagccacctcataatttagacctttatccatggcattctgagctccatggccttgaatattcctaaaaattgtttctcttacacctgaggtagattctttatatattgcttcttggcttacgctctctgaaaaaattattgttgttgcaggttggaacaattgtatcacttgccttgactggatt

SEQ ID NO: 110036 - DNA, 1035 bp, Aquilegia coerulea
  Intron number 1 from transcript AcoGoldSmith_v1.019023m (l ocus AcoGoldSmith_v1.019023m.g) derived from phytozome v7. 0 (chr-ID scaffold_7; pos 4108692 to 4109726 reverse stran d)
cctgcagttaccattgggcagttaacgaaaatagggtatgtttcctgtttaatttgctacaatttgttactttcaggaggatggtataatgttattaacttcaggtcttttctgttaattctatcattctgcacgtacaacatcacaatggattctgaataagcctaagagctgttttgcgtagtataagtaaattttgtatgtaaagttagttgcgtgctagcatgcgtggtggtaccacaggtcctttttctgttcatgcagaagagcttcaaataaaatgatgttatacagttgctccattaactatactagatggaacttggaagcaatcagctttctgcttgactgtttatcagcccggcttgctcgaatcaaattaattgaatgccataggtttgtcatgcattatccttcactttgtatttgggtataagtttggaagttggtgcacaattgtaaaactcatcagaatgatgcaaccccctgaataaaaaaatgtatgttagtcaagactatagtgttgcaatggcccaatccttttatggaagtggaatggacttttcaaaatttacgtccatcattggtttagtattctctctctattatcttgagttttcgttttctgcggtgtccttttgcagctaattattatctttatatttgcaacaaaaggttacctgtggaaaaaggctgtttctacttattagcaacgttcttgcattcatcactttgatctttgggttgaaagtatgtattattggctggattgattctaagtatggggaggatcagagtatatgtaactaaattttttagagggggaaccctttttcactagtagaataagggaaatttgtgtttctgccccttctacccaccccagattcacaaatgtgtgtcctaaatgttgccagtttacactgtatattctttatttgatgtgtgcttttgttcattattttcagtttacactgtatattcttctttgttttagtgttactgaaagtagaatttgaaatgtctccaggtata

SEQ ID NO: 110037 - DNA, 848 bp, Aquilegia coerulea
  Intron number 2 from transcript AcoGoldSmith_v1.019305m (l ocus AcoGoldSmith_v1.019305m.g) derived from phytozome v7. 0 (chr-ID scaffold_22; pos 3951310 to 3952157)
ctgataggtaaaccccctctttgtctttgtctgtctctccctcttcaataatttaagatatgaatgatactattattttatgaatgagaaacaaaaatgaaaattccgatccatagaactatatacgaaggtgtttgtttgctcaaataaaactaaaacactttgatttcttgtgtatggtaaagctgctaactgcgacaactaagggaaggctaaatttgtttagcttatgctggtgatgtaatttgcaatgctatagctagcttttaaaacaattaactaccagttgactttagcttctaaataactaagcagtttgatttcctgatctactaaaataatgtaattagttgattacctttgatccattaatcttgtaattttgtcactctaaccatttatgcgatgttagaattgaataaaagcttttacatttcaattaattgaaattatctttatttttaaacagggcgtaacgataaacacacacacacacacacaatgttgaaccagattgcaatctatgccctgcttgtttgacctgcagatgaattcaaaacattgatccttacccatccttaagtgaaactaaaatgagatggtaaaagggtcatggttgtcttggtaggtgaatctatctgatattagtcttaaataccttcataactgcagtcacgaaatgacacgtgctgaagcgcacctctgctccaatgcagggcacagaagcaacaaccataattttgaattgaaatttagaaaagtcgactgttatttacatgaagtaacttgccttttttttctgtgtatgtgtagtggggatcctttgttcttagaaccattctgggtgc

SEQ ID NO: 110038 - DNA, 366 bp, Aquilegia coerulea
  Intron number 1 from transcript AcoGoldSmith_v1.007814m (l ocus AcoGoldSmith_v1.007814m.g) derived from phytozome v7. 0 (chr-ID scaffold_58; pos 1016245 to 1016610 reverse stra nd)
aaaggtttgatttcgatgttgctaaattttccatatatttaaagtaatatttttaatcttacttaaacaaaaaaaaaaaaaaaaaaaacagtcatacaatcttgctacaatctaagaaaatctaaacacactctgttcatcaattatcataattgaaaaaataaaaacgaatttgattttgaatttgatagtttcttgtttcctcaattaatatatataattacttaaaattactgtttgagatttataaatcatgatgtcgttgttgccaaattggtctgaattacctgaagaactcttacttattatcgctgaaaaattaagtttttatgaagattttttaaggtttggtgcagtttgtcatcc

SEQ ID NO: 110039 - DNA, 531 bp, Aquilegia coerulea
  Intron number 1 from transcript AcoGoldSmith_v1.020472m (l ocus AcoGoldSmith_v1.020472m.g) derived from phytozome v7. 0 (chr-ID scaffold_16; pos 4044643 to 4045173)
tcaagttgctgctaaccccatcaacacagtttttggtatgttaattaaactcttcttcatcttctgtttttcttttagtagctagggtttacgtgttttcttatgtgtgaattttgaaaacaggggattctgcacttaggcatataagggattttgcttttgttgatctgaaatcttagaagtttaaacatactctactattatggatcaaaaccacttagaatagtgttaatattttacctagggtcacacgagccagtacaaggcgcaatgcgtcaacatgttgagcattaactagttatgttatattgaaacaaggcaaacatttctcaattgttgatattgactcacgaattagtttgccgagttcactttcattatcatgcatctgcatcagtatacctgtaccagttttttcagtctgtgtgactagcgtaaattttttcgatatatagactgaattggtgtcaatctttgattatcaatgtaccctacttgtctacttacttacaattttgtgtatctgtgcag

SEQ ID NO: 110040 - DNA, 661 bp, Aquilegia coerulea
  Intron number 2 from transcript AcoGoldSmith_v1.002092m (l ocus AcoGoldSmith_v1.002092m.g) derived from phytozome v7. 0 (chr-ID scaffold_13; pos 5633114 to 5633774 reverse stra nd)
tcttctcaacagcaaattgagcgtttcagtatgtctattttacttgttcctattgttattacaattagtttacttcatctcaacttaattatctactcatttgttaattgttcaatcacactttgttccattgatcaattagttaaaagagtaatattaggttatttgtcagcgcattgcgattagatcaaatttcgttaatttttttgtatgcttggatgttgagtttgacttatgaagagaaaagttattaggctgctgttcactgacaacgaccatgtttttggtctattaatgcgtagttttaagtatatgattatgcagaaagaggtttttctatggtttgttaattgtttcagcagtttgttgcactgttcaattagttgaaagagtaatattaggttatttgtcagagtattgcgattagatcaaattttgtcaattttggtgtattgcttaaatgttgaatttgaattataaagagaaaacttactaggctgctatttactgataggaaccatgtttttggtctactaatgattgttgtggagttttaaatactgtatgtgattatgtaggaagaggtattcctgctcttttaattttatatgctgttctgtttgcagtggtggatttgaaaagacttgaagtgcaagcaaga

SEQ ID NO: 110041 - DNA, 400 bp, Aquilegia coerulea
  Intron number 1 from transcript AcoGoldSmith_v1.025708m (l ocus AcoGoldSmith_v1.025708m.g) derived from phytozome v7. 0 (chr-ID scaffold_68; pos 230471 to 230870)
gaggatcggtaggtctctatctgtggaagcaccctgttatgtgcttccatcccgatgtcgacaagaaacctaattatttataccacagctatggttgaccttgttttaaatgcaacttggataatttctacattgaaagagtagtacattcgttttcctttctttatattttatcattcacagaaattccaggaatcttaccaaatttaatttgatgaagtaaactactctgtagcagtactactagcctactagatgcattggtgtctttcttgtaactacttgtctcatttaatatttgttcctggtttcatgttaacagctttccgatgagaaaaggtccatctcgcttcctcatttttcagttcatgttcttttattttttgagtcattgttgcag

SEQ ID NO: 110042 - DNA, 482 bp, Aquilegia coerulea
  Intron number 2 from transcript AcoGoldSmith_v1.025708m (l ocus AcoGoldSmith_v1.025708m.g) derived from phytozome v7. 0 (chr-ID scaffold_68; pos 231059 to 231540)
taatcactgctgcttctgcaggttaatatttctatctgttcttcctacaaatctacaatgatctttgaattgagtctaccccgtataaatttcagttactttccaataaacacccattaacaatatatcagagtaatattaaattttaattttttgctttacatctgtaaattgaacaaaacattagtggagtaactaagttttgatattataataggttttctctatctatatcgatctgttcaatatattgtccacatatttccagtaaattcagagttcaaataggcgtggtaggagtaagtagtaattataacctattctctgaaatttagtatttaacatatattgttcgcggcatcatttgtgagactgaatttctataaagagaaaattgtgaactcaacacacataaaaggtttactaactaaacttgatttattttcttcctctattgaactcagctgtgaacctgttgaaag

SEQ ID NO: 110043 - DNA, 461 bp, Aquilegia coerulea
  Intron number 1 from transcript AcoGoldSmith_v1.024404m (l ocus AcoGoldSmith_v1.024404m.g) derived from phytozome v7. 0 (chr-ID scaffold_32; pos 500476 to 500936 reverse strand )
gcagaaccacaagtaagttgatatatatgtaagatgatgatgatgagggggactatcaacccacacgagtggtttgttgattttcatgcagatgtaacaaagaaaagcacagataacaagtgtgtttgtgttgtatagacttgtagtggtatttttctcttttttacagtcaaaaaaaaaaaaaacaatcatcttgtttgctgtactgttctgttttctattaataatgcttttcttctcactttcaaagtcctccaaaataaacagaatccaacattgaaaactcccctctttcaccattatgtaatctttaaaacaaaccccactaagaaaaagaaaaaagattgtacttttgattctctactctgattaattatcttgagttcagaatagttttggtttcttttcatatcgttggcctggtgttttctttctttagtttcctttactagctagtgaaa

SEQ ID NO: 110044 - DNA, 797 bp, Aquilegia coerulea
  Intron number 1 from transcript AcoGoldSmith_v1.002322m (l ocus AcoGoldSmith_v1.002322m.g) derived from phytozome v7. 0 (chr-ID scaffold_13; pos 385646 to 386442 reverse strand )
ggtgaaaccgatccaagagttgcagaaacttgcaggtaggtacactagtacactctgtaacgccaattattcagtttttattatttttttatttttgtggtgcatgttagtgttctccggcgtgcaagttagttttcatacacggttgaaatataacgtgcgcggtgtattggtttcttggggcacgtgaagtggggtatattttttgtctgtggttttgtttgtatacttgctggcacatcatcttgttattttggtgtcatttcattattagaaggaaagaaggattgcatctctgtaaagaagactgatacatggataggataccatatagtaccatttttgtttttctaatgttaggtgcaatgtgcattttatgtaacattgcaaagaatgacatttgtgttgtactttccacattgaattttgggtatgttgagatatgaaatttggaaaataatttttattcaaacattggtgtctagaattggactgttttctaacagcattgagactttaaacaagtggactctcaaacgagaaatgggaaacgtgcattgatgaagaagatgttgacatattctgctacaacttttatacgaaaaagaaataaaaaaaaatgtatgatttggaaaaatgatggtgcatcccacttctgccacatcttcaatttatcataacactctccaaaagtcttttggggccaatgttgtctaatttaggtttttaaaatgttttatcaagcattcggtcacaaagaaactgataaaacaatgacaggtatttggctgaggctc

SEQ ID NO: 110045 - DNA, 589 bp, Aquilegia coerulea
  Intron number 2 from transcript AcoGoldSmith_v1.026030m (l ocus AcoGoldSmith_v1.026030m.g) derived from phytozome v7. 0 (chr-ID scaffold_3; pos 9154742 to 9155330)
gaaaccccatctacccagtatgaatcattgaatccccaatctatttatcttcaaattttaggttttttttggtatttttgaagattgggattttggagaaattttcaattttatgtttgattaggtgtatttgttgcattatatctagcttggggatattttgaaaattaattgtttatgttggttttgcttcttgcagcttgattttgagttttaggtatttgggtatttaatctggtccatattttattgattgtaattcgttaagaaaaattcatggttttcggaaatgggttttcattttgtttgttggttgttcttgtttggactccatttagtgaatttcaattttcaagtattaaagtttaaatttttggggattagggtttgagaattttattcttttttgattgattttttcatgacaagtttgcttactcaatcattagttgaaaccccaatagttcgagaaattattagggtttttgataattgatgcaagggtttatgttttattgttgttttatttacaagctttgtttttcactgtgcagtttgtactgttctaggacttgaaaaaggcaaggaa

SEQ ID NO: 110046 - DNA, 503 bp, Aquilegia coerulea
  Intron number 1 from transcript AcoGoldSmith_v1.013909m (l ocus AcoGoldSmith_v1.013909m.g) derived from phytozome v7. 0 (chr-ID scaffold_44; pos 1659881 to 1660383 reverse stra nd)
ttgtccaatcttggcgttaacccccttccgttaaacaacccccaagtttccgtcaattcaaagtttgtttaccccaaaaatttgcttacccattataccccaaattcaaattagtgaagttagttttgataaccaatttatgggggtttagacaaattcatttgaattaggggtataatgggtagtcaaactttaaatggatggaaacttcgggggggggggggggtttaactcccaagattggacaacattggggggttcacgccaaacccggtcaaaacttggggggttttgaccaattttcccataatcttttcaagactggaggtgccactaataatatactacttgttcgcctacaagttataaacaagcatatttataatattgtcgaagacaattttttagaagatgggaaattgaattgtttcaacgcgttcagagtgaatcaattcaaatggacaatgaaccagttctgattgctgcttcgaaggcttccattg

SEQ ID NO: 110047 - DNA, 798 bp, Aquilegia coerulea
  Intron number 1 from transcript AcoGoldSmith_v1.009422m (l ocus AcoGoldSmith_v1.009422m.g) derived from phytozome v7. 0 (chr-ID scaffold_32; pos 2056488 to 2057285 reverse stra nd)
aaaatctgctaattctttcaaacttgctaaagcttgtaagctataaactaatctctctttcctttcgatttcgatttttattagggtttttattttttaattaattttcagtaattattttgaattgttagggttttgtttgatcggatcggaaacaattttatgatttgttgtaattagttaattagggtttgattgatgtaagttgtttcgaatcttgttgcttttgattatcatgagagagagaaagacttaaagagagagaattagtttataattcaatcaagtttgcttttgaagagagagagagagagagagagagagagagagagagagtttggttgtttgatgatcaatgtattatgtagtttgattttaattatgtattaaaaggcagtggtacatacctattagttagtgatgagtgatgatgaatcatcaatgtaagaaagaatggatcagatgttgatacagtgtttatatgtgtgtttgaaactgcatcttcaatatgaaatgggtctgtttgtttatatcatcagcaaatttggtcttagagaacaaaaaagttgtgaaactgctgataaatttccacacttatacttttggtagaatataaatttggaaagagaaaatgaaagacgaatatcttgttcaatggattacaagtgtttttattatgtttgcagctttttttttttatttggaatttcttattacttaatagaactgacctactaattccctgtaatatgttgtctttcaggggataaagctgcagcagtatacataaaattggcc

SEQ ID NO: 110048 - DNA, 907 bp, Aquilegia coerulea
  Intron number 1 from transcript AcoGoldSmith_v1.017118m (l ocus AcoGoldSmith_v1.017118m.g) derived from phytozome v7. 0 (chr-ID scaffold_103; pos 275157 to 276063)
tctcttcatcttctcttacaggtatatataaaccacaatacactaacatctctttctgatcatatgttttgaacttttgattcaccattatgtccacacgtgtacaccctcactcccacgtgtagaaagaggggtgtttttgctttcatcattcatgcttttgtcttttgaaaaacttttgtttgtagtactattgatgatgatccagcggatccaccaacaccaaagattttcagtgtactttcatcatttactgtatagttgctccattatatatgcttttggtatttcctgattgatgtttcaatgtgttggatgaaagcagtttgcaactttgcatgacattaatatctgtgacaaagttttatgcatctttcattatatttgagattttctttttggcatttggtgcataggcactatacaaattacagtatgatgatctccacttcttcataaggtattagttgctagcttgaccatccacttcaatttgttgttgcctttactaattaatatttgaaatcctttcagacttctccatactctactggtagagtttgtcagatcaaatatgacagaaaaatgacaatattattatattaagtatttctctataaacacaatgttttttctttgaacataagtttggtgctgaaataagataaactgcaaaatagttttggtcatctgtcaatgccgtcatttttgttacatgtaacgaaggcatggttgtttgtcgcgatggttatccaatgcataactcttcagcttgttgaaaaaacattatattgtttcataacagaaattatccattatttaccataagcacagagtctgattcgtttctgaaatgtattgttcaattaatgtgcttcaacagaaagaaagagaatctgccaaagaa

SEQ ID NO: 110049 - DNA, 935 bp, Aquilegia coerulea
  Intron number 2 from transcript AcoGoldSmith_v1.025146m (l ocus AcoGoldSmith_v1.025146m.g) derived from phytozome v7. 0 (chr-ID scaffold_3; pos 4896987 to 4897921 reverse stran d)
ccttcaacattgtcggaagtgctctcccaatattggttcgtttttatctttcgaaaattgtacattgtagtaaatcttaaagtgcatatctcatgtgatcttttaaatagcaatagaaatatcctaggcacttgtcggaatataaacactgaagaggagaaaaatccagttgtgtttctacactcaaagtgtcgtgccagttctttaagaaactagcattgtcctgacttggaggaattctacaaaatttcatattatataggatgcttactttgaaagtttgaattgcatttgttttatagcttatggagttatggttgactcatatttgtttgtcatccatatctaaggaattaggctgtaaatggatcacaaggcaaattctgtttttttttttttttttttttttttttggcgatttgatagtttttggctacacaaaatttttttagagtagaaggagaaggaaatagtctgtaggttagaggtcaagaccaatctgattgcttaacgttttgaacagccaaatgattgttcgaccttttattttatagatatgtatatattttatccctgtgatggtaaacactcaaatattcaagtgggttatgtccgaatgattatgtaggtatcgacactatgtccaacttgagtatgctgttttatgtgtcaaaagtaaatcctttgcgtataaagttgattcgatatgttaattcttcaaaggctcgtagtaggcgaacttgtacattctcataaaacacctgttactcaaatgtctgtcaaagtgtagtttgtagttcttctctgggttttttttgaattgtaatggaaatttatttgaatgtgagaacttttcgatcttttgatggaaatatcgttttttatgcgggactggaacagtgatccaggagctatagtcaaggttggtgaaggaa

SEQ ID NO: 110050 - DNA, 763 bp, Aquilegia coerulea
  Intron number 1 from transcript AcoGoldSmith_v1.025330m (l ocus AcoGoldSmith_v1.025330m.g) derived from phytozome v7. 0 (chr-ID scaffold_13; pos 3817707 to 3818469)
ggtgtgttgctaatatctttgctcttcaacaacaggtatgattttgattataaagattactggttctttagctgcttgcaatgttttgtttaatttccctaaagctgttagctttcagatgtgggtttaatttcatgattaactaggaatacattaaattttccgcttaacacatccagagctattattccttctctctcaattaacagtataggggttcttatatacaaattagtatttgtagtaaccttaaattttttagttattccaaaataaataatatcaattttgattatttctaatatatattaccaacacctctagtagagtttacagaaagaaataaaaaaatgcaatacttctagctaagtgatgaatgatcacttatttgctagaagacattgttttggaagagaagagttggtatcaaatctctactacagaattaaacattttagagttttgtggatgattaatatgaataaatcatatactcagaagacgaatatgtgtatgatatttatatatttggaagaagaattttgtatgtataacaataggcacatcatcacatgaagaataaacaaatttctcatgaacagtaactgataaatgaatctgaaaattgtgtaacagagatgataaattcaggtttccaatttaccttgttaggcaaatgaaaaacttttcaatacataaaggtggctcaaatcatatttgttactcaggtggtaaatttacaagctgagttatcctacttgca

SEQ ID NO: 110051 - DNA, 405 bp, Aquilegia coerulea
  Intron number 3 from transcript AcoGoldSmith_v1.006178m (l ocus AcoGoldSmith_v1.006178m.g) derived from phytozome v7. 0 (chr-ID scaffold_19; pos 2515801 to 2516205)
aggtaaatgtgatttttagtgttgtatttctacttttgctgatcttggtttaattggatgaatgcaagtacctttctgcatcttgccagccaaatgatgaagtaatttgatgtctttcagttgaaaactgcttattcttgcacggtttttttactatatgtgattaatttagtacatgctacctttctgattgttggctttcatctttttgctgcctcaattatatcctgtagtctgtcccattttactatatatagttttaacttgagagacttttctgtcaaacaagccttttcttttgttaagtttattttttatcatgaatatcattgcagtcctgtttttgaatgcaatcaccgaaattagtgtcccatctcttcatctttgtgttaacaatgcagaagt

SEQ ID NO: 110052 - DNA, 422 bp, Aquilegia coerulea
  Intron number 1 from transcript AcoGoldSmith_v1.027022m (l ocus AcoGoldSmith_v1.027022m.g) derived from phytozome v7. 0 (chr-ID scaffold_24; pos 2594386 to 2594807 reverse stra nd)
gccaaggtcatttgaaagatgaaagtgaaatttgtcgatgcacttgaattcaggacagtattctttcattagtagttcccattggttttttgtctgcttcaacttcaacaaaatataaagaaaaagaatgtaatcttctcttctattttatatttttactcagccttcttacgtttaatggttctagataatttctgcaagagactactataaactactatctagtctgtaagtagtattctgacttaaccgaaagagaattagtaacttgctatcctatcatagtcaccaccaaatttgagtcaaggagtttatataagggtagtttgattttcacctacgaaataagttttctgagataattatggactgccatgcaaataacgtacacaggtggatttcgggaagaagagacggtctag

SEQ ID NO: 110053 - DNA, 888 bp, Aquilegia coerulea
  Intron number 1 from transcript AcoGoldSmith_v1.003609m (l ocus AcoGoldSmith_v1.003609m.g) derived from phytozome v7. 0 (chr-ID scaffold_13; pos 2689359 to 2690246)
tctgccctagaaattgaagctcgagagtaagtttctaactctcactctctttttctctacttctaggtttaaagtttttagttttttttttttttttttttctaatcttcttaagtttatagttctttcaattggaataaagtttttaatttgataaaatgtgttggcgaatttgtgtaatttctgttcacattgaagaatctacacaatatatacgtttctatgttcatatttttattgcagtgaaggtaaatttgattgtgtagtgttacaagggaattatagggctttgattttataattcatattagtcggactattcatatgttgacgttgaggatttaaaacaaaggtgttttgcactttggttgcttagttaggttgctggactacatttacttatctatgaatgtcagggatgatgcaaattcaatcaaaacattgctgccacattcaaacacaaacataattaacttgatttggcttacattacatgatctttggtgtcagttttatactaggcaatggccaccctatagcctattacctcccaaaacccttattcatgaaaatcaatcaagattttttctacattcttttgtttgcttggaatcaatcaaggcgatcggttattgcaaacaattggttttctagtttttggagtttagataatgacatttttgtggaaagtgagattggtataagggaaggaacattggcttcaatgattttattctattatgactcgagtgtttttattattgttgttttattaatactttatccatcatgctcacaactaatgttggatgatataagaagctgatctaatgtatacaatgtattcatacagtgtgatcaagattgtgctacaattttgcaaagaaa

SEQ ID NO: 110054 - DNA, 1044 bp, Aquilegia coerulea
  Intron number 1 from transcript AcoGoldSmith_v1.001824m (l ocus AcoGoldSmith_v1.001825m.g) derived from phytozome v7. 0 (chr-ID scaffold_2; pos 10421432 to 10422475 reverse str and)
cgagtataagaacttcaggcaaatcagtcgcgatcgtaagtttcatttctcctttttcttcaattggttgcttgtttggttcttttgatctcatgtgatgttctgtaatttaggttttcttaggtattgtgtttgtgtgtagtagttaaacttctacttgcttgcatcttgatacatgtaatggatgaaggtcggatgtaaaatatgaattcgaattctttttcttagaagtttgaaaaaaaatgtgaagctatgaaagtttattttgttgagcttgattgttttggcgagtttgaaatgtcgtgagcaatcatttttgaagcattatatttgataggtaaaacttatgtattgatctgcaattgattttgagaaattttgattgaaatatgtaggaattttgcctgtatagaacaagtataataaatttctcacttggtcctaccagtttgccataaatatgaagttttatgcatgtttgttttgttcggattgagctttggtgagtttaatgatgtgaaaaataattaacaaagcacattatttttgtatgggtaccatctgtattttgaacaactgtacacagtacactttacttcatttgagtaatttcaactttgagtgtagtgtgtttagttacaactttattatacctaaataagaggccagaggacactagaaggacacgactaaggatcctggtttggtgaggatgcaagtgaaggacaatgagttataatatgccttttttgcgccattgtattagcaagtggctttccagtgcaaaggaaattatacatttttttcgctattgtactcaaatggtagttttggttttatagttgaattatgccactttttaattctgttacagttcacatgtgactataataacaagtttttattcttcctgattgatattttacgcatcagcgtttaaagaccttgtgttgtttaggtgttcatatatatttagcatttctttttactgtatcattctcatatttctcttctatatggatatgctcaggattgttgcacgaa

SEQ ID NO: 110055 - DNA, 722 bp, Aquilegia coerulea
  Intron number 2 from transcript AcoGoldSmith_v1.008022m (l ocus AcoGoldSmith_v1.008022m.g) derived from phytozome v7. 0 (chr-ID scaffold_58; pos 524770 to 525491 reverse strand )
tcaggcttgcatttctagctggagctggccttcaggtaaatgttatcctgtctatcaaaaggttgtaaccacttcgatgttttgttgaatataggttcccaggccgaacaatccctttttaatattgaaaatcacattatcttttgttatttagagactcatttcactcaggcagttgccagtttaatggggacctagttattaatttaaaaaaaggattagatagtcccattaagttctctctgcacattcaaaccaacacaatatattttgacaacaattttgggacaagtgccagaggcatcttaaaacaaaagttagaacacttgttttgtttgccccactgcaaaaattgttgtgaagtatcgactgtaccaatccttgtattctggttatgtgagctgctgtgacataaatttctgtaaagattttgctgtgtagattgacaatggcattttctgtaattttaagttgcagcatgggcaattaattgcatcaaaaataacatttgaacctcatatttgcttaagcgtctggatttatcttttttgtttttgtggaaaatttgtattttccaattgaagaatatgaggaaaattccctcaagtcattgtgaattgttctacaaagaggtggtttctaatacaccatattcttaaaattgatatataaattgggtgtgtgcaggcatttcagcagcttactggaataaacaccgtcat

SEQ ID NO: 110056 - DNA, 762 bp, Aquilegia coerulea
  Intron number 1 from transcript AcoGoldSmith_v1.005001m (l ocus AcoGoldSmith_v1.005001m.g) derived from phytozome v7. 0 (chr-ID scaffold_26; pos 1238021 to 1238782 reverse stra nd)
gtccttttcttaacagaagtactacaagaactgaggtgagaaaaaagtgttaattaagattctattgaattggttttgttatattgggttgtttagtttacttggaactttgcatgatttgattttgtttgggtggttttagaattgtttttttttatttgatggattgttatagtcctggttgttttagaattgttttttttttttttttttggctttttcgatagggtagctaaacatagtctgatagtctcgagcagcaacatttggtatttgtttaatgtgggataagctgttggtgatgatgtagcaatgtaggttgcatacccattttgaatatatttttggatagttgtctttagattatgagttctggtcattgaggacagttcttgggtgacctttgacgatacggtggttggtggttggtacgtgattgttacaccattacaaattaatcatttaattgacttatagtacatgaaggacaattaatgaattctcgcttgagttctaccatatgtttttcttaaaaatgaactgttcttaggtacacatagaaaagttccaatatctctatttacatttgtttttagtaatgtgctgacgacaatgttccactttcttctgaaatttctgaaacagtttgtctttgaaggggatataagatttgtcttttcagttttagctattgttctttggactgtgtagtattaacaacttgttctcaatcacatcattgaaggctgttaaaaattgcat

SEQ ID NO: 110057 - DNA, 784 bp, Aquilegia coerulea
  Intron number 3 from transcript AcoGoldSmith_v1.020926m (l ocus AcoGoldSmith_v1.020926m.g) derived from phytozome v7. 0 (chr-ID scaffold_83; pos 636254 to 637037)
acctctacagaagtcgaatcccctgaacaggtgtttgtggacaactgcttttgtataatattactatattctttggtttgtttgtccaacaaatatatggtttcctagttaaaaacttaaaaaatgtatgtgttagtagatcatctaatggtatttgaatgtacattcatcgtttctttgtaccatatatacatgccgcatccatacatttatagtgttttaaacgtttttatacactcaggactcagaagattagctatcaattcttatatatgttgttgcctcattggtatgtgtttgagatgtggaaggttttccagctacttaaattctatttgtccttttgtcaagattattgtacaattattctagactatgattttgaaattttagtacttccacaccatactattactctattgcttctgggataacacaccagtgatgctgtcaaggattatggggcttgtttttcctttttttggttaggggatctctttttttggctatgtggcttgtctgtgaccagtaaacagaacctatatacatctgaaccaaacgatcagtaaaacacagctttcctgtttgttcacttgttatatttatattattatgtttaattacagcaaaatgtttgacttgtgggagtatattactttctaatctgttattgcagcttgtggggcatcatcggaaaatcttaccatcttttgttatttgtaacccctgtttggttgttattgtggcagtgcagagcctggttagactgactcttgaacatcca

SEQ ID NO: 110058 - DNA, 997 bp, Aquilegia coerulea
  Intron number 1 from transcript AcoGoldSmith_v1.012847m (l ocus AcoGoldSmith_v1.012847m.g) derived from phytozome v7. 0 (chr-ID scaffold_8; pos 4694363 to 4695359 reverse stran d)
ctcttgaggtaaattccatctttcttaatcttctttattatgaaatttgagaaaatggggttgttggatagtttgatttcagggtttttttatgtatatatatgtattacctatgtcggggacttgcggaaatcgcgattttgatttattttaaatttaataaagcatatattatgaagggggattttattttttttttggtggatttttggatgaaaatgcttgtcccacaattaccatttcccatgattgattacttggatatgagaggggaattttcagaaaaatattatagataaaagtgtggaaaaatatgggggctcagatggtatagaaatgtggactacattaaatttgagaaaatggggttgttggataatttgatttcaggtttgtttatatcacctatgttgcgtaaaacttggttttgagtttatattttttgttttaaattataacataaattaggaagggaattttattttcccttgaaaacgtgtatgtttttatcttgataaccgtatgttgctatgtagaattagggtatgtttgatgaacaaaaattttccgtaatcaatatttcccatgattgattactgtaaaatgagcacgaaatattcagaacaggtttacagtgaagtgctatgtcaataattattgtgtttgataaaatactacagatcgttttgtaaaaattccagtccagattattgcattgtgcacataaattttctgcaaaaccggttttccgcacaaatcaaacagaagcagatattgttttttaatacgtagcgcacaatctcatagatggtattatgtatttggggaaccataatagtattatgaggttcaggcaaagctaagcattcgaggtgaatcatggtttaagtagaagtgcaatgtaggctcgcattcaacaccattcatacaatttcttgagttgcaaaatagaaagtacatgttattgatttactctgcttttattgcagatttctca

SEQ ID NO: 110059 - DNA, 727 bp, Aquilegia coerulea
  Intron number 1 from transcript AcoGoldSmith_v1.013905m (l ocus AcoGoldSmith_v1.013905m.g) derived from phytozome v7. 0 (chr-ID scaffold_3; pos 7241943 to 7242669)
tggaagacagtggaggggacgataataatcatacggtacacatttatcaatgtcagaatgttatgtttctgtttgctgagaagaaattagtggatattaaaacagtaatattttctcttgttggaagtaagggtattgtaggctttaggtgtgtagtttagtcccacatagcttagatataaagtctatgtggattctctctctatatatagagttagcttctttgtaagttaaacctaatatatcaatattatcattcatcttttataaaaaaaataaaaatttacccttacttccaacatctctgatagttacttagcttcttaatacttgcattattatgttttatttgccgaaagaacaaatatgttttataagttgttagatcaagaaaattatgtaacaatccaacatgataatatttcacatcgatgtacaagaaatataacatcctccaatcaccccccataaaggcatcgaggctaatattcctcaaacttgaaactaaaaaataagttatgaaggtggttggtgcatcatacaatctgttgttctttttgggggaaaacaagctattagccagattatatgaaagcatcaccttcgcagaagaatgttaacttcatgctgttttttgctttatcttttgtgcggtttggtttatgaattgtcttgtatcaaatttttattaggagctagagattccaagtagatctcgattatttcg

SEQ ID NO: 110060 - DNA, 893 bp, Aquilegia coerulea
  Intron number 1 from transcript AcoGoldSmith_v1.005189m (l ocus AcoGoldSmith_v1.005189m.g) derived from phytozome v7. 0 (chr-ID scaffold_16; pos 4880309 to 4881201)
acgtgtgttgcagttagtatttgtattcggaagaggtgatactgggctccccccgttcactttaaaacaagtccagctactacccaagcccagggtcgaagtccagtagtccgagtgagtcattaaagtgatttggcaattttacccttttctctttctttttttttgtctctactagaaagtagaaactacgcaacagctcgtcgccggtgtcggtcgcctctctctctctcttttcaagttcaatcatcatcatcatcatcatcaattttataagaaagaaagaaagaaagaaacagatctatctatctatctatatatctcgagtattgtattgtattgtattgtattttcttttatttctcttggcatccatccattcctgaaaccctaaaaaaaaaaaacaagtttcctggattccttactttctcttttgattatttgatttggaaatgatacagatacatagatacatagatattaattctgctgctgctgcgcatcaatctattatattctattctatcaagtacaatctgaatctatcatattctattctatcaaatctagttttaagtacaatctggagtagaatgttatgttagatacattctatacagttgaattattatgagtcttctcttctctttaatttttatttctaactaaattcaaattctattatagaggtgtgtttttttttcccttttcattcatcgtcgctcggttgtgtttttaattttacgattgattgattgattgtgagtcaactcagcttgcttgcttgtttgctttgctcgctatgacttccacttccaccgtcggaatacattcttctgataataattataataataggttaggaggtggaactggaagtggtggtggtcttt

SEQ ID NO: 110061 - DNA, 359 bp, Aquilegia coerulea
  Intron number 2 from transcript AcoGoldSmith_v1.025622m (l ocus AcoGoldSmith_v1.025622m.g) derived from phytozome v7. 0 (chr-ID scaffold_55; pos 904551 to 904909 reverse strand )
actaaggtatggaggaattcaacctttttcttcttcttctgtacatactgtttctgaagttttattattctgaagagtctctgacaaactagagaaaggcataatctagtagagcttaagaaaatcgggtttcgagccaactgatctgtcagtcagcaagaaaactggtcatatgtgcgcgaaagctaggcctcacggagaaatcaacatcaaacaaatgcactgatattgaaatgcatcaatattgtcaaaattcaaaaacatgtttaaactcttcatctactactcttttgctactgactactgggtttacattatttgcagcgtcttgtgtcagtaacacctgttatcggtattct

SEQ ID NO: 110062 - DNA, 730 bp, Aquilegia coerulea
  Intron number 1 from transcript AcoGoldSmith_v1.019054m (l ocus AcoGoldSmith_v1.019054m.g) derived from phytozome v7. 0 (chr-ID scaffold_26; pos 2310977 to 2311706)
aagatcaggtatgcagaaggattgctagagagaagttcgccaaaaggcggctgaataccattctcctcaatcagtgaagttcagtttgttaggtggataccacaatttgatgtaaactttgttcctaaatttgtttcctcagaatctctaccttgtgggctgtggcttgtaatattgtagcttaatcctgcaaacaaagtcttgcattcttcctcattttaatgatgttttgtgttatgatgtaaaagtgaaagcattcaccattttctggaaaattcatgttcctttctttcatttttcatacaaagttagagatagaaactgtgatgaatagcaaagcaagggtggtcatagtctcatagaaaaaaaaaaaaaaaaaaaaacctctcatgtggtgatgaatagcaaacattttggatgttaatagcagggtcttagaatttgaaatatcttgaatgggctcaacttaaacccacaaaaccagcccattaggaaaaaaaaaagaaccttcttagtaggctagtagctcagagctgtaagagtgttctcatactcaaaaggcatgcatttcttctagggtttgtctcatcaagcttccatttctcaaactcctatgtactacttttcttcagattttggtatttatttatgaaatttggttctattttgagctgatttggttaaattatggatagaattagccatcttcctgactcgattcgacgctata

SEQ ID NO: 110063 - DNA, 675 bp, Aquilegia coerulea
  Intron number 2 from transcript AcoGoldSmith_v1.003366m (l ocus AcoGoldSmith_v1.003366m.g) derived from phytozome v7. 0 (chr-ID scaffold_2; pos 3963392 to 3964066)
gttgaagaagcaccggacgcgttcttttggtagttcaagagataaagaaagcaaagtgcatgtcctctgggatggctatgaggctgatgctgatgaccaactgaagatttcagaaggtgagaccttcttaatgacctcgtatttggatattatttgctaagacttggtgagattgtgtgaacaaattatttgagcattattactattgcttaggtgtattttctttgaatttctggtcctcacatacatttagctagtgtaatgattcaaactcgattagtctgtgttgtttgcaagactgattattaactttatataattgaagtgacgccacagttcccttttagtaaatgagtcaataaccattacattgcttgagactgttaaagaaatatataaaatacgctggttagcacgtggtgctcatgctgcaattccaatgaagatgcactcccattgctagtattttggctaataatagcgagggggtgcggtcttagtaggtggggggggggggggggggggggaaaggagaaaaacattaatgtgcatgcaattatatgattttcaaaaacttcgtatgaagttatttcattaaataggttttatttctaatcatatttgtttctgcgaaagacagttcgtggaggtggaaggagcaatagttcagcgtca

SEQ ID NO: 110064 - DNA, 899 bp, Aquilegia coerulea
  Intron number 1 from transcript AcoGoldSmith_v1.006487m (l ocus AcoGoldSmith_v1.006487m.g) derived from phytozome v7. 0 (chr-ID scaffold_56; pos 41020 to 41918 reverse strand)
catttggtgattgaagataccccattgttcttcaggtgatttttcttttaatttctcattttcttattaataaggggtgtaatttgttttaagattttttttttttttttgagaattttaggatttgggtttgtgaaattgaatctctgtatcacaagaattgcgcaaagaaagtgaatttatcgtgggagtattgagatatgtgttatttgtattgattttcatttaatttctgttacaagtaatttcatattatattatttatgtttggcattattgtgtccttctttgggattgttgctatggggggtgtaaaagtgtagttttgtttgaagttataggctttgagaccaaatttatgtatatattcaattttgattattgggtatcttattagaattatgagataaaaatggagtatttcatcacggttttgttttaggagagtgagggagggagatgcagttctgaaaaaagtaaaggaaaagaaagccaatttttaagctgtttatattagaaaagaagctttgacattatatgtcaatggtaatgagctggccatttatgtgaacttgtgcattaatgaggaattgtagaaatatgtctagcttggtttatttattttgcaacttgcattttgatagatttagcacttgtagtgtttgggttttgtgtaattaaatttatacagtttcacatttatagacattatcatcctcgtatgctttttctatattatcttactagcatagattttattattattgatctaatttttctgataaaaaaatataagtgttctattttattacgtacaaattttcattctttggtgaatgcttgtgcttacagcgaaatattttgtttgtcaggctattattttttcttttaacattagg

SEQ ID NO: 110065 - DNA, 1031 bp, Aquilegia coerulea
  Intron number 1 from transcript AcoGoldSmith_v1.009730m (l ocus AcoGoldSmith_v1.009730m.g) derived from phytozome v7. 0 (chr-ID scaffold_3; pos 993173 to 994203 reverse strand)
accccctttttcctacttgttcttgttcttatcaggtaatctacaaaaacccaaccctaattcaatttcttgatttcgtatttcaaatttcaaattttactcaaaacaaaaccccaatcctaattttgttggttctgatttagggcatcaatttttttaatgtttgcacttatttgtttggattcaagattatttgttttaggtttaaagttacaattttgtttgaatctaattagttacagagtttggaaacttaagtacggagttatatgaatatgaattttggttgggcgtgtaggttaggattcagagagtttaactttagatcatacatacatagagtcattcagatttcataaactttactgccttcgccaccaactcacattttagggattagagtgtgcacaattctaattctaatataatagagtctatatctttagtttcaagattagaggagtgaggaatcatagattatgattttctttcggtgaagttctataacttttgtggcataccaagtaaggactgagttcatgaatgttagaaaataaaattggatatacaccaaaattctagcaacttttccatttcaggttcattgtttgtattattcgtctccatttaccatcaaccatttgtataatcctttcatctctatctctccctctctcattctttaatcttgatagctgttgtaaactattttacttttaaatgttgatagcttgacaagtttgagtggatttttcaatggtagcaaatatgggttactaaattttattggaatatgttgtagcatattttcgaactttgataccatagcaatttagtgtgctcgaacgaactactgctgtaatgtttcttagcttgcttagttaaatgtactgagcttcttttatttcatgtctattatttatcagtcaatattttcttcattttttaattaaatcaacatttcaaaaataaaattgaatgttttatattttcctttattaatatagtacataccgcagcaattttgtatc

SEQ ID NO: 110066 - DNA, 1009 bp, Aquilegia coerulea
  Intron number 2 from transcript AcoGoldSmith_v1.010069m (l ocus AcoGoldSmith_v1.010033m.g) derived from phytozome v7. 0 (chr-ID scaffold_91; pos 329839 to 330847 reverse strand )
ctcggccatcttctcgtgcaatttccaaggcaagctccaaacaccattgctgttttttgatgcgtgttcaagaatgtagataataaaaatgcgttagagaggaattgaattttagcatggagaagcttaaactgaagttcccatcactaaactaatggtcgtagatacccaaaacaaaatagaggatctgaattttatcttggagaagttcaaactgatgttctcattgccaaacaagtgctctgtttacagtgcgatctacactggctccataaattttgggttattgcgggttgggtttaaatggcactcttgatattatgcttatctatggagtttctattcagtggagcttgtgacgttgaatattgataaaacaactttcagcagtaacaaggataccaccaaattatattttaattggtggtgttctttacttctatccatcaccctctactctcagctagtgcttggtatatagtcagtctacatcgattatccctaaatagtgggttgcttcgggtgggggattagatggcactcttggtatttgcaaaaaaaattgtcagtatgagctcgccatttattattctcattcccagagtccccattcagcggagcttcaatcactgaatattgataaatgcaacactcagcagtagcaaggatgacacccaattatactgtaattggtgaagttctctatttctattcatcgccccagttctgttatgattgtttagagttttgattgttaaattatgacaaaagttcaacatcagtgtcttccattactttctggttttttctttttcttaaaatgttatgattggtaatgaagtcatttggatttctcatttacttttaattttttttaaaactttgatttaatttatacacttgaatttgaatatatagttaatgtgatgatattcttttcataatctggattgttatacgtatacatcatgcagccttttagcagaaccaaaagtgttccgtggcagcg

SEQ ID NO: 110067 - DNA, 356 bp, Aquilegia coerulea
  Intron number 2 from transcript AcoGoldSmith_v1.002570m (l ocus AcoGoldSmith_v1.002570m.g) derived from phytozome v7. 0 (chr-ID scaffold_7; pos 1533996 to 1534351 reverse stran d)
aaaggtgaagtttctttaatagagcttattgtcatttatccaaaaagcacaatgagattgttggttttttgtatttgatatactggaggatctcattattaagtagtgctataaaacattctgtaatataatactgagttcaatcaaatcaaacatgtgtagtgcatgcaccctgagatcctccaatatatgaactcatttctttaggcacaagtcctttagacttgcatgcagtagtgtatctgtactttggatgttctcatattattaaaattttagtcgattcgaaatatacatattttcacttctttttagagaagaaatgttgatataattgctgtccaggcttcgggaat

SEQ ID NO: 110068 - DNA, 833 bp, Aquilegia coerulea
  Intron number 2 from transcript AcoGoldSmith_v1.017962m (l ocus AcoGoldSmith_v1.017962m.g) derived from phytozome v7. 0 (chr-ID scaffold_2; pos 5178726 to 5179558)
gctctgctaccttgagcagcggtcagcaggttggtgatctaaattctttttcctcataatcacatgaagtccaatcaatgaaatcccttcaaatgggtttatataacaataactctctttaagtcatactgctacatattttatttatctgactataaaattttcctaatgtttcaacattctttttttatgcgtacaatatgttactttgaacaaaaaatatggcattcacacaacagcatggtgttaaagttttaacctgtatcactatatgtccgatagacaccacctcttttgtgcctatatatccatctgctgttgtctcccctcatttctgtattctggtaatagtccatccatctcgatgagctttctttgagcactgtaaattttgtttgggatgcaatctcctatgtaatataattttcttttctctaaaaacaattttacattctgggacatggaaatctaatccttagcttatgtttgtttgtacaagctgtaccattaccgtcaacgttccttcatatgttattacttcgtagttttcttcataggtctctttttttgactatgaattgcaacccttctagtgtagtgtctgttcatatccattactgtttgactcataatggttccattaaacctcgtcaaaccacttttattttgcctcactttctgcacgttttgttaactttcaatttcaatctttcgcctttgttgtaagattcaaataacgacacggagattcacgatatttcagtaatacaggggattggtgatactgaatgatcgctataatttaagtacacatattattgcaggctggcaca

SEQ ID NO: 110069 - DNA, 687 bp, Aquilegia coerulea
  Intron number 3 from transcript AcoGoldSmith_v1.011950m (l ocus AcoGoldSmith_v1.011950m.g) derived from phytozome v7. 0 (chr-ID scaffold_31; pos 2366462 to 2367148 reverse stra nd)
ggcaggagtaagtaccaaactgttattctcctttcccgaatattgtttattatctttcacaggggataaagctggtatcacatagttttgtattgatgtccccatgattccgttttcagtgatagtcatccatttttcccttggggcggttaatctgcttcattcattcagatatcaacttcttttttgattgaacaacaaaatgatacttattactcgtaatggttcaaagcattaatgtaaattattgaagtaaataccctgaaattttgatcttctagtttaaggtataatgattccagtgaaatgatttcattaaatgttggaatgtatcttaagttcatgaggtatatgtgacatcacttacaacaaacacacattttacatcatttcagaattagcacatggaacagcttgtatactactcaaatctggatattgttctctggatattaaatcattcgtttaaaacttattaatctttacattcattgaaaacttacaatagatgtgtgcctttaagcacccatggacatggtctggttggtactgcgaacatgattttatttgcgaatggtcaaaagcaaatgtatgttctctccataaataggtatcatcttttatatatgttctgatatttcttacttcatggcattcaaacaattctttaccatttttgatacagtt

SEQ ID NO: 110070 - DNA, 824 bp, Aquilegia coerulea
  Intron number 1 from transcript AcoGoldSmith_v1.027829m (l ocus AcoGoldSmith_v1.027829m.g) derived from phytozome v7. 0 (chr-ID scaffold_8; pos 3742522 to 3743345 reverse stran d)
ggaaggtagatttggcttttgtcgtcttggggctgtaataccttgtacagtgacctgcctgcatattagttgttgagatttttgtaccattagatggtagcacaccgttgatttaacttaaactagtttctgttcacattagaaagaaaaaaaaaccgacttgctgctcgatctgtatagtaaagagagagaaataactttgtgtgttcacactatataacaatggtggaagagggaaacagatctgtgtaaggtgcagatcaaataaaaaaaaaaattataaaaaaaagaaaagaggataattataagaaagctagtaggaaacttggaattctatgcttgggacatgtagcttgtgattttttttagtagacgattatcatagctattttcttcgcgaaagataaggtaagttacattattaataatatcttttcttgcttttaggagatagatgaagttagtgggtgtaatagtatgctattgttatactacaatttcggctatgcatattaattgaatttgtttgattttgatttcatgaaattggtatcattatttggttattattgaaaaattgataggaaagcatgttggtgtgtttatttgatttaacatgatattgattgtctaaatcctaattgacgctgcaatgaattattagattattggtgatattatgcatgtataattttcatgctaaatgtgagattgcatattttgaaatttatgcgtattgatagttaagatgcattcaatttgaatgaatggattgatttgtgtgaaaagggctttcgagccagagactgttttgaacagtctga

SEQ ID NO: 110071 - DNA, 414 bp, Aquilegia coerulea
  Intron number 1 from transcript AcoGoldSmith_v1.000648m (l ocus AcoGoldSmith_v1.000648m.g) derived from phytozome v7. 0 (chr-ID scaffold_2; pos 8975633 to 8976046)
tccatttttataagaacccttctgccattgatcaggtttgctttcttcctcctcttctttgtttcattatatttgatactgttatgatttgttatagaaaaaaaaaccaagacatcaatgaatatatgtttacactttgaattttcaatgggaattttcgaaaaatccctttttagtttttactaactaatgtttacacctcaatgaataaattgtcctaaccaagcataagtgctgccgtgccaactgccatgatcaatgatatacagtaatccttctttagatgaaacatggaggaactgttaatttaggataataacatcttatgatgcccttatctatttgaattaagtggtgttcgtggttgtgtggaatgcaggaaacttttgctcagtacacagcgagtacagcatt

SEQ ID NO: 110072 - DNA, 786 bp, Aquilegia coerulea
  Intron number 1 from transcript AcoGoldSmith_v1.025397m (l ocus AcoGoldSmith_v1.025397m.g) derived from phytozome v7. 0 (chr-ID scaffold_57; pos 119735 to 120520)
ccatcacagaactacgtgaatagacagtaaaataatcatctacatactcttgggttgccatataatagtaatttcttagttttgaaacatcaggtgtgtttttgttgttgatgattggaactataagccatggaagatgattttgaaacaacataggattacaaatagattgccatgttttgcaaacccatccgaaacgatacatatccggtaaatttaaacgatcaacaaccaattctagaacatgatctggtagctctgttgcttgtatcttcatgattcctcttcctctcttgttttcaaccattgcactctcttttacaatacaactagaagaactatggtgtatagctagaagcctagaagaagttttctcttccacgcatgcatgttatagctatttaatgggcttcacgtacttgttgtatttgggttggattaagcttgggctaaaccttatggttagggtttaggtttttgtacaagctcgacctagtcattaatcattattcctcatttaatttcatccagaaatcttcagttcttcacacctatgtactagctagggtttctatacattatcaaaaaaaaaaaaaaaaatcatctagggtttcttctatcatttccaaccttggtattttctacaacagttccttcatccttgaagaggtttagtccagttcattcaacaacatgagtaaagaaatgcgtacggagtttcgcctactgagagatatcatgattgatatatatctttgctagattaacagtccaaggtctttatca

SEQ ID NO: 110073 - DNA, 1025 bp, Aquilegia coerulea
  Intron number 2 from transcript AcoGoldSmith_v1.023463m (l ocus AcoGoldSmith_v1.023463m.g) derived from phytozome v7. 0 (chr-ID scaffold_52; pos 863796 to 864820 reverse strand )
cactctattttgaggtatgaattttatgaaatttgaacaatgtgcataaaaaatcaccaattaatggaatacaagatatgcacattattatgtggtaaacgatagagtgttccgtcatgcagtctttcaagcgtcggattcatgtagtcatttacaatgttcattttgagtttgtgccatttacttgtttaggatgaacatttgtaccaatatggggcatactattgttattggttacattttatacctaatacatacaagaaatcacattacctaatttgaactgttcatcctcatcagtatactggtgaagttcttttgcaagtgcttctggacttctggtgcctttaatctatcagatcagtgactttatttggtaaagaaatcgtaaaagccagttttgcattttcttctggctagtctgacttggctcttaactttgataatctgggaaggagatacaattacatatcatcattattttggcctctgtccttgataactatcacatagctttgaggttgttataatcatcatctaggatgtcctgtctgacacctttattttggagatgcttctgttgtggagaccctattgtcaaatgttaaccatgcttctatcttgaagtagtagtttatggacgtgcttccttgttgtgtatatcactgaatgaacacataatctctttgctgaatttatgaggacatggacacgggttatcactatcaggattaatgacttaattcatattctcttgtaaattataggagtgttttttcataaaaagggcccccttaagaaaatgaaatgtctgacttgttacttgtgcttattgtgagttctgctttatagaaactggcaaatcatctgaatgttataaaactaacggtattgggctattggcaatcacaataacctttgatgtttccctgttaatttactgttcttctgatatatgcttaccttctattccacatattcctatcgcaggaaataggccttataagtcagaaagaaccgataag

SEQ ID NO: 110074 - DNA, 329 bp, Aquilegia coerulea
  Intron number 1 from transcript AcoGoldSmith_v1.006354m (l ocus AcoGoldSmith_v1.006354m.g) derived from phytozome v7. 0 (chr-ID scaffold_3; pos 6115171 to 6115499)
agagtgatattacaaattcaaccaggaatttataggtacttctgctttctttatattgtttcagttatatatccttcttcctttggacttaagacttaattaactaatgaagtgacggactactatttgaattttgaaatcaaatatgcattgcataaccatgtttatttgttcattattagatcaatttatgagacattgttgtatacattaatttaccaggttctttgttttagttttctcatagtaggctgcagcagctgatgtgatcatgtgattgtatacaatttgtagggagaaaattgtgattcccaggtccttgccttttg

SEQ ID NO: 110075 - DNA, 1033 bp, Aquilegia coerulea; identical to SEQ ID NO: 109500
  Intron number 2 from transcript AcoGoldSmith_v1.007163m (l ocus AcoGoldSmith_v1.007142m.g) derived from phytozome v7. 0 (chr-ID scaffold_13; pos 3709860 to 3710892)

SEQ ID NO: 110076 - DNA, 991 bp, Aquilegia coerulea
  Intron number 1 from transcript AcoGoldSmith_v1.008314m (l ocus AcoGoldSmith_v1.007928m.g) derived from phytozome v7. 0 (chr-ID scaffold_2; pos 1019052 to 1020042 reverse stran d)
gtttgcagactcttcttctcttctgcttttggattgtaagtattacacctagctattctttgcttagagtttgctccttccttaattagcttgtcatttttaaataatggggttttaattatatatatctttctgtgcaatctaaagccaagaatctctactcttcagttttatccattcattagtatgaatgcatggtgggttttggcttagattaaagtttattacattaaaatatatataggttttttgtctttctgtgcaaaacccattgaaagtaaggaatatttgctcagtttcttccattaatgagaccaaatgcagggtggggttttgttatttgaatatgtgagatggaattctttggtattttgatcaatgggttctagttgaatgtttggggcttgggtttctctgttcattttgcttttataacttttggggagttttgatgttcattgaagatatggggttttaagttttgaatttgtggaacttttggatagatagtttgttttggaatatgagttttattgccaaaaaaatctcgaaaacaatgaatgtgggtagtatttaattgattcatgaatgcttggagaaataatcccacttttgtttttctccttttggattgattgttgtttatattgtcaataatcgcctgtaaacattgtcgatccttaagttatgatgatggatttatgcgtctggcttgaatgaattagataccccttatgaggactctgcattgttaagaatcccaaggcttatcaagattttcatgttgttttttggatttttattttacttgcccattttatttagtttgaaaacgatttgttcttggagacgtttggaggttgtatatgacattgtgatttaaaaactatccaccatttagacattttgagtgaagaataggaaggaaatcaaaagcatcattgacatggattttataacaggatccgcaaaggtatcttggcagccagag

SEQ ID NO: 110077 - DNA, 288 bp, Aquilegia coerulea
  Intron number 1 from transcript AcoGoldSmith_v1.025747m (l ocus AcoGoldSmith_v1.025747m.g) derived from phytozome v7. 0 (chr-ID scaffold_3; pos 9783847 to 9784134 reverse stran d)
gaaaaaggtaagaaataatgtaataatgaatgagaatatatttttgattttgctgaataaatccaaatctaaacttaaagctgtgttatggtttgtaatggttgatccagatgtactatctaggtgtactgtctgctatatatatatcacacatgtagatgactagatgctgtaaagaatcaatctctcaaggttaaggaattgaaacaaaggaagacaaatatgaagttttttcttttcttgtgtctcctaggccttgctcttgtttccctgcttgaatttataagt

SEQ ID NO: 110078 - DNA, 439 bp, Aquilegia coerulea
  Intron number 1 from transcript AcoGoldSmith_v1.001100m (l ocus AcoGoldSmith_v1.001100m.g) derived from phytozome v7. 0 (chr-ID scaffold_7; pos 5245270 to 5245708 reverse stran d)
tctcttcatctcgttactcttcgtcaggtttgcagaacgaacaatttcttcttatttctttcacaaacacacaaaactaggttgttttttttttgtgaattttcgtttattctgtcaaggttttgttattcttcttcttctagggttttagaataaaaatatgttcatgaactgtaaattcaccaatgtgaacgattcatgtgtaatttagatttagttatatagttaaaggtttgattttggataattttgaaggatttttgtagagataataagtttaaaaatcaaagacaattgtagaaataattggattttaaaattttgggaaaatttagtatctttaaaagagatcaatttggtggtggttctatttcatagagtttaaattagttcttccaatgcaggcgaatcgttccattttgttagaagaagatcgtgt

SEQ ID NO: 110079 - DNA, 392 bp, Aquilegia coerulea
  Intron number 3 from transcript AcoGoldSmith_v1.012287m (l ocus AcoGoldSmith_v1.012287m.g) derived from phytozome v7. 0 (chr-ID scaffold_55; pos 982140 to 982531)
gttgcaacatctgaagaagcattctattagtactggtatagatgcaaccattgttcttggatttctatttatttttcttgtttcttctggaagatcttccattttttttttctgctttgttccctttgcggcggaaattgtcaaaatatggtgaactacaacgtgctactgtcataactagccccaatctactgaagaaatttctattactcttctgtgaaattcctaatctcaaagcaatttaatgatgataagacgagtttgtcaaaaatttgacagtaagcaaatatgaattttttttgatgatttaattttctaaagtttttttgatgaattttctttgtacatttattctttggtcatgctcttaccgccaaaatgaaactcagcag

SEQ ID NO: 110080 - DNA, 963 bp, Aquilegia coerulea
  Intron number 2 from transcript AcoGoldSmith_v1.007501m (l ocus AcoGoldSmith_v1.007501m.g) derived from phytozome v7. 0 (chr-ID scaffold_34; pos 2195423 to 2196385 reverse stra nd)
accgaagctacagaagtttctgacactgctcaagggtaaaatttattttagaaagccacaactcccccctattcgttttctcacataaattctactgcattttaagggatttttagactttaaccccccctattttggtcacgattggagtaaaccccccattttgtccaaagttggacttaaccacttgccgtctcccttccgtctcttctaccatccatgaattaatttttggatataaataccccttcactcattttctttctctaacatgttcttctttatttgaattggggcttttttattttcattcaagagaaaaaccaaatgtagaaaactggaccaggctgaagtggaggatacaagctatggcatgggaaagtagtagaaattggtaatagttcttattggctttgtagacattgtatggtggggattttaattcaagagaataagcaaacttcactgcgatttccgacgtttgcaagttaccaaattcatgtggttcttatggtctttgtagacctggtaaatggtaatgggttgtcaatgcttagagaatgaaacaaagtataaaaaaggggagtgttttttgccccaattcggtgattaatgcagagaaacacaaaggattaataaaaggtattgggtgttgagaagaaaaggagttgaattaccttttaaagagttaatggggtttgaaaagaatggaactctagatgaatgtgaaggttcataagagggttctttgttactgtaatggagtttttcttggaggggtgaagtcgaagggttagacggcggggtgatatgtccaactttggataaaatgggggtttactccaatcgtgaccaaaataggggggggggggggggggtaagtctaaaaatcccgcattttaatgtgggctattatattttttccccaattgcatgatgtaggtttccggatactcccggtat

SEQ ID NO: 110081 - DNA, 640 bp, Aquilegia coerulea
  Intron number 1 from transcript AcoGoldSmith_v1.022050m (l ocus AcoGoldSmith_v1.022050m.g) derived from phytozome v7. 0 (chr-ID scaffold_80; pos 193495 to 194134 reverse strand )
tggccaagtatcctcaggcgccgtactccaatcttgtgagtactcaacactttcccgaaatggctaatctatctgaattgactatgtaatcaatcttgcactatgtaatcaatctaatctacttctgttactagagtgtttggttttttcctttttatgctggacagtctatcaatgtcgcccatccagtctgagacacttgacctatgcttgtttagtgaaaggaaattataattttccaaacttaagtcatataatgtaagagcttatcagtacctttctttctttattggttatcaggcaaacagaagataagttttctagtaatttgacttctttttcttgacaactcttgcgaaacaaacacaattagtgaaacaatctaccttgttttgtcttttatcgtccaaaattgtgtaatatgctaaaatcctgattgtttctaatgatcttacagttgtgtattaatctccaggtgttttacaatttgggtagaaaaactgagctagtgaaaccattcacattgctcattttcaaaatcgtgtagtgcatattttgattcctgactgcttatacaatcatcttatagactttgtgttgatttgcaggtgtttatatcactgggattgtatctgcgggt

SEQ ID NO: 110082 - DNA, 728 bp, Aquilegia coerulea
  Intron number 1 from transcript AcoGoldSmith_v1.000970m (l ocus AcoGoldSmith_v1.000970m.g) derived from phytozome v7. 0 (chr-ID scaffold_2; pos 7012523 to 7013250)
aacgctccaattacaggtattatttttctttaaattgaacaaatgataatttctttgttctctgttggttgtaatatttattcagaaaacatgaatttgttaattttgagtgatagtatttgggctgtgttgaaattatttaatgtgattaggaatttggaggataattataatgttgagacttacatggacaatttgctagaacaattacaacatttcgagatagcatgaatgttattgatagttagctgaagaaagtggaaattgttcaaatacaacttctaaaaacataagctggatctgaactactccaattcaaataaatatctctctttaagagagttggggaagtatatctgaatttaagtcaatttacagcttaattcagaagtattttgttgctaaattgaaaacaatggtatctgcaccctacctgatactcccttttggtatcaagagtgatttttagggatcttcaaacactgattctgatctccctttttttggtcgtactgatcttcctttttagtatgatactattgctttctttcatctattttactagagaacattgcacgacgaattctcactcagttgtgatggacacactaacatgtatgtgcgccattgtgcagtcagtgtactgctccattgcctattttctgttggtgtgtaacctgatcagcataccattgtatttccattcatcttgcagacacaaacaagtg

SEQ ID NO: 110083 - DNA, 606 bp, Aquilegia coerulea
  Intron number 2 from transcript AcoGoldSmith_v1.005073m (l ocus AcoGoldSmith_v1.005073m.g) derived from phytozome v7. 0 (chr-ID scaffold_2; pos 9191975 to 9192580 reverse stran d)
ggccattcttgtgattgtggccgtgtcttctccaggtatatagcttttaaatttttcttctaaatcaatttcaatatttatgtttttttctttatagcttcatcactatttatatcctctttgcatatacttgttggctaccctttataaatatattttttaattgaaattcaattggcccaaaatccaaactctgagtttggatttaagtacattaattcaattaattctacaaatacttcaatattaaacttccaataattaaaaatcttatatattattatcactttgaatcaatatgcaaaacttctgttaatttcttgccttggtaggttttcttcttcttgttgtgaaatttattaattaattaagattattcaccactaaagataaccatatatatccttactgaatagttgtctagttaaatctctcttagctagacacaaagtccacccctttgttttatatatattgatagtgttttgttctacttctttgtattatgaacacataaagatcaactatataattacaatctgtccttctcaatcttttgttttcttcttcaatctatcagagtggaaagtttcattgaacatcaag

SEQ ID NO: 110084 - DNA, 359 bp, Aquilegia coerulea
  Intron number 1 from transcript AcoGoldSmith_v1.016038m (l ocus AcoGoldSmith_v1.016038m.g) derived from phytozome v7. 0 (chr-ID scaffold_58; pos 1131523 to 1131881 reverse stra nd)
ttggtctgcagaatttgagcaatttcggtttggaagttttacttgatagctggtaaattctttttaatgtggatactggatatgaagtgtaatactattaagacatgaagtcttagattaattttaccctatataaatatataaatataaatagatatactctaccgatcgagttaacttgcaaagtatccccaaaaccccttttttgtaactttgtttctttgcttcaaattaagttttaattttcttatttgcttttcctctaagctaataaactgagttgacttcatctttaggttgatctgatctcatgttgaatgcaaaaaaactcaaaatggatgatggcaacatgaaaaaag

SEQ ID NO: 110085 - DNA, 674 bp, Aquilegia coerulea
  Intron number 1 from transcript AcoGoldSmith_v1.003052m (l ocus AcoGoldSmith_v1.003052m.g) derived from phytozome v7. 0 (chr-ID scaffold_2; pos 5090854 to 5091527)
gtttttgtgaatctgtgttgtttcactaatttaaggtacgtcatatatgatctcgatctaggtttcttgttttccgtacttcaaattggtacttgtttcatgtaatttggttagggtttatggttatttggttaagagatttttttttttttttaattaggttttatgtttttttgaatgtgaattagttaagataagaggagtttgattgatgtagttgtttgcgattcatatgaaaattagttttttttttcttgcgaattataaagaacagtaaatagattgcggaaagagagcacaattctaatggattgtaaagaaaatctaaggcagacctgtgcagaactttgaagaacttgagtgataaacatttagctacttgttcactcacagagaataggaatttttcagatgatttttttttgaaaatattagctactgaaagttgaaggatatgtgtataaagtaatcgtctttatgtgaaaacagaagtttgcttaaaaaaaatcctaaattgagatgattatttgtatgctttaataataagttgtatattagtgaagagaaattgctagtatagggtttgtatcagacaagtgaattactgtatgtgtttcaatatctatcagtttagttaattatccgttgtttctttgcaagaaacagttatcaaa

SEQ ID NO: 110086 - DNA, 739 bp, Aquilegia coerulea
  Intron number 1 from transcript AcoGoldSmith_v1.005424m (l ocus AcoGoldSmith_v1.005424m.g) derived from phytozome v7. 0 (chr-ID scaffold_34; pos 1802653 to 1803391)
ttctaaaccggtaaatcttttaattatataattaattcaagttgattattgtttttttccagctcaatttacctctgtagttacttaattttgtggtaattggaagttttagaaattttaaaccaccataagaaactcttgttgctgagttgcttaaacattgaattccgatacggagtctactacagacatgacaaatgttgcattttgttgttttacgcgtgcttgttttaagcaaagtagtttcatttggcatgtcttagataaattacaatagtcgagacgagtgtaaactgtaaaaaataaaacacccttgttctgaaattttaaagtaaatctttcattttagtatggagtttttagcatgctttttgatggatataacaagaacggaacaagaaggaatcaaacatctcaatttgcttgatatatagtttgcaagcagatattattttaacaatgctttgatgactgaaatgactaaaaacttaaagccattcaaattgacttgagctctacaaaagagaagccccttaacttcaaaaaacatctgatgtagcttctagatcgtttgcgtaaaatttactatttcacttcctgtctcactccagtcgagtttcctgtttggtgtcttcacctctgcctctcagattagagagacagtttgtttctaataatatgttagacaagtataagtgaaatatttttgttttctcaggaaccagttcattggacgtca

SEQ ID NO: 110087 - DNA, 555 bp, Aquilegia coerulea
  Intron number 1 from transcript AcoGoldSmith_v1.010559m (l ocus AcoGoldSmith_v1.010559m.g) derived from phytozome v7. 0 (chr-ID scaffold_32; pos 1106187 to 1106741)
ttccatccatccattcattcttcattaatccaaaggtaaacaaaaagattacttctgtttgtttgttttgtttggtttctcaaaaaaaaaaaattgggtttgtttgttgttctcttctttcttctcatctctgcttttgggtttgttttcttttctcccctttatttcatttattctacttatgttatgttatgttaattatggtgtactttataattattaatgcaactgatttcataacaaatcaattcttgttagagactacatttgaatggaaaaaaaaaaaaatgttaatcataaggtagagtgaatgaatttaatcaattgataagattcacatttacattgcttttaataatttcaaattttccctgtttgtcgaaaaattgactgattttttttttttttactgaattctataatttatcctgtttcgattggttgtctcgtatgtcagaatgttaatttgtggggcattggtgctttggattttgttattttgttgaattgttaatgtctatggatgtaggaaccatctcgaatttcaccaagaac

SEQ ID NO: 110088 - DNA, 450 bp, Aquilegia coerulea
  Intron number 3 from transcript AcoGoldSmith_v1.009973m (l ocus AcoGoldSmith_v1.009968m.g) derived from phytozome v7. 0 (chr-ID scaffold_13; pos 3359015 to 3359464 reverse stra nd)
gtggagatatcactttgaaacgagtgcttattcaggtttcttatttgtcacatgattagtacacgctatttgcttaggttattgttgttgctattgctctttttgactttatcacaatctgttttaaattcaattcagttctgagggtttaataatgcagttcttgcttttgtaaccttatcttatcaaaagcaacctttcctttcctcagccttttttcgtcttaagaaaatgtgtaaatcaatcctagcagctacaattataataatttgaataatacctcttattactgataaaaataatttggacaaagaaatattatgacttgattttggtcttttgttaattcttgttatggaatgtatatgagaaatatttcttttatttactagaaaaattcttttcacaattttaagttaaattatttctgtttggtaacagggagtggat

SEQ ID NO: 110089 - DNA, 874 bp, Aquilegia coerulea
  Intron number 3 from transcript AcoGoldSmith_v1.007676m (l ocus AcoGoldSmith_v1.007676m.g) derived from phytozome v7. 0 (chr-ID scaffold_13; pos 312331 to 313204)
caggtaaatgaaattacttagacaactagatttaaactgaacttaacagttgatggtgttctgaactcaaaatgtgctctatgtatgtataataagatttactaatttgatgaaactttggcttactgcactgttgaccgttgtatgccatataacattagatctctataccatatcttacttaacagcacactgcacaccccgaatccccatttgtgttactggtagattatcaatgaattttttgtacgtgttactgatatacatgggctttcccttagaatttttatgtgtcaaatagatttttaaagatgtggaacctttgggactaggctgttggtgtatgtcaattttagcaattataaaacagaaatgcattgccaccattcagtgccagtagtccagtactacattccagttaaactctgctggatctttgtactttcttatctgttgtgtattatcaagggctcccaatgcaccttacgcagtcggactccccttcctcatgtattccaatggtacaaaaacaaaggctattgtgctagttatgtttattttgagtcagacagcacttgtttatacctgatacgattagaaaactgaagattttttcaccttttttctacctgatacgaatagatatgacttacacataaagtcttatgtctgcgtgattttgaaggcaatgttgctggtttacctcaatttaatctgtcagaaaatatattaccaatttcccataatgccagtacgaatcccccaaattgagaaaaatccaattttcagtattgtgatttcatagtgtaattgtattttttaatggcatttgacaatatttttggtttataaatgtgtcaggttttgtcgaaag

SEQ ID NO: 110090 - DNA, 364 bp, Aquilegia coerulea
  Intron number 1 from transcript AcoGoldSmith_v1.024257m (l ocus AcoGoldSmith_v1.024257m.g) derived from phytozome v7. 0 (chr-ID scaffold_7; pos 4532369 to 4532732 reverse stran d)
aaaacctcttcttgttattttggttgtgctccaatatcacacttaggaatatgcatcccaatcatcaattaaagaaaagtatataagatgaagaattcattcttcctaagttggttagagaattaaaaataaaacataaaaacattgatgcagaataaaagaaaaacaaacacaattcatccaaaatgcaactcaaactgtacatgtatatatagatgaccttagaagtcagaagaaagacatgacattcagcacactaactgcaatttaagaactcacacattcaattgcttggacatcacttttccatgatttcattaatagtttagctattacattcctctgcttattccttctcatctca

SEQ ID NO: 110091 - DNA, 892 bp, Aquilegia coerulea; identical to SEQ ID NO: 109393
  Intron number 1 from transcript AcoGoldSmith_v1.005604m (l ocus AcoGoldSmith_v1.005604m.g) derived from phytozome v7. 0 (chr-ID scaffold_13; pos 3088656 to 3089547 reverse stra nd)

SEQ ID NO: 110092 - DNA, 446 bp, Aquilegia coerulea
  Intron number 1 from transcript AcoGoldSmith_v1.017985m (l ocus AcoGoldSmith_v1.017985m.g) derived from phytozome v7. 0 (chr-ID scaffold_39; pos 393463 to 393908)
cttacaatgttaatgcaaatcaaaaaaagccaatattatatcatatttattcatttaatgttgattacagaacagaaggtatactaggacaaaaataccactatgtcttgcgaaaccaaaaattaataatccacatgatgaaaaccacatgatcattgtgcctcataattgtatctcaaggccaactttcacctttaatttcatatttttgtctagaatggatttatttattttttcttgtgtttttgttgatccataatgacagccttaaatcttgtatatctgtcagtttaagtataattgcctctgattaaagttggacttgagcttgtctagaaagtttcactttatattaaagcccatgaagaaaaaaaaaactatatattctagtaagctagctagggtttttaatttcagtttaagcaagcatcattcaacagtttacc

SEQ ID NO: 110093 - DNA, 599 bp, Aquilegia coerulea
  Intron number 1 from transcript AcoGoldSmith_v1.002172m (l ocus AcoGoldSmith_v1.002172m.g) derived from phytozome v7. 0 (chr-ID scaffold_2; pos 9057557 to 9058155)
ttgttgcattgaattataattctgagattgttctggtaagttcttttcactttgatttgattaattttactagtgtcattgctatttgatttcgagatccaagttttaatgaatttgattcttcaattgacatattaggagtttgcacttagatctgaattgaattgttagctaacatagccttggcattggaaccgattccaatgttcaaggtcacataggctattgcgaagtttcgaatgctggatttaatgtaacaatttgggtctaactgtcatgttgtatatttgcaacaagtgaaagcagatgtatagataatgacatttgatgtatgttttgatctgatctggttcataatggacatcttttttttttttttgaggatcagccaccaaaattaaggtgactgtcttgtgggcttcgtgatagttggtgtcattgccgtgtgctgttctatctaagaattttattgttttgttaatttgcattgacaaactttctctatatgaattattacttgtttgtcaatatatcaaatgttaagctgccttaaaagcttattatgtttcttctctaaacttgttactgcttgatgaagg

SEQ ID NO: 110094 - DNA, 673 bp, Aquilegia coerulea
  Intron number 4 from transcript AcoGoldSmith_v1.022498m (l ocus AcoGoldSmith_v1.022498m.g) derived from phytozome v7. 0 (chr-ID scaffold_26; pos 2214505 to 2215177 reverse stra nd)
aaagagcagtcgattacttgaacagtctcgacaaggtaataatatatggacagagacgggacacctcccacaaggctgatctctcttatcctgaagttataagtcaaccgtattgtgcgcagcggaaacttatgcaccaatacccaagattgaaatagtgtatgaattaaacaaaacaaaacaaaacaaaaacaaacccacacaaaacacaagatttacgtggttcggctaatattgcctacgtccacggacaaacaaacaatctttcttatagagacgattatacaagccctcacgaagaaaccaaagtgttcttcctcacaaaagttctctcaaactctctaatggcttctcacaatctctctctcacatcaagattaggttttccaaccttctcattggctttataacatagccttacaatcaaacacgaaatgggcttaaacaggcccatatgcacaaaagcaaagaaggacgtacgaatgtcgaatacacgtttgtacgttcagctgaaggataacgtatacgggacgtacgtacgttcgttcccagacaaaaaacttccctccgtcctcttttccacaaagaaacccaacaaaccgtacgtactaatagtgatttgcatttgtgattttcaggtgtttgttaacgatcaatttctgaactgggatcc

SEQ ID NO: 110095 - DNA, 896 bp, Aquilegia coerulea
  Intron number 3 from transcript AcoGoldSmith_v1.008495m (l ocus AcoGoldSmith_v1.008495m.g) derived from phytozome v7. 0 (chr-ID scaffold_2; pos 7080880 to 7081775 reverse stran d)
ggctaaaacaagcaaaagaagccaacagagtacaggtatgctttcacatacagtagtcagtagttatgtgtttttcttttacagctcatacactttcacctttataagttttgcaacatacagtatattaactcttagaaatcgattagttgtttgctagtttgttttcaacttaacatggtactccattttgtcaaaaaaaaatcgtgtatccctcgatgtgtcggacacacatggacaccacacacttacaaacttatgcacatgattcagattagaatttgtaatgaaaccctgatatatgaagattaggaaagggatgaccaagaagttacccttcatcaaactacaatcaaagaaaagatagaaaagaaaggtgagaaggagagatattatgttttatgtaaaaaaatgtattataaattaatcaaaatctgtatccctgtgtccactggttttaggaattaggatgccatcttggcaccgacgaattgcacctgtgtcaatgttacttaggttccaatagtacataattcctactaaaagtctttagaataaaaaccactataatctattcagttccaaccttagttcctacttatttagatcctaaattataacgtaaaattatggtatggtttgtcatttgaatattttggaccacttgcgtttcttgttctgaagcatgacaaggatcgtgatttagtaatataagacaaaagagcgtggtagtgtggtactgcacaacaaggaattttggcacgtttttcagtccatgcttttcagcaattaaaatgtaaaacctcctataggcacctagcaccatgaaagaaacattcacatacttgtaatgcattgcagattgattatacacaacctattcagaaagaccctcc

SEQ ID NO: 110096 - DNA, 625 bp, Aquilegia coerulea
  Intron number 1 from transcript AcoGoldSmith_v1.001423m (l ocus AcoGoldSmith_v1.001423m.g) derived from phytozome v7. 0 (chr-ID scaffold_2; pos 7807729 to 7808353 reverse stran d)
ttttcctctgatcctcctgcttggattcctgatttgtaagtattttaacatgttttcaattctttgttttctcgaatttttatgaagttattttagttattttttgatatgatgtttgaaaattattggaataaatttaaatcataagaatttttttggattttatatggaaaatttaggaacatggaagtattcttgcttgcaaattaggagtcgaaagccgttggattacttttactatccactttattatgtgctgatagttcatagttgaatccttatctcaattacagcagatgacaaaagttggcatttctgaaagtggcaaggattcttttcaccctcgtcaccttacaagtgacctctaagaaaacttgttcttaacagtttctgtgcattgactgtggagaactcctacattaaacactattgaatattttacaatttgtatctgacaagttcactgttttgttcattagtcgagcataactactttatcttgtaaatttgttctttccttatttccttatttcttctcaatttctaatattattttcgttaccagtttgtgaattctaattattatgtgatgtactgaagcacagagagagtgccaagttaacga

SEQ ID NO: 110097 - DNA, 961 bp, Aquilegia coerulea
  Intron number 1 from transcript AcoGoldSmith_v1.006248m (l ocus AcoGoldSmith_v1.006248m.g) derived from phytozome v7. 0 (chr-ID scaffold_2; pos 8966259 to 8967219 reverse stran d)
tggtcgtctcttccctgtttctgactcaattaaaggtaacttttttatgtttttttttctccaattgtttgttatttgcgcgcttttatataatattcaatagttcagtttgtaatacgaggtaatcatgttagtttcatagtatgattgatgtttaagattgtgtgtttctgtgacttgatttatattgaaatctaggaaaaaagtttggaactttgtttcagctacacttttagtgggttttttttttgtatttggtaagaaataattaaagggtatgttgattttttgttaaattttgagaagtgaatagtgagttatatgataatatcacaagatctgaggaagatttgaccgaaatatgcattttatctttttgttaagattgaaaggtttagccacttgttcaattaatgaaaattttgggggacggagaaatgtttagagcttacttagcgcattcaattgtgtgcattgaattaatatgtgtttggttttatgcattttttcttttttctttttaaaaccaagtcacatttcttgtatatgcataagtgtacaactgtaggcaatttgatgcactgggttgggagaatactatattaatgtcaacaagctgaacttatttgtagaaaagtagttgccactgtgaataaaaaacaacaacatcacaaccgcagccactctgcataataagtagaatttggaactaatatataatcacttcttttatataaagaattgtataaaatttcccgtttcttacttctatggttttaaagatctttgtttcttttcctgataaaagcgacctctttcacttatattgaagaaagatttgtacaaatttaatgatattctttatagtgttgaagatctttgcttcataccctaataatttgcttaaagtgactgtcctcatctgtgttgtaaaagcaattcaggtaaacactgttcagat

SEQ ID NO: 110098 - DNA, 931 bp, Aquilegia coerulea
  Intron number 1 from transcript AcoGoldSmith_v1.006647m (l ocus AcoGoldSmith_v1.006647m.g) derived from phytozome v7. 0 (chr-ID scaffold_58; pos 794122 to 795052)
aagttatccaaacttgtaattcttctttctttccttcttatgtatgtgttttatgatttgggtttttgtttcactatgtttgattgatcatgttctgtttaattgtaaaaaaaaagtgaacttgaaatgaaaatttttgaattttttttttgtgtggagattaaatggtacttattatatttgaatttggttgaaataactttggaaaatatgttttggcatgaaatatttctttagtagttgatcaaatgttgttttcggaattccctaggtggctaatttcattggaatgagaaaatcagtttgtactgaaatgaaagatgaagttatttattttgtttgcaaaacaagattctactctttgaatttgatttttttttttttttttagtattgagttgttagtatggtctgatcatttgatttgaagtcattaaagatggatgatttatacatcagcaagtgtagtttagaaccctcttgagatataatgttgaagatagtcatcttttatctatgttctttcttcttcttcttcttcttcagacaattgtgtttgttttcagaagccttaactcagacaatttatgattttggatcatagtggtagggatacaatgatgccaaattcatttgtcatattaaaacaactttttgatatgttggttgaggggagaggctgtgggcagtgatgatgcggtttataggaagcataccatggttttcattaagagatttgaaacctttctgacacttcgtgatttcaaaaattgttattttgaaacttaaaaaagattttatggtatttgttgttttattcaagtattggttgaattacagatgttagtttcattctttctaacttctgaaatgttgcttctatctgttttgtgccagggttctcttttgagagattcaaaaagtaggagatc

SEQ ID NO: 110099 - DNA, 626 bp, Aquilegia coerulea
  Intron number 5 from transcript AcoGoldSmith_v1.002450m (l ocus AcoGoldSmith_v1.002450m.g) derived from phytozome v7. 0 (chr-ID scaffold_39; pos 461223 to 461848 reverse strand )
aattttaagagtgccaggtgctttatttactattttgctcaaatattttctataatgacacgttgttttagtaatgctgttgtgctagttagtgataaacagatggtgtagaggcacattagatgttagcattatgttatacttcataactcaaaagtggttctctgtaatgtacctcatactgtcattgtataaaatgctggctttgacaaatccattgactgaaaatatagaattccagaaattttttactaggtgtggctgttaaaattgagatgttatataggcacattatacgttagcagtagcaccgtgttctatggtagatactttttgttcatagctgtcttttggaaacataaaaaagactgttagctacaatagttatgtggtatatgaatatttctaaggaggaaaggaagaggaatttgaccaatttaatgattatcatagtggcccattgtgcattgccttcatggtatttatgccctctttaaaccttttcaattttcatcattacctttctccaggacatttcatgtgctgtccttttgattaagttttttatttgctcaattggttttgtacctatagttcgataacatactaaacttgtagggctgttt

SEQ ID NO: 110100 - DNA, 591 bp, Aquilegia coerulea
  Intron number 1 from transcript AcoGoldSmith_v1.016932m (l ocus AcoGoldSmith_v1.016932m.g) derived from phytozome v7. 0 (chr-ID scaffold_26; pos 2361794 to 2362384)
gatctcaataaactcaatcatttacaaaacctcatgtaatgtactcattcttatgaacatctcttgattattggattatcttaatatgattgtgtttatctttaggtttcgatcatctgaatttgatattagctttcttttcaagtagataaatagatagatagagatgttcacgaggatttttttttttttttcatcacttttaatatctctgtctgtgtcactgggttatgaatctcgccactcactcacatatcttaggtatcaattttaattggatattgaaataataataataataatgtttcaaatccatgttattggcctgggtgagttagacagaccatattatgctatgttccccaatttttgcctattccacattttgttgcttattggcataatataatattgatttttctttcaatgttgacttaacccccattccatatctaagtgagtgaaaatattcttctgaagaatgtctaggttttgaatgtttagtgtttttagagtatcatatcaatataaggttgaatgatgactaactcattcttttcttcacaaaatgtagtttgggaaggttacagg

SEQ ID NO: 110101 - DNA, 710 bp, Aquilegia coerulea
  Intron number 1 from transcript AcoGoldSmith_v1.002206m (l ocus AcoGoldSmith_v1.002206m.g) derived from phytozome v7. 0 (chr-ID scaffold_26; pos 322253 to 322962)
cttcttcttcttatcgatcaagatcaaatcgatctgtaagttttttttttcttctccataatttgaattttcgagtagaaatttgtgttttcggtttaattttgattgcaaataagctgaaattgatacaaaatgagcagatttgagttaaattttgcaaacaattcatgtaatttctaatttttgcatctattggggcattatgacaaaaaaaatcacgatttctaaactattccatgaaattcacacagtttaatagataacgatactgaaccacatagattcttgtgtgagagaaatctaagattccaattggtaagacaggaacaggactaatgttgtattggaggacaattacgaaatctaaaaagtttaatggttttgggagaattagtatgttcttttatcaaaataataataataattaatatgttgttacaaggattccaagtcaaaaaaaagctataatttgaaatcagggataaatttaactatttaagcttcttgttttttgaatttcattcaaaaccttttgcttgtttgatgtttgtagaagagatgccagataaaccaggaaagtttactctaaaagtttcctgttttttattattccatttaagaaaattaattagtgggtgctggctctgatgagtagtcttgttatttatcatgcagaaaaagcgacgccgtaacaaaagtactggctcatt

SEQ ID NO: 110102 - DNA, 974 bp, Aquilegia coerulea
  Intron number 1 from transcript AcoGoldSmith_v1.001791m (l ocus AcoGoldSmith_v1.001791m.g) derived from phytozome v7. 0 (chr-ID scaffold_22; pos 781500 to 782473 reverse strand )
gagtttcttctctattttcaatctcgatcagatctgtaagtctctctctcagttagaagtttaatttgttggattctttgattagatctgttgcttccagtgtgataaattatgaatttttgatttgaatttgaaaagttggattttgttgtaattacatatgacctggtgtaaattgtgctgatttgatatcagatctggttatagctttggaaattgattaaagtgttccaaaatgttgcatattgtttcatttctgattttactttgctcgatttctttttaatcactatagaaaatggaaaagaaatgactcagaactaggttaatttaaggatctggaggaattttgaggtttattgttcgaatttagttgtaattttgattttttttattgttattggatttggttgttcttgagtttttcctaacttgatctaactttgaatcctcttgtttggaatgtaaaattcgatttccttacttgacttcattttgctttggaagatgataagaatctgtttcataaggttttgaatcttacattatcaagctatcatattgtttttggaaatctagctcacttttagctttaacattgtttgtgtgaatggtggtggattgtctctgtttacctattgataacactatgtctggaaagatgtagtatgagttattaactggaatgaaaaattagtggctactttttgaatatggatgtagaaacattgtggtctgttgtcgagatttctgcctttaggtagtttcattggtagaaaatataaatagcggtttcttttctggtatggatgtctttatagtctaaatatcggccttttgggtctatcatgattagagaaatgggaaattcatttcttatttggatctgtcttaattcttgtgaatgactgaaagttacttccttttccctgttctaaaactttggtatatttcaatccagaggctgcttggaa

SEQ ID NO: 110103 - DNA, 882 bp, Aquilegia coerulea
  Intron number 1 from transcript AcoGoldSmith_v1.027344m (l ocus AcoGoldSmith_v1.027344m.g) derived from phytozome v7. 0 (chr-ID scaffold_93; pos 177496 to 178377 reverse strand )
ctatccatcgggtataaattcacatatctcatacacaatatacaaatattgcttcaacttaagacacctgtttctcactcatctatatgtttcgattaaacctcctttgaactttgctaatgtaaattgcatatcatgttttaaataataattgtttgtaaattaagaatataattccattaaattactaggcatagaatcaaagttacccctttaatgttcatctttctatttagtggcgttgagaagctactgatgtcacaaatactatcactttgatatcttcatatgtttgacagtttgaggctatgctccttggattttaggactaagcgctactcttcttttccaatgaccttctcggagagcttcttgcttttggtcatttttattcttttttcgataaaacacttatcgtatagaacacacaaagacatctgacgacaaagattatgccccttatgtatatgttggcgtggacccttaacaagttttttagattcatgtatgttatatgctgtgtagttatgtaggaggtatcagttttcaccttcaaagatgattactttcggatgtcattttgaggttttcaacattatttgtagctctaagagtcaatttttgatgattgtaaatcattatttttagacaaggcaatgctagtgcgtgacattgacgtcaattagaaatgccatttgctcatcgtgtagagattgtgtttgaccaattgtattgagattttcccctgcttcagcatgtttcttgtcgaacttgagtgttttaattgttatttcttttttgttcattctgtcctgttaccaattaggttaactatattatggctatacttgcagattttggatctgtacaaagaatcacgtg

SEQ ID NO: 110104 - DNA, 754 bp, Aquilegia coerulea
  Intron number 1 from transcript AcoGoldSmith_v1.027010m (l ocus AcoGoldSmith_v1.027010m.g) derived from phytozome v7. 0 (chr-ID scaffold_7; pos 4528753 to 4529506)
cctgagcaaaggcgttgttttggctacagttcaaggtgatggggattgcacgtaatcgtggaaggttgtcaagcaatagagacattgtaacaagtctttggtatccacagtgtaacatgtttgatattgaatggaaacaagcttagaagcaattttgttgaataaatggagataaaacttaataaaactgtatcttccaaattataaattataattctacgaaatctctgggggtggaatttcagttgccttgtgaagctgaagttgagatcaatattcaatatcgtgctctacatctattggattgatctgtagttttgtaccaaatttactctgctggatcgattttattctacatgttattttgctaagcagctatgtgcacggaagggtgagcttttagtgaaatatatagtacatggtaaattgcgcgcattcacttacgtggcatctgaaagaaagtccaaattctagagcacctgtaaaatcaaagtcagcattctaaaaccaccagcaaaatgtagcagccctattaatgcagctggtctgacagtgtttctttccatagcattaagataattgaaagctatataaagaaacctcttcctcaccatttccttacacacaacattctctactcactgtagtattcatatggcttctacacttcagattctcattttttctgttatttttttctgcttcaaccctttcaccagtgctcaaccctcttttcgtcctcgtgcactcgtgc

SEQ ID NO: 110105 - DNA, 458 bp, Aquilegia coerulea
  Intron number 3 from transcript AcoGoldSmith_v1.000472m (l ocus AcoGoldSmith_v1.000472m.g) derived from phytozome v7. 0 (chr-ID scaffold_13; pos 1396009 to 1396466 reverse stra nd)
aaccatatcatcccccacgtccttataaggtgtggattgtactaatattatcgtctatgttttggcaacatataaggattatcctgcgtcttctcaaaacatcattttgatatcctatttgtttgtgtctaagatgccttgatgtatggacaaggtgacaacattgtatggcattataatgtaacatactaacacacaccataaatggtttattactacaagctatagtattaatgcatccatagtgttctttagaattcaagtaaataaatgtgcaaagaaaatttccaagtattcagcacattgacagtacagtctgtgctataatgtggggtactttgctcaaccaacaatagatcacttttagagtggtactgtcatttagctgggtatgttacatatgttcttctccaatatttattttatatttcttcaggcagcccctcactcacggagag

SEQ ID NO: 110106 - DNA, 788 bp, Aquilegia coerulea
  Intron number 2 from transcript AcoGoldSmith_v1.003878m (l ocus AcoGoldSmith_v1.003878m.g) derived from phytozome v7. 0 (chr-ID scaffold_2; pos 9787390 to 9788177 reverse stran d)
agtaccctgttaccactgagctccaggtaattaatccacatccatcttactaataatcacaacaaactaaactaaactgatggtatatcatcattgtagctgcagggaaatgatagtgttctttcacttctttgtaattaagaaccatggaattatttggatctaattagtttttcactttttctatatatatacaaaattcaaataagaagcaacttgctctcatggccccctgacaaagctatcacccaagtacaatataatgcacaggcaaacctaccccagattatcacttggaagttggatcattactagtactagtacagttttttttctatgctgctagcctgctgtgcatatagacattacaatattaggtatactttttttttgttgaataatattaggtatactttaatatatattggtttaataagtgcttaaatattaatgtaaacaatgaccattttcaacttttttgtcccccagcgacctaaattaatggatcagcatcctcacatattatgctctatttttctaacaactgaaaatgacaggaataattttgaagagaatgacacctttatatttattttgaattgcgtaaaaaaataaaaataaataaatatacaacgaaagaaaacgtcatcattttttttttctttttggttataactcaaggatggacaacttgatattgaaaagtatttttatttttatttatttttcatttttggttttggaataatgcagaatcgttgcgtgaacattattgctaatctcttcaa

SEQ ID NO: 110107 - DNA, 382 bp, Aquilegia coerulea
  Intron number 2 from transcript AcoGoldSmith_v1.000100m (l ocus AcoGoldSmith_v1.000100m.g) derived from phytozome v7. 0 (chr-ID scaffold_2; pos 590986 to 591367 reverse strand)
ctggttctggggtaattttcttatcaatattttaatttatagtttatttacaaagtttcgaatgtcaatggaataacatatgtttttcaaaatattatcgatggatcatattgttgactctattgtcatatagaaagatcagttttagttagttatcacttactttactatccatctgtttacattgatatgaaatatttgaaaaatctagcttgaacacaccttttagcttgttgtacatgtcaaatgaagttcttgtgatttttgtatacaaccacgtcacacttaggattgatcaattaacattcattactttgttaattaatcaattgacattgattactttgttttatgtatcagactgcagggaagttcaaacttg

SEQ ID NO: 110108 - DNA, 1022 bp, Aquilegia coerulea
  Intron number 3 from transcript AcoGoldSmith_v1.012060m (l ocus AcoGoldSmith_v1.012060m.g) derived from phytozome v7. 0 (chr-ID scaffold_2; pos 950001 to 951022 reverse strand)
cacgtgctatcaggaggcgtctcaccaaacatcaagtatacttcacaccttctgatattattgaaatgttgtttgtgtgacctgaaatggttgctatagttgtaattgcttatgtagattcaaatttaactaaactatgagtacatagaaatcattggttaggtagtatggaaatgattatcatatcggctacagttaggcatgtacaacagattgttcattaaatggttaagatccaagcaattgaagttgacaagtaatcaatatcaatctatgtttttggacatctaaattaaaccatcctatggatatcattttctttttccagcagaatgactgatgtttatgttaagatgtgtgaaatcaacaaccttacagtaaattatagcgtctttcaatcaggaagatatgtagatgagcttcttgcactgatgtagtgtcgaatttttctgttataactttaatggtatccgtggtaaaaggttgcctagaattccaaacccaatggttaggttttattagtagaacaatgaaagcaatttagcagttgtaaacttgaaaacttccaaacccaatggttaggttttacagctgacatgaatagaaagccctttatgtatagtagttgttggccctaacacatgagccatgtaataagaaggccatccattttgttttctttttctctggtgccttgttgagaggttttattattttgtatagtcaaggtatttgctttgcatataattgaactaacatggaaattgcatatggtgttttgaaccatagaggatattcaagctcttactttagttggattggtaagatgtgtaaataacacagtcaaaaggtttcagttgtattgatatataaattctttgacacggaattactgttgttgtttgtgtggctgtttagtttctgtattctcttcattttgtttcttccttgaatgacattctgattatctgatgacctttatttcaggcatcactgaagacagagagggagaagaaaaagga

SEQ ID NO: 110109 - DNA, 591 bp, Aquilegia coerulea
  Intron number 1 from transcript AcoGoldSmith_v1.025460m (l ocus AcoGoldSmith_v1.025460m.g) derived from phytozome v7. 0 (chr-ID scaffold_68; pos 51957 to 52547)
ggcttttgttcaagcctatcgtcaagcacttactagtgagtttcttgctaacttatatctctttggcattagtttttgacctttgtacataatacatcttgaataacctagtaggaaattaagatatctttctcctttgaatgaccgagaaagaatgttgcaatagccacatactatatcctcatgtccttcattttccaaatttcttttccttattgcctcatactaaatagttcaatttaactctgggaacctaattctgatcttaattataataataaaataaaatagaacaaaatttaagggtcagtttgattagggtggttttatttacctggaaatatttgtaaattcattaattttattctgaaattggggactccttcatctatttgtctcttctcgtaatacctgagctgaccaaccttctactggtaaattaattcccctgatctaatcaaacagacccttaattatctggaatgtacccgtttttattaattatcaataaaatctcaattataaaataataaacctaattctgaccttctttcttgatatttgagttaacgatatgattacttgttccag

SEQ ID NO: 110110 - DNA, 440 bp, Aquilegia coerulea
  Intron number 1 from transcript AcoGoldSmith_v1.004483m (l ocus AcoGoldSmith_v1.004483m.g) derived from phytozome v7. 0 (chr-ID scaffold_22; pos 3655386 to 3655825)
gaggttggttttcttaagattttatatttttcatttggtactactttgtttactttcagtatttgttttgtggacttttcttcattgtgtatgatcttactagaattttatgcaaagttaattataatgaccattctgtttcagtattctttgagtgattgttaagaagatagagatgatggccctttttatttatgagtttctcatttatgaaatatagtagaccttagtgtgagtgtgtgactgcaattgggcatcaaaatgatttgaaatttggagcttaaaataacaaaaggggatggttggttgggttctgctttgatctactctggatattttggaatccattttgttgaattgctgactttggttttgtgaatgtgagctaacagttttagtgtccaggtcctggttgttcctctgttggtggaggcgctttc

SEQ ID NO: 110111 - DNA, 993 bp, Aquilegia coerulea
  Intron number 1 from transcript AcoGoldSmith_v1.017747m (l ocus AcoGoldSmith_v1.017747m.g) derived from phytozome v7. 0 (chr-ID scaffold_116; pos 151474 to 152466)
cacagattagcaggtaaacaagacaacttcataacaaagtctacgtatataagaaaatgtgtggtgtctgttacctgctagattacactaagtttttttaggtgatatttgatgaaacatgaatccaaagttgatgtgtcataagttaagggaaaacacaagccaacaaatgaaacatgcaaaacaatgaagtttataaacacatgcaaaaagaaagtgaaagacctttataagaaaacagtttgctcctatataaaattcaattgtaaaagcaaataaatcatgagtgggagttcacctgcattctatttatgactccacgaatgattttggcgtgtaacctggggtaaggtgttgcacttaacaatcaatacattgagtaagagataaagaatgcattttgttaatgctaaacatgtaggacttagcgaaagacctcaaaacttgtattacgccaacacgaattcagctgaagcatacacataaactacttgaagcccaagaatgctaaacaattataaacctacaaatacaagatatcacacttcagatgaggactaccgaataagaagaatagaagaaattttaaaaataattaccacagaaactgtaccagcctatatgtttcatgtagagcaaaataaaggttgtcacgcacttaaatctggtcctacaaaagaagaaagcattataaatgagaacaaaactaatgattgaagcaataaaatgtagtgcttctatgtgcaacataaagctaatatcgaagtcatgactctaaccctcttactctataatctatatagctctctctctttctctcttccatttcttcgtttgtctttggtgtaaatctgtaaacaaagtaagagaaaagaagaaaaaaaaaacgtatctgtgaacagtagtttgaattgaagaacagaatgtgagtgataaaaataaaagcaagaaatatacgcaacacatacagattctcaaccacggcctcccaat

SEQ ID NO: 110112 - DNA, 905 bp, Aquilegia coerulea
  Intron number 2 from transcript AcoGoldSmith_v1.000010m (l ocus AcoGoldSmith_v1.000010m.g) derived from phytozome v7. 0 (chr-ID scaffold_7; pos 3827706 to 3828610 reverse stran d)
tagcttgtgaaacagtcaaccaggttcagttcaaaatcatatagcaaatagagtttagtcattgatgttctcagattgttgaccaacgtttccaaattgaatttatgcaggagatgctttttagagtggcaggtcttccgatggttgaaaattgtttatcaggatataatagctgtatgtttgcttatggtcaggtactcataaaaacttcagattgagaaacagatactataactaaaagtagtcaatacaagttgtgtgatcaatcaaatttagcaattcttttaaaggtgctggacgtttaatttttaaggttgtttcctttggcgatgcttatcataacttgagtaactgaggctgtcatcttggtagaccagcttggaataatggagcaaggggccacttttccaaggctgaagttcagttacattggataatgtaacaatcaaatgaaatgaaagacaatggttaattttttttttttttttttaaacttttttacccttttaaagttttgagaggattacaatgttgaggtcttgaggatggtttctatagtttatcagttcccactttctgtctagaggcaggtcttagttgggcatgtgtggggagactactatttgataatcattgtttttctgtgggaggatagaggtgtggggctgagggggagttaatagttggatctactgaatgagatatcctggtttacataatatgtattttacagataatgtgggtttgttgtgtgttccaatcttctaatatatgtgtaaattatctgtggatttggcggtgattgtgtttgccatggtaagtggtctagcttttagttctattgacaatattgcaactgatgtatgaattctttcttgtagacgggaagtggaaaaacatacaca

SEQ ID NO: 110113 - DNA, 895 bp, Aquilegia coerulea
  Intron number 2 from transcript AcoGoldSmith_v1.023149m (l ocus AcoGoldSmith_v1.023149m.g) derived from phytozome v7. 0 (chr-ID scaffold_2; pos 9251545 to 9252439)
tctactggagatccatcaaaccgtcacaagcttgggtatgaatttcttttagtactcgttaacttttcattaatttttttttttttcggaaaccgtcatagtaaaactgccactgtgcactgtctgtcatttcatttttaaccgaggatggcatccatgccaagaacgctctgaagtctcaaactagagtctgttagaaggtaaaagtatgtgctaaccactcaacctcagagtctcttggaaggtgaagacgtaaagttacacaccaaccagttctactgggttggatgttttagcctattttcagacttcagagtgtgttggtcattggctcattgcacattctgtgattcaggcattactcaaacctttctaaatttctcaagttgaaaaatggactgaatcactgaaatgtctttttccaagtggcctattttttcttttgatttgaccttttaaattatggcttcacgtagcctccatcttagtgcacaactgcacacatataagtcttcctttctttattctttcatcatctcatcgaccgacgttaggaggtccatttaaagtcaggtggaactcaaactcgtgatatgcccgttttttaatattttctgaaatctctcctcttccgcttgctctctcttcccctaacgtcggtctccaccgtatcatggttctatattaataagtaccatgcaccaaacatctggttctatcctcctataatttctgtacatcattttgtgatattagcagattggtaattccaagaaataccgtaccttatttttattttatatttgtttttttcctattattattttggttgatatgattggatattttatgcaaaacaggggtggagtaagttttgcagcaatatttgggctag

SEQ ID NO: 110114 - DNA, 652 bp, Aquilegia coerulea
  Intron number 5 from transcript AcoGoldSmith_v1.011001m (l ocus AcoGoldSmith_v1.011001m.g) derived from phytozome v7. 0 (chr-ID scaffold_8; pos 4531626 to 4532277 reverse stran d)
ttcttctgagagccaagaaaaaatttgaattcccggtaattgtttcttttagttttattttttatctatcatgggatcactaaagtatgttaacagtattatcattcaataatctgctctgaaatctacttgtcacataaaatgtgttcttgaaaatgtcaggaatgatgtgtcaaatggccttaaaaaatatgtaatttactttttggagttttcaaatggagtcatcaaattctccccattccttgcttgcctttgtttcttaagatgtttataatttacctttggtgtcatttactgtcttataattggtgccctcaattcttttgacactagacttactgaacatagcattttgtgaatcgacttaagttgctgaaatatcagaaactttgaaagatctgttttaatagtgtgatttgtcgccctaccttgtacatttttactctgcgctttttgagttcgtccaaaaagattatgtcttcaagccttttatgccacctagagtgaggggacatacttttgtagtccttaaagtcaaggatttggagcttcatcgtctttaacaacagttaccactgtggacagctgaagcttttagatgcaatattgctttgacatggattggtatgtcttttgttatgtaggtaaa

SEQ ID NO: 110115 - DNA, 451 bp, Aquilegia coerulea
  Intron number 1 from transcript AcoGoldSmith_v1.025579m (l ocus AcoGoldSmith_v1.025579m.g) derived from phytozome v7. 0 (chr-ID scaffold_56; pos 1096835 to 1097285)
ctacaaacgctacttgcttggtctgggcagtgccagtaaggtagatagatcatacattgctacaaatatttactttgaaataaacttaaattgattgtttctatttgaaaggattagatataaactcaagcccatttcagttaatcacttaagcccattaaaaatttaatctaatctcagccccagatcttagctagatcgatctctagaagatctggttcacttttgtttttttgttttgtccgtccacaagtatattatcagaaagaaagttactcgttcagttcactagggttttcatttccaaattctaccgcccaccatccctaacagagaagatgaagaagaagatgaagatgaagaagaagatggagatggacatagacatggacattgagagattagcgacatcttcatgaacattctctcaagattaccaaccaaacaagaa

SEQ ID NO: 110116 - DNA, 540 bp, Aquilegia coerulea
  Intron number 2 from transcript AcoGoldSmith_v1.022652m (l ocus AcoGoldSmith_v1.022652m.g) derived from phytozome v7. 0 (chr-ID scaffold_2; pos 1094766 to 1095305 reverse stran d)
aaggtgccaaaagtaacttagcaaattcccatgaagcaatcaacaaactggcttctcaattggaaataagagctactaaaagggatgatattgagttcaaaaagttggaacagaaacgtgagattgagttgcggaaactacaaatcaagcatggttttcttcaacgtgcaaatgatttaaaaaaacttcacttgacacaatccctgcagaatatcgtgaggtgtataaggcacgacaagaaacaatagcagccagtggcggatctaaggggggtcatggggtatcagttgacacccctgattttttagaaatataaaatttacctacaagagtttgaaaatttacaaaaacttacttgtactcaaattagtttgaccccactcaaaattctaattttatgtaatagtccttgattttttgactttttctaagttaatcaatataattttcattagtagtccctatacagtcagtcatgaaatatatatgacccccctgtactaagctcctagatccgccactgatagcagcaaagtggaa

SEQ ID NO: 110117 - DNA, 612 bp, Aquilegia coerulea
  Intron number 1 from transcript AcoGoldSmith_v1.002586m (l ocus AcoGoldSmith_v1.002501m.g) derived from phytozome v7. 0 (chr-ID scaffold_32; pos 2619722 to 2620333)
aaagttattttttgtttttcttctttagttcaaatgtgagttttcttgaacagttagactgatagttaaacagacttcatgaatggtcaaaacaattagctagttagggttacttacttacttagttcaagagttctgaaatcttgctagtagtaacataacattgatgttgttcagtaaaactaagtgatttctggatcttgatttggaatcttttgttttaatttttggttattccatgatttgtttgatttgaagaattaagacttgctttacttgttccaaaactagaaacatttccgtaaatttgcagacattttgtttaatttgaagacgagctgggttgagaagtgtttttgtttgaattattatttttgtgaatatattagaacaaattagtatactagaagatcagcttaaatttgtacagctattagattgtgacaattgatatacccctttttctttttatttatttatattcataaattgagtgataacggcaggtgtgtgtatgtttcttagtttttatgatttcctttttcttcctatacagtatttccatgtatcttctaaacctgaagtacaatgcaggtccattacaaagaacta

SEQ ID NO: 110118 - DNA, 985 bp, Aquilegia coerulea
  Intron number 1 from transcript AcoGoldSmith_v1.012638m (l ocus AcoGoldSmith_v1.012638m.g) derived from phytozome v7. 0 (chr-ID scaffold_78; pos 1007912 to 1008896 reverse stra nd)
tatattggtcctacaattttataccataagggtttgtttggttttccaattttgacacttctaagtataagtatgtattcttaaggattacaacatacttttttagacatttatagggaaaaccattaatatgaataaccaaacaggtctttagtgatagaaagagtaagatcagcattcatcttatcttttctactagtggctgaggtgtaaatgatatccatcattttaatttgaatctaaaccaaaagttattcagatttgttttaatcaaaatcttattaaaacagaaaaattaatttaaattagttaattcgattttaataaatagactacacgtattaaatctttcgtgggagtctttaaaaaggacttacacgacacaatttattcaaaaataacaataccgacgtactttcacgccattctgatatccacgttatcaaatggttcatcagacatggcgtgaatgtgtgccagattgccaagtaagattatttatcacccaattaaattgggcttttacgacacaggcaccaagtccactatcaccattccccataatcaaacggcgaagtagtactaagaacagaactctcaaaaacctctaaccaatcaacatcttccacgtgtcatagtccgttgtatctccactcaatctcttttctttatataaagaagctacaagcttcacaaacaaaacaaaattcttaagcaaaaattaaaaaccctaaacctagaaaaaatcccaaattgtttatttgttaaaatttcttgaaataatggcaaattttcatttacatatgaaggagaaaagtaaagatctgaaggtatttttcaagaaaagtgtgaagattgttagtgaatcttgcaagaagggttataaagaagctacaagttccacaaacaaaacaaaattcttaagcaaaaagaaaaaaccctaaacctagaaaaaatcccaaattgtttatttgttaaaatttct

SEQ ID NO: 110119 - DNA, 838 bp, Aquilegia coerulea
  Intron number 1 from transcript AcoGoldSmith_v1.008520m (l ocus AcoGoldSmith_v1.008520m.g) derived from phytozome v7. 0 (chr-ID scaffold_2; pos 9098933 to 9099770 reverse stran d)
tagtagtagagataacacaagcacttgacacaaaggtaatcttcgttcttgctcaataacatctttgaaatcaattattagggttttctgatgtctttgaaatcgattttttttttataacttttgatttgtgaaaaaccccttttcgatctctactctatttatttgcttttgcatattaattgtttgattaaagttctgtatgaaaaaaatgtatactacgccattctctcatccccaccacatgtttgatgaaatacatgaaaaaagaaaaagggttctgatatttgatctgaatatgaactagttagagattttaatcagtaacttttctttcacaaagtatttacatggtcagtttgttgatacactagtggattttgatctgtttctaatcttgagtttagagttgtatttatccattaaatttaacaaggtgtacaagtttgggttttttgtggtttggggatttaggggttttactgtgagagccactgttgttatggtggtgatatatgttttagatgtatatgtgcttgttttgggggtttggaggaagaaagctgttgtcttgctcttagatgatcacaagagctttgcagaaagagaagccagtctttttttttcactgattgctttattcttctagtcttagtggcatgatctattatcgtacttgtgtgatttaatagaatttaaattgaataatatacatggacttgaattttgattgaattgatatctttgtttggaaagttttgaatatattttgtttgaggtatcatcgtccataaacttcttctcgttcattattagatattgcagagctttctttcta

SEQ ID NO: 110120 - DNA, 772 bp, Aquilegia coerulea
  Intron number 1 from transcript AcoGoldSmith_v1.017194m (l ocus AcoGoldSmith_v1.017194m.g) derived from phytozome v7. 0 (chr-ID scaffold_2; pos 7819132 to 7819903 reverse stran d)
gggtacaacaacacaaaagttacaagctcagaagtgtgaggtttatgcaatataatacttcatcaattaagcaaagagtataaatctcatttctacagctataattgtgcaaacctagagtagaaaccacagatcctctccacaaaacaaagttagcttccaagtgtttgatgaaattcctgactgaacttaagcgctacttgtctgtggtaatatgttagccaggcctttaattgaacgtgctaaaatatccaggactctctctctctctctctggatttacccaaactttatcctgggccaaatctaggggttaaccaaacaggtgtccaggcccattatacagtttcaatgccattcgatcaatgatatcaaactgggtagtgcaagctaaaaagcaatcttcattctgcaaatcttatgtccagtccagtttcaatgcccttcaatcttaagcctgcaaataatagcatcagtaattgtttactgatgttgttacaatttacaagagctcctttgtatatgatcagtaaaagaacttttttttggaacaataatgttttatgtaaaggtgttatacaaagattcaaagttcagacttttaaaaaggcagtctctttatatttggaaacaagtcttacagcataaatgccaatggatgaatggaataatagcattatagcaaaactataccaaaaatgaaaagaaaggttccttcttcttcttcttcatcttattgttctgcagtgaacaaaactaatcaccatactaa

SEQ ID NO: 110121 - DNA, 695 bp, Aquilegia coerulea
  Intron number 1 from transcript AcoGoldSmith_v1.016535m (l ocus AcoGoldSmith_v1.016535m.g) derived from phytozome v7. 0 (chr-ID scaffold_3; pos 9767597 to 9768291)
aggtggtgtaaaaacttacaattcttctactgttggtaagtgttctattcttcctagtttctatcattatcaaatgttatgttcttttatatgtatgtagcatttcttctatatatgaaggttgctctccttctgcttctgtgtgttttggatggttgttagtgtctatctcacacactggccctggcaatagtaattgttcaaggtcagtaggcttcacaaaatgagaaattaatatagtctggttgcagattatgcatagtcagtgtctatatacaactacataggaaatcctacgtacagatagatgagatcttatgacattcaaaggaaatgtaataaaaggggtgcttagaaaatgtaataaggagaaggagaagcagaagagttgtaagcatttttattgagaaaatgttaaatatgtgtttacaaatgatgagttagagatgaatatgaaacagatataagggcattaagcctgtagttcaagttatcttccttcataaaatgtcttcctctctcttgttttatatcatttgattggccctcctaagtcctaaatgactactttagcacaataaaaggagtactatttctcaaagaaattaactgccatcttagacttatattcattttaaattttgtaagctacctatatttaattaattttcatatttgttgtttaaacagctgta

SEQ ID NO: 110122 - DNA, 591 bp, Aquilegia coerulea
  Intron number 2 from transcript AcoGoldSmith_v1.017642m (l ocus AcoGoldSmith_v1.017642m.g) derived from phytozome v7. 0 (chr-ID scaffold_55; pos 673602 to 674192)
atagaaaggtactatcgtctttactttatattttataaaaataatcacattactacatagtgttgttaaagtcaaattataattgtgagtaaatgtttacttgtattggcaagcggggttgaggggacccctacccctttaaattacgtgtggaaacttatatcaacaatcagctgttgatgtgtttcgaaccctcgacctctccactttgtgagagggatgcaaccgttgagccacaagctcatgtgcttatactcgctatttgaatcctaaaggaaaaaaaagaacatagtagtatctaggctataatgtactggcactaactgtaggagatgtagtaaccacgatgcaactcaaaacctgccagtatcagtatggcattaccatcttagcaatgaagaagaaactgtttcttctgttaggacattggtcttgcatctagcaaatggtagtcagcatgagtttgtttcccctatcagtgttaacacaatgtggaactgcattttggttgtatagaaacatgattagtaagtgcagccatttgtttgtcttgcaggaagtaccacaccatttggttgacatattgcaccc

SEQ ID NO: 110123 - DNA, 593 bp, Aquilegia coerulea
  Intron number 1 from transcript AcoGoldSmith_v1.000876m (l ocus AcoGoldSmith_v1.000876m.g) derived from phytozome v7. 0 (chr-ID scaffold_3; pos 7794506 to 7795098 reverse stran d)
acagtcgattaagtagatctcttgaactaaattatgtaagttgttgttcttgatcttatttaggttttaattaattaattgtaatttaaggttatgatgaatcatgtttaattgatttaaggtttttttgaaaattcaatttttgaattttcgatctacatttgttgtttgatgttggattatttcgagtgaagtgtgtaatttgttttcatttgtgtcttttgtggatgttttaagggttttgagaatttttagtgttggagagttgtgatagccggcaatgaaaaatattagtcgttgacttggagttttttggctaaattagttgattttttgtctcgaatttgtgtttttttagtatagtttgttattattaaaatgttgttgaaatgtgtacatttctgaacttgtttttattaatgttttgtttgggttttcagctggattaagttcttcttcatttctaaattattggttttgtgtgttagagagttgagtttttatgagtgttataatgtcagatgaatttattgtttcagtttcgtcattcaattacaggtggattcagttatttggcttgggttttgaattgc

SEQ ID NO: 110124 - DNA, 668 bp, Aquilegia coerulea
  Intron number 2 from transcript AcoGoldSmith_v1.002598m (l ocus AcoGoldSmith_v1.002598m.g) derived from phytozome v7. 0 (chr-ID scaffold_55; pos 30538 to 31205 reverse strand)
ggggtctcaggtaaaagcatatacatacattatttatgttatggttgatgtcgatttttatgtatttattttaatttattatttcaacatgaaaggaattttttgtatttttgcgaaggttcgatttatctgtgttgggagtggatgattttgtatgttggcatgcttactgcatcccagcttcgacatacaacatatagaaaatttaagaatttgtgaagaaatttatatgttcaatgtacgcaattttgaacgtgcaatggaattgatttgtgtggacaatgattcgtgaagattgtttatctacaaaaatgggaatgatttgttagattgcaaaacttttttagtttgtccactggtgtggcgctcatccacaaataggagagttaagttgtgatttgggagtcttttatgccgctggtctggttctcgtgcacaaagaagctgtaatgtgtggttttactgatttgatttattgtaacggtgtagaggttaccagtatagaaaaacttatttctactagtgtattctgttggcatgtctagcatgcttcgttattgttttctatatgacacgttttctgttgtgttttttcagcaatgccgttaattgtattttttatgttttgtacagggacctgcacaagctcaaaatttgagagactccct

SEQ ID NO: 110125 - DNA, 655 bp, Aquilegia coerulea
  Intron number 1 from transcript AcoGoldSmith_v1.003532m (l ocus AcoGoldSmith_v1.003532m.g) derived from phytozome v7. 0 (chr-ID scaffold_86; pos 18294 to 18948)
gttgccttattatcatcaagtggttcagcaatgtataattctatcattttatatttcagattttgtttttatatagattaatggctttagaaattagctttgattttgctgtttttccataatcattttaattatgttctgtactactttatttgtatatcattttctttttcttggttttattcgaatttagatcattttctcaattttacgcgacaaaaatattttttgtgattatgttattgtcggtgaatctttccctagcagtaacatttatcttgacagttttactcttctccatgttgtaatagtgtaataccgacaatgttgaagagtaaattatgtgacagactgacagaggaaataaaattttcaacaggttcatgttgtttcaagaaaaatgttttggtggaaaatagttatgtttctgcaaatgtggtcgatagatttattgttgactattggtggatctacccccatgtttggttaggactgtgggcctaactgtttgtacggccctgtgacccagttgagagtgtggcaaagtccacctccgtgtttggttaggcatgtgcctaccagtttatacggtattccgattgatatacaagttcgagcttttttacaacattgacattttaatcatacaggtaaa

SEQ ID NO: 110126 - DNA, 845 bp, Aquilegia coerulea
  Intron number 1 from transcript AcoGoldSmith_v1.002019m (l ocus AcoGoldSmith_v1.002019m.g) derived from phytozome v7. 0 (chr-ID scaffold_2; pos 5952150 to 5952994)
ggaagagatattattataaggtacaatttttatttatttgttcgtgtgtttggtttgtggtttttttatatttgttcatttcgtagtaattgctttaatcaaaactttaaattttgtgccttttgaattaatgcgtttatgtttttgctgaaattgtcgacattagaagttatgcatcatgtatgctagtgtctttgttgatatgtttgatacttttgagcaattgagcttatacactacatcgatcctcgacaacagtttggccatttatgttgttgctgttgaattaggtagggaagtagtgttctctgaggatatcagtgtgttcatagtagataccttaagatatttgtctcaaatgtaagatgtttccttttttttttggcgcttttccaatatgctctcattgttttaaacaaacactcattcttaattgcttaaacaaaattcatgggtcagtctagcagcccttattcatgtctctgcattatacgcaggagagagtttccatccatctgttgtacatttgtacatgtagcttccgactaccaggtctattgtgcttattgcctgactcgatattcatggtgtatatatttaatgtattggcaaaatatttcaattaagcttttattgaagtaattatttagttcttttaattcatgggagggccctaataagaaactatgccgtcattggatgtttatgtcaaatatgggaagtgtgtcgtcttcctgtacagtctgagtcaactctgagtactttccttacgaaccaaggtttactagtcttctcttgcttaaataaagatactgattcgatgttattaaaacaggtcggtagtg

SEQ ID NO: 110127 - DNA, 633 bp, Aquilegia coerulea
  Intron number 1 from transcript AcoGoldSmith_v1.026956m (l ocus AcoGoldSmith_v1.026956m.g) derived from phytozome v7. 0 (chr-ID scaffold_26; pos 1147816 to 1148448)
ccacattcctagtgccgagtcaccaaaatccccaggtgattggcaccttacctatcaacaaaaagtggtaattgctattgctggaagcttcgttttgctcagtcttatgggtcttgctgtttggtgtttaaggaagcaaaagagaaaaattcataaaggctatgtcatgccctcaccatttgcatcttctcagacctctggtaattaatgctatcattttatagttattccttagcatgtcttcacatgaactactggttattatgtatactaagtaaatggagaaatctttttattgtttattcattaacatgttcaaagcaaaaaggggagtttaggtcacttgctatggaagtataaccaccatgcagggttattaaaaaagtttatactctctaaagttctgcttcttagtatagaattgaatatgtcgttctttagatagtttagtttggtcatttttgattacttaactagaatgcgcattacattttttgaaggatatggataaataataagattacaactataaatagatgaatctttgtgcagttgagccttttgaaataaactttaagaagtgacatttaattttcagatttgtatcatataaagacacattcttcagcccct

SEQ ID NO: 110128 - DNA, 945 bp, Aquilegia coerulea
  Intron number 3 from transcript AcoGoldSmith_v1.010917m (l ocus AcoGoldSmith_v1.010917m.g) derived from phytozome v7. 0 (chr-ID scaffold_2; pos 860063 to 861007)
aggaatcgacccctgtaatgctctgtctgaacttataagctatttcccccctttttaacgtattttcaggaaatttcatttttttgaagaatctcatactactcccactaaaaaatgataattaggttgtagtttctatgcatgatgaagcaggcagctcggcctgtactggtcatagatgtttctctacttgtctgtttgaacctggcatgggcaaatgagtgtaattgttcactctttgagtggacaatatgttgatgacgtaagacgtagcatcggtttccattaatgttagtattgtgcgatcagtgaatatttgtaggtaggaaagtaatgtagtctggcttgtggactagagcactgaccgtcaatttgtaccaatgatttgatgaatagttcacatagtattgttggaacagcttggacctctagaggacaggggcataaattctgctactgttttgggaatacaagtctaaaagacgttttggtgcttgttgaccacaattgaatatgttgtcataatgaaatatttgatggtgtctcgagatccttagtaatgaagagagtttagaatttccaggaatacggattatctataatatagttgtaatacatgacaatatagcatataaaccttccacttatgaatatcctaattgtatacttaaatgtttgtttctacgatttaggaattggaagagtttaatcagagaattttaaacgatatttcccaatctattgatgacagccaaatctcttccgaaaaatccagattttcaacgggacaaacaagagttggtttgaatttggtctttttacatttgataacatgtatagaaaaatgcaccctgctgatatccactgtactataccatccataaatgatgtatttaatcattgttgtcaggcacctttacctgtaccagaaccacctgtggaaaa

SEQ ID NO: 110129 - DNA, 728 bp, Aquilegia coerulea
  Intron number 2 from transcript AcoGoldSmith_v1.012440m (l ocus AcoGoldSmith_v1.012440m.g) derived from phytozome v7. 0 (chr-ID scaffold_36; pos 2278269 to 2278996 reverse stra nd)
agctacggctttgacatcgttgaaacagagaagaggtactgaactctgaagcagaacttcctagaacacgaggatatgtttaagtcacatgcagtacacacttttaagttgattttgaatcgctctgactatggagaaaattttaacaacatatacctattgttcttaaccatcttccgtacaaattactcaacgacatccatctgggatcagtctgcttggttaccccgcaaaaatttagcctaatttaatatactcaaaactcttgataattaggtttacgaagattggtgttatttcaaaagtgcaaaaatttcacacctttttctaatcataaggtttatgaagattggtgttatttcaaaagtgcaaaaatttcacacctttttctaatcataaacttagtaggggacatctatgatttatctcatacttacctaagggtttaggtggggggttagattagttcgggggaccattcaaatcaaaaagtaaatttgggagggaccactctaataatcatagatggataaagatttgccttttttgcagcccaaacaagcagggcctagttgtatagtttcaccacaaaattcatgctttttagtggttaatccatgatgcataaatactattgttttcaactaagatgaatggataatagtgatggttatttcttgattgtggttgcagttactacgacaacaacgctgtgtctggatttccag

SEQ ID NO: 110130 - DNA, 575 bp, Aquilegia coerulea
  Intron number 1 from transcript AcoGoldSmith_v1.007020m (l ocus AcoGoldSmith_v1.007020m.g) derived from phytozome v7. 0 (chr-ID scaffold_13; pos 1202759 to 1203333)
agcttcactggtaatataaatctcttcttcttcttcttctttgtcaattctatttatgtttgttcatgaactcgtttggtgttttaatttgactttttattgtttctacttataattgacctaaagttgatttttttttattgattgagtgaaattacatgttgcttgcttttcttctttatgaagtaaacaataattgttggatcagacatacttttggtaattctaaatctttgataaagtttgatagaatgttaagaaaaaaaaaaaaaaaagaggtgcttttgaacgatgtgatgcatttttattatagataatggaaagagattaaaaagaggttagcaaagttacagtgatgttgagacctttatttgctgaccttgtttgtttctagggtagtggagctgatatttctctatctcattcactttgcattgtatttggatacacaatgttaattttttgtatatacacaactatcagtatcacttgcaaaaattgttggtattttcttttatggtttgtaataaaaatcttttttgctatattgataaaccatttacaattgtcaacag

SEQ ID NO: 110131 - DNA, 835 bp, Aquilegia coerulea
  Intron number 1 from transcript AcoGoldSmith_v1.007460m (l ocus AcoGoldSmith_v1.007460m.g) derived from phytozome v7. 0 (chr-ID scaffold_13; pos 2005828 to 2006662)
gaaagaacaaatcaacccgaacgagaaagtgtaacgtaagttttataattagatttcgtttcttttctctcaatttcagataaaattcctttcacttcaacgctacgctttttttttgcaattcgttttatcgaattcaacaacattttttttgcaacgaaattagggttttaattgtgtctccaggactgaatcgtgagtctatttgcggttttcgaatcaaatggatctgaattgtgtgattaaaccctagaaatgtgactaggagttgagtttggtgagatttgaatttgacctatttgattgtttatgaattgcagtcattgtctgcaatgcaagttttgatcacatatccagctaatcgctgatgctaagttttaaattggaaatttaaatgaaattaaaccctaccgtgaggaaaggtttgtgtttatgatctttctgtagtgttgttggatagtaatttggtggtaatatttctataattctaaatgtttgaatagcaagacagtttttataagtttgaattcaataagttagtacggaaagttgtaacattgggtatactggcatagtttgtttcttcacagtttttttaggtaaaggtttgtcatttggctcaatctccatgcctgcaatgctgcgctacccaacaaagcaaatccactgtagaattgattgtacttctgaaattttcttgctccctctatcagtggtttatatatttgttcattaaaatgaagatgtacaatgtattaagaaatgcttattttctttatgacttgaatatttctgaacaggtcagtttgaacgagggaggttcttcttgtttggc

SEQ ID NO: 110132 - DNA, 508 bp, Aquilegia coerulea
  Intron number 2 from transcript AcoGoldSmith_v1.008287m (l ocus AcoGoldSmith_v1.008287m.g) derived from phytozome v7. 0 (chr-ID scaffold_22; pos 2078543 to 2079050 reverse stra nd)
caggtacaattcttaaatacaagcttatctcaagtactttagtttgttggcctaggtggttagtctcagctttggcattgtacttaacaaaattgcttcttttcaaaattttagtaaaagaaaaagaagttctttaaactcaatttctaacctgttttagaacattatgtttcattattttggtactattaaaggtttaatacagattttatcaaaggattaagatgtttttctttgctttttaaagaacttattaaaatatatcagattagattcttttttagtaataagcaataaacagaaacggttgaggttcagctttttagctttattcagtaaaataattttattgtgtatttatttatttatataaccgacttacatacagtattctgtttttgaagcaatgccaaaagaaacctttaaattttttttgtatatatattatttatttgaatatgggagcccttgttttattaatatttactttgaaaatgtattgcaggtt

SEQ ID NO: 110133 - DNA, 600 bp, Aquilegia coerulea
  Intron number 1 from transcript AcoGoldSmith_v1.026760m (l ocus AcoGoldSmith_v1.026760m.g) derived from phytozome v7. 0 (chr-ID scaffold_2; pos 888650 to 889249)
caaggttagttcaagtcctttatatttcttttattttatcaattctgtcttcttgtttggataattgatgtcaatggagttttatagtgatatgagaatcatggtgaaacttgctattagttactcctgagcgaaaaaagaatgacaaattctttgtgtccgtaatacattttgtttgtagagaagtattgcatatgatcaattcggcatttcattcttgagaatttttcttactttattttttgggaaaatagttccccttaaattatgatgattacaaatcataatactattgatacaggggaaatgtctagatgaatcatcaagaaagaacacaaattatggaatcattctgcaagtcatttcaagataaaatgctgagaatgaaatattgctcacttcctgaactacatagggcaatttatctgtgtttcctaaaaattacaagcattttaggaggcaatatgtttgagcttttagcttccctccctagtgcgaaagggttacttttaagtttaattaagattgtccgcctttttgttgtcttagatggttttttatttcattgttgccttaatagcatgatatatatgcagttag

SEQ ID NO: 110134 - DNA, 608 bp, Aquilegia coerulea
  Intron number 1 from transcript AcoGoldSmith_v1.009525m (l ocus AcoGoldSmith_v1.009525m.g) derived from phytozome v7. 0 (chr-ID scaffold_2; pos 5276074 to 5276681)
tctttctctccatctacttcattcacttcatcaaggtaagactttttttttttttttttttattgaaaacaattgaatttcgtcttctttgatgtcaattcttgataccctttaatcatttttttgttagacttgtcaagttggtattttcaagtaatttgatgttattagatatatagtaaatgttttaattgaatgttgttttgatatttatgaattgggttttgatgatattgaagtttatgtgtttgtgattataacttactaaactccaatttatatactaaatcaaaagattgtttcaattaagaactatctattgttacttatgatttgaatagttaatttgaagctgacaacttgttgccccatatatatgttcttatcaagaaggtatttgattgttgagcaattttactttttctgtgaatagtatctctagagtgtaattcacctacttctacttgtaatatgtttcagcagtaaatttttttgatttactacaatagttgtggctcattcaactggttttatggaatatgtattcctcagatgagcaatgcagttaattttactttctttgtttacattctaggaggaattatcgg

SEQ ID NO: 110135 - DNA, 764 bp, Aquilegia coerulea
  Intron number 1 from transcript AcoGoldSmith_v1.025051m (l ocus AcoGoldSmith_v1.025051m.g) derived from phytozome v7. 0 (chr-ID scaffold_34; pos 1703235 to 1703998 reverse stra nd)
tattttcctgtgcaataatcccattcttattggtggaaaacttttatacattacccaacatctttttaatattctgaatccacttttgagtgtatggattgatgattgattggtgattagattacatgcaaaacatatttaactggacttatattgcaatttatgtatatagttttatacctacattgatctaaaaaggattgattctggaatttgccgcaagttaaataaaaaaaagaaaattaaacctcaccatttttaaatgtttgattttctcttcacattctatcttacatacatgtgagttttcatggaaaatggtgcatggcactgttagaccatctccagggttgctattttctagatattcgtaaatttggtctccaacgggttgctattttctcaattttttttttttttttttgctattttctcaaatacgttttcaaatttgagaaaacttttgagaataacaatattcatattatatacataaacaatgattggaagggcggatgagaagcgacccccatgtaatggaggagacggatgactacaaaataccatcagccatctttatgtagttttaattgtgaagaccggtgattgagtagtttaaagaaatagtttttgtcaccagccttagtaaagtgaaggctggtgagtgaaaattaagagaaccagttggagttggtttttggatatttctataattatagaaatagaaatagagaaatagaaaactactactgtagcggtttgag

SEQ ID NO: 110136 - DNA, 490 bp, Aquilegia coerulea; identical to SEQ ID NO: 109899
  Intron number 1 from transcript AcoGoldSmith_v1.004108m (l ocus AcoGoldSmith_v1.004112m.g) derived from phytozome v7. 0 (chr-ID scaffold_34; pos 1886743 to 1887232)

SEQ ID NO: 110137 - DNA, 531 bp, Aquilegia coerulea
  Intron number 1 from transcript AcoGoldSmith_v1.007029m (l ocus AcoGoldSmith_v1.007029m.g) derived from phytozome v7. 0 (chr-ID scaffold_2; pos 9656411 to 9656941)
ttttctcacttgcacatgtgagcacactttctctccttttttattgttatatacattgatagaaaaccacataatgcttggatcttatgttttctttggtagatagagttctgtcagaaagaaaaaaaaaaaaaaaactggcaaatctattgtagttgttcattttgattatagataccaacaaaaaagccataatgtatagaaattgctattaattgttttgttctaggtaatcagaaagctaaaaagttatgaaacatggccttgtaagtcgtcagcttaggatattggcaacattgcaatacttttgcattgtgcaaaatgattaggagtttctactagatccaacatagtttagaagaaatgcgcaactagaataagttctcattcttttcttatatgtcgatgtagtgtcagtcattttagatgatctggagtctggactcaagttttaacttggacatagaacgatgtcagatactcaaaactaatgttatttgtgatatctcaggttcctactccgattcacaa

SEQ ID NO: 110138 - DNA, 672 bp, Aquilegia coerulea
  Intron number 1 from transcript AcoGoldSmith_v1.015628m (l ocus AcoGoldSmith_v1.015628m.g) derived from phytozome v7. 0 (chr-ID scaffold_2; pos 7328672 to 7329343)
gtccttgttgccattgtgggattacaagtgagtttgttattccttgtgacttaggcttcatctaatcatcttttttggtctatttgcttctacttctacatgtttgttatattgcatgaatgaaatgagattctatttgtttctcccctgttttgttacttgcttggttgacataactgtgttacatggttaattgtgtacttttcccctttaaaatgtaacaaatagatttctctttcttgtaatcataacaattttgagctcaaggacaatgaaaccctaccaattcatagttcttaattgctctttttatctatctaataaaattgtttgaatttgagtaattggtttataaccggcagcacagtctttggtccacaatgttctgaaaataatttaggagcagtgtttgcttgttttactgctttattgagaattgataacttcttataaagctatagctttattgagaattgattacaagacagacactaggtgaaactagaaggaaggactatactttgttctagatattgatttaccagaattatagattaagttagtgaagtttttctcatgcagttgtatcaattgagcattatttgcttcaccatcatcctcgttttcattcttgaagagtatctattgacgcaggttctccactttggagga

SEQ ID NO: 110139 - DNA, 749 bp, Aquilegia coerulea
  Intron number 2 from transcript AcoGoldSmith_v1.001640m (l ocus AcoGoldSmith_v1.001640m.g) derived from phytozome v7. 0 (chr-ID scaffold_2; pos 8081411 to 8082159)
aattttgaggtaataatccatactttgttacttatggacttgcaattgggataaataagaatgaatttatttggtaagcaaatcaaattatgttttaatggaaatttagcgaatttctggacactatactagaccatttttgcgaaaaacacgctaaaatatatataagattttggttattataagatttgaaatctcactggattcaatcttttagaagattgcttgagttattgaagaatcttatgtgtaataacatgacgagtaaccttggatacaggtctgtattctaggatttctcagtgaaacaatgaaacaatgtgtgagaggtatatgaggtagccaaaaaattgctgaaaactcccaattcgattgctcagtccctttgttatcaaatttcacatatgcgaaaagtatagagttgtttcatttgttcatggtccaatctcgagatgggacaaattctaggatttttctgtgacctcaaatgaaacattatgttaatgcagttaagtcgatgctaggtaccttcaacacattttttttggtgttcacgtatatttatccagagatgaatgtgtttactggttttatttgctagtagttgtactgtcaacaattctctcttcacggttgtctccacctaataaccttttttggagaagaaatgcctgcattcttttcttttatttttttgtttctctttatttaaacgcttatcttatggtttactgtacaacaggcaagca

SEQ ID NO: 110140 - DNA, 913 bp, Aquilegia coerulea
  Intron number 2 from transcript AcoGoldSmith_v1.012561m (l ocus AcoGoldSmith_v1.012561m.g) derived from phytozome v7. 0 (chr-ID scaffold_34; pos 309444 to 310356 reverse strand )
gatcttgtgtctacccacctaatccaaggtattactttcgcctccttgatcccttttttttgttttcttttgtgagcaatatgtttccttagtactactattatgactgagtctacttatgaatcggccgacttgactcagcattggttcatagggtaaatttaataaaatcattgagtcaactcaagttggtctgaattatattgatggagtacttttattgagttggttaagtgttaactataaattattattattatgtttcgagaataaatttaatttaattttaaaagaaagagttcatcttgaaaaatgaaaccggccttgatacttgcctttcagattttttcttggatagtgttgtttgtttgaactttgaagaagttggagtgtagtgtttggtgtgatttgagtaaaagtaaagtttaaatatggtcatagtcgtcgtttagtactctctaagtatttttttagcatcagattttaaatttattccctgtgctctttgcaatgttgcaaatttgacatttttgaagtctgtcatgtgttcgttcatcgccattgattatgtaggagttggaccatctaggcatgatggttttgttgaagtttaaagtttgaactacaatgttgaatgttagacgtaaaaaagacacggtttgacatcataacatggtcccaagggatgtattgttgcctctgcaatattcctagttcctcaaagtagtatgaaaccatgtgatgcactgatgctgtaaggaaaaccacaagcttgtcttggtcatagtttgatagttatctgttgtcttttttttggtgttgcttgacagagaagagaatatattgtatgtggttaatgtttatgtggttgcatgcagctctgctgggggaggatcgaatacaccagtaacgc

SEQ ID NO: 110141 - DNA, 648 bp, Aquilegia coerulea
  Intron number 1 from transcript AcoGoldSmith_v1.006818m (l ocus AcoGoldSmith_v1.006818m.g) derived from phytozome v7. 0 (chr-ID scaffold_8; pos 4691317 to 4691964 reverse stran d)
ctcttgaggtaattatcttttttattaattttgtttagtataaaatttgatgaattgggtttgttgaattatttgatgtaaggtttgtttattttacgaaagaacgaaaaacccatttccaccatacaattttctttgttgcaatgttgaaaattttggggttaagaaaaaaaaaataaacaaattagaattagggtatgtttgataatttgattatactaaattttttggttcccatgattacttacttggaaaatgagcgcaaaatttccataagtggtgctagataaatttaagtaaaaatatagggggagccttaatgaagtctacgatgggggaatataccaacaattaaatacaatagtttgttttttggaagtttcatatttcgacttttgtgcagtccaaatgcattatccgtaattcaatttttggcttgaatcaaacagacccgtagtgagtttaggcgaatttcacgcataggaatgtattttaggcgaatttcggtacattgcaaagttgagcaaaggtcttcctattttagttcaagtaagttttatgctctcctagggggaaattcctacaattgctgaagaaagagaactatttattaatctacactaccttttatggcagatatctcagtgg

SEQ ID NO: 110142 - DNA, 708 bp, Aquilegia coerulea
  Intron number 3 from transcript AcoGoldSmith_v1.025145m (l ocus AcoGoldSmith_v1.025145m.g) derived from phytozome v7. 0 (chr-ID scaffold_3; pos 9936224 to 9936931)
atcagaaggcagcaatttgtaagaacacttcggatcttatacggttaaaaatgttgaactttatattgctgtatgacatcctagggcatactactactttgttctggttagaaagattccttagtcaattccccaaaggttattgccattgtaactcttcctatagtccttcaagtcgaagacttgccatcattgttgatggaaaaatccttctagataaattacaagctgtgatacattttgttcagatacatgtatctccttaccttgcttgtgatactgttaatgacattaattgacaccaagggttcaatactaaatgaaaccataatatatgttattgaggttgtcaccaacaaaaatgtgtactttttattctcttctcttctttacttttttttttttttctgaaaaataaatattgtagttttttgttagagagcggagcgacacacctctataattatattgaagaaccatgccataattttggccataagtgactgaaagtatatgctcaatattaaagacagattgaatttaatagagataggcaactccttactatcatcaaagctgagaaatgatacggaatcttatacaattgtcacaactgtgcagtatatattatacacaatgccagcaaacaatttgagttatatttgtgttgctcttaaaacagatcctccagttccccttgccactaag

SEQ ID NO: 110143 - DNA, 1033 bp, Aquilegia coerulea
  Intron number 4 from transcript AcoGoldSmith_v1.006400m (l ocus AcoGoldSmith_v1.006400m.g) derived from phytozome v7. 0 (chr-ID scaffold_13; pos 5452528 to 5453560)
atcttctaaaaggtcaagcagtgaggaaccaaaaggtataatgttttggaattgataacctaatagagtgtactttagagaaggaaattcccttattacacagcctgacatgattgatacacatttcttctattaattttggtgtgaaatttgtatggatatattaaagattgcttttcctatttggctctgtgtccttcaaataattcatcttatatatctttggttgtaagctaaggtacttggttttgcttacaatggatatattaaagatggctggttttgcttttcctatttggctctgttttctccaaataattcctcatatatatcttcagttgtaacctatggtacttagttttttttgcctatcaaaatttttaatttggattcttgtaatccttcccattttatagaactgtagcaatgaacagcgttaaggacgacccttttcctatggtacttggttttgtttgcctatcaaagtttcattttggattttcgtattccttctcatcttatagaactgtagcaatgaacagtgttaagggcaacccttctccaacgaccaaaaccctccccatcctttctcttgcacatttaactatcactctcttcgccaacaccattgcgcaatgttaacaaatcgtggaagaaaatcaaattcatgtggagtggcgtgctattagcaattgttgctttatacttccgggtagttccgatgtagtattagggttgagttgagcagggtcctctaggggcacactctatgtattgagaaagagtgctttcacacattgagtttttatatgggtgggttctctaataatgtgggcccacttttcttccttattttttggattttctgtctgttgctttgattccaattacttctattttcatactcatagttcacgtagcaagtattgctgttgcatttatgattgtatgtggtagcgctatatcattaacttttcctctttttttcttaactgaaggctctctgggacaagactcttgagttgaggttctc

SEQ ID NO: 110144 - DNA, 365 bp, Aquilegia coerulea
  Intron number 1 from transcript AcoGoldSmith_v1.006675m (l ocus AcoGoldSmith_v1.006675m.g) derived from phytozome v7. 0 (chr-ID scaffold_24; pos 2160412 to 2160776 reverse stra nd)
ggagatcgaaaccctaaatcacgagaagagaagaagtaactcgtttctctctctctctctctctctctttggtcagtttctcactctctcgcctcttctctcttccacgaacgaaatgctttcatttcagcaatttttcaggaataattcgcactgattttgctttcaattaataattactttactttttacattttttttttaataaagtaaggatgaattaggttccttttgatgtttttctttaatggctttttattattgaggaatttagggtttttgagttatgactaggttttctgtatctctgtgtatttcttgtgaaatcaggtgaactttgcatccatcacgagtgaaatctcata

SEQ ID NO: 110145 - DNA, 582 bp, Aquilegia coerulea
  Intron number 1 from transcript AcoGoldSmith_v1.001704m (l ocus AcoGoldSmith_v1.001704m.g) derived from phytozome v7. 0 (chr-ID scaffold_3; pos 7679027 to 7679608 reverse stran d)
tgggaaatttggcttattcaatatccaaaatcaaggtacttgttctagatctcttgatttaattttgtttgattttgttgaattgtgtttcaattggcttaatttaagacacccatacgcgaatatttacatttggagatgtttttgtttgggggtggtttgttgtgttattagaatgccattttgaaatcttttgttataagtttgatttgattgagtgttagaaacatgtcttcacccattaagcttcaattgtgtgatcataatttttaattgatgccctttgtgttcattaatctgtctgttagaaattaatcagacagaatgcattgaaaattatgttctgttgatttgtaggtgaaatattttgtttttgtaagattgatcaaggtgaagaaaaatataggcgttaattcagtaggattttgtatgtagggacattgcattacacatttggattctccccttttgtgatggcatttgcatctggtggattgtgatgttatgattccttttattcagaaaaatattatcagaaatttatggattctattttgcagccaacaagtcttctgaagcatc

SEQ ID NO: 110146 - DNA, 514 bp, Aquilegia coerulea
  Intron number 2 from transcript AcoGoldSmith_v1.017214m (l ocus AcoGoldSmith_v1.017214m.g) derived from phytozome v7. 0 (chr-ID scaffold_34; pos 1552674 to 1553187)
gactcagggtacaattttcgccttttctattatttttattcatttgtggatttatgtgtgatctagcttaagatcattctaagcttatttcgattcttcaatcttcatatcaaatgtatgttggtcctaatttgaacattataggaaaattgtttgttcccaagaattttagatattatctacaatgaaatttgaaaacaatttggtctctcaattgataataaaaagatggtgtgtgtgtgtggggggggggggtatattatggacaaagtgttctcttgggataatctccggcacccagatgtcgcgaacctaccttcattgcattgaaaaactaattgttgcttctaaaaaagaaggattagctttccacattatgttttaaagtagtctgatttctgaatcaagattgacttcttagtgatatgttccacatattaactgactgctgaaaatgttgcgacgttattgttattcaggactgcagatcacactaagtggataggtgcatttc

SEQ ID NO: 110147 - DNA, 667 bp, Aquilegia coerulea
  Intron number 1 from transcript AcoGoldSmith_v1.013057m (l ocus AcoGoldSmith_v1.013057m.g) derived from phytozome v7. 0 (chr-ID scaffold_103; pos 219494 to 220160)
caattgtttcaatttgggtaagttttaaacttcataggttttttttttttaagtgttgccttggttttttcttgttgtgaatgttgagttgttgtttgggtaattttttttatcaacatatgctccgctttgtgaattattttctcttaattttgataaactcatattagtcattacttttccatcatcttaagtgttatactctgaaattctatgaaaaaacaactaggcaagtagcttgtgtgaagtcgtgaaaggatccatctcaaccattgctcatagtgggatactttgatatataatgtagaaacaatttgtttagaaaaagttcgtcagtgaaaaggaacatctcaaccattgttcaagtcatatatgattgcaagttgaatagtactcgcgtgaatggttcgattaggttgctacttatccattatcatcatatgattgcttcttaaaacaagttatatgattgtttgacccctcactgaatcttaggcttgacctttcattaggatggtgaaagagagagcaggaaagcaagtagtggtctaggttttcttttcagctagtgctttcgtgcagttattctaccaattgctgcttatctttgtttcactcacttttaccaacagctccttgcagtgatactacctattgcaggattggg

SEQ ID NO: 110148 - DNA, 899 bp, Aquilegia coerulea
  Intron number 3 from transcript AcoGoldSmith_v1.009711m (l ocus AcoGoldSmith_v1.009711m.g) derived from phytozome v7. 0 (chr-ID scaffold_34; pos 960812 to 961710)
acgacatttttagggaaaactattgaaggaatgtatgcattttcccctccttagtaattagtatagtacattgagatttttcctttcatgccagaattttatcattattatggtaaatagtggtgcgtgacgagatataactattccctcccgttacaactattcttcaattaaaacaatgactgccaaaaattgtaagaatagctattgtattagactattaggttaagaaacatggaaagccaaaagattcatagttattttgcataagagatgttgagtagtttgcaattgtctgctttattcacatttgatatgtggaatttttgggttgtaaatatcacttatcattaccatgacgtagaagaagttcttaaccatcaaatatttatcagatcttttgtattttcatctcacttctagccactcgttactgcttacaattgcaatgttattttacaataaaaagttgtgatttttttcctctcagaatagtttcttattttagttggacaaattccttagatgagcacgaagcaatcttatctagcaagcattagcttctaaccaacttggaaccacattctaaatcaagtgccaaattgttaaatcacggcccactaatttagtgattcttcaattattctaaaatttcgtatgaataatatctgaagtttagtccaatttttacgttcttttagtctacatggaatgccaaaacaaaattcctggtttttttttactaaaaacaaaattcctggttattttcaacacgtgagagatgtcaagtcattttgatttggtagcgtttttcttagttttgattatatttgatatacctatgtatatttctcttagaatgtgttaatattgaaacaggcacaccggtgtagtggtgt

SEQ ID NO: 110149 - DNA, 749 bp, Aquilegia coerulea
  Intron number 1 from transcript AcoGoldSmith_v1.000379m (l ocus AcoGoldSmith_v1.000379m.g) derived from phytozome v7. 0 (chr-ID scaffold_3; pos 9212095 to 9212843 reverse stran d)
cgttacatcaattaatatccaagctcaggtattaattttatttttaaataccatgtttcatcatttcatctagttttacagattactatagtcttattgtttagatacgttttagggaatttgggtagatttaaacaagtagaatgaatgatttttgttttttttttttttaattttagtgtcatggaacatttctgattatagaagattataaaggggtaagaagtaagtaagaactaagggtgtggtcaaccaataagtggcaatttggatttgctaatatgagtctgaatttgagtgattacttagttttgaatacggatgtgaattggatccaaacttaaatattaatttgcacccaccccctatgtgtacaatgtaattgccgatatttggattaaaaagtgacgtttttggtggtttttttttatttcttgccttaagattgttttctacgtctggatgagcatgaggattgaggacttgtgttttggaaagcaaaactctagccaacatataagaagggaaaagtttttgaagtttctatttcgttatggagttgtgtgcatcacttgctttctgcttgcattattattgttcatgaatttgtgtagagaagattagagaaagacaaccatatactattttgttctacagtttgttcattgattgatcattgttttacattttttatttgtttgttgattatcctttttcttctcagtttctgtcaagtttctactggggaa

SEQ ID NO: 110150 - DNA, 628 bp, Aquilegia coerulea
  Intron number 2 from transcript AcoGoldSmith_v1.014698m (l ocus AcoGoldSmith_v1.014698m.g) derived from phytozome v7. 0 (chr-ID scaffold_22; pos 509179 to 509806 reverse strand )
tgccaggttgaaagaggaattggtaatttctaattacatatttcttaacttgaaaaagtgttatgctagttcattgctttgtaagacttcataggtggtttccaaagctaacctcaatcatgcacatattaccatttttaaatcacattatagttcccacaaaaattgcgtccatgctttcttacttcgggttttccctgggctatttgtttttctctttttttgcttggttttataggaaaaagaaagtgtggatggtaaagttacaaggactcatatgtttgtggcctctcatacaaaaagggatgggacttgtccatctcttgaaacaagaccaacacttgtaagaataatatatttcttttcattttttttccttgttttgatctgaggcaactacttttgacttgttgtataggacaatatttgtttatgtaggatgaaatcaacaggcttattagccttgatccctatcttagtgaacgagatcttgatcatgatcctattgcaatagtatgtactgtttcactttacattccttaaatgttttttgcaacaccatttttcttattaaacaaccaactatctgacttctaatttgagtgttttttttaggtttgtggtgtcg

SEQ ID NO: 110151 - DNA, 945 bp, Aquilegia coerulea
  Intron number 2 from transcript AcoGoldSmith_v1.017512m (l ocus AcoGoldSmith_v1.017512m.g) derived from phytozome v7. 0 (chr-ID scaffold_2; pos 7621709 to 7622653)
atttcaaatctagcagtcgcattggatacaggtgggaaatctttctggtctctacatcatcaaattgagtttctgatatgggcagatggaaaggcaaaatatacttgaggcaaaaaaaattgtagataggtgtgcaatttatattgttggtgtccaattcctgactctatactaatcatgatagtaccacatgtatcattaatctgtttgtaaaaacgtcatgagcagatagttttattaacagtcactcatcatgcttcgaaaaatacttatatttggttccttaaattaagggaactaaaagccactttcatatctttgccagtcagcacaaaccatgtgaaacctatgtccacccaacctctgtgcagaatctattccactttcaaatgatttgtttctgtttgtcacgattttctgttaaagttagttttcagtttcagtggtttcataagtaagattacacaatcaaaagcatgccgaagctcttagttgtaggctcactccttgcgcatagagtaaaatctgcctaggctatcgcttagcataacctaggctgaatcctagcgtgtaggtgcacctgtggctgcatagaactgtacaccattttagagagaaatagtgaatgtgtcatctttgttattttacgcattcaaaagcatgcctaggaagctcttagttctaggcccactccttgcgcgtagaataacatgtgcctagtttatcatttagcagaacctagaatgaaccctggtgtgtaggtgcacctgtggctgcatagaactgtacaccattttcaagtttatctcaatctcttctctttgcgtgtgtgactcttgaatatgcacgtcaattcataaattatcattttttgtgtttgtttatgtaacttaactcatcctcctatcaggacagttgaagtcccaagctcgcggattgttatta

SEQ ID NO: 110152 - DNA, 470 bp, Aquilegia coerulea
  Intron number 2 from transcript AcoGoldSmith_v1.007572m (l ocus AcoGoldSmith_v1.007572m.g) derived from phytozome v7. 0 (chr-ID scaffold_2; pos 8594680 to 8595149 reverse stran d)
agccttggaaagggaggcccctgtccagtcaacaggtaaggtttccacccccactctttaccttttccaatagtccctaaaagggcagaaatttaggtttgaaataatgatataataaaactctctagttgtattcagaaaaattctatgtattgtcattatattcaaaatgccaagtaaccaagataaaagaggcatactagatcagtatacacattgtataccaaaaagtcaaaaaccgatatacatcaaagatacatcatccactgtgtaaacattttggccaaaacccaaggggtaaagcaataaaaagataaaagtcctccagggtgtttttttttcttttctttgatggggtggggggtgggggagggggtgagagggtgtttcctgggctcttggcaggtcatctttagctcttaatttcttatgaaagcaacttctgttgcaggtggtaccttcaataatca

SEQ ID NO: 110153 - DNA, 566 bp, Aquilegia coerulea
  Intron number 1 from transcript AcoGoldSmith_v1.007572m (l ocus AcoGoldSmith_v1.007572m.g) derived from phytozome v7. 0 (chr-ID scaffold_2; pos 8595285 to 8595850 reverse stran d)
atcgaggagttggaaattatccattcaggttagtttattacataaaactctccttctttgcacacattgttcttcaattcaaaccctaatttcatagtgttttttttttcagttttccatttctctgcaaactgagttttttcagcttgctttaaagtactgatataatcttacctttgtatgatttctcaaggttgagctgatttgatataaaattattgaatcatgagatcgattttgactagtagggtttatatgattacgagtttattttgcttaaactagttttgtgaatcttaaacaattaaatataggaataatgcaagaaaaatgggttaatttcaactttaaacaataaatagtctgtacaatattttattgccagttgaaatgactctttattcatgtgtatgcttcagtagtcatactgcccttcatcgaatacgaggatgcaagaaactcatagcttaatatagtgtattgtcctctgcattttttaatatattgtattcacaacttaacttacaatacatcatcttgtaggcacactccgttgcagattatcc

SEQ ID NO: 110154 - DNA, 673 bp, Aquilegia coerulea
  Intron number 1 from transcript AcoGoldSmith_v1.019910m (l ocus AcoGoldSmith_v1.019910m.g) derived from phytozome v7. 0 (chr-ID scaffold_34; pos 1962310 to 1962982 reverse stra nd)
gtttgggcattcgtcctgtacacgtgcaaataacaaaagtttttcacaatgatttgaaccaccatggctactatcgtgatcaagttgctgctagtgaatcctttgaaccttcgtatagttattattgtgtacaatcagctcattagtatttttattgtaaacattttataataaaattttgggcaatttcatagttaagaagtttttttgtgttcaattatatcactacacttttatttttatccctcgagaaatatattagctatatacacagaataatactattcgcctatttgtgtgttgctcaatcagaagatgatagaacaatatatgaatatcaatatacaaggggaaaaaaaaaaaaaaaaaaggaaaaaaaaaaatcttcttgcaagttttatttttgagggaaagatcgcatttcattgacggaaatgaacaatatggctaataattaataaatattcatataaaagattctaaattatattaactagcataactaattttctttttgctttttattttttttggatgctggaaccagtcctagctatgactgggggctaggcacccatgcccgacagcacttcctttcagtagatgatagcattaaaccctgataatcgtaagacagaggtctgatgtagattgtattattatttgcatgtag

SEQ ID NO: 110155 - DNA, 699 bp, Aquilegia coerulea
  Intron number 3 from transcript AcoGoldSmith_v1.027864m (l ocus AcoGoldSmith_v1.027864m.g) derived from phytozome v7. 0 (chr-ID scaffold_31; pos 128545 to 129243)
cttacagactccagcttgaacacgatgtaagtttatatatatctttcttactttatgcactaatataatgcaactcatactcagagatggttaatcaagtgaaactcagtatatatatatatatagtttgtgtatggatgactttttgggagttgagaggtttagatcgcattacacgatttgtttcttcaagcatctttataaatgcgatgaattcaactatatgattgaaagttggtcaaatgtggctactgcttagaaaacatgataataggctaattaacgtgagaggattttcaaccatactgaacaccctgtgagatacaaatctgctaacagtaatcacatgacaagatcattagagacaatcagatgactgaggtggtgaggtggtatatgtgattcaaacatgttgtttggtttgtcttagtatagtttcatacatcgaacttttcttatttttcgagagaaaaaatatgcacaaccaagcatgcatgtacttcattgaaaacaaatgcttatgaaaatatcacgcacctaactagtttcaataacagttgccatagtgagacacaagtctaagtttcattttgattaatcttgaaatacacatgctaattagtcagtatttattccctaatgggagttctatatactgtaacaggtccacaggttgcgtgaaaagctgcaaaaggaaat

SEQ ID NO: 110156 - DNA, 530 bp, Aquilegia coerulea
  Intron number 2 from transcript AcoGoldSmith_v1.019203m (l ocus AcoGoldSmith_v1.019203m.g) derived from phytozome v7. 0 (chr-ID scaffold_24; pos 3318709 to 3319238 reverse stra nd)
ctttacaagaatcccacaaacctatgttttagcagctgcattaaggggctaaaattttgcttaactccataaaatgatcatgggaagaccctatcaaagatgttcctttctcttccccaaatcaaatcatttgtgtcctcctttgtgatgtaatctcaccaaaggcatcagcataatattttaaggtaaacatttcaagacacctcccgtgtttttagtttgtacgatcacacactatcttttctggatctattttgttggcactcttctttgtcggtagttcttctgttgtcataccttactaagattacacccttacgaagacgtaacccgggaaggaacgcaatgtatacccatcgatgtatttgtttaagcggtcttcatcgactctgagagtccgaggttgcatagttctattatatgtgcatccttttttatttttcccttttcagaaaaagggtttattcagtgtacacctattgttttctgataaaacaggattccagtaatcttcgaaggtgatctggcac

SEQ ID NO: 110157 - DNA, 374 bp, Aquilegia coerulea
  Intron number 1 from transcript AcoGoldSmith_v1.026384m (l ocus AcoGoldSmith_v1.026384m.g) derived from phytozome v7. 0 (chr-ID scaffold_13; pos 6036665 to 6037038)
cctttcatcagtaagtttcaagttgattccattgttttcttttccttatcaagttagttcaaaacagtcaacttgtgaatattcaacttcgcaatgttcaattctaattgacagagatttatgttctgtgcatggtagtaaagctgcatcaacacacaaacattattttaattcttccgattgtagttagaagcaatagccttaattatattaatgccatggatgaccacattgatttgatgatatcatgatatcaggtgtctcggcctttaatttaattcatgtaagtcgttagtgaatgttagtgaacattatggcaggtccaagaactacaaacctaacatgtttttgtttttgttaggagccatattgag

SEQ ID NO: 110158 - DNA, 757 bp, Aquilegia coerulea
  Intron number 2 from transcript AcoGoldSmith_v1.017757m (l ocus AcoGoldSmith_v1.017757m.g) derived from phytozome v7. 0 (chr-ID scaffold_2; pos 5308189 to 5308945 reverse stran d)
ttcagcctctgctccaagtggtgctagaaaatctggtaagtggtgataattcctgttacttggtcataaattaaattatgagcaaatttttgtttttgacaatctattcggctaagtaatttgtcataaacatcattttgttcattagaacactctatatgaggccataactcactcagcaacttacgacaataatcttaatgggcacaacatgatattggtgcaccacaggctgttttcttgtagaagatagctaagccacaaggaaacaaactgggtgacttgtacgtattctgaaacaggcattcttgtggtgaatttgagaacacaataagccaataatttttgtttaaattaaatgaattgctcgttgactagttgttgcatatgggcacacatcaaatgacctcaactcacaacaacaaatgtcctattttagaagtcggttgcgcatttaccctaagagacacatttgagttataattagtgcttcgcctagcacgtcatgttttccagtattacaaatgaaatagttggtttgaaaatgtttgtcgattggtttcaaaggaaatcgaatttgatccttattagtataaattttcagatgcacaaagtaccttttcactatatacaagcaattaatgtgaagtattctctagtaaaatttcacatacttgttctgaatttacaggaaagatccatacagatgcaataaatgaaaatactacaaccgatggaatagtttctaaagattcag

SEQ ID NO: 110159 - DNA, 807 bp, Aquilegia coerulea
  Intron number 1 from transcript AcoGoldSmith_v1.024643m (l ocus AcoGoldSmith_v1.024643m.g) derived from phytozome v7. 0 (chr-ID scaffold_26; pos 1361602 to 1362408)
agacctgagaggtgaggtctcatgagagagtgttgaggtcttatgtatgattcaccatgagaccatgagaagatgagtagtttgcctttatatttataggctacaatgtaacttcattcttagcaattaatagagtaataatgggaaaaatatctttgtaataataaggcttaactttgtaacttgtgccatcaagagagagcccattagatgttgacatgtggcaccatgatggacggtagagatggtgccacatgtatgttgtatatagtacccctacaacaatgtacaatactctacactctataatatacgttttcaaactagtaattggaggtatggactttgaattacccattattgctattaagcccttgggcccccaatactctccttatgatttgaaaagtccaataaataagttttccgtacattttccaactgtttataaaaaccctcatcccccaaacagaacctaaccaaacaaaccaacaaatcaagaggattccggaatcacgataacaaaggctgaaaaagactcataaaccctcatttctctctctctctgaaactttccatttccatgcgaagaagaagaagaagaagtgaagcttccaagcttaacaccaaactccatcatgagttctgaaccgttcatcaagttagtacactttttatctcttctttatcttttctttaacctttttttttttttttttgtgtagtttttaactttgaattaagtagtaatgtttgtgctaattgatttgttgtttaggttagtaaagcttgctgcaagagcgtttt

SEQ ID NO: 110160 - DNA, 821 bp, Aquilegia coerulea
  Intron number 1 from transcript AcoGoldSmith_v1.006999m (l ocus AcoGoldSmith_v1.006999m.g) derived from phytozome v7. 0 (chr-ID scaffold_2; pos 1901375 to 1902195)
tcttactggtaaaagtgaaattaacattttatatttcaaattgtgactagataactgtagaactcagtactatctccaattcctcttcccctctgcgcattcaaaacaaacaaggattcaaggatatcgaaattcctatcggacagtgtcttgtaccctgattgcagatgcatgcatacatacttaattaggttttgtctatcagttttgtttatgtttagatgttgggtaattcttttccaaaatgaccaccaacatttctatgccattgttacgtactccaaaatcctgttgttcactttaacagcttttacaagtaggggcatcttgcccatgcttgagagcttatgctgcttgtattgttggtgttctgataatctctttagtttcccaaactaaaaataaaataaaaaatggttggtacctacaagatgaaataaaggcttcttttttaaaaaaaaaaaaaattctctcgaaatcaacctttctaccatggagaccatcttcagcaaaaatcagctccttctgaccctgtcaaaactcaaagttaatctcaatttttggatttatgatgctacgcatttctttttcttcccttttgcagccttttgacaatgttgaaattgttccaaccattagtatatatctatataattgtataaagtcccctaagtcatgtatacaacaaccatagatattctaatcacactcttggcaactaaaaaaaacgcatttttttttatagatgtgggtcagcgggtgctggtcttttgctttgcatctaatctactgtttgttccaggacttccgcaagcttcttg

SEQ ID NO: 110161 - DNA, 875 bp, Aquilegia coerulea
  Intron number 4 from transcript AcoGoldSmith_v1.011736m (l ocus AcoGoldSmith_v1.011736m.g) derived from phytozome v7. 0 (chr-ID scaffold_16; pos 2111024 to 2111898 reverse stra nd)
aagattccatttatactggatatattgaaaaaggggtaagtacttctgctttttagttctgttttctttgctgtgtggggtgaactcaaaagaagcaccgtcatcaaacttttagtatcaactactacatatttgaatgttaagggctacattagttatctgatttgagttggattgttcaataactataccttgaaaaaaaaaacttcactacagaaaagtgaaaagtatatagcctttaggttcaatgggggaggacaatgggaaattgacttctaactttacaaagtatgttaacaataatagtaactactaactagtaagtatgtacgataggcatctttatgaggagatgtattaagtaatatgaggtagaatagattacaagtacttaggtagattttgtgagagattactagacgaactcagctgtttagagttttcttgcacttgatttcctgtccaaagtctatataaagaattaatgtgaggttggcagcttgttgaaaatagtccctcttcttaggactgagcacctttgttcttatgcctagcttcttcttccctttttttttttttttttgtagttttaatatattagagtttcgatgctagattttattgcccaggtgtctgcatctactaatatggagtttatttttttaggaggttaaatgattaatttgtttctaattagtatgcaatttgaccaagatgtggaaatcacataagacctatttgtttcaaaagtagcacattcctctactactactactactactactactactactactgtactacttttgactgttctttcaaaggcctacctaagtggacgttccatgcaagcaggtcaggcccttcaatcgttg

SEQ ID NO: 110162 - DNA, 489 bp, Aquilegia coerulea
  Intron number 1 from transcript AcoGoldSmith_v1.011736m (l ocus AcoGoldSmith_v1.011736m.g) derived from phytozome v7. 0 (chr-ID scaffold_16; pos 2112431 to 2112919 reverse stra nd)
agagaacgcaatagtcaaactcttgttcaagtaaggtaatagcactctctctctctctctctctctctctctctctctctctctctctcttgttcttagttcagttacttgtttcttatctatttctgcaatttctatttgttgaagaactcagtatagtgagtgagtgaaaaaaatgtttgggtttacgtgattatgtcaatttgagttgtgtagggaaagtaaaatcaccaggatttggtttttttgaatgggggttttgaaattgtgtgaaataaggtttgaggagagtgacaaagctgttttatggtttttttttataatttgagctatagagggaaggagaaggtgaaggtttgtgtgtgtgtggggtggggggggggatgtttaatgtctccatgggaattcattctttatgaatttgatatatcattttacattcttccttttgcaggttccccaataacttattttgttcaactactgttc

SEQ ID NO: 110163 - DNA, 655 bp, Aquilegia coerulea
  Intron number 1 from transcript AcoGoldSmith_v1.001870m (l ocus AcoGoldSmith_v1.001872m.g) derived from phytozome v7. 0 (chr-ID scaffold_13; pos 748533 to 749187)
aaggtttggagagttgttgggacatttttcggtgagtttttttttttttgtcaaatttaccaaatcttgagaatgatgtgtgagattttcatgatttgattgtttttaaagttgctatgcatgtgttttaccttggaatttgcttggttgcacattttggaaatttgcttggtgaagatatacattgttttttcttatagatcagaaggagatgaaatgttttattttgttagatgttgataattattcttgatgttcaatgctttagatgttaatgaagcataaatttccacgttggtcctgccgagaagtgatggtataaggtctagacatagatccactaattgattgtccatgtttgatgttccgataatctgctcaggtttaatttaaaagaaagagactagattaaccactatcatggatataagtgagagacaacattagatcttagcaaacattcagctccattaactattagttgattggatttcaattaaggagcatagaagatgaggcaaaattttggttggaaataataatggttttctttacaagtctgcatttcatgtatgatctgttcgagttcgaaaaagttgtatagcaacatatgaatatgatcatcttgataaaattggacttttctttttataga

SEQ ID NO: 110164 - DNA, 966 bp, Aquilegia coerulea
  Intron number 2 from transcript AcoGoldSmith_v1.002599m (l ocus AcoGoldSmith_v1.002599m.g) derived from phytozome v7. 0 (chr-ID scaffold_3; pos 10321740 to 10322705)
tgtcctttgccaacactcttcacttacaggtatatatattactttaactgatttgaagtctctctgttgaattacactttacattttgttatattatgttgttgaattatgcgatgatttggtgttggagttaggttgacacataagaaaactggtttaggtatacgcagatatgctttagtcagtgaagagtaatttatttggatcatgatgaggggaactaaataaactgagggatttgcttgtattgatgtagatgagaaaacgagttaaaatagctattttagaattgtttttaagaaatacgtgtgcatttagaaccaaatcttttccatagatgatgaatagtgatatcacatgaaggaaaataaacacatgtatttcttagtatcagggatacctttgactttacaggtactgagaagttttcacattcttaatatatcatgggaggtacttggaaacttcaaaaatatactatgtgtgatgcatgaggctttttgttatactaatgtttgacgtaccacgcttataaaatcatcacaattagtgtagcacaattaactgctttaacagaataaggagtttgaaattatctgtctcgctgtcatatgtgtgtacagcctgatatcttctgagattttgccaccctcattaatgtagagttccattagtttgtatatgattttgtgattttgttatcctattggagcttatgaattcggcaattttattgtataggtggaaggatagaaataattttttggtaggcaaaggatacaaataattgattgtagaatttctttttcctgatactttatgcattctaaggtactttatgagtatcttctgctcaatgaactgatttttccagagcgttatgtgcaaatatcgctttccacaaccacagcataaaaaaccttctattaatttaaatattaactctatgcatactttcagaccaaa

SEQ ID NO: 110165 - DNA, 968 bp, Aquilegia coerulea
  Intron number 1 from transcript AcoGoldSmith_v1.017304m (l ocus AcoGoldSmith_v1.017304m.g) derived from phytozome v7. 0 (chr-ID scaffold_22; pos 3300210 to 3301177)
atgtcaatctctttctctctatgtttctctttttgtttctgttcatctttttttttcataaatctgtttatttactcccttcttctttgtttattatgttgttgtttgtaaatttctgttttttctttgtggtctttagaatatagatttgaatttctagggttttgctctgtttttgttttgttttttcccttcttctcaaatgttcttatttctgttttgtttcttaacttcatgtcaatagtactatgttagacaactaggttttagatctgctctggaatctgtactacaatctttgttcaaacaactagttctttcttcacatatttcttttttcataaatgaaatatataaactaatactctgaaaattattcactttgttattttacttgaatatattctttgctgcacttatatttctatctgtagactctgatataagatctgttcatattttagtgttggttaaaaatgtttaaatgttggcactaatcatttttaaacatctcagtttttggtttcgtattaggtttgctagcctctctttatgttaatgattttctttgaatatttttgcagaatattagtttttgttgtagcttcagattgcactgcatatattgttctatgtttttggaaattttgtcagaataaagtttcctcacattatggattcttttatgtttttgaaaacttttgctcataactggatttttggctttactctgcatttattgttgatactccttgaactggaaatgttttccactttgactagactcatgttaagctcaaagtgttgagcctgatttaacagtcatttgttttattttctcttcaagtaatgctgaatgcaatttattttccttgtttctctttgtctttatgttcattctactttatgattataatgtgtcactccatgtaggtttcaatcactcctgaggtcatctctagaggttt

SEQ ID NO: 110166 - DNA, 727 bp, Aquilegia coerulea
  Intron number 1 from transcript AcoGoldSmith_v1.003121m (l ocus AcoGoldSmith_v1.003120m.g) derived from phytozome v7. 0 (chr-ID scaffold_2; pos 8616259 to 8616985 reverse stran d)
tgaatcttccgctaccactaatttcttgttaactggtaagcaaactgtcactagcatttctccaaacacaacggacttatcgaagtctttcttgctcttcttctttcttctttcttctttcgtcgttttattctatgtgaggagagaaagattaacaaaacaactgcagaaacgaatttcgaatcgcattagatcgtcttgaaggttcgattctttaatcaatcacttcttttcaatttcaccaacaattgtttgattcgaagtttttctctgtgattttgttctctcgatctattcaaacacttgttttacttatagattacaagatcgcttcattaatctgtttctttaaactacgattctgaacgaagattcgtcttcttcattgttctggttcgtttctctgttttttactgagttaatagtcgtagagaatgctcgagagtcgagaacgaagatcatgtaacttagtaacttagtgcgattgtatccttgaacttatcaaattgaaaatcacttctgtgatctcattgaaggattaagctaattgagaagaacttcatttatgtttaatttaataacagttgagaatcttctttaatggagtgatttggtgaaaatgaaactgaaattaatgatttctttgatttgatgtagttatctatcttatcttcttcaaattttaacgatttatgtatttttttttatcagtggttagcaggggaaa

SEQ ID NO: 110167 - DNA, 298 bp, Aquilegia coerulea
  Intron number 3 from transcript AcoGoldSmith_v1.011424m (l ocus AcoGoldSmith_v1.011424m.g) derived from phytozome v7. 0 (chr-ID scaffold_7; pos 238336 to 238633)
agatagtaaaggtgagctctctcagttgcttctcaaagtgtcttgtgtcatatctactcactatgtttttaggtggcaaattattaattacttatccatcattttcttgctcataatatttatgtgtgtgcgtgatattgagtatttgaaatgtttttgagaagttgtttaggctactgtgtcagggacatacattgtcggtacttcatactgatcatctgatttgatccatgggaatgtcttctattttatggccattacagggctctcagatattacctactgaaaagacaggatc

SEQ ID NO: 110168 - DNA, 734 bp, Aquilegia coerulea
  Intron number 1 from transcript AcoGoldSmith_v1.023713m (l ocus AcoGoldSmith_v1.023713m.g) derived from phytozome v7. 0 (chr-ID scaffold_13; pos 2362154 to 2362887 reverse stra nd)
gggacgtatgtgtaccataaaactaaccaactgcatctatttttctctctctactcggatactcaaagagaaattaaaactggttctaattggactgcttggtgaagttgagaatattgagtgtctaaggatatatcatatgggatgttaatcctgatacacttgtgaacaatggatatctggtgctaaccggagtttggaaaataatattccaaaaaaccaaagaaaaacaatcagacacacacacggagtctgacaatcgaagttgtacgtccacatgaacaatggatatctggtgctaacaggagtttgaaaaataatatgccaaaaaccaaaggaaaacaatcagacacacacacggagtctaacagtcgaagctgtacgtccacattgagagagataaagaaagtttttccgaagaactaaattccaaaatgttaatcatataaatgaatactaaaacccagcacaatttatgaagaatttaaatttattaacaaaacggatattaacatccaacacttgtattttgtacaataaaaccactatgtttacaattttgtaattgtagtggaaaaaaataataatattaaaaattctcttcagccattccgcaatcttttttagcagcgtcaataaaattacgacgaaacacgtgagattttggtgggtgcagctcccccaattttaaactaccagcagagtttgtgtagtaccttatcagctaagtactt

SEQ ID NO: 110169 - DNA, 979 bp, Aquilegia coerulea
  Intron number 2 from transcript AcoGoldSmith_v1.005976m (l ocus AcoGoldSmith_v1.005976m.g) derived from phytozome v7. 0 (chr-ID scaffold_13; pos 4740476 to 4741454)
cctattttaacactgtaagatttcttgtgagttttactcaataatgttgcagctaaagaggcattgtaatgttaatataaaacctgcacacttatcacacatattacaagtaggtgaaaattatcacaaggaacatgattttgaaccaaacaggaatcattttctgaataggaacctgcacacttttagtttagtaagataataattcatctacaaaagtgggaagtagtttagaaatcaaaacaaacataagtgataagactgatcctgtatctgtatttaaaagagaataattcaaaaataacatccccacaacttcaacatatcaatttacttgaccggtgaaaaagtaatacaatttagaggctaactgtacatagtattctgattaaataccaatgggaaaagtcattttttaacagtgtttttgggcattttgtttcgatttgagaggcttattgtagtacaaggagatccgtttttctttgtttggtggatgttggtgtgttatattgtctatcttgcattctatagcagttgcctcgacctacacaacttttcttaatggttttataatgttaccttatttaaggatgaaagaaaaccccttatatcattaacatatttagttatcttttccaaggttaagaccttcacagacatcttcctcagggtagaaggtcttggagaacgaattacatcctctcttcccgcatcaatattgtattaagcaagaaagtttatgtaaagtgcaaatatactgccattgttcaaattggagcatgaaaggcatataagatcacattttctagcattattttccacgatctcttttttgccggcttaaggaaaaacagtgtgtattctcatgaaattgtttcgtacgtcatttttggggttttcttatgcatttatagcttatgtggaatgcttgctcatcagtgttttttatgatcctccaggtactttggtcacattg

SEQ ID NO: 110170 - DNA, 252 bp, Aquilegia coerulea
  Intron number 2 from transcript AcoGoldSmith_v1.014247m (l ocus AcoGoldSmith_v1.014247m.g) derived from phytozome v7. 0 (chr-ID scaffold_3; pos 2686999 to 2687250 reverse stran d)
gttacaaaacagacattttgtacaacggtttagcttctgctcgaagtacaggtagaagtatggtgagcttacgcgaatattatgcgttctgaatccaacagaggccaaatgagggtcgtacattaataatgggaggtcgtttgttccaacagttcttagttgatgcttatacaagtattgaagaggaacgacttcgatacattcgaaaaaatcaaaagaaaatttgatcagaattataccaagggttaaaag

SEQ ID NO: 110171 - DNA, 476 bp, Aquilegia coerulea
  Intron number 1 from transcript AcoGoldSmith_v1.015332m (l ocus AcoGoldSmith_v1.015332m.g) derived from phytozome v7. 0 (chr-ID scaffold_61; pos 1396710 to 1397185)
tcataaaaacattgtttagttttctgatattatttgtgagattttatttttgatttttataataaagttgggtttaaggtgtttgataactattcttcaactactgtaagatttaaatgtgtgctttgtttaggaaaaaaattaaaaatttgggaaatctagggttatctgagagttatttgaaatatgggggttttagtgtgtattagtgtagttatttgaaagaataccctatttgtttaagttcaggcatgctattaggggttcttcgatgttaggctagagtattactggtttgttgttattcttttgttttgatctctagatgtgtgtggttcaatagcttatctgaattgttatttctttttgtaccagatgctaaatgattaattggaaggagatttagtgatgcatcttttcaggctgacatgaaactatggccctttaaggtgattcctggtcttggtgacaaaccc

SEQ ID NO: 110172 - DNA, 648 bp, Aquilegia coerulea
  Intron number 2 from transcript AcoGoldSmith_v1.006475m (l ocus AcoGoldSmith_v1.006475m.g) derived from phytozome v7. 0 (chr-ID scaffold_3; pos 7059632 to 7060279 reverse stran d)
tgcatcctgggccttcgagtttctcccaagcacaggtaattatcctaaaacctctccactcggaaaaaaaaaaaaaagaatagagaagtgatgaagaagagataactacttactttaaaagtctgataccgtttattacctgaatgcaatgataagctgctcaccatataagatgactaatgagaaaaaatcaaatcaagattatccaagatgatcatttcgaaagaacgtaaagctgggttttactataaccataacaaactaaactcaaatagacaaatgaagtaaatgaacaaaagcaaggagcaattgagtgatagatattataagaaattttacatacacaagagacctattcaatataagactattttttttgttacattctgaagtagctttagtagtctaggtattgaatttccaagtgcggtcatgagcatatttaaattttttaatattaccatatatatatagtttttttctgaagaaagctattaaaatgattcccttttcttttgtgaaaacaaatagtaaataaaaatgggagtgtgcagcagtgccattcaatcacacttacactgtcatttactaatttttttcttctgcggcataggcgcaaaggaattggtttgaagcttgttaagtcaa

SEQ ID NO: 110173 - DNA, 430 bp, Aquilegia coerulea; identical to SEQ ID NO: 109370
  Intron number 1 from transcript AcoGoldSmith_v1.005771m (l ocus AcoGoldSmith_v1.005780m.g) derived from phytozome v7. 0 (chr-ID scaffold_2; pos 9475721 to 9476150)

SEQ ID NO: 110174 - DNA, 765 bp, Aquilegia coerulea
  Intron number 1 from transcript AcoGoldSmith_v1.010025m (l ocus AcoGoldSmith_v1.010025m.g) derived from phytozome v7. 0 (chr-ID scaffold_2; pos 542846 to 543610)
accccaacaaggtaactaaacttttcattttgaatgtggggtttttaggttatttgaacttgttgtaatgtttctggcagcattgttaatgttgggtttttttttttaatttcagtaactttagatatggtttacattcatttatttgttttgggtatgtattaaatttgattttggtgataaatttgaataacttgagagggtttttattggttttatttagagtaaatgagtagttgacaagcattgtcattattgtgattattagtcaataaaaactcaatagaatagtattacaacatcgacattgacctgattggcctattgaaatcaccccctctatatgtttatagaataaccaatgtgatcgagtatcttgtttgcaatgccccccatgatgaaatttttggatgtggggtttggttttgatgagtaccaaccaacaaaatatggaatatctggagtacagtagattgctcaagttgttgatggttctctgctcagtttgcatgtgtcaaaacaacctcatgtcctcatggcttagaagagaggaatagaggatcatacctatgtaaaagtattccaaacatgatttttttgttgacgatgatatgcacgagaataatgtagtttttttttaaaataaattcttctagtatttatattcttgagaatggattagtttgttgtggtgttatttgttttgagtaaagcttttgtggatactcatggtctatattgttgaacttccccagttaatattgg

SEQ ID NO: 110175 - DNA, 348 bp, Aquilegia coerulea
  Intron number 1 from transcript AcoGoldSmith_v1.005537m (l ocus AcoGoldSmith_v1.005537m.g) derived from phytozome v7. 0 (chr-ID scaffold_22; pos 2237554 to 2237901)
tgtttgcttacaataccaagtcttgtgactgtaaggtacttgcccttttcttcctttttcttcattttcaattcatttatagagattataattattgtttcaactgtttaatttttttaatttgggtttttcttagaagagttatagctgttcaaacttgggattttttcattgaatggaaaataatagaattaagtgttgggtgtgatgcattttaagggttttatatggaattgaatattgggttatgtagaatttttaacttgggtttttgaattaagggttctttttttttttttttttacttgtgtaggattcacgtaaatatacaggcattgtagaggattg

SEQ ID NO: 110176 - DNA, 1006 bp, Aquilegia coerulea
  Intron number 2 from transcript AcoGoldSmith_v1.017696m (l ocus AcoGoldSmith_v1.017696m.g) derived from phytozome v7. 0 (chr-ID scaffold_35; pos 1619363 to 1620368)
acttgcgtcttgagaaagcgctgattgttaaattggtatgcaatgcaactattacttttttttttttccctctcttctatataaccttcatttagtttttgttatgtttagcttttttagttaagttacatacgttgtatacatttttcttagtcggtacaaaagatcagcgtgtttatactgaagaatttaaatttaaacgcagtaatgtgatttcttttggtacatttattgtgatgtgtaaggtgagagaaacccatcaatcacttcatatatcattttactagtctaactaagaaagaacattcatttgaaatgctccatccaattttaagtctattgttccttgatttatttattgaatgttagcttgacggtagcctctatgagttgatttatcagtttcagatgactctgatattttttggggttgttacatatttgagaagatggaaaaacatatttgagatggtccttccaattaaaaatctattattaatttttgagttggcattgtgagttggttataagtttgatggttggcattgtgagttggtttgtggcatggcagtcactttaagaatatttaatgttgttcgtattaataggctgttgcggtctacttttacctgttgacttctactttagtctgtaaagtcataaattcactcgttcaaaactttgaggaaggttttggtatctaatttagctttcccattcctattgatacttgcttgccatcaacctgacttatggaactctttattcaattagtacatgaataaaccgtgctttatgcaaaaatgttcacttattagttgatactgttagtacatgaataaaccgtgcttgccatcaacctgactcatggaactctaagtttcgttggacttattagttgatactgttaattatgctccttaattgcagctgcgatttggtgagatattaatgcttctgtcttttgctattccgcaatatatgcaggtggacattgttgatttca

SEQ ID NO: 110177 - DNA, 798 bp, Aquilegia coerulea; identical to SEQ ID NO: 109270
  Intron number 1 from transcript AcoGoldSmith_v1.008138m (l ocus AcoGoldSmith_v1.008140m.g) derived from phytozome v7. 0 (chr-ID scaffold_35; pos 56723 to 57520 reverse strand)

SEQ ID NO: 110178 - DNA, 790 bp, Aquilegia coerulea
  Intron number 2 from transcript AcoGoldSmith_v1.011317m (l ocus AcoGoldSmith_v1.011317m.g) derived from phytozome v7. 0 (chr-ID scaffold_58; pos 722932 to 723721 reverse strand )
ggctttatcagtttggaattcaaggcacaaagaaggtaacaacattgtttttaatttatatatattttacttattgatcaattaatcttcggttttatttatgtataggtgtaaagagttttcctttgaatgaatgttataagtatatgtggttattattcttattgatcaattgatatgaagttgaattctgtaaactctaatgatatttgtggcattgttgttttttggaatgaatatttgattttcatgacacctttaatgtatagaatgctagatattcattgtttgatattggtagttattgagaattcctatctatgtggtaattaatatgctttagatgacaatattgaactttttgagagtgaatactgaatatggttttaatttggttgaaccattaatgatttctctgctagatacatttatagaaaccatgttataaatagctctaatgtaaggaaagtaacaaaagtagaaaaaaaaattagtttacgaaaaaggaaggcaggaaataaattaaaaaagtattatgattgtaaggtgattattatatgtttttatatatgaatgttattttgctagtgagtttatttggacaacatagtaaggagatgcttgcatgtgctctaaggtagcatataggaaggattttttttttattgccgaggaattaaaacaaaatgttatgttgttgtattatccatattgcatttctgatagaatttggtcttgaagaatgatagagtttattgcaactgtttgcatctgcaggagccttttgtga

SEQ ID NO: 110179 - DNA, 778 bp, Aquilegia coerulea
  Intron number 1 from transcript AcoGoldSmith_v1.008427m (l ocus AcoGoldSmith_v1.008427m.g) derived from phytozome v7. 0 (chr-ID scaffold_13; pos 5503698 to 5504475 reverse stra nd)
tgatcctttcaagatttattcacatgtaagtttttaactgtaagaatgttttgtttgttttgaactcttgatgttgcttagtattagcttttgtttacttcatttgtgaaattttcatgaaatttcgggagatattggagaaggggagctacagaattacatgtttgtttgtttgataagctcaaataggaaaaaaaaaaatctttttttttttaatcgattttccaaatgcctcacagatggggcatttggaaattggaattggtcgtgggcaaaatttataataataaaaaacaaataatggcctttaacttgtatggggaacttactagacattgatgtagttgtgctggaacattttgataatgaaatagaagctatcatgtgcgcggaagattatagtgcataacttgttgagaaggtgcggcatgtcaaatccttgacagcttccaaaactttgtggactatttgcattttgcaacacatatcatcgacatcaatccacctttttttctcttttcgacgtgcaaggcgttatagtgttcttgttccactttgattcatcttcatctatgtactttgaatttattactgcatatgggtctatgttcaaggtggaagatgctttttgtaaacattatgttgttagatacatgttcttcgtattgctctacaatactaaaactgatgagtctaggattccttactgaccgcagaatattaaattatatttttcttttgctttggtggaagacagatttcaaagaaggaatcgaag

SEQ ID NO: 110180 - DNA, 777 bp, Aquilegia coerulea
  Intron number 1 from transcript AcoGoldSmith_v1.013029m (l ocus AcoGoldSmith_v1.013029m.g) derived from phytozome v7. 0 (chr-ID scaffold_3; pos 2921760 to 2922536)
ggcatttctggtatctatctttaacttcttcagtttcataatgtagaatcaatttccaaattgtgatattaattttaattttcttaataagttcagattggttttgttcagtattggtcaaggttggtgtttaaaagtttttgtctttttatcaatttaaactatttttaagcttcaatttggagtatagctgaaactttttgttttattttctaactcttatcattgtcaacttcaagcttttgctttagtttcaacttttttttttttagtttaaataatttttcaaaatgcagaatcaatgtgtgaattgtgattttagtattaatttcaattttttttttttttttggataaattcagattatccattctatactatttgtaaggtagatattcagttgaatttgcagtagaaattcaactaatttttttttatttttttccatattaaataaggtttcaaaatgcagaaaagcgttttttgattcatgattttactataattttggttttgccaataaattctggttagtgttgttctatatattgttttctatataagttctgttttttaatcaattctaactatttttaaactagacattcagttggattttcgagtattaattaatgtgttgatacaaagtacggatttttatcttcttttttgtttggaatttagttaaattatatatggttgttgacttgtttctccttttgaaggctcatgaagtgttttggtttgaattttatcagactctgggaagctcattac

SEQ ID NO: 110181 - DNA, 116 bp, Aquilegia coerulea
  Intron number 1 from transcript AcoGoldSmith_v1.011357m (l ocus AcoGoldSmith_v1.011357m.g) derived from phytozome v7. 0 (chr-ID scaffold_13; pos 1147356 to 1147471 reverse stra nd)
atcaaaaagtaacgttttcattcactattcccatcctcttcttctacacttctatctctttcattaaaaattgtaacttttttgtttttgattttattcaattagacataaagaag

SEQ ID NO: 110182 - DNA, 628 bp, Aquilegia coerulea
  Intron number 2 from transcript AcoGoldSmith_v1.026233m (l ocus AcoGoldSmith_v1.026233m.g) derived from phytozome v7. 0 (chr-ID scaffold_58; pos 391411 to 392038 reverse strand )
gtgcaaaggtatgatatttttgtttgctattttgtttcatctgtttatatactatttcagtgttttacttttaactatcgataaaccatctatggtctatttcttccagttcattacattatcttcttccttccattgaaattactcattcttcttgagctcgttatccttttggtgatttgtagatcttttcttctcgtactaatcaatcattcttttttgttttctacttttgcatgatccctcaagctgtgtcttttgaatcgtagtgtgtcctatgatatgttatgaattgtagctttaggtaccttttcccattaccacacagtaaactcaaaaattgcgttcttcactttcatttcttttcccttttttttttgtcgtacttggacaatgtcataatatgatggcaaggaaaatagccaatttacaccatttgcatctctgaactttgttgagtctgaatgggattatgatttatgggatacaattgcatttctacatctgaaatctgaataagaagatatgatagctttgaagttttttgtcaaatgtatttcgttttagatcacactatctttgtttgcgtgtaggtaattggatcaaactccgacaaagataggattcc

SEQ ID NO: 110183 - DNA, 410 bp, Aquilegia coerulea
  Intron number 2 from transcript AcoGoldSmith_v1.005040m (l ocus AcoGoldSmith_v1.005040m.g) derived from phytozome v7. 0 (chr-ID scaffold_19; pos 1877245 to 1877654)
ccctcctttcttcttctctctgcatccacaaagaggtctgttcacaaatccatttatatacttttggaggtctactcgtaagcatggttttataaaagttcacaaattgcaacaaagcacacaaaagcacatccacttccaaaaaattaacatacattctacattttgaacattattctgcacacaaacaatcgtaaacaaatgaagcaaataatcactcaggcaacatttttctaaataatgtaacattctcaatcatatgacaaattattgtaaacttgtatatacaaaagatcatcaaccctaaaaactcaaattatattttaattttcatcacattatttatccttccaagcagaaacgaccaacatgaacatttttcttttctctatgttggcagggcaagtcaa

SEQ ID NO: 110184 - DNA, 843 bp, Aquilegia coerulea
  Intron number 1 from transcript AcoGoldSmith_v1.002792m (l ocus AcoGoldSmith_v1.002792m.g) derived from phytozome v7. 0 (chr-ID scaffold_35; pos 334591 to 335433)
ccattactatcacaggtatgcccttttttatggtcggatttcaatgcgataaatattcaaatgaagacacttggaataataaattattgatattagctataatgacagaaatcaactgcaagttgtacacacaataccttttcttgatactattttacacttgtacaaagtaaaatttcctctaaaatatttcgttgtatgtagcgtgtggactttaaaaaaaattcttaattattgattatcttatgaagtgggttaaaaaatggcacttaagggttattgagcatttgagcatgttccgaaggcaggcacaacatatgcttttctcctcgtatgtttttgttaaaatgaatttacatccagcattaattcaggctgacttatacatccagcataaatcattaatttactcgtatgatactaaagggaataagaaccacatatgatactgtgtctcatttaatatcttgaattcttaaatatctcgtttactcgtatgaagctgcttgttggggctattttaaaaaagagggaaaaaaggaaatcttttaccgttgacaagtatacaaaacatgtcataagttacctctaaaaatgaaaatgaaacatgtcataagggaaattctgatgccaagatggcaaggtgtttaggaaagacgagaggtcaggtcattaggattttgagtttatgcctgaaggatttttcatgtttgtatgtgggttgtctaggttgctacttactaacctgtcaccaccttagattacatcaacatattaattgtatacatttttggtttgggttgaatgctagattgaagaatccttggaggaacttgcacctgc

SEQ ID NO: 110185 - DNA, 502 bp, Aquilegia coerulea
  Intron number 1 from transcript AcoGoldSmith_v1.005050m (l ocus AcoGoldSmith_v1.005050m.g) derived from phytozome v7. 0 (chr-ID scaffold_13; pos 3953627 to 3954128)
agatttttgatagccgtggaaaccctactgttgaagtgagttttttttgttttgttttttttttaaaaaaaaaaaaactactatcaaatcaacacattataatatttttttaatcatcaagggtaaaaaccagatcatgctgttatttatagccgttaatatgttgtgatgtttgtttaattgtggggtttacttagaaatttgaaatgtggtatattatcaaagatagacatgaatttgtttttaccagaatgatctgtatggtttatgaagaattatagtattgggatcatacaggctttaatgttaacttagagacaaaagggagggagagaaagagaagatgagaagtagagattgaagaaaaagataatgtgaataaaatgatatagattttattcttacttttaggtttgactcttctaaagttggtcaataagataatttaaaatatattttttatttttaattatgaattttcaggttgatattactctttctg

SEQ ID NO: 110186 - DNA, 402 bp, Aquilegia coerulea
  Intron number 1 from transcript AcoGoldSmith_v1.000923m (l ocus AcoGoldSmith_v1.000923m.g) derived from phytozome v7. 0 (chr-ID scaffold_26; pos 2155390 to 2155791)
tcttctggcagattgaataaattcaacaaacctaggtaacttctggctttccccaagtcctggttaactagttgggtcatttttagtttttttacactgaaaatgattggggtttgatggtgttttaatgattttttttcttctataattagtatattgtactccaatgtaatcactgtagttatgcattttagttcagctacacaagtgtctataagttttgggtgtaagcttgcatctatgaaagcttaggctgcagttatactagactaatgaaaatgaattcatctccaattgtttgattcattttctagttcgatgtgcttatattctgaatttcttgggttttggcattatgaaatgacaggaacatctctagatctgatcgacgttacagttctt

SEQ ID NO: 110187 - DNA, 524 bp, Aquilegia coerulea
  Intron number 1 from transcript AcoGoldSmith_v1.019290m (l ocus AcoGoldSmith_v1.019290m.g) derived from phytozome v7. 0 (chr-ID scaffold_58; pos 1156652 to 1157175 reverse stra nd)
ctaatcgtcaatctctcttttcaacaaatctcgaggtactctctttgttctaatcgttttttctgttctgtatttaggtttaatttgatattgattcagttgggaatttgaatgatatccagagctcattgagtgtcattaaagaagataatggagaaggatcatcagaacatcgaccgggtggggaggaggaggagaagaagtgggttacctgccctgtttgtggtaaacctgttcttggagatgattacatggttaactctcatttaggtatagtttctccttaacatctttatcatatcaatagtttaggattttgatgtaagttgaaccaaatctcgaattatataataatttctgagcaatctaattatgtttggcaaaatcttgatgaatccagcttttattttctaattgtatattgcagtcgtttatttgattaacaactgatttacagatgtgtgtttatcaagaggaacaaaacggaagcttactcaacgaacccttctgcagttcagtttttc

SEQ ID NO: 110188 - DNA, 553 bp, Aquilegia coerulea
  Intron number 2 from transcript AcoGoldSmith_v1.011250m (l ocus AcoGoldSmith_v1.011250m.g) derived from phytozome v7. 0 (chr-ID scaffold_13; pos 2398285 to 2398837 reverse stra nd)
ttctaatccttgggattgacaaggctggaaaaactgtaatgtgatccctgcctgtaataactacctgtagttaatctttcatttaagttctatttttgtttctctgtgattatgtgttgtaatactatttgaactttcatttcagtttaagttagtataacatatatggtgctatgtatctcttaaccaaaccaaacaagggttagcatacatttgtcaaaccgttaattgatgcctctgtttccttgcctattaacatctgtaaactattttttctaattaaataataattaaaaaacatgtgatgaaactttttgaatggtatttatatgctttagtaagttttgttgttggtcatgtaatgatttgtgtttctggactttatagattcatcttataaccaaactgtaatcacattgctgactaacacatggacgaggactttcattaatattttgctataaacttgtcttctacgaagttcatgtgagtactcatttcgttgtatttgattccagacattgttagaaaaattgaaggcattgtactcaaa

SEQ ID NO: 110189 - DNA, 811 bp, Aquilegia coerulea
  Intron number 1 from transcript AcoGoldSmith_v1.027043m (l ocus AcoGoldSmith_v1.027043m.g) derived from phytozome v7. 0 (chr-ID scaffold_22; pos 3671613 to 3672423 reverse stra nd)
gttttaggtcttcaaaggttagaaacacttctttatttctggttactggtgcttagatattttatagtggtgatcaaggatccaattattagttaacattttgtagtgtctatgttttaaaatatgaattgaccatgactttaaagcataatcaatttttcattaatgatagatatcggtgataaatattagtataaattaggccctattttaattcctttgcacatttgcaattatgacttgttcccccttttttcttatctaaaagtctaaaacaatttggtcagttctgatgtatatcagtgatatttgtcatgcataagattgaaaactttgagaatgtgcatatagtattgcctgcattatgaagtactggacctccttactgttgtctgtttgtagatgagcaatacgggaccaatagagacacataacatcagcccatgcctccatgcctatggtgtccggagccactagttaatatcttccaagcttgatagtaacatactgaactcaagaaggctgtattaaggtattgcaagacactggcctatggactttccaaaacaccacctcaagataccctttcctatatattcatgtgcatactgcttacaagttacaacaatatttgatgtagtggcaccccattgattcctccgatcgtaaatatatccgttaatcaaagctaattgaatatttaatagaagaagaacaggacaagtacatatacccagaaattttgtacgaatgtgtttctctacttgaagatttggattgatgaattgcttatactcaggaagacactact

SEQ ID NO: 110190 - DNA, 589 bp, Aquilegia coerulea
  Intron number 1 from transcript AcoGoldSmith_v1.000021m (l ocus AcoGoldSmith_v1.000021m.g) derived from phytozome v7. 0 (chr-ID scaffold_2; pos 7468892 to 7469480 reverse stran d)
tcaggaaaatcattaggtttgttttctgattctgctctttagttcaattttttttttttttttttcttgaactttgtttttattgtatttgttgcatatctaaggttagtcatagctattaggtatttaggttcagctttggatgtttgacgagaatgtgtattgaaggatatgagtcttataaactccttttgtgtttatttcattttttgtctagtattatggacttgtattggatcttgttttgctcggtattttaccactaaaagatatcatgaagagaccagcatatcaaataacaaactataagggatgctatacattagaaccaggcaatatatgtaaatttgcaattacaatgagcatgagaatataatattactgaagctgtatccaaaataatttgtctagttcagttctggagagaaatttttctttcatattttcatggcattcaatcacattttagatgtgtttattttgctttatcaaaaaaaaaaaaaaaacgtgtatattttgcttcagtttcagtcgttttttgttcatatttgttactaatgattagatgcctgttgcttgtacagagacc

SEQ ID NO: 110191 - DNA, 515 bp, Aquilegia coerulea
  Intron number 1 from transcript AcoGoldSmith_v1.010981m (l ocus AcoGoldSmith_v1.010981m.g) derived from phytozome v7. 0 (chr-ID scaffold_16; pos 4808872 to 4809386 reverse stra nd)
ggaagaagtacgtataagtttctatccatcccattcattaaaaaataacaattgtatatttgtattgtattattcatttatttgtgttcataagtcataccacaccaccaccaccatgatatgatgtattttcccaatcaatcgatccatctatcttcttaagactatactatcaaaatgtctgaatatacatactgtaactctatgatgaatcagaaatgtttgtttcgtttgttgtgtaatttctatctagatctattcattggttttcgttaatggatgcctgcctgcctcttatctctctttcttcttacaacaaaagtgcttttgttttctgtttacccaaccccaattcttaatctttcaacaattttgttttgtttatactacgtactgctttttaatttcaaaactttactcttttctatacactacctttttttcaaagatttctctatactgcctcatttatcattatataatacttttttttttttttttttaggacctgcaag

SEQ ID NO: 110192 - DNA, 649 bp, Aquilegia coerulea
  Intron number 1 from transcript AcoGoldSmith_v1.004656m (l ocus AcoGoldSmith_v1.004656m.g) derived from phytozome v7. 0 (chr-ID scaffold_13; pos 1413464 to 1414112)
acggtggttgcagtgaagaatttgttgaataacaggtataatttgctcatactatatatagtttcgcaatgatttgatctattttgggatgattgtggacttgtagtttagggaaacagtttgtagacctgcaggttgaccttagctttttgttacttgtttaggtacaagtagagaattgaattgtaaagtgtttttcaattaattatttgtttttggatgaatttgaagaacctagaatctaatgttggactattagtgtttatatggtacatgtagctcagtagctctataagtccatcatgcatttgtgaagaaatccatactataagcagaaattggtcttggacttttaatgctactactgtattctggctttttctgcgattgtgtttatggtatggtacttgtagctgtataagttcatacggttattttgtattttttccttatttggagtagaaactcgagggtattgctagatttgattatgatgagtacaagattaacccttctgatctcatgatgttaagtaatgtatctactatttaatccttcttcaactttggttttgtattgtaaattatctattaatatacttgatgaaataccagagggcaagctgagagagagttcaaagtagaggttg

SEQ ID NO: 110193 - DNA, 1007 bp, Aquilegia coerulea
  Intron number 1 from transcript AcoGoldSmith_v1.010705m (l ocus AcoGoldSmith_v1.010705m.g) derived from phytozome v7. 0 (chr-ID scaffold_13; pos 2662463 to 2663469)
atttctccgatttctcttctcttcttcgttctcaggtatattgattcaactctttagatttaatttttttaaattgatttcaaatttcgttgtttgaatccgtatatttttgcgaaattttagttaatgtggaagaacttttgagctaaagatgatactttgttagatttgatagattaaaagttgtaattattgaattgattaaaaaaattcaatttatttgtatgaagttatcatgtttgcttcttttgatatgtgatatttttgctaaaattttcagtaatttttgaatttttttctttcttatgattgattttagatgagatattttactgaaaattaagtttctttctcgatgaaatataaacataatctacattctgaatgaatttattaatagtgacatatggattgcattgtggatttgtgcctgctagaatttttcccatattgtatctcgttaagactctgagatgttcatccattttattgttttaacgacagatagagaatgaaagttcattgatttgttttcgatcaacaatttttggggactagattagaaaattgaatgaacataagttttgaaaaaagtacaataaaggaccttaaatgagaaatctatctactgcagacttatgatcaagtttaagcgcttaggtgtaagacaaggtagaagcctcaaggcagaaaagtaaagatataaaaggtagttcacggttaagaatcaacttctttttccctcttcctacctctgaataagttatagacatgcatatactatagcagactaatatgtgcagatcaaatagatgctcctcaaatgcaaaacaatggacgctaaatgtactgataaaaaatatacctcagtattatgcaggaaattactttatgggttttagaaagtttagcttctagtcttctagataatgttcagggatgttttattgaagtatgttaatgtcattgattttttttttactgacttgtgtgttcaggattaaaaa

SEQ ID NO: 110194 - DNA, 652 bp, Aquilegia coerulea
  Intron number 1 from transcript AcoGoldSmith_v1.002387m (l ocus AcoGoldSmith_v1.002387m.g) derived from phytozome v7. 0 (chr-ID scaffold_2; pos 10239416 to 10240067 reverse str and)
tatagggcaggaaggtaagacatcattttacttcttatattgaactgctattgagttttagtttgttttatattgtttgcactagaatgaatatggacaggaaaaatatacaccattaaaaattttcgaattatgtaagaagaaagagaaatatacaattttagttctacattttgatatatggcataatggggaatagggattttgctttttacaatttgaaattacgatccttgtgtcttgatgcaaggtgatgtttaaaatggagaataacatgaaggcccttttttcaaagtatcaacaagaaattgaatcccaaacaagcaagttttaatctccctccaactttttgtccagacaatattagttattagttattagtgatgattcctttcatgatcatcaagggagcttttgcttaaattcaaagctttcatcaagcaagatacaatttccaacctgttcttgggcaaaacataaagatagtattcactttcattactaaacctaaacagttttgaaattttcaccactgagtagtaccctaatttttctatcaactcaataataaccttgttttccctacaattctcatatcagtatgtactacatgtaattattattttcaaatttatgtgcagagcattggaag

SEQ ID NO: 110195 - DNA, 983 bp, Aquilegia coerulea
  Intron number 2 from transcript AcoGoldSmith_v1.022455m (l ocus AcoGoldSmith_v1.022455m.g) derived from phytozome v7. 0 (chr-ID scaffold_24; pos 276759 to 277741 reverse strand )
gggtatgtttgttttttgaagagttcttgttttcttcattggcaaaacatatttgagattaatgtgaaattttgacagagaagttacatgacaactccacactatgtgagctcagtcaaaactagaagttcccactcaaagtgaaatcctcctatctaaaggatcttgttcacatatccatacgagaccgttcccgtaaaagtgcttttacattacaaatggcatgaagaacccaaaacatcttaccaactgggaagaggttacgacttcagtatttgcccttataactgcaaagagttcatatacaattaagtgataatgtaatgtcttacttcgagtaagagttcatttgttttcaaaatcagtcacgtttctgtttctgtttttagccattatcaggaatatgtggtagatggtgcaatgaaatgagtagattaagaaagattagtacatctaggtaatgcttgtatttccattaaccgccccaggctataaattgtaccctgaaattcacctctgaatgtaaacattttttttaattttatttgaacggtaaacgagcataatataataataataaaaagagttgtgtacagacaaagccaagggatcaatttttacaagcctacgacacaatgtgcatttagcattccatgcctgtacttgaaactgcaatcatcacccatttgctcgaaagtttctgtgcttcataggctgtcaacataatgaaccttatttttcaaaattttcgctttgatatttgatctgccgattgaattcgacagtcagctgatgagcactgtattgacagttctaaacatcaattttgtattgcatattgatgttgctgatgaatttcagaaaaatgaaaaaacaccctcaccttcctttgtttatataatttgttcattccttttccagttgttcatggatttggtttctgtattttcagaacaagatagatttcaaggacagaagtacat

SEQ ID NO: 110196 - DNA, 1027 bp, Aquilegia coerulea
  Intron number 1 from transcript AcoGoldSmith_v1.006847m (l ocus AcoGoldSmith_v1.006847m.g) derived from phytozome v7. 0 (chr-ID scaffold_35; pos 101814 to 102840 reverse strand )
ggcgcattgagggccctgtggtctgttctcttcaggtatgtcaccgtcttgccaactctacatatatcctggaaactctttgttccgtatgatggatgttgcttgaaccgcccctgctaactggcagatgttgctgacaaagaatgtaatgcgattgcatgacttcagttagaccagtcagcagtcactcccttgtgttcgacatacataggactaatcataaactaaaatattttttcagacgggaaaggaaaagctggcaaacatttggtttatactaacaaggaaagtacaactaattaagaatcccttaatttgttctatagtgaaagccatcttaaagatgccaatccaaccataacgatatgtgagtgtaagggatactccgaattgctttgctttgggcatgacgtatgttctgttaataatacttaactaatcttcatgctaatcctttttaacatgttccgtcttcatgcatctctgaaacattttgtcctagttttaacacaaacacacgcacaaaacattgcagacatggctatctcaggcattaaacactctctggttttttttctttctgctgtctttctcttctgtgcaatgtttttggcattgagtgaagctcgtctaaataaattcaatgacatggaggaaataaggaggaatctgctgagaaatggcttagggaatacccctcagatggggtaagtttataaattaatctattatcaactaactgagatacaaaccatgtgagtaatgtatactctttggctcattcatagtgataccagaaaaggaaacattgtccttcgacattttttgatttccttgtttgtttaaatagcaatagaacaggaaaattgaggaagcagttttcttatcagtaaaaacaggccataaaatataattgacaatcttgaatgccgcattcaagtgtcattattgaaaatacttatttttcaataaggttgttatggtatcattgataaagcgacctttctgcattgtgaatggtctccag

SEQ ID NO: 110197 - DNA, 692 bp, Aquilegia coerulea
  Intron number 1 from transcript AcoGoldSmith_v1.022766m (l ocus AcoGoldSmith_v1.022766m.g) derived from phytozome v7. 0 (chr-ID scaffold_86; pos 383562 to 384253 reverse strand )
agttggaactttcaaacaggtcaacttcactgaaggtgaggttacacattattattatacgttcggaacttaagacagtttattttatttatttttttgtttagataagttcaaattttttgatatctaaaaaaagttacaagcctgtgagcccatacatcagtatgtcgtcaggcaaccttctcttgcatgattgggagttgagttaagatgcctctccataggctacatccgtgcttaagactgtatttccaaattaaagatagatgttggcatatcactacaaaaatatttgatctctgccacacactagagctgtggtcttgatgttggcagatatatgtctggtcttgtttaacgctaattaacatgacagtctagtacaaggctttcagttcctttttcatatatacaattgaatacagaataatactgattgattatcatattttcgggttcaaatactgatgtgtgattgggtagacttgcttacgctgtagaagcatgttactcttggtatgtatttctactgtattgtagtgtttgtactcggttttcttcagtgactgtgaaatatcattcacaacctgatcatattgtacattttgccagtttcaatataatgcccacttacactattttcgggtaattttacaggagtaccattcagacgtataaaggagcgaattgac

SEQ ID NO: 110198 - DNA, 587 bp, Aquilegia coerulea
  Intron number 1 from transcript AcoGoldSmith_v1.026597m (l ocus AcoGoldSmith_v1.026597m.g) derived from phytozome v7. 0 (chr-ID scaffold_2; pos 2201913 to 2202499)
ctggcacgccgcactgccgccaaggtaatcaggaaacacagtaaacatcaataacttagctcagatgtcaggtactcaggtgggaggtgaagcaattagctgttcatctctagtcaaatggactgggtttatggataatttacaggcccaaaagcatacaaaccccaacattagcccaataatgagcacttagagcagaaacttcaagaacaagaaacactgcaatctcaaaagttcaaagagttgtgattttggtaaaaaaaaacgaaaaaaactacaaattttctcaactattcttgctttcaatggcaacaatgacgaagaaatcaatgggtatggatggtagttctttaagcagtaggaaagataagggtaaggcaacaatggtagaagaaacccaaaaggctgtaaacaataatgggaatgtgaatgtggagaaactaactcttggaagtccagcaacaggtaatgtgaagagcttaagcaataaggttgatggtaagggtttggagttagaagaatcattgaagaaactaacatttgaaagcttagaaatcaaagaagaagaggaagttgtggagaagaaa

SEQ ID NO: 110199 - DNA, 616 bp, Aquilegia coerulea
  Intron number 1 from transcript AcoGoldSmith_v1.023393m (l ocus AcoGoldSmith_v1.023393m.g) derived from phytozome v7. 0 (chr-ID scaffold_13; pos 1517441 to 1518056)
aatttcaggtcagttcaattgattcaatcttcacttcttttcttatttcttcaagatctattaataccctcttcactattttctctatgaattcaaattagttgattttttcccactttttttcataccccatgttttcatcatttttcttatttctgggttcttttagggttttctcactttgaggtatggttatatttgctttataatcttcaaacttgaaatcccattaaagggtagtcttgttgctttgaaatagttaatgggaaagttttgtttttctctattatcgtttctatcgcgtgtattttgaaatttcttatagactttcgttcatgatgcaggataagataaatggtgactactcgtgtcatagtgttgaaagagaatcagtttatgctcatgaaaggtatgtttattccaattagtgaagatttatagcaatctaataagtgagtcaaggattagggtttcaagtttggatagttcataatatcaaattatttgtttcgaaaatgatattaattaagctttatagtttgtattaattacgtataaacaaatgaatttagtgaatatagatagtttatctgttctttgcttcaagcagtattgg

SEQ ID NO: 110200 - DNA, 889 bp, Aquilegia coerulea
  Intron number 1 from transcript AcoGoldSmith_v1.016473m (l ocus AcoGoldSmith_v1.016473m.g) derived from phytozome v7. 0 (chr-ID scaffold_13; pos 535684 to 536572 reverse strand )
cacgtcacattatcgaagaataaggtgctttcttcttcttcatctctagttctagacatttagttggactcgaacccacaacctaaagcacataaacctgtgtgtataccagtgtacttataatattttatgatatattatgtttatatttaatacaaatatattactaaaatttaaacatttggagttaacaatatatttaaccctattaatattggattggtccgaccagtgatccagtggtcgaaccagtgacccagtgccttcaccgggttggtgtccgggttggttctgatttacactcaatctcgtgggctataagcccagcccacaagatttggaccgcccaacttcagatcagtttaagttggttctggaatcatattattaagaacaaaacaaaacagtaaccatatttaccgtttgttgaaagaagaataacgaccacaatgctgccatggagaactctgtccacgttgtcgtcctttccagtccacacacacagtcattcaaaacttctttcactcaaactctatctcatcaaaacatcttccaattttttttcttctaatttctagggtttaaaacaaacatctgtctgtaaactaatgttttcaagattccttcagcaattctttcttcaattcatttaaaatcatgaatttttgtcagaattttaaggtattattgtattgtattctccaaatttcatcaactttttcttcttcttcttcttaaatcatttgttgtttaaaactgtgtttacttaattgctgcagggaaatcccattatgtatagtagttgtagtaataaaccaccacaggtttattcgcaagtcttttcaacttcacagaagcattcatatacaattagtttgaacctgaagaa

SEQ ID NO: 110201 - DNA, 840 bp, Aquilegia coerulea
  Intron number 1 from transcript AcoGoldSmith_v1.010996m (l ocus AcoGoldSmith_v1.010996m.g) derived from phytozome v7. 0 (chr-ID scaffold_2; pos 5792371 to 5793210)
aatcaaggtgacacaaacaaactgtttttcaatttctgcaatttgagttcaatttgaacttctttagctttaattattgtggtttgtttcatgaatatgttaaaatttccattttcattaagtattcatcataatttgatgttattttgaagccttgcatttggggttgtggaatgttgcgttttcatttttagtaaagatcagaattagaaaagctaaagattcagacatcccaaatggggcaattggtgccgtaattctgtatgttaaaagttgtgacattgacattttcttaatttaacttaacattaaaattagctaatagcaatgattctaaaactgataaaattctgtgacgaattcatttcacattttttttcaaagaatgtctagtgggatgcttaaagtaaacacatcttaaactgctagatttaatggaaactgtctatgtctatgtattacagtaatttgatactctccagttaatggattttgctcagtattactatttattttggtcgaccccaatattaatagtttctaatgctgcttaaaaagacaactggagagacctatcccttgttttcaatacttaaatgtacagtattagggtgctgctatagatatacaaacttgttggacgtaatcaagtagtttaggaattgtttgatgcacatttaaatatgaagggtttatgacatcaagttttcaggctggttggtcatacatgcacttgggcatgaaattaggattggaataattagggctttgctaaaagttgcccacaacttctttcttccaattatatgtgtcttcctgttgcagagcatattttgcttg

SEQ ID NO: 110202 - DNA, 322 bp, Aquilegia coerulea
  Intron number 1 from transcript AcoGoldSmith_v1.011260m (l ocus AcoGoldSmith_v1.011260m.g) derived from phytozome v7. 0 (chr-ID scaffold_8; pos 2724403 to 2724724 reverse stran d)
ggttagtcaccaatctcctcttatcatttctttctttcaatgtcttcaaatggatccatgaaatgaataaaaaacttcgtttaaaatgttttctatccttacttaaaattggttttgaatggaaggttttcttattgttgttaggtttcttaagatctaatttgaaatgggtttttgataatttctgatgaaatcgtttttgaatgtgggtttgtaatatatgaagatttgctttaaatggtgtcttttttattgatgattttaagatttggggttttgatatttgtttgatttgatgacatttttacaggtgcttacaagt

SEQ ID NO: 110203 - DNA, 855 bp, Aquilegia coerulea
  Intron number 3 from transcript AcoGoldSmith_v1.013546m (l ocus AcoGoldSmith_v1.013546m.g) derived from phytozome v7. 0 (chr-ID scaffold_2; pos 9795241 to 9796095 reverse stran d)
aaggtgttactgaagataacaagtacaaatctctgtgctcctgtttcctctttattagtttggactagtgtaatgtagattctgcctttttgatttcataggggatagggaatatatctgtttttattcaaaatgcttatgcattattaaataatgaatcattgctcttgactagatgtagatgagtagttgccttatcctaaatcagtgtacatgagcacttgggttatgttagatacatggtagcgtgtgtgtgttggtttcgaaagaaagctgatgcagttgtcagaaacacttacaagccataataatgttttctgatctggctgggtttcacgcatggaatgtttgttttgggtcatgacttaaaagcctattgtaggaaatgacacaggaagttttacaagcttggaacttttttctgctaggaaacaagtcttgtacctttgtaggtgtaagtacttatattttagttttgactatgaatacaattcatttaaaattatcaatcatatgtgtaatgattcccaaggagatgtctacctcacaaagaaagcttgtctttgttaactcatgtctgtatgaaatgcagcttcaaaagaatttgccataccgtaaggttattcttcagatgcttaaacaccattaaaactgaaaagatgccatctttttcccaaccatccagctgaattcctttgcttgaacatctgctgttattggtctcagtggttggcagggaatttgtatctgtttaatacatactaatgagttcaaagtgatctgacaaaattgtactaatattatgctttccaatttccaggttggctacatcgttgaacgaaatcattgtttatc

SEQ ID NO: 110204 - DNA, 876 bp, Aquilegia coerulea
  Intron number 1 from transcript AcoGoldSmith_v1.009423m (l ocus AcoGoldSmith_v1.009404m.g) derived from phytozome v7. 0 (chr-ID scaffold_13; pos 5906055 to 5906930)
tctgcagttgcagtttcaacgcatttagacggcgggtttgtaacttttctctctcttagaatagttagtgaaatttgattaaaaaagaatcaattttttctatcgaagttatatatgaattaatttatcaattttggatatatattgttaagcggtcagaaagaaatttagatatttatggattaatttgcttttattgttcaacttggtgagagtcggtgaagttttgtttacaaagattgaatgtgttagtattttaattgattggtttatgcatgaattgaaaatgcgagaaaagctaattaagttgagaaaatttcaatgtaatgcgaaaaaagtaagtaaaagatctgactgtattggtgtttaattggcctgcatatacatagtgtaatcaaactgctaagatgtttaacagagtattgatgcgatagacaaatgttaaggatggtgactagcaattgtgattttactacatgaaagcgatttcagtatacatgtgttaaggacgtgtatgtacatttcttcccttataggcaaacaactgcacaagggtttttactctttcaaaagaatgcacattatattgtagtagaatcttatggtatgacggtaactagctatcgcgatgtggcttcacagaaatgaagattagccactcccataatcaatatgttgagcgcaagagttctttaaatgctccatgtttctttgaaaatgagtttctaatcatggcttcatgtggtctgtattagcaatttgtgtagcttcactatatagtgggctagtggccatctgcacatgcatatgtcttctcttgtattcaaaattaattttaaaatttctttgttcttattttatgtagcatcattgtcg

SEQ ID NO: 110205 - DNA, 277 bp, Aquilegia coerulea
  Intron number 4 from transcript AcoGoldSmith_v1.025860m (l ocus AcoGoldSmith_v1.025860m.g) derived from phytozome v7. 0 (chr-ID scaffold_16; pos 1264517 to 1264793 reverse stra nd)
gattgagcagagccaacattgcaagccacttacaggtttgcttaattcattccaaggaatatttgtttatttaatttattaatcaaagcaagttaaaggtatatttttttaaaagttaattataatttttttttatgactgtttatatcgtaaaattgacatagtatatattatatcttctctaaatacattaattgaaaatggatatattattgataaattaattattgcttctttcgcagaagtaccgtctgtaccaaaataaatataaaggcac

SEQ ID NO: 110206 - DNA, 803 bp, Aquilegia coerulea
  Intron number 1 from transcript AcoGoldSmith_v1.008303m (l ocus AcoGoldSmith_v1.008303m.g) derived from phytozome v7. 0 (chr-ID scaffold_2; pos 4426982 to 4427784)
gcttatattactcaaggtgttgttcaagaaactatgtaagtttgtagatctctaattgatctctaatatgctttttagattttttcacattttcgttcgttttgtgattgtaattctatgtggaatttggtaggaaattgcactgttttaatcagattctagggtaagaatacaaataaataaataaataaatagaattttagctggaaatgtttttgagaaagagaggaaattatgtcaaggaacaacctttgcagtttgcacaaataaaaaaacactaatttagtagtgaatagtaataccacatctttgatcttaattgatatattaatggtaagctgttttaattgtcttgggcttatatggataattatttatacgtagatagaattaatttatggtgtatttgccgatgttgatacttgatattgtgggatgattatgctgcacaactttatcccattgttaaacgtgggaatattttagtcctaccaagtgattagtaatagctatccttcaagtgatacatgtcttggtaagttctctcgactagtaacccggacaacatattgagttctgtagatagaaatgtgaaaatgttgtatgttgttagagtttgtaagttagataaagaaaacttctgaaaggaagcaagaaagcccctgggataattatatatttgaattaagatatctttggttttttttcttctaacttgtgccctttacatgtgcatagggtaattgatatgtaatttttatgtttcagctctaccaagagatttggacctgaagggaagcgtt

SEQ ID NO: 110207 - DNA, 668 bp, Aquilegia coerulea
  Intron number 1 from transcript AcoGoldSmith_v1.002266m (l ocus AcoGoldSmith_v1.002266m.g) derived from phytozome v7. 0 (chr-ID scaffold_22; pos 881902 to 882569 reverse strand )
cagcaagatcagagaaagaaggtttgttggatctttcttttgttctttcaattatgttttttttgttattagatctgttttttagattgaatttagctgtttaattagatctgtttgtgaaatttgattgattacttgaatttcttgagcttgcattagtgcaacttgtaggttttcgatttctaattctttattagcatctttgctattgatattgatttgcaattatatgtccatggaacctaattctgtttcctgagaatgacaatttaccaacccccccaaattgcacaaaatgttctctttgttattgttttttttttgttaaatctgtttaaattgtgcgcttttcctctttatcattgccttgtgaggttcatgaaataaaaatatgcccttgaaggaaaaaccccacttttattcttctgagacaagttgcatgaatttgtgagtttttggatcaattaagatatcaaattttagttaataaagcctaatgaatgtgctctatatctgactatgtcttgttgtagctgaatagatactgttactcattattttcattttgttgtagttgtactttgggtagactttttgagcatcgtggcaaaatttgtttttagcgatgagtctgagtcagttttatattttgacagaatccaacagag

SEQ ID NO: 110208 - DNA, 760 bp, Aquilegia coerulea
  Intron number 1 from transcript AcoGoldSmith_v1.001499m (l ocus AcoGoldSmith_v1.001499m.g) derived from phytozome v7. 0 (chr-ID scaffold_3; pos 2977914 to 2978673 reverse stran d)
ttagacgtgttatcatcaaggtatatatatatatatttttttttcttcattcattgattgcattatttattcttttttagtattttgattcatatggattttgatctttgttgcattatttattctttttttggtattttcattcatatggattttgatctttgttaccctaattcatagtatctaaccaaacagttttgttttgattcaaacaaaataaaaatgctatttttgattttttttttttaaatctattttgatgttctattgcttattatgaaactatgatcgataaagtagaaaagtttatctttttagggtttttttttttttccatcaatctaaattcctaaagaatctcacacggtttgatgttaattgaccgagtgttggttttgatagggtacgtaatgtatgtacatgttattgtttgaactgtaattgggctatattattgggcttggacctcatgacccattcattctttgaacattgaaatttagcccatcttactaccattttttttttatttttatttttttaactttaccaccatcatgtattcatgttctgatgttcatgtgttttcctcaaggtggtggttgttgttctgtgttttttttcataattagcccaaaactgatttgatttggttgaaatcttgattaaaagttgtaagtaatactgactgggtgaaattgtttgtttgtttgtgttgggttaaaaataaaggttggtacagctgttgtgactagaggtg

SEQ ID NO: 110209 - DNA, 165 bp, Aquilegia coerulea
  Intron number 1 from transcript AcoGoldSmith_v1.011577m (l ocus AcoGoldSmith_v1.011577m.g) derived from phytozome v7. 0 (chr-ID scaffold_68; pos 61554 to 61718)
cgggcaaaactactattctctgtatgtattctttctttcttgtcattacaattattattactacttggtttatttgttctgaatttggccaatttctatttgaacatttgttttctctgtatttaatatcttataatttgatttttgtattcagatcggttacaa

SEQ ID NO: 110210 - DNA, 863 bp, Aquilegia coerulea
  Intron number 4 from transcript AcoGoldSmith_v1.015139m (l ocus AcoGoldSmith_v1.015139m.g) derived from phytozome v7. 0 (chr-ID scaffold_3; pos 3363412 to 3364274)
ggctttactggtcccaggtaatgttatcatccatcttctgagattggataggtgtattaagaatttttaatgacagatagaacttgaaatatggaatatattctcttgttttggtcacacacacacacacagaaaattcaggtgatttttgcttgggtgtaacaatttgattttactgtattaacataaaaaaatttcaattgagcaattttaaatatttgtggcttcgtatactaactaacttttttaaacaaaccccatgtgctaaatgttttacatttgcgtatcagttgagacttgagaatatttagttggataataagattctaaaggactttttttattagttaaattgaattgactttgaacattttgtttaatttttaagcaagaactgtgttaaagtagtttgaagtctgaacccttgttctagagggtttagaaactttccgataagtgagatatgaactggtgaagatgttaataacatcattggttgtttacattcaaatttcttccgtttatgatagtaaactagtattgctcttaggttttctgaaaaaactaaaaagtataggaactttgatcctgtttaattagcttttccattcattataaatcactatttaaggaaataaagactatacgttttcttgataatgtgtgttgttaagtgttattgactactgatatattcgctgcagtagatgtttttagaattctcattttgttatcgtatcaatttcgattaatatgtatactctcagtctcccacgttccattgtgattctatttgctgcttgcatactttcttaggtgcatatttcttgtatgaaaccccaggtctctcattgaagttcgta

SEQ ID NO: 110211 - DNA, 815 bp, Aquilegia coerulea
  Intron number 2 from transcript AcoGoldSmith_v1.015725m (l ocus AcoGoldSmith_v1.015725m.g) derived from phytozome v7. 0 (chr-ID scaffold_3; pos 1677683 to 1678497)
gattggattggagtattttcccctgcaaatttcaagtaataccctcgtcgccaatccttacttaagattttatttttcgctgacaacatgtatgagtatgatcatgtgttatgttgataagactttttaaatctggatgatcagtgaaccacaataattaatataatttgtaaagagtgaggaatcttgttaaccggaaggaaaccacacttaccagaataatattatggtgtgacaaaagacaagatcaattaatacctactagctatgatagtatgtctgctctgcacattgatgagccatggattgtttcattgaactacaaatttatacattgagcatgcaaattcatctttcgttcttgttagtgtgatagtggaaggcggtgtttaatttttgtctaactgagagttgaacaaaatttccagtttactttcaaatatcaacttgtttgcgtataggcattactcatagtagaagtgtttagacagaacacacaaacaattgtagttgtattggaactgctacagatttgcagcctaaggatggcaaacaaacatatacacattttctcggactgagtggggaaacgatatataacattacatgtctgtcttacaaataagtgatgctacaagcaaacaattgaagctgtagtactgttttattatatatccctactacattagttttcaaaacaaatttcgtcctgaaaattgcttatgcactttcttttctagtattcttttgatggtaaaatgaataaatttgatgtggcagttcgtcaaactgttcgccagaacctggcaatccga

SEQ ID NO: 110212 - DNA, 820 bp, Aquilegia coerulea
  Intron number 1 from transcript AcoGoldSmith_v1.010357m (l ocus AcoGoldSmith_v1.010357m.g) derived from phytozome v7. 0 (chr-ID scaffold_16; pos 3887331 to 3888150 reverse stra nd)
actaaaagattcaggcttacaggcatcagtggaaggtacagaaatgttgaaccatagtgtcatcatatgttgcttcaacaaaatttggttctcttcgtgtctcacaagtgactttacatttccttcaaatattcttctgtactttatgtctttatccacgtatatgttaagctatgagatacttgagcattcatttcgaagtccgtatactcaaatgtctctcaacaagttataaaacggtgattatgagtaagatatcaatatcaataggtcatcacaatatctgtttaataagtatcagaatgatttttcgagtatcacctttactgcagtgttcctaaaactacactatgaagcaggcttcctcattcacatttccatgctgatatgtggacaagaggtttcatgatttctttgattgggcagagccatttcaaagagggcaccggtgttccataggagctaaaaggttttcgtttacacaaagctttggcaaaagtatcggaaatggttaagaataaatatatttatgagaaggaaacaaacttacatggtactatgcctacaatgttattaatgaggacataacttttggtcgattttattttttggacttagcaaaatggaaaatatttcgctttagaacttaccaaaacaaactcttttcactgctaaagtcaaaagtaatcagagctttgccacatccatagctattgttgtggaagtttttaggcttaaatttgtcttctatcatttgttacactaattcgaatgatcatgactaatgagtttcttcatgtaatgtaggacaagtgaaaac

SEQ ID NO: 110213 - DNA, 750 bp, Aquilegia coerulea
  Intron number 3 from transcript AcoGoldSmith_v1.001007m (l ocus AcoGoldSmith_v1.001007m.g) derived from phytozome v7. 0 (chr-ID scaffold_39; pos 1714034 to 1714783)
ggttttactctgttattccggtgagtattagcttttgtttgatatacctgcaatagaacaatctttagtttatacaggatcttacctactagattttattctgatttctgaaagagtttctgtgtatatgttactttagtatccgcagtatatgtttgcatgatacatgggcaaatggcataatgtggtgaacagtagcttatgttgtttgacttggatatacaatattgccattaaagttcttaatggcataatgttgtcagcggtagcttatgttacttcattatcatccatatatcatatttagtagatttggtatagctaccaatctaggaaacgcatgtcttccctctcctgtccaatataatccctgtatggtttatctttccttttcaccatcatggtcagctatgttttctttatcagacataaggattatgctaatatgacctgcattatgtgtttccattttctttctcttgatataattataaacaaaacaggattcgaagtaatttatagttgcctcagctgatctaacttaagttgtgctagcaatgttatgtgataatggtggccactggccaattttttaaccatagttatctactgaaccttttgttttacgtttaacacctaaattaaaatctgtgatttatttctctttgggatcattacattggggtaattatctaatgaatattttcatgtgcaggagaaaaatctcaaggaggtttttgaatccattcc

SEQ ID NO: 110214 - DNA, 778 bp, Aquilegia coerulea
  Intron number 5 from transcript AcoGoldSmith_v1.017873m (l ocus AcoGoldSmith_v1.017873m.g) derived from phytozome v7. 0 (chr-ID scaffold_3; pos 9734523 to 9735300)
ttgataaggtatgagactaatctccgatacttgattagctataatttacatatgcctacaagcctaactagccttccctacctgaaacttttggtccaactgatacttatagttatagtcttcctcattatatgggtctctggcactctccgagggttctggcacatgcttgatgcctagtttgtttactaactcccatgcctaattcaaacaaatctacacttgtccttggccaaaactttacattttaaactataaatacttattagatacctcatcttctcggttcaaacttttctgtcccactaaagactgatttgtagtaaatcacattttaaaattcatcatttacttttttttgccttacttttgtgtgctttgtatttcacaaacaaatatagctctataccggtcgaaatttgaacatagagcttccttaggtccaaccccacacccaaactacctttcatcaaactcaaagactgtcagtatgtacgtgtagtatatgcaattaaatcactaccctaaacaagtctatgaaggctactgtggttgcgcaattttgttctatatattctttaatgggatatagtgagtgtagcaaaagcactcagatttctagaggagcacttgcagaaatttgctcttattgacgggaaaccttttgttgaggaaaaaaaagtggaagtacactagaccaatgtgaatgaaccttgaagttacactaataattttgctcctagaataatgaatttatacttaaactttctaggtgtac

SEQ ID NO: 110215 - DNA, 902 bp, Aquilegia coerulea
  Intron number 2 from transcript AcoGoldSmith_v1.012303m (l ocus AcoGoldSmith_v1.012303m.g) derived from phytozome v7. 0 (chr-ID scaffold_34; pos 1785068 to 1785969 reverse stra nd)
agcgtcttgttccatctcccaactccttcttcgtaactttcttcagcttattcgttttgttattttttttcttgttgtatagagattagcaatgtttgatttggtggattaatgcttgatttcagtatatttcatttacagtaatttttgtaattatttttgttgaatttgttaaaaattagtttacaaccttattttgcttgagtaggattcagagtaagaatacatattgatgacatagacttctctgtttaaaaatgagttagaaattttttggttttttttggggggggtcttgtaggttatcttactaccacatattctgttatgactggaaaatttgatatatatgtagaatactagtatgtaatggtagcatagacttttctgtttaaaaattgttactggaagagtgatttaaaaacttgtttggagtgtttgtttgagtcttgtagattagcttgctaccatatgttctgcaatgactggaaattttgataaatgctttgtttgctgattaaattattcttgatttgacatttgtgggatatatttggtcggagagactatttaattagtagttaaaattccatggagactcattgagagaaatttatcgtctggacttttttattcagaaaaatgtatgggatgtggaaaaatacccgattgaaattcctttacatgctctacttggcattgttgatgttataatttgaagttatatgttatgaacatctcttgtactttgtttatttgtgttagtttgggctttggactgctggtatacttattactttcatttctcttacaatctcaattgtgtatgtgtgaagtactattggtttgtaaccacacagcttgtttacaacactagttaacctctgtttgtgttttgcagg

SEQ ID NO: 110216 - DNA, 511 bp, Aquilegia coerulea
  Intron number 2 from transcript AcoGoldSmith_v1.016697m (l ocus AcoGoldSmith_v1.016697m.g) derived from phytozome v7. 0 (chr-ID scaffold_24; pos 2723547 to 2724057 reverse stra nd)
ctgaagttaatttgatattaatgactttccatcaattaaactactttgttattatattatttatgatttcatttttgtctgagcttgattgactagcaaactagtaagcaatttgatctttattgcctagtgtcatgagtgcaacagttatattatagtgtcgggttttcgatttcatgaaatcactgtgatgttcttctcaccttaatgcatgtgcagaaattatattgatggtaagcagataaatgtttatatatggaaaacttttgttttttttttttttttttttggttttctaagtatactgggacaaaagaaattttatttaaaagaaagcttttgaaagctataaaccgagtcgaagttgacgagcaatagcttggacttggttccattaagattaaattgtttactgtgactaaagttgtcgtattgcatgttttaatttatacattgaaagtacatgaagatggttttgttttactgtattgtttttgaatagacagaatag

SEQ ID NO: 110217 - DNA, 685 bp, Aquilegia coerulea
  Intron number 1 from transcript AcoGoldSmith_v1.002084m (l ocus AcoGoldSmith_v1.002084m.g) derived from phytozome v7. 0 (chr-ID scaffold_2; pos 7257508 to 7258192)
gcttcttgcttttatttcacagatctcagattctggttagtttcattcattcttattcatattagttaagtttctttaaggctaattagattcgagttttgttcgatttgttactttgttgttttctttgaagatttgcttttagattcaatgttgaatgaaaatgttcttttcgatttgcgaagttttctgtagttttgagttgaaacttgagaaaacagttttatatctttaattagatttttctaagattgatttgattcactattgaccgacgtatgcgcgttttattgatagaaatggatttattttggataaatctcgttatattactttgagatcttgcaataaaacaagaaaatgctgaagatattttattttctgcaatcttatccagtttcaagaatagtttcttcaattatttagatttattggtaaagtgcatctcactatctgtaaaatatcttcctgagtattcctttataaagatttcttcaaatgaaaataaagagtatttatcttgtaagtatttatatttttatttgaattttaatatatttttagtattttttctttttttttttatcaagaaaattttgtgtagtataagagcagatgttagttatggtttttaatgaggtgtgtttctacagatatcgaggtctttctgcctggcataaaagat

SEQ ID NO: 110218 - DNA, 933 bp, Aquilegia coerulea
  Intron number 1 from transcript AcoGoldSmith_v1.024703m (l ocus AcoGoldSmith_v1.024703m.g) derived from phytozome v7. 0 (chr-ID scaffold_22; pos 2484594 to 2485526 reverse stra nd)
ttgtaacatagctgaactacaaaggaaggtggattcaaccaaagaaaggctccatgccgtcgcatctgattttgcaaggacattgaggtaatctccctgtaactcattttatacccccctcacaacacctcgacgtatcaaatttcatctcaaatgacttcataacaattcaagctgatggtaaagcgaacctccagttagatggtactgactttggaaagccttgcaagactatgcagaatataagcttctgggaatcaattgaaagctattgaataggtggggattggtttctactactggtagtccccagtatagttgccagttgccactgacaagttcgactcttcaatagacatagggaaaaactgcagggctttattttgtaatgaaattgtaacacaatattactgctcaagtcttgtatattaacttaggggtttgcgacaaaaacaatcaaacatttacaaagcagcacatatataatcacatatatataaagaaacagggaagaaattaatcaattccttttattatgattaatgactgaaatatcaatgtagattggcaaacagatagatgctctagtgctctacctagaagaaccaattagacattaaactagtcttcttccattgattggcctgaaactgtatcggattcatgcaaagcgcctggcctgaaattataatgcccaaatggccctcctggtacaatcgttgtctttattagttatatttattgggtgtgtacaacttatatttattgggtgtgtacaacttttagtttcggtattgatggctttggtctgcatgaaactatcacaaactttgaccttgttattggtagttaaagaagaagacgataagcttgtagtagtggttgttgatcttccatggcgagtaacaaaaaacctgaagaagaagcagaaca

SEQ ID NO: 110219 - DNA, 853 bp, Aquilegia coerulea
  Intron number 3 from transcript AcoGoldSmith_v1.017694m (l ocus AcoGoldSmith_v1.017694m.g) derived from phytozome v7. 0 (chr-ID scaffold_13; pos 6158427 to 6159279)
gattggattggagtattttcccctgcaaatttcaagtaataccctcgtcgccaatccttatttaagattttatttctcgctagtcaatttattctgacaacatgtatgagtatgatcatgtgttatgttgataagactttttaaatctggatgatcagtgaaccacacaagcaactaatgataattaatataatttgtaaagagtgaggaatcttgttgaccggaaggaaaccacacttaccagaataatattatggtgtgacaaaagacaatatcaattaatacctactagctatgatagtatgtctgctctgcacattgatgagccatggattgtttcactgaactagaaattgatacattaagcatgcaaattcatctttcgttcttgttagtgtgatagtggaagacagtgtttaatttttgtctaactgagagttgaacaaaatttccagtttactttcaaatatcaacttgttggcatataggtgttattcaaagtagaagtgtttagactttagacagaacacacaaacaattgtagctgtattggaactgctacagatttgcagcttaagaatgacaaacaaacatatacacattttctcggactgagtggggaaacgataaataacattacatgtttgtcttacaaataagtgatgctacaagcaaacaattgaagctgtagtactgttttattatatatatatccctactacattagttttcaaaacaattttcgtcctgaaaattgcttatgcactttcttttctagtattcttttgatggtaacatgaataaatttgatgtggcagttcgtcaaactgttcgccagaagctggcaatccga

SEQ ID NO: 110220 - DNA, 755 bp, Aquilegia coerulea
  Intron number 1 from transcript AcoGoldSmith_v1.027294m (l ocus AcoGoldSmith_v1.027294m.g) derived from phytozome v7. 0 (chr-ID scaffold_58; pos 362656 to 363410)
gaaatttgtccaaacaagtggaggtcttgctctgtcttaagttttttgtcttgctctcttttattttgatttttatcttatctgggatttttggcagaatctctgttgccctttggttgttattaatgttgtttgattttggtaatgccaccatcgacaagctaggaaagtatacttagatattttgtgatgggaaagcagtattaattacacatggagatcattgcatttgttatgaaatcacatctattgtttactgttcagaatgaaaaagaaaaaaaatgtcaattaaatatactagtgcaaaagagtaaaagatacatggggttttagtgttactaccatataaaattatacataactctgctttccattgtgttttaggcattttcacacattgtgtaccaaagcacattctatacgtagatagaggagtgccctagttgtgggtaacaggcaatatatccaaattttcattttcttttctcccattctactcgtaaatgagtattcggtgcaatatgtatgtttattggaaatctttatgccatcatgaattgtagttcaaattggaatctatgccttatcttgtatatgccatcatgaattgcagttcatattgcattgtttgctgtttcttcaatgatataaactgctctaacactacgtaagcgattatctaaattactctcaggaatgcaaatcattttattcttattttagggtcctgatttagttatccatcaaagcaagga

SEQ ID NO: 110221 - DNA, 907 bp, Aquilegia coerulea
  Intron number 1 from transcript AcoGoldSmith_v1.016835m (l ocus AcoGoldSmith_v1.016835m.g) derived from phytozome v7. 0 (chr-ID scaffold_2; pos 73505 to 74411 reverse strand)
tgcacaaatcacgactatccctacaccaagtaagtcacactgttctacttaatatcattttcttttcattctgttaatacaagaaaagagactaattcatctaaaagtgaaaataagatttggaatttagcacttccggttctcagtataccttaacggatcattaaaaggaatactaaacccaagacggtgtgattttcgaacagtaacaaccttattgtttttacatgttttcaaaattgtggttggcctctgttcttccattaggtatttgtccttgttaatccttgctactgattttggtgaatcaatgtttcctgaatgatgaaaccttatcctaaagacaaaattgctttcatgtggagatgaaatctccggctactaacaataccttgttctaattgcttttatgtatagtgatcacccaaacactatgtgtgtgagcttaagtccaagattcttaactttcttagaacatggcatcgtccaactaatgttttgtgtatcctcaagtcgaagaggttaagatgcacgccgtgtactacttcgagtagaactagagcaccgtattgaagctttttactaacataattttatctcccctggtttctaatgttttttctttggtgaaataattaagatatagcttataaaaaatttctgggcatagttcatacatttttaatggtctagcgtttatataaacagtagcgtttgagatttgaacaaaccttgaatggacttctgaatgttttctattgtttcacattaatctaaataaattccaaaaggaaaaaagtaataagcaatgtgactgatcaatctcttcatatcttccaacattgagtgtttttatctgtcaatgttgttctaccagtgggaaattatccaatttcacaagtacgag

SEQ ID NO: 110222 - DNA, 1014 bp, Aquilegia coerulea
  Intron number 1 from transcript AcoGoldSmith_v1.003269m (l ocus AcoGoldSmith_v1.003269m.g) derived from phytozome v7. 0 (chr-ID scaffold_56; pos 743877 to 744890 reverse strand )
tgttttcattatcttgaaaactcaattatttgtcggtaattcatagaattatgctggttttttaagaatttcattcatatttcacttgtaattcttaattcttattgttatttaatggatctattacgatcaaaatgcaaacatcgatctgttttgttgataactttctgcttacgtgaacatatataaagactggttataagttaatagcaacttgttatacatgttttttttatggttttggatcttaaacttgttaaaaatatgattttgatctttgggtatctttaattttgcttaattttgttatgaaaaagtgtcaatttgatcccctgttttaataagtatttcaaatggatttttgtttcttctggaaaatttgttttcttgattatgaattcatctagatcattgatgatgtttctttctatattgggttaatctggaatatccgaattatactgaactattgaagaaaagtatccctttttaagaaaaattcttttctttacaactcttttaactagtaaacttttttttcttgtttctttacgtgtttaatggtttatgtgaactctttctaagtttggggattcgttgttattgatttgtttgctgtttggctctctttggttgattgtgatatccatttgagtcagttatatagcaggttatttcgatcttttgcactttaactaaaccatgtgaaattgtttataatgatacctttggtcaatctcttgagtgtgattttgtttcctgtttccagaatgtattgtattaatcgccatttctaaaatgtgatcctatataatttcatattgaacatttcattcttaattggattacatgtttccatttggatggtgatttcaagtctttcgaactttgagcagcaccttctgtgatatctaaatgcaaccatcttgttgatttagtaatgttgtatgccttcactcctccatgaggtgaatctgacgacaatgctgtgttcttttgtattcagggttcaaa

SEQ ID NO: 110223 - DNA, 320 bp, Aquilegia coerulea
  Intron number 2 from transcript AcoGoldSmith_v1.019388m (l ocus AcoGoldSmith_v1.019388m.g) derived from phytozome v7. 0 (chr-ID scaffold_34; pos 489796 to 490115)
aagggaaagaaattgggaacaataccatagccctcgtatcttctcttggctcttgtaagttaaacctaaactctattttttttttttttttgatcttttaaatatctattgatgattttaaaccttggtcttgttcttttacaacgaaaacaaacaagaatcatataaattttgtgtttttcggtttatctgataccgatatatactgatatatcggtggttctctgatccctattatttattattccttttgttttgatttttgaatgaaggtgggtgaagtaggagagttatctgaaatctttcagtggaaaggagaa

SEQ ID NO: 110224 - DNA, 450 bp, Aquilegia coerulea
  Intron number 1 from transcript AcoGoldSmith_v1.016015m (l ocus AcoGoldSmith_v1.016015m.g) derived from phytozome v7. 0 (chr-ID scaffold_26; pos 893713 to 894162 reverse strand )
tcattattctcatcctagattgcccaacatcaaaggtatgcttaattagtataatttccaatgtgtagtattattattattcgcaacatatggagtatatttttcatcattaaagaaaattcaaaattgtacatacaaaggtttgtcatatcctcaattattttttgtcacttcttagttcttcttaccctcccagtacctttggttattcagaaagaaaactttgcttggttcatcactcatgaaagtgttgaatgttagtctttagtagacaactttttcaataaaaacaaaaatgctaccattgatggagggtgaagtagaagtcttctttcccctttttggtgtgtaaaaagatatttatttcattattttagctgttttatgctaaagtgcatgtatgtagacactactttgtttgttactaaacctctgttttattaactagga

SEQ ID NO: 110225 - DNA, 580 bp, Aquilegia coerulea
  Intron number 1 from transcript AcoGoldSmith_v1.020659m (l ocus AcoGoldSmith_v1.020659m.g) derived from phytozome v7. 0 (chr-ID scaffold_121; pos 249436 to 250015 reverse stran d)
ctgctttcgcctttcttgttaattggtaaatcattgcttaaaagtctttctttctttattttttattatgaataaataaaattgacacccccctcaaattagatatttcatctagatatgctaattaagtagattagatgaactaaagattttcatatatttttttttttcttatcattttacaccctttaatggtggtatcttgttattgagatataataggtaatgaaattaaatttcccaatcaaagatatggttgtaagacccgacccacccacgatcttaattaaatttgttttgcttgttaagattgtatttagtctgaatgtggtgttaaactttaatgtttattgtaaaggtggataacatgaaaatgataaatgttgcatcgagaccaaaatatgtaggtttaaacattgttctgattcctgtacagaataggtttatttgaacatgtttatttgaacaactattttgtagtgcatgccttgtcacttataattagaatgctgagatcctgtaaagatttgtaatgtgtcttctgggaaaaatcagttttctctttttcttgtagtgaaag

SEQ ID NO: 110226 - DNA, 333 bp, Aquilegia coerulea
  Intron number 1 from transcript AcoGoldSmith_v1.002396m (l ocus AcoGoldSmith_v1.002396m.g) derived from phytozome v7. 0 (chr-ID scaffold_16; pos 4756994 to 4757326 reverse stra nd)
tcatacttattcacccggtaagtctaagtatgtaactttgtttttctcttttgcagatctctgtgactgtgcactttcactttcacattcatttttcctccattccttattccctatctttattattctaatctaatctaataaattaataatggattcaatcaatcaattcttctctgttaatgttaataatagggaacactttgagttgttctttctctacacgatctctaattagttttctatactatatatatagttggcttgctggatgtaagggaatcatcaaatatattacttcttagtcagttgttttgttttgtagcagtttca

SEQ ID NO: 110227 - DNA, 962 bp, Aquilegia coerulea
  Intron number 2 from transcript AcoGoldSmith_v1.000005m (l ocus AcoGoldSmith_v1.000005m.g) derived from phytozome v7. 0 (chr-ID scaffold_7; pos 569615 to 570576 reverse strand)
atcactttattgaattgaagggagcacaggttaaggtatgttttttgtttgttctttcctaatgaatgaatgaatgagatactctagagtctagactttagaacactcactttctataagaatcacccacctaacaactaaaacattttgatggtctttggatttggaatatacatacagaaggttttcacaatagtcctagtttattgaccacttcaaaatgtcgtttattccttttcaaccaaatgccccacatgtctgcgaagggagcagaatttaatttccttttgaagaatggacttgtaaaaaccatgaaattaattactctatcactgaaccaaaaaagtttaacttacacttggggattttatcattttaccagaaaatttgaatagcttaatggtaattgcattttacataaaatgaatttatcctgccccttcttctttattgaagacaataatcacatggtagtgccacacaccacatgaagagggccatctttgggaatttaggaacccccaacttgttggctactaaaattagatgccgcagtatgtgattatagtgcaaaagaaaagtacacaatcaagagcagtatatttccttttcttgcttggtctcccgagaggaatattcaatctttttatgaggccatccaagagtactcattgtctacacatctctatcaaatgtaatgttatttgatgtcctgtgtggtatatttgtggagcgtaaagttgaattttaaacttcatttcagttaatctactgaaaaaccaaaagaaataaacaactaatgaagtgacttccaatgattaaaataatgatttaagagtataaaaggccaatgttgttgctgctttgtcaaagtatttcttaattgttcagcgaatcaccttttttccttattccatttttccgcagacggtttctttcttaacgtacttgttgaagagttt

SEQ ID NO: 110228 - DNA, 868 bp, Aquilegia coerulea
  Intron number 2 from transcript AcoGoldSmith_v1.024540m (l ocus AcoGoldSmith_v1.024540m.g) derived from phytozome v7. 0 (chr-ID scaffold_26; pos 985553 to 986420 reverse strand )
ctcaggaccttcttgtagagtgttgtgtaggtgagcatatcttattatctttcagcacataaatagcatagttataccttttatccttgtttatttatgccaagtgtggaagccttagtttcaaactcagattgatgtgagacacaaggtgctgacatcatgcggatgtccccatcaggcccaacaggtctcgttatattatttccttttagttccttgtccatcaagtttctttgctagactacaagaggttttgttagttaccatcattacaaggagtctgggtatctactaaaaataaattctttatggacacagattatagtataccaatttaaataattagaatcatggggcctggtggaatgaaattattatggacaaggattataaacaatctaataattagaatcatggggcctggtagggcgtcacgatggagtcagcaatctgcgtgtatcatcatatatacttgcggatgtgtttctttttccagtgacattgttcatggtaatttgagttggctttagcttattttgagtggaagataaagtctattggtgggaaaggtgatgagatattatggatgatggcattagtggttttataaaattatttaaatagattaactttgaaattctcaaatgtgatattttcttggagctttaggtgtctttggttttgatacactctccatgtagacccctattgactggtttaaaggtaataatttttgctgtttacacaaaggatgataatgcagtcctctcagcatgttttattttcttaagatagtgaactattagtgcttgggtactgaagaagttttaatgtgcagagtttatcaatctcgtgtcttcagaatcga

SEQ ID NO: 110229 - DNA, 661 bp, Aquilegia coerulea
  Intron number 1 from transcript AcoGoldSmith_v1.005498m (l ocus AcoGoldSmith_v1.005498m.g) derived from phytozome v7. 0 (chr-ID scaffold_34; pos 618650 to 619310 reverse strand )
attcaggtatatacataatacatatgctgttgtgttctacattctatggtataaatatgagtctaatcgtttgaaacctgaatacattatctaaatctggaattactacaaagcagaaatgaagatctttggtacttggtaagtcttatctgaattaaaggtacgtatatagatcgagatacaacaatggagtatcattaatgtaaaatgaagattgttggtagatgtcctatttgattgtgcgacccaataagatagtagtacactagtacttaatactgaccatgcttgccctaatcctgtccttgtgtttcacctgttttaccacacaaggactgtgagtgtcatttttatccagaactgtgtaaattagaatagaaaaattgctcccaattagagatgagcttgtctcttatgctattgttattggacccctgacgttgatattgataccacttcatgctcacaaaaaaattggtccccaagcaaatttgagtatatgtttgataaaaaaaaaaaataaaaaatccaggaattctatatcttgttgcagatatcataaaatgatcaagaaatgggagtttattctttaagaccatttgagccaatggtacacctttattctgacaattattgtgtgttaacagttaacttggttcaa

SEQ ID NO: 110230 - DNA, 766 bp, Aquilegia coerulea
  Intron number 3 from transcript AcoGoldSmith_v1.017386m (l ocus AcoGoldSmith_v1.017386m.g) derived from phytozome v7. 0 (chr-ID scaffold_2; pos 9216673 to 9217438)
ttatatattttaccgccaaaaattctagaccacgagtatgtttttctcttctattaagtataatagatataaacaatttctttggaagaacattgtacataataattcagtagataaatttatttagagaagtttaatttctttcttgagacttaattaagtttgattttagaatagattatgatatatatatatatatatataactaaatttttcaattttactatattaaaagctggcataggtcggcaccttcattaaaaaaaatccttcattaatagtatgttttttgtctgatgattttaaatattcatttaattaattgagcagatggtgatatctttggagattgtatgctaaacgataactaatagaaattttttgttaataattaataattaccgaccccagtatgattagagagttaagctaattgccaagccacctaaaaggtacgttttatatgttaaacatattgttaagacaagtagttagctattagaatattccactcttctaactagaatctaatttggttggaaaaccacctgaactatagtctaactactgcacttaaataatatagttatatagtaatacttaatttatttccgactttctgtgttggtgaaattcaaattgcatgctataaagctgtgaaaagatttaaaagtaattcagaatattggtcggatgtcaactaactgcactaccttactaatgcattgcagtagagtcgttttcctcggggatttgaattatagga

SEQ ID NO: 110231 - DNA, 835 bp, Aquilegia coerulea
  Intron number 1 from transcript AcoGoldSmith_v1.009640m (l ocus AcoGoldSmith_v1.009640m.g) derived from phytozome v7. 0 (chr-ID scaffold_58; pos 555200 to 556034 reverse strand )
taactaatacagaaccctaccctaatttggttcatgtaagtcttcttcttattatcaatcttataattaaatgtttatagattattgtcatattaatttgcacattttgatatctaccaagtgccaactaaaatttgattcaaaatggtgaattgaactaagtaagcatttttagtaaagagttttgggaataaactactagtaaaaaatgccagcccaggtgaggcaaggcgagctaaaaagaaagagtgcttcttagttatatgtactagaagttgtttgtatttgccttgtcattacattttgcatattcttgattagaagcataaatcactagttaccaagccactatttgggtgtgattcttggatggctcgtgtgtgtggatagactattggttttgactttgtgcgatactacacacttttggccggtttttgttttggagacatactagcagaaaagtaagcatcatatgaagaaatcacttattgagatatattacgttattatgttactacaacatgattatattagataactcttattgtaattatagtattttgaacataagttgtcgataaacttaacaattagggtcattgtagtaccagaagaatcaatggaaaaagaataaaatcattgcccgtccatgattgtttagaaatccatactactcacatttgcatattcttagtttatgtggacatgtatataatgttgagatttatatgaatggtgtgatagagtctaataccttttcttaactttttctgccaatgaaaaaaacaaaagaattgatttaatattgcttttttttcctacagtttggata

SEQ ID NO: 110232 - DNA, 899 bp, Aquilegia coerulea
  Intron number 1 from transcript AcoGoldSmith_v1.011814m (l ocus AcoGoldSmith_v1.011814m.g) derived from phytozome v7. 0 (chr-ID scaffold_2; pos 8577311 to 8578209 reverse stran d)
caggactggatcttcttgatataattctctccagagtgagtttcgtttcctattgatgattttttttatttattttttttttttacgagtttaagagaattatctccagaattttttgctagccatgaatatttcatgaacctataatttgcacaccttgattaattgtttgattggtcttgatggaaaagctggattttcaaatttgaaaatctggcttattgatggaagaatacttgtacaaaacactttgtgtttgagatcttttgctcggttatgaaacggttgtaattgtttgtttagattcattgctagttgataaatggtttaattgatcgagaagttttgtcgagagtcagtttatttgtgttgattgcgaatattgttggactacgctagttgtttgatgaaactattgctcgtatatgaatttatagtttattgaggttttaattggaaaggataagcattcatgtttgtacttcatctttgtttgggtgttacatgctaggggggtctttgatttgtggatcttgatttctgaagaagaaatggttcagggcagatttgcaaattgcaatctatctcaaagttagcaatcatcttctgctcataacctcttgtcaatttcacatgtctttattgggaatatggattgaaagttatctgatcaacttttctgataaaaatttagattgctaatagtgaaattcatgctgggtgattgttaagagttgttatttatcggaggaaccagtttagactaattttgaaatcagagtatgaagattcggattggtgtttacaattaatttcctgctagttggtatactccaattctaactgtttgtttgctttaaatagggtggatacgatacagaaaactccaacaaccactt

SEQ ID NO: 110233 - DNA, 1025 bp, Aquilegia coerulea
  Intron number 1 from transcript AcoGoldSmith_v1.009114m (l ocus AcoGoldSmith_v1.009092m.g) derived from phytozome v7. 0 (chr-ID scaffold_19; pos 2307492 to 2308516)
ctctctatttttgttctcgcaatcttcttcagcaggtgagtgtgttataagtgaatttttcgataatttgtgttaaaggggtttaagaatttctaatttcatggcaatttgagctgcttcaacttgaaatctacctttcccaaggttgatttcatgacttttatcataattgaagcattagggagtttgaatttttatttgtgttcacttccagttatttgtgattttgatttccatttttttgttattttttaaagctttttgaaatatcaagtgagaagagcttgtttagatcttattcagtgtggttttaagactaattttgttggatatgttgtttaaatagataaatttgtattcataatttggagttggttgcaaggaagacatattgtgacaatgtaatacaaataaaagaatacatttgtcgcgcagaggttcatatattaatattatcttgttatatatgttttagccccttcataattgtcgagactaatacaaatgaaagagaattaaaatactgctcccctgaagtttgaatctcatccaataagaaaatcattctttaatgtatagataatatatgcagaaatccagtgtgattcctaatcaaaaatacttttttggggataatgtaggttggtgttaggatatctttcatgcattgagtgggtgacaatgcaatgtccttttaattgtcccgcttacttttctacattgtttaattctctcactttgttttcaaacttagttcttctatttgcgacttccttaaaatgatatttttggacaagtttttatttcaatttataatgagttagattctaggtttgccaaattgagtatgttcatcgacctacgttaggaggtccatttagagtcaggtgtttcttaaactcatgtctgtccgtctccttttgttttaatttttttcgtatctttctcttcctctctctctctctctctctctctctctctctctctcagtcacaaagaagtgaaacttacggagaaaaagaaga

SEQ ID NO: 110234 - DNA, 447 bp, Aquilegia coerulea
  Intron number 1 from transcript AcoGoldSmith_v1.010193m (l ocus AcoGoldSmith_v1.008142m.g) derived from phytozome v7. 0 (chr-ID scaffold_25; pos 2821925 to 2822371 reverse stra nd)
ccgattctaaggtcgatcgaaatctcagttacactgtactttttgtctaatctatcacctttcttccttccttcttatgttttcatcatttcttatcaaatctccttttcaaatcttaattttcttgagtttttcttagattgatttctctaactagtcattttaagaaacatttgagtttgtttttgttgaatttagattctaaaaaaaagaaaaaaaaaggtgaattagtttacctgtttagattcaatcttcttttacatatagtgatatagaagaaactcttaacgtttggtgaattgttgttttgattattatttacagtttttctttttgatttatttatttaaaagaggatattcttttagatttaaaaaagaaaagagaaaaagaaagattttaattatttaattatttttttgggaagtgcagaaagaaggagaaaac

SEQ ID NO: 110235 - DNA, 1030 bp, Aquilegia coerulea
  Intron number 1 from transcript AcoGoldSmith_v1.006581m (l ocus AcoGoldSmith_v1.006581m.g) derived from phytozome v7. 0 (chr-ID scaffold_2; pos 9838696 to 9839725 reverse stran d)
tctctgtcgtcgataaatcattatctccatcaaacgtaagcttaattttgatctcttaaacttgttaaaatttcaattggtgttttttagtgcttaattttagctagattatgtcatttcatttgtagattttttttcgtattattctatttgcatcgaattactttagaactacgaatcctgttgttgttatttctttttttcttctataaaaagtgactttaattgattttattttgaagttgagttctattctcaagcaatattgaaattattgagaaatttgttctgcaaaggtgtaaaaaagaaatgaggttaacaaaaatggtagcttagttgatttgaagaatgcactcaactaagcatcggcattcgttgtactgtactcataatctctcggatagtcgtcaaaaccctcaatataaattgtgtagggttaaattattatatcattttaaatcttggattatttcatggatcgatacgtaccaaatgaacttcggtgtgagtgtgtatatatcttatgtttgacagtttatggaaaattttccaatgggaatgggcaagaagcttatcatacaaaacaatctgatcaatggtttgcagttacggagtttaaagtaacacataagaatcaattttatgttggactgtaatgcaggtattacatgggtttgcttccttttggggaaagctccttcaatatgggttggcatagggaatcctattattgaaattatgacatatttttaccaagttatgtaagttgattttgttaggaattgcttgagggtgtaataaaattgataacttgatggaaaatttatactcttaactatgtaaaagtaaatgtggcctgggtaacaagatgctcgattcaataagctacccaccatatcatagtttaccaaaaaccgtgatgacaaatgaagtagctttaatattactgtcaaaattctgttatcgttgaactgactttttgttttttgggttaattgttctctgtgttcgttcagagtggtacttggca

SEQ ID NO: 110236 - DNA, 867 bp, Aquilegia coerulea
  Intron number 3 from transcript AcoGoldSmith_v1.001513m (l ocus AcoGoldSmith_v1.001513m.g) derived from phytozome v7. 0 (chr-ID scaffold_58; pos 211577 to 212443 reverse strand )
gagtattgcccccggtacacatatcttattcccttactttttggtagtacgatttattgatttggttttgatgactcaccagctcctcttcatagtatccacaagagtacatttttccttgctaaggaaaaaaaaaacaaatcacagaagcaggccattggacactatcacatgggtcaatgaatctatgagtaatattataccaccaaaaagcctcaacattagttcacacacaagattacaagatgagttctttccataaagtcatcataactaatgcatctcctttgaggctgaaaagactcaaagagaccggatttcacaccatgttcattatccttcatgtgatgtgctcggtggtagctgtcctttcaaatattcttgaggtcctttcaaaccaaacgtttcaacaaatcccatacaaaaaatgaattaggctacaaagtaaaaaagaagagaaaagaacaaagaaaaggaaagtagaagtcagtcctgaaatgggagctgtgaaggcccaaaagtctgaatatgaagaagtatagggcactataattgatatggggcattgccattccctaaacaattgacagctactgatttgctaattgataagcatagggcttgaggcttataaactgaaaatgtataattgggccaatgccatttaaaggacttatctcatcagcagactgatgttgtgaactcctactggatgtctaggtgatgtttatttaggataattcaaatttgcataatatgggtctatcacttatacacttgatgcacttcaaaactattaaattgctaacatgctaactatgcttttctgttttaactgaaggactttacgccaagttttcgagtcat

SEQ ID NO: 110237 - DNA, 380 bp, Aquilegia coerulea
  Intron number 1 from transcript AcoGoldSmith_v1.011613m (l ocus AcoGoldSmith_v1.011613m.g) derived from phytozome v7. 0 (chr-ID scaffold_2; pos 2698899 to 2699278)
ttcttccaggtaaacaaattactgtagtctcccttcatccccaaattagttttctttgcaattcttcctgcttgaattaaaattgtcaaaaatatttgtaattggacccctttttttttgtatataaattggggctttaaagatttgcattttgcttgcagttgcttgtcatcaatatagcaaaagaattttgattatagaaaaagttcagatttttatgatagaagaaggtgttgaattggttgttcaatataacaaccaatctcagtgcttaattggtccatctgtgtgtaatgagcagaaacattgcatctttttgtgtaaatgtggtgcttgtgtttgacactttgtttgtatcactatttcaggcagagggatca

SEQ ID NO: 110238 - DNA, 927 bp, Aquilegia coerulea
  Intron number 1 from transcript AcoGoldSmith_v1.025510m (l ocus AcoGoldSmith_v1.025510m.g) derived from phytozome v7. 0 (chr-ID scaffold_26; pos 229149 to 230075)
gaacgtacgtacgtagttaaggcgtacgtacgtcctcactgtgtttgctgcatatgggcctgtttaagcccattttcgtgtttgattgtaaggctatgttataaagccaattagaagttggaaaattgttggattttttgtgacggatggaagtttttctttcaagaacgtacgtacgtagttagggcgtacgtacgtcctgtatgacagataactttctcgagatggaacgtacgtacgtagttaaggcgtacgtacgtcctcactgtgtttgctgcatatgggcctgtttaagcccattttcgtgtttgattgtaaggctatgttataaagccaattagaagttggaaaacctaatcttgatgtgagagagattgtgagaagccattggcaagtttgagagaacttttgtgaggaagaacactttggtttcttcgtgagggcttgtataatcgtctccatccaagagagagagagtttgtatcctcaatttgtgattgtctctttgagagatttggtgaggatttgagaagggaggaaacctagggtttctccatttgtttgagagctttgtactatcttctccaatagtaaaagttctatttgtttgtccgtggacgtaggcattaattaatttatcatagttttgatcaattttccatgtgtccaatttttttagcctgatgcattatgttctatcggctttgtcatctttcatacactatttcaatcttgggtattggtgcataagtttccgctgcgcacaacagccttgacactagcacaccactcacatctttctagcataggcacctttgcaaggtacaacaatataatgagaataatgaaattacgattctgagtgacaatttctatcttgcgtttattttaggcagaaaagccaccaaattccttccccaaaaagaa

SEQ ID NO: 110239 - DNA, 871 bp, Aquilegia coerulea
  Intron number 1 from transcript AcoGoldSmith_v1.026606m (l ocus AcoGoldSmith_v1.026606m.g) derived from phytozome v7. 0 (chr-ID scaffold_32; pos 2696120 to 2696990 reverse stra nd)
ttcatatctcagacaaaggttctgcatccattcaggtaaactctaatttaaatcccattgcattatgtaatttttttttattttttttatcaatttcttgttatggtcttgttttattgcttcttctgaaatatgttcagtgtcatcacctaaagaactggtgacagtctgcttatttacaactcaacactcaaatgaataaaaaacttagctccaaaactagtcaatattaatctggtttgccgcaccttttacatttggtttaaagcacatatcacacttaagaaaatctgtgttagtcattagatacaattacaagatgggactacaaagagtcatcagacctacttttatttctcatttttatcatgtatagaacacctttcatgtctggcattttataccgcctgctgttgaagtcctgtatgcatgatgcgtcaagaaaccatatggcctttaaagttgtagttttttttattcagtacaacttattcatttttattatagtaaaaaaggacagatctgtttcaaagaaagactcacaccgagctacatgcttgctaatttatttcaagagttatttggtggtttggtgcggtgaaccaattagttagggcaagacatgaaagacgatgattttttttttttttcttggtgatatgtttactatggaatgaaaccacttcatctgaagagataatttgtggatgtcctgatcttgcctttcctttgtaggtcataaatccttttccctattaatccctggcaattttgtgatctgtccccgtctgtgttcatctttatgtaaatattttccttgttagcaatgaacggaaattgatgattgttgcttctaggtaaggtcgaaggc

SEQ ID NO: 110240 - DNA, 753 bp, Aquilegia coerulea
  Intron number 1 from transcript AcoGoldSmith_v1.017742m (l ocus AcoGoldSmith_v1.017742m.g) derived from phytozome v7. 0 (chr-ID scaffold_32; pos 1322238 to 1322990 reverse stra nd)
aatcttttggtgagtctaaccaattcaactgttaatataccgtcatgtttcaatttagtgttgaaatcactttcctaatgaacttgtttagtttggatattcacccaacaactttaactgttattaaaatttctattatgttgtaaattaaatgactgaattctgcatctttatttccttgccattatctgaagaataaatcgtggtagaatttttgctgtcaaaacatgaatctgaagcactaaaagaggttgacagccaatctacctctgatagcttataagctattagaaaactcaaatgtatgtttgtttttacttctaggtatggtcttataagcttttctaaggatctttttcaagttgtttgtgtatggtttcctaatccacacagtactaatggtttgaacttgtgatatatacctaggctacgagggattgaagatactaccctgtgtacattatttccaacttagtaattttcttatatgtaaaaacattacacaatttatattttgttattttaagctgtggttgtttcttgcaaatagtagccgtagtgccacccatattcaaaaaattacaatgtcaatttcctagtctagattgaataatctgattatttgacataatttatttataacaatgacaatttgatcatgactaacattattgtttgtgttctttaactaaaagaattatattatctcttataacagaactggcgttgaaaatagcgaaaaagtacccttat

SEQ ID NO: 110241 - DNA, 767 bp, Aquilegia coerulea
  Intron number 1 from transcript AcoGoldSmith_v1.009676m (l ocus AcoGoldSmith_v1.009676m.g) derived from phytozome v7. 0 (chr-ID scaffold_2; pos 8852875 to 8853641)
gcggtaccattcagcgaaaggaggtaagaattgtttcttcttttaagtgatttatatgcaaaatggttttattatttttttcctgcaaattaggcatttggcattgcttagattttattggtgtaatcattttaaatttcacatgtaaattattaagtgcgaaaaaatctacacttgttgtatattgtaatacatgttttgaagtctcaaggaaatgcagattaagattaggcaaagttttggaaaatagtaatatataacataagtgccctttttgtattggtgttaaagggtagctcgatcatacttaagaagacaatggaattaagacattatctcttcaatgaagttgaataaattattgtctgctttggctaatgttaagtagagaatttcctcgcaaaagccaaggtcgcctatatttaccgcaaaatattgtggagaaaaaaatgatatactacattctacaacgatggtttaaacctcttagaactgtaaagatatgcctaacttttgattttcgttacatttctttatgttacatgtttgaagctgtaactttagagtttaagtgtgtagtatgcagacttaaggacaattcttgttttcggaaggggtcctttgaatttactttggaagtctaggatttgtatttgtgcttttgataattttttcttagcttcttagctttacttacatttttaaggttgatttttgatggcatttcttgggtcaattgcagtctgtcgaggaaaagatcgttcgtc

SEQ ID NO: 110242 - DNA, 338 bp, Aquilegia coerulea
  Intron number 1 from transcript AcoGoldSmith_v1.011146m (l ocus AcoGoldSmith_v1.011146m.g) derived from phytozome v7. 0 (chr-ID scaffold_8; pos 405231 to 405568)
gaaagccacacgtttctctaacaactcaactctcggtaagttctctctctcttttttcttcttctttcaattaaatcaattattaagcaatcaagatgtgagattcagagtttatttttctagggtttctgtacaattttatcaacaaattagtgctttttatattccttttattgattcgaatttggctaaagtttggatttctagaaaaagatttacctttttttttttaattattattgatgattgtcttcccttttgatgtttctgatgtttttttcattatttgattatgttcttcagtgaataaagtttcaatcttgcgcgtgtcccagtga

SEQ ID NO: 110243 - DNA, 930 bp, Aquilegia coerulea
  Intron number 2 from transcript AcoGoldSmith_v1.011146m (l ocus AcoGoldSmith_v1.011146m.g) derived from phytozome v7. 0 (chr-ID scaffold_8; pos 406251 to 407180)
ctggctcctgatcaatctgggtaagcttgtaatgatgatcctgttcttttgtatcattttgttaatacagcatgtagtttttgctgggaattcaaatgtgtttatacaagaaaacaatgccacttttgtgacagataacctttatggcgaacggtcttgattttggatctctaaatcactgctttcgtaaatattttaaaggataatgttctgtttgttaatattacatatttatgcacactttatgtttcacaattcaccatgttgatacttgaatacttgatagtgttaagtttgccgaagagcctcgtctagtgcgattggtccttgagtgaatatctgaaaccatccaagtttggtgccttttctttacgtcatggaaaacatctttttgttcttatatgttccatccttttcagaagttgtccatagattagttaaaaggttcacagttgcacacttgctttaggattaggaattaggattacttataggtctggtcattgatgttgcatgacaatatgacgtaatatctccttatggttggaagttggatacatattgtccgaggtttatgaagctggattatagattctgctaatcaattactctatgactctcaaaggcttgtgcgtaaggcttcttgagcagatcttacaataaacctgaaaccatcgaagttgggtgcctgtacttctggacatagaaaacactttttattttttgtatgttccatccagttaagaagctgtgcatagatcagtcttaaagattcacggttgcacacttattgtctttttagaattgggatataggatttgttgaaaataggtctggtcattggtgttccatgacatatttctttgttgtttgatgttcgataaaattttggcagggctctgtgaagctggattaaagattctggtattc

SEQ ID NO: 110244 - DNA, 873 bp, Aquilegia coerulea
  Intron number 1 from transcript AcoGoldSmith_v1.018749m (l ocus AcoGoldSmith_v1.018749m.g) derived from phytozome v7. 0 (chr-ID scaffold_3; pos 5483903 to 5484775)
attgttttgttagggtgcgttcacttccatgctttccatttttttatttttttccatatagaattatacttgataagagtagttattcagagagggtaccctcacaccataaatgtttttgatctttgaaaacttttattaggggcatatttggaattagaaaagtagaggattaatattaagactatgcgtcatactcattagtttcatttttcaccattgtttgataattgtgttaagtttacagaagtgtttttggatttgggtttgataatttgttcataaagaaggaaggattagtgaattctcttccaaaatgtcaaaaaccttagttaactaaatattttgtaatttgatgtggatagtacttagtagtgagttgacatgaatagatcgaactcggattatctaagttaattatctaaatataagaacccataattcctaactagatattagttgaatttgaaattaattagctctttagaataaaatttttgaatttgattgttcaaatcttccaatcatttttttcaaagatattctcactatctagttttgttatgctttaggttagaaaccaaaatcaatttttagtcgaaattgattgctgtaaaatggtagtaaaatatttagatcatatatttattattcaatctccatgattttgaagagaaaatagtatacaggggatgaagaagttctctcccctcaattaattctctttcatttttactaatatgcccttaaagaaaaacttttctagtcaaaagtattaaataactttgagatatggatcacacatctaataataacgacctttctaactgaggtggttatgtgcagtactaaatatatgtttcttacgtaggg

SEQ ID NO: 110245 - DNA, 996 bp, Aquilegia coerulea
  Intron number 1 from transcript AcoGoldSmith_v1.018532m (l ocus AcoGoldSmith_v1.018532m.g) derived from phytozome v7. 0 (chr-ID scaffold_39; pos 1970921 to 1971916)
atatcatctatacgtgcaaaactactgaatccagtgggtgcaggccaggactcccatgacataatatttatatcatacgacaatatgtccttcgtatattttcctcctataaggatttaccacaacaatatatatgcaacaccattaaaaccatttttttttttttttttgtttaatacccggcagaggtgcaggtaatggtgagcaagtttctgcgactggataaacttcagcccatggtttttcttcattacctccaaatacataaatcattccattcacagcaattgacaaagttagactcaagactggcgtaccggaccaagcacatgactgtcacattttaaatctatttgttaatttagtttgggagggataacggttgttgactgctgtaatagcattgccagagcacagatcccagactctgcagggtacgcctggttgaggtgccatccagacgatgccagtgtcctgtggtgcgcatccctgtggctgttttagccagttgatagttataaggttaactactcgatccacacttacttcttagggtggcctgctggtttcctaaagtttgccttcctagattgctttggtacggaattgtttcatacaaaaaacctaaccctaaaggttgctgggaaatggctataatcttgtgggctattgggccttaatttgaaagcccaaattttacaaaagcccattcaacaaaaagcccaatacaaaaagccctatacaacttttgagtccttttaggactccaccttggttgccgccaccttgctcacaccgtttacctctctatatatatatttcaattatttgcagagaaaaggaagcaagacaagacaagcagaactgcagaagaagaaagaagcttagaagaagaagaagaagaagaaagaagaaagaagaaagttaattgtgaagatgatgaacatgcaactacaaccagttggacttggattaccactgggttatcaatttcgt

SEQ ID NO: 110246 - DNA, 644 bp, Aquilegia coerulea
  Intron number 1 from transcript AcoGoldSmith_v1.022504m (l ocus AcoGoldSmith_v1.022504m.g) derived from phytozome v7. 0 (chr-ID scaffold_25; pos 1775892 to 1776535 reverse stra nd)
attgtgagctaccgaggtacgtacattgcctcttctctctttagtgtttgtttgctttctaaatctgcatgttatgaattacatcatttacatgtaagttaatatcactttgatctttaggtcaaaataatggaaaactttaatgtgaaggcaatactttgaattactgtatttgttgaatttaattgaatgttggataataagaatatgacaatatcttttatactgaagttgggaaaccttttttgcgctctgacattacgagcttagagatcaaaatcatctgcttctgggctgcagaggttgaaacccatgcttcctcgtaggtagtcttggatacccaccacgatctcatagaggtgttttaaagtggtgaaaccaagtggaatattcctttcgaatgatagaactagctgaactggacggtctaccttagttgaattggctaaaattgttaaagattttgccaaaatatttccaacatgatgaccatatatcattactgagttatttcagtatactaattaaacaacagtaaatgcagccaatatatagtaatagaaaatgactaaaaaaatgtttttgtgatttcttttctgccctgattcttctcttacttttagatcatgtacaatgcaggttta

SEQ ID NO: 110247 - DNA, 568 bp, Aquilegia coerulea
  Intron number 1 from transcript AcoGoldSmith_v1.017437m (l ocus AcoGoldSmith_v1.017437m.g) derived from phytozome v7. 0 (chr-ID scaffold_2; pos 7705132 to 7705699)
ggttggacagagtttgctgtcacttctcaacataggtatgtcatataaccaagtgttttgatgaatgtataattgtttgctcgttgcattcgatttatatctatgcatgtgggtgtgtaagctagctgaaaaaaaacacttgaactaaccaaaccaattttgtcaaaaccatctatgtaaagatacgaagaatgagtactgctgtactggtgtctggatgagaatgatggtgaaaatgcttgtagaagataaagttcaaaacttcaaatagttgtataagatccattacagggggaatgaaaagtgccttcaaaatgttactgaacttttctgttagctaggtcagatctaaattaacatgtaggtgaaaagacttgctggtgcctggtaaggagttgctagttgggatgtcaggggcattatagcaccatgagcacaagaaaaacattagtaataaatgcgagttgcaatttatcatatcgaccggcacttaatatttaataatacatgtattcaaatataatattttatcgtctactgataagatcatgaccaggaggagggattt

SEQ ID NO: 110248 - DNA, 529 bp, Aquilegia coerulea
  Intron number 3 from transcript AcoGoldSmith_v1.000329m (l ocus AcoGoldSmith_v1.000329m.g) derived from phytozome v7. 0 (chr-ID scaffold_56; pos 1194800 to 1195328 reverse stra nd)
tggtgtcgaggattactgctttaacggggcttctggtagatttattcttccttctgatccatgtttggaactaatatttgtctctttgacaatgccatcgtcttgcccaatgtaaataagatattgaactgttaagtgcttaaataatattttatgtgtttgtatacttgcaactcgcaagtgatttctgctggtaatctatattcatttgctttgtttatgtaacttctcaatatttagaaatatgagaaaaaaaattgaatgtgtgttctgtttatttcaaatcatgacaaaatttgcatttatctccactaatattatattcctgaaagcactgtttatgaagtaatattagatagttttttttgataaaagattggtcaaagttgagtattcagttaaatttcattgaaatagaaatatttcgttctataaataattgaatatgtatttttaatcaggatgacgtttctgtatgtttggtaacaaatattcgaatttaaaagttatgtttctgtgcagattcgga

SEQ ID NO: 110249 - DNA, 632 bp, Aquilegia coerulea
  Intron number 1 from transcript AcoGoldSmith_v1.009854m (l ocus AcoGoldSmith_v1.009854m.g) derived from phytozome v7. 0 (chr-ID scaffold_7; pos 630546 to 631177 reverse strand)
tttaagattacaacattagtgagttcttctgattcgatttttaatttcttgtttagtaatgtttatgtaaattagattctcttccttgattcggttattgaaatggatgatgttgtagtttaattttttgattattaggtttagttcaaacgagaagaagttgaattttaaagttttttttttcttcatgtacacaagctatgaagaagagaaacatgttaataagaagcttagataagttaattagcttaagtagttattcaaggagaaattaggttttaactattcaatgtgtttaattcagttgtgattaactatatatgcttttaaggagaagaggttttaagtgaaatgagagagagttttgttagaaatgttttttataagttataacaacaatgtagcattattggttcatttgtgttatgtcttttcgactattcattttgtggtttcatctgatttttcttttatgaatttgataatttatgtgctaatcagttgaaatacgagtcttcatatattaacaagactccgctttaagtcaagttgttttgaattcttactatccatctcacattgtacttaaactttcagttacagtcaagcttgcttcttgaacttaccaagtg

SEQ ID NO: 110250 - DNA, 706 bp, Aquilegia coerulea
  Intron number 2 from transcript AcoGoldSmith_v1.002470m (l ocus AcoGoldSmith_v1.002470m.g) derived from phytozome v7. 0 (chr-ID scaffold_3; pos 9242016 to 9242721)
tttctatacaaccttatcatacccattataaatcagtgagaccttatatatccttctatattgacatacagatatatataacaaaaatacggctttttcttgtaggagaacaatgagtaatatatatgcttttttggggttcttcttttcaatattgctttacatgaagctaagcaaagataaaacaagatgtcatagcatttttccatagttgtccatagattcatagctatatatgttgcctaagttggtgtgtatgatatataacttatagatttgcttttaccttgagatcataatgcatattgcatatggatatatcaggatatattaacatagcatcacgaccttcttagttcttctgtaagaagaaaatcattcaaaagaagtttttagcttaaattattttgatttaaataatgatttaattttttttttttttatatatatatatatatatatataaaatgatcttgttaaagttcattgtggattggcttcaactttgtctgtgatgaccatgattacccttcacatgtccctgcacttgctttcacagtccgtacctgcaagtacactaggggtgtttttgtcaacttactgtgtttcaccctaaagcaagcagatacaaatacaattatgcaaagcagagtttgtttgtcatcttatcttcaacaaaactttctaatttcacatttattcaggt

SEQ ID NO: 110251 - DNA, 550 bp, Aquilegia coerulea
  Intron number 4 from transcript AcoGoldSmith_v1.022663m (l ocus AcoGoldSmith_v1.022663m.g) derived from phytozome v7. 0 (chr-ID scaffold_2; pos 1469102 to 1469651 reverse stran d)
ttcccacacttcaaaggcttgacagattctatcatgtatgtggaattgatattggtaacacaacttttgtagaacttttaactttgtcctcaatattgcctcactggtcaagaaaaaagaagaggtagaatatagttgcctagttctgattgcccgaagatttgtggacaaagtttaaagtgaaagctctgcaattgtttggtttttgagggctttgttgtgttttggagtgggtttcctgttttgctactacacttggcaagaataataggcaattgtgattgatttccccactctgctgattactcaaaggcagaatttttttttttttttttttggtaagcaagtggggttgtttcagaggtcccctaccctgtttcataataaaaaggcagaatatttatcgtactctaatgcataagtaaatacttcaaagtgttatcgaacacatattttgcacaaagatattttttcagtgagccaagttatgcatgtttcagaatcttcacaactaagtttctatgtgttaactatttttatgtgcagggta

SEQ ID NO: 110252 - DNA, 858 bp, Aquilegia coerulea
  Intron number 3 from transcript AcoGoldSmith_v1.019702m (l ocus AcoGoldSmith_v1.019702m.g) derived from phytozome v7. 0 (chr-ID scaffold_7; pos 2241925 to 2242782 reverse stran d)
ttattggttttgtcacacaggtaaatgctaacatgaatattactacgtaatgcaaatgtgtaaaaagtaattttgaggccataatacaccatcaaaccacatatgttacatgcaattttagagtaattttgagaaccatgatacatatatcattacattgaacgaaaattaataaactagagagaattaaggacatcaaaactaattttctttccagcttaggtggcttcttaaaattttatgtccacatctactaattttttgcataattccgggtagtcaaaatgcactaataataaaaattaggggacctcttcctaacaagatgttgtggcgaatggacatagtaaaataaacttggggacccggtcacccggcctcttccggagtgcatcaacaatgcaaaaagtgaaaggaatagggggctccatcaatttagatgaattgccaaacatttgcgagcaaaccaccaaaatatacgccagcttgatatatattagaaattaaattgtaaaataaccaatccattatatatttggagtttggacaagcagccatatattatggcagttcatgacactaccatatcagtttataaacttgtttaattatgttttttggttggcctaaaatatccaagccatggtgacttcttaaaatctcgtgtgtgctcacatctatttacactcctgcaccaggtaatactttgacaagctgttgttataaggatgagacccatgagttctttacgaggctgggcacgatcttgaacatattatcgttgaagttcttacgtttttatttctctcaataatggaaatttatggagtacggcttttgtaggctgcagttattgaa

SEQ ID NO: 110253 - DNA, 898 bp, Aquilegia coerulea
  Intron number 1 from transcript AcoGoldSmith_v1.025241m (l ocus AcoGoldSmith_v1.025241m.g) derived from phytozome v7. 0 (chr-ID scaffold_39; pos 277169 to 278066)
taattgaagcaaggtaaaccttatttgatgaaaatgataaccggtcggataatgtttttaaaaggcagaattactttaaattttttttgaacaaatgggggttttaatgtatgatcttacaattcaaaagatggcttaggaaagagagaacaattagatggatatattaatagctttatattttcgcaacaaaaatccatcttctctttcaataatttctctgtttggtattcatgttgttgaaatattcatattatttttgttatttttggtttttatttgctaacattcaaaaacccaaatatctttattttttatgagtttactttttgaattgattaccactgttgatgtttttttaacatttggtgtagttaatttaccaatttacctctctctcctctttctctctccaatttaattaatcttctcttcctctatcctctttctctctccaattaattaataagattaataacgtacagtttttattaacattgaaatttgtgacaatataaaataaaaacaaaactaagtgtgtggttataaaaagggttctatcaaatggtagatggaggtaggttccttcaaagtatttttctcgtagacatcgtggtttaaaattttgttatatttcccgaaattttgactatatataccgatatttgagaatttggaattatgaatatccacgaaagtttgtaaaattcggcttgcaaattaatttccagtgtcggaacctcggcatatgccgttattttaagaattaaaatttcgctctcgaaattgaaattttaaattatagtagacattactagacattatcatgttgcaatctatataacttaagtttatatttaacaaaccactgttttattgcgtatttgtagttcatctg

SEQ ID NO: 110254 - DNA, 645 bp, Aquilegia coerulea
  Intron number 1 from transcript AcoGoldSmith_v1.016561m (l ocus AcoGoldSmith_v1.016561m.g) derived from phytozome v7. 0 (chr-ID scaffold_7; pos 3496608 to 3497252 reverse stran d)
agtacgggcccattaagtgtttggtctctatccatgtctgatgagtgatgaggcacatttcaattgatagagtaaacatttttaccattttaggtatgaatgaagaaaccatagagcctaaaatgtagctatgacaattttttgttactaactaaatttgaagtttcatactgtattatcaaagttgctcatgccccttttttttttttattggcattccataatccataccatcatacaaggatcacatttatgcaaaaagtggaaaattcagaatgtgaaaagaacaaaggtgaacagctaataatgttattggtactcacaactttttgggtatagtcaaggttttttttttttttttttttttgggtaaagggtatagtaaaggttgaataatgacactccatattcccaaacgacatctttttttctctctttaaatagttgtgtttagaagctcagtttttgctagtaagctagagctttattttaagagtttttaattagtaaactagagttgcatgaataggtatggatgtgataataagagaaatttttaacatacaattagttacaagtggggagagaaaatgggaggatctcaacacagattgcctagttaatatttttgagagagtaggactg

SEQ ID NO: 110255 - DNA, 771 bp, Aquilegia coerulea
  Intron number 3 from transcript AcoGoldSmith_v1.021480m (l ocus AcoGoldSmith_v1.021480m.g) derived from phytozome v7. 0 (chr-ID scaffold_2; pos 4595464 to 4596234 reverse stran d)
ctatatctcagtccaaatttctcggttcctatctcgtgattattcattaatccttttcattcagtcattaataatattttcttatgtatgaattatgatcgtcagatatcttatggttatgatctttacaatagttactatggtatacattatgttctagtgggtgtggtctttgcaaaaacttatgatcatgctctatgaaataatcacttgatagataaaggaagtgaaagatcattgcgatttaaaattatgattgtgaaggtgctttgaatctagaataagactgatatgttgatacacgtaaacagtaatttcaaattacgatttttggaagacactttgtgttagtttgcaaaacctatgagctcattcatgatttgttaaccacttctcagcatattcatcatgtgttgttgaacttcacctgtgacctgaccattgataattagttaagtggacacgaaaccattgataattgttctataatatatgttgtgtggtgggaatagcaatgtataccagcatataagaaaagatcaatgctaccaaatgcataccactgaactgctactagttttattttgatttgctatttagatttccttttcgctcgaatctaataaattagctgagaagtcatgctacttagctatgtttagactttctcaactttctcctgcaagtttttttagttggattcgtggttatgcatgcattgcttggtttgatgcaggcaggctgtaagagatatatttcttccctactttg

SEQ ID NO: 110256 - DNA, 929 bp, Aquilegia coerulea
  Intron number 1 from transcript AcoGoldSmith_v1.003979m (l ocus AcoGoldSmith_v1.003979m.g) derived from phytozome v7. 0 (chr-ID scaffold_68; pos 261505 to 262433)
ttccaaagaccaacttgtcacagctgtttttgcaggttttgcttctttactatctcttccatccggcatacatatactagctagttttcatcatgtttaaacttctgtagtctataccactttgttaattttattttgcattggatcttcaaatttctgcaactgaatgtttgtgtttcaagtttcaaacttttgaaatttgtagtcttcatggtttaagcactaaaatagatggaaaaaataaggattttcattaaattgaagaggagatagtttgaatctaagactgatctaagaaatcaaggagttaattgggatgatgattgaaaaaaaacaacaacaacaacaacaacaacaaaatctcgaattcctcgagatatctctcgacaagcctaaaatttgagatctcggatgtctttgtcaagatgaacaagtttttagaacaaatttcgacacacatttatacctaattaatattcctaaattcatttttcactagattttgtctttgattaaaaaaagttattagcaataaccccaaatcaaacaatttcaacgaatatttacaattaacaggatatggaagttgaattctacgaattttacaatttccatttcaagttcagaagtctagaatataatgaagaaatcaacgagttaattgggagtgaatgagtgatgatgaacaagaagaaagaagaagaagaagttcggtgaatttaaggtgttagtctttatggcgttttttaattcaaaaagaaaagtgataagaatttattcacatgactctaaaaatctcttttattacctttcatttaattataaatatactttatgtaatccacaaatatttttgattatatacgtacagtacttgatcttctttccatctttcttatacttgaactcagctgtggaattgttgcaag

SEQ ID NO: 110257 - DNA, 963 bp, Aquilegia coerulea
  Intron number 1 from transcript AcoGoldSmith_v1.013113m (l ocus AcoGoldSmith_v1.013113m.g) derived from phytozome v7. 0 (chr-ID scaffold_2; pos 3063292 to 3064254 reverse stran d)
ggattttggatacaattgttgaaacactttcaaaggttagttttcagcttattttggtgcaattttgttgttggttttgatgatttcagtggaagtaatttagttaagagttatgattttattggtttttgagattaggaatttttaaggctaattatgaacaaaataatcttgcttactgacttttgttttaaatttttatttgttgaaatattactaatactaaatccatataataagccaatagaggaaaatagtcatgtatgatgtatgccaaccaataagaaattccaccaaccagctgggacggaattacaccagaggacatggatggcaatttgataactgtagaacaggagggacagaattcaaacattttacaatagaatttctattccctaggttgtttatggccaagatgcggtccaacatgacacaccatacacggttattgaattaattcatgggtaatggtttattggaaaaataactaaaaggaattgatttctcattaactgggtattacacactggaaatgaatgtgtatcgatagttcaataagctagtatttgaactatgggatatttttttcttaattaacttctatttgtattgcatttggccatttggggattttcctggttagtggttaatacattaaatatgattctgttatttctatattgatctatgaagtgcctcgatttattgttggaaaattttcttgattatactcacgagggtttactttctcaagagattaaacgaaagatcatgcaatagactgtacttattatatcctagtacgaaattccttcaagaattctttgtattttgggctagtgtaactcgcacactttttcaacgaaatttgtgttttatcggtgaacgaaaaatgaaaatccttcaagaagtaagttggaagctgacgagttcctaatctttaacatgatcttccgtagg

SEQ ID NO: 110258 - DNA, 916 bp, Aquilegia coerulea
  Intron number 1 from transcript AcoGoldSmith_v1.002071m (l ocus AcoGoldSmith_v1.002071m.g) derived from phytozome v7. 0 (chr-ID scaffold_2; pos 4170670 to 4171585 reverse stran d)
tcagtaacattcttcttgtaggtcgtggtggaagcgtaagttctttcttttgcttctcgatttgaaagattttcccctttccccctttttgatttcttgattttgttttttttcgtttgaaaccctaatgtatcttcgaaaccctagtttatatctctggatgaacttatcttttcttttattctataatttgtgttcgtcatattgattttcgtcacttaattactgcaaacagtttttcccctaatttgctgatgttcgaaaacctaatgtgtctattgacttattaatcatcttctataacttgaactttgatttttgttctttctgaagattttgttagaaacattgccaccttttgatttatgtaatttttatttgtgtttacttgaaaccctaatttactcatttgaaaccctaattcacttgaaaccctaattcacttgaaacctagattctcataccttttttcaaatttttgggtatttttcaaattgtttacagggatgtttgaaatgctaatcttgtagatattttatcatctgcttacattagtggtcaaagttttcaattagtttgtgtatttatgcaattacaatgccaaatgcccaaatgtacaaaaatcaagagatttgtttatatcatttctccctactcctcaatgtgtttagagattcttttcaggatacctagggttaagttcaccttttccagttcattgttgtctttgaaattcctttgaatcctaacctttttaatgaataatgaagatgagcgtaggagtcctttcaaactaaataaataaaattacaaaaaagaaaaaatacattgtacattttgaaacataagattaaggttggttttgatgatggtcattgcagaactctggggatttgagagttcatccagggggtat

SEQ ID NO: 110259 - DNA, 586 bp, Aquilegia coerulea
  Intron number 1 from transcript AcoGoldSmith_v1.007440m (l ocus AcoGoldSmith_v1.007440m.g) derived from phytozome v7. 0 (chr-ID scaffold_8; pos 3791488 to 3792073 reverse stran d)
ctgctcatcttcatcttcgtctctccctttctcaggttaacaatcctatcgaatttctacctgcaaatctgttagtattattattgatttttaagcaaactcaattgatattttgaaatgacagatcttaattgatgtttcttagtttctatgacatgatttttttttagtgatttgcttacttgaatttatgaattttcaaagagattcatgttgtttttgctcttaaatacatctcaacatcacaaatcttagattctgaacatgatttgcttgctctgtgaagattttgatattgatttggatttatagtccaagggttatgttatttgtttttgacatttcatgttgtactgctcattgagatttttgtgttcaatcctctttaaaatgacctacttactgtatatatatatatatatatttgttagcacctacagagagagagagagagagagagagagagagagagagagagagagagagagagagagagagagagaatgcaaatgttgtggacatttctaataccaagaaattgattttgtttgttttcaacctttttcttttgttgcgaatcatagat

SEQ ID NO: 110260 - DNA, 860 bp, Aquilegia coerulea
  Intron number 3 from transcript AcoGoldSmith_v1.003373m (l ocus AcoGoldSmith_v1.003373m.g) derived from phytozome v7. 0 (chr-ID scaffold_19; pos 956759 to 957618 reverse strand )
taaaattggtgtggttcaagctagttggaaatttggtaagcatcttcttggtttgcttaattagttgctcatttcttcgtaaatcgcaatagtccctcaaatagcatgttttcttgatgtgcttaattgatggggtatttaggttttagtcactatatgtatatactaattagggaaatagcatttttgtttcattaattaggttttgatcacttggtttgactcgagttacaaaaaaaccaggtttaaccggattattttttaaaatgcctaaattacccctatgaaactcatgtgttttgcatgtgataaactaaacaccaacaaattcaaaccaaacacacgtgttacagtacaatctggtgaaacaagaatgcaacgtgtcattacattgtctgctaaacacacgtctcgtgtttctcacgtaaaattctagtgagggcaattttgccattttagattgtttatccggttcagctagaccaagtgatcaaaacctaattaatgaaacaaaagtgatatttccctaattagtatatacatatagtgactaaaacctaaataccccttaattgatagatagtttttacattgagtcaagctggaaaagcttttgagcagtagaagaaaatagcggttggttgcggcttcgatatcccagaatattcacgcagaatatgacaaattccaacagaaacaccaaacaacttcctgcgttcattaaactcataatagctgaccatctaaagtcaataactatagaaaagcaaaagacaaatcagatatctatctgcattatggaatgtgctaatgtaccattgattttctgcttgtttgcagcaaactctgacgagtgcttc

SEQ ID NO: 110261 - DNA, 554 bp, Aquilegia coerulea
  Intron number 1 from transcript AcoGoldSmith_v1.010992m (l ocus AcoGoldSmith_v1.010992m.g) derived from phytozome v7. 0 (chr-ID scaffold_16; pos 2668808 to 2669361 reverse stra nd)
ctttacgaaatcaggtttgttaatataatcggaattcattgattttgtttcttcttttaattagatcggaattgattgaaacattcgtaacggcgattgattagtttaggtttaattgtagcaatgagactgtagatctatagaaatttcgtagggttttattaatttttgggatttggagctacatttgatgttttcttaggttttcattatacaatttaagatctttgtcgaaaaacttatagcttgattgaattgaattcttgttagaatctatagggcacgctttcattgtagcaatgtaaaggcagaatctgagaactagaccataacaaatttcatcagatttactttgggttaaaaacatttgatgtgaatgtacaattcttgtgcatttctactaattatgtagcttgattaatattaagtaggacgttaatcttattgtgctattggcagaagcgttgcaaatttcaatttgctagccaataatatattccgttttatcattttttttgtatgtttgtaggctcggaaacttgaagcacaactcg

SEQ ID NO: 110262 - DNA, 655 bp, Aquilegia coerulea
  Intron number 1 from transcript AcoGoldSmith_v1.007685m (l ocus AcoGoldSmith_v1.007685m.g) derived from phytozome v7. 0 (chr-ID scaffold_34; pos 1345221 to 1345875)
taatctattcagaagaaaaacaacttctccttcttgtaagtttaattttttcaactcatatattaacttttagaagtcatagtgctctggaaatgtgggattgacttgaataacttattagtttgcatttacttcaaattagttatgatcttgttcattgtgaaaaatttgattttaaagtttatgccaatataactagcttagtttgattcctcgaatgagttgacatttaatcacatggatagcttggtttttcctagtcatggtggtctgcccttttagaaatgattggtttctgctttctggatttgatcataatagcttagttggattttacttcgatttgggttatcttttaattgaaatatcaactcttcatagtcctggtgatttacaaatttggaaaatagattttatagtaaatttgagttttctttttgaaaacgggtagttcgatttggaacaggaatttataagggaaaaaaataacgatgaatatctgtggaaatttgaatgttattgaatgctggtttgtatactagattactacctaaagcttgtgctatgataacgatttctctagaaagtgcaactcattttttccccctttttttttatagtgagatacagaaaagtatcaaggtcgagtgcagtt

SEQ ID NO: 110263 - DNA, 745 bp, Aquilegia coerulea
  Intron number 3 from transcript AcoGoldSmith_v1.014065m (l ocus AcoGoldSmith_v1.014065m.g) derived from phytozome v7. 0 (chr-ID scaffold_2; pos 6855494 to 6856238 reverse stran d)
gactataccagttattgctcaagttatttctggtaattactctaaacctttgttttacaatttagttttacaccctctcttcctttcttttttttttatatcaagtatgattatggttagtttgacttgtcaatataatgaatgggggaaggttaatttcgaatatgattatggttagtttaatttatctagggtctcagaagctgtagattaacctaggcttgatacttaggatttatgtacctagtccaatagaaaaaaatcctgctcttgtttatgatatacattgtgttattttacaagtatgcatgaataccagacctgaacaatttttttgtaatttgtgtcgcactgtttcttgctcacacattcaagggatggtgaattacggaacctaattcagttctggttagtgaagttcttttaatcctgtgaaattgtgcagccatcaataaaggaaaacttattgaagtgcaacacagagaggctccatttctcaagaattagtgtttttttacgtgtgtcctgagtcgaaagaaactgtaagagggaaaagggaattgttaaacattaagatgcacaagattatgaacacaacggaattgtttagggagtgaagggggatctgtaagaggaatgagtttgatgtatagttgtctacacacaaacaccacacagacatatgtagacattaaatatatcttcttctttaataatcttttcatgtctttatgatacacaggta

SEQ ID NO: 110264 - DNA, 773 bp, Aquilegia coerulea
  Intron number 1 from transcript AcoGoldSmith_v1.020240m (l ocus AcoGoldSmith_v1.020240m.g) derived from phytozome v7. 0 (chr-ID scaffold_19; pos 1170332 to 1171104 reverse stra nd)
tacatgtaagtggaagttctcatgcttaccaagggtgtaagtgtttctgtgtttagtgtacataagaacagctcaatgaatattgagcagtgtgtgtgtgtgtgagagagagagactcatcaccgggtccaatttgggatgttcttttatctaaatttttctgcggctgaattggacttatggaaaagaatattttccaaatttctacattacaagacaatattgttataaaaactaaaaatcccgagttttaggtggagattggtgagtgctttgatgggactagtaaagagcaaagtgtggatatacatttcctcaactgttagtatttcggacaacctaagatcgtcagtgtattgttatcatgtgcaatagatccatagatacagtggcaagggaatttgccaatcgcctcatttccagtcttgtttgatgaataaatctcgaatttaaaatgatctttaagtacagaaagataggaaatatcacaaattataacatgtttggcctgaatgaatagttgaatacttatttcagttatgtattccagaaaaagttaaacgatttgtcctatatgatgtctaaatatttccaaaaatcaaagtaccaagccagccggcaagacaaaaggtatcaaacaaaactggcagcacttcttcatggaacaatacaaaggaaaagacctatatttaccagaactggaacttaattgattaacacaacacaccatctatacaggagcattgttgtattgagcattttcttggcagtag

SEQ ID NO: 110265 - DNA, 676 bp, Aquilegia coerulea
  Intron number 1 from transcript AcoGoldSmith_v1.001254m (l ocus AcoGoldSmith_v1.001254m.g) derived from phytozome v7. 0 (chr-ID scaffold_35; pos 1532480 to 1533155)
ctgctgcaacttattgtacttggaaagattatcaggtgaattttgattcattttcttattttttagtagaattgtttgagttttggtgagtaaatgatcttttttttatttttttttcgcatcatttctgtggttttttttactgattaaatattttgttctagcttttgtcgcatcaaatgtgtaactcataattggtattaggtatgttattttgaggttagagtgatttggattttctggatagtttgagaggagtgagcttctagtgaggcccggtataacaatgatagacatgtgcctcagagttgaacaggtgtactaagtgtttgatgctgcaatggatattcatcaatcctaattacaagttccagacatgcaaattcatggagggaattagtaacctgtgtttccaattgtcaaagttgatgttctaacttctaactccaagtccacttaccatttcttttctgttatgtttctgatgctttctatttaggatcagttactgactatgtttcagtcaatgaagcttctttggttgtcttcttttgaaacttgcttttatagttggttgcttaaaatgtttacatgtatatgatttgagatgatcaacttcaacttaataacttggtgggcaggttaatataattgacactcccggccacgttgattt

SEQ ID NO: 110266 - DNA, 912 bp, Aquilegia coerulea
  Intron number 1 from transcript AcoGoldSmith_v1.026926m (l ocus AcoGoldSmith_v1.026926m.g) derived from phytozome v7. 0 (chr-ID scaffold_13; pos 2014738 to 2015649 reverse stra nd)
ccaaaaacctggaacttctgctgatccaaatccaggttagtttctagggtttatgtttgattctcttactaaagttttttatatggaatatggtatttagaggatgaggttgtctaattaagattatgtaaatttaataaagtggggtttaattgttttttagggattttgagacttttaggatgttttggatttatgggttactgaataggatagcaagtgattcatgcaattaaacattacaatggaattcatatagatatagtagtaattctgtaagtaacaccgttttttttttagtacattgggttatgggtttgagtccaatttacgttactaggggagatagtttgtgttatagtagtaatttatctggagaaggctgtaataagaaatggataagaagatagttagattcatggatattataatgttgaagaaattaatatgcaaaacaaatggtggcattgttttcgtggattgaaaacgcgttttaattgaggattgtcaaaatctaatcagaatggaaatgcatattgggaaatcatgttcgcttctattatatttggtttcagttttaactttgggttgatatgcaacaagaacagcactacaatagtacctcgtccactgtttttgagcttggcttagcaagcactggttcctttattggattctccttattttttcagtgtatgttaataatcagtttgcatgctaagtagatacttttgggcaccttgtcattgatgcagcatgcagatattttgtgttagtccattggaaaaatgcatatagttgttactgttttctttacaactttagaacagtcatttttgttcttcagtcttccactatcgccattcaccctttaattttttttcaccccaaaatctacccatacaggaggca

SEQ ID NO: 110267 - DNA, 658 bp, Aquilegia coerulea
  Intron number 1 from transcript AcoGoldSmith_v1.018530m (l ocus AcoGoldSmith_v1.018530m.g) derived from phytozome v7. 0 (chr-ID scaffold_36; pos 2402199 to 2402856)
gagtcccatgtaggtctgtaatgtatttcttaactttctaagttaaaccaaaacctaaatagctcattaataggaggaccaaaatttaaatactccaatattttatggatttcaaattaaacacagaaaagcagattcaatatcaattaataaatttgatattttggctgttataattctttaatttatcttaaatctcaaaacaagtgattttttttttttcgcaatcttaaatttcattgaaatgatgaatctatcatgaattccattctcttcaattacgctatcaatcttataaagtatagattactagcaattatttactcgttggctgcactttgagtttaatatcttcctaacaattgtcttgggtattcagtattcaatctataaatttagattgcatgtgtgggcaaatactacaaaaggaatctgttgcatcttctgaaaaagggagtttcttgaccctctttgttattagtccaaatttgcacaaattccactagggttaactataccaaaggtttaggttttattttgatgatgagacgtggaccaataacaaagagtgtctagaaacattttttctgaaggtgcaacaaattcgagactctacaaaagtgctaacaaagaattaaacttgtgtattgcatgcaga

SEQ ID NO: 110268 - DNA, 299 bp, Aquilegia coerulea
  Intron number 1 from transcript AcoGoldSmith_v1.021509m (l ocus AcoGoldSmith_v1.021509m.g) derived from phytozome v7. 0 (chr-ID scaffold_7; pos 5574882 to 5575180 reverse stran d)
ttcctctcttctcccaaccacgtttgctggtttaagtaagagcccactcttttccgaattactaatttaaaatttatttattttgacttagaactttagaagtggtttaattggatacaaaacatacagcctgcaggggtctaattacattttcttctaattaatgaagtagaaccactttttacactaggtacttagatggtgtttttttgctttaaagagtaaattctaacttcttgttgattaatttgttgtgtgtttaaggtaaaggtttctgtgattccaagtgcaaagatagg

SEQ ID NO: 110269 - DNA, 629 bp, Aquilegia coerulea
  Intron number 2 from transcript AcoGoldSmith_v1.023743m (l ocus AcoGoldSmith_v1.023743m.g) derived from phytozome v7. 0 (chr-ID scaffold_2; pos 9457544 to 9458172)
ctaaccttccgatcaagcttgtaagcattcttgcctaattaatctacttttttggtccctcaagggatcggatcatacaacatgtactgtttgtgcaattttggttacaacactgatattatgaagaaaaaaagtttaaaattgtgttttgatgccaattgccaaagatatacgtataatgttagtcccatattaatactctgttttcgtttgtgtggcctgagttccctgccatgtccatcacaagcacctacttcataatgtcactaacataccatcagcccgtcaggaccattaatttttctatgcctccaatgataatcccaacatgttcgtcagtactgtacgtgcatatttaggtatttaggttattttgtcggtggacagcttgtttcatagatgttatgttcgccctgtttggcatccagtgaagtggcaggctgaaatatatatgtgcactataaccttcagctgggaatcaaatgatgcaaaagtttcaaagattatgcaatcaaatgatccaatcttaacatgcccgcaaacaatattttccctattttattgatcaagattttgattatcttttggttggttgcagaaagtgtacgacaaggatacactaagcttgg

SEQ ID NO: 110270 - DNA, 581 bp, Aquilegia coerulea
  Intron number 1 from transcript AcoGoldSmith_v1.004644m (l ocus AcoGoldSmith_v1.004644m.g) derived from phytozome v7. 0 (chr-ID scaffold_16; pos 2521915 to 2522495)
tgtttgtgcattggacttgaagattccatttcgtaatttgattcttgcttattatttattgaatttatttgttttgggtaattagggtttttgaattttaaggaaaatagtagtaactttgatagatagaaacacaagtaacatggaattggatagtacattgtgacctagcttctacttagaatataaaccaaattcacagatattgaattacaagggatttggtatatgaatgtcgctattccaagtacgggcaaatgttataggttttagaattgtttagtgttttgaaacaataagtattttcatcttgagcattttgaaatcagcaaaagagatacccccaccccaccctgcgcactttaaaaaagcgacgtcggtgtggtgtataattttcattaaatgtctgtagaagatgagggaattatattgttaacccatgtcatcatatccatttacctgacaggaaaattagtagaacagataacaatgaaaaataattattgtttgtgattagagaaactgcagggttttgtttataaatgttgactattagtggaaattggtggcctgctgcaggc

SEQ ID NO: 110271 - DNA, 398 bp, Aquilegia coerulea
  Intron number 1 from transcript AcoGoldSmith_v1.007896m (l ocus AcoGoldSmith_v1.007896m.g) derived from phytozome v7. 0 (chr-ID scaffold_26; pos 590368 to 590765 reverse strand )
agtccaaggtaatacctttgatctttttcttcttaatttggtgagtaaaaaggtttttagttgaattgggatttgggttttgattaaagtttgaaattttttattggggttgtggattttgatcttcaacgttgtgtttttgttctaagaaggttgaaatttgaggtttgttttgagtcattttggtgaggggttttattgaatttgaggtgtttgagatgaatttgaggttagtttgagctaattttgtgatttattgaatcatttctgttgatcgttttagggtttgtatgtattttgttgaattcccaagttttatttgttcaaaatatgatatagatttgaagttttgatgttgtaattgaaactgattgaatgacttttcttgatatgattag

SEQ ID NO: 110272 - DNA, 659 bp, Aquilegia coerulea
  Intron number 1 from transcript AcoGoldSmith_v1.023590m (l ocus AcoGoldSmith_v1.023590m.g) derived from phytozome v7. 0 (chr-ID scaffold_57; pos 1314223 to 1314881 reverse stra nd)
aaaagtagaaggcaacaaagtggtactggtgtctggtgggtatctttgacattgggcctaggggtgctgattggggtggggaagtacgcggtgtggggaataataggcggggctgggtagtaggaagtttgacaaatgacaggtccaagataagaccagttgacagttttcatgaattgtatactgcagagtctgcagagagcagggcagcaggctcatagatactgcagagtgctgccctgctccctgattgctgcagtgcagagagcagggcagcaggctcatagatagaaaacgttgtagaaaataagcacaaaaagaaccagggataggtatcaggattctacgcgaacaccagagtatggtagatcaatcagaaatcgaaaccattttttatcaatcttcttcagatatgttgacatgatacaaatgtgtaacctagggaggggagatgggatggatcggttcggaaatgacatgtttagaaataataaatcggaaacaaattttttttctaattccattccaattttttcatgacagtatactttttgtgtgtgaaagaaacgtcgatggagggtccaggaagggatcacacattatacgttttgaagactcgtggtcctcggacatggaagggtagagtttttatataaaga

SEQ ID NO: 110273 - DNA, 993 bp, Aquilegia coerulea
  Intron number 1 from transcript AcoGoldSmith_v1.003378m (l ocus AcoGoldSmith_v1.003378m.g) derived from phytozome v7. 0 (chr-ID scaffold_13; pos 4199069 to 4200061 reverse stra nd)
ctaatcggattcttctacttgctgctcttgctgaggtaaattctaaaaaaaaaattaaaatgatttatttttgggaatttttgtttgaattttgattggatttgatgtttaattgttcttatgagtttattacgatctggatattaaatgtaaagttggaaaaacccaaacatggccttgattttgtctatatgaattcgatctaatttagttatgttaaattgttttcattggttttgcgtgttctatgctttgttgtgcttttggtgatatgtattggtatcagattttgaaaattctagtaaaattagttaaattgttgctgcattccatacttctttcgattgtttacaacatggcgtagaatggtattcgatattccatatttgatttggcttgttaaatcatttgggcatatttgacttgcttcaatatgtgaaactggatgaagaaggacaggtattggaatgtctaccaccaggtttaatatagcagcccagtttgtaataatcttatggtcttgagtgttgacattttatacaagttcttgtgtgataagaccatttgctgattcattatagacttcaatttcatttcacatttatccacaaatgatcgctatgattgttttttaatgcctggacaagcctagaatggttcaagccttgaggacatgtccctttaaatacacgtgtttcctcagtaagcttattgtgtgcaaatttgttgagtttgaaattgtaactaagctatgactactcttgttttatttagctgagactggtagattccttatattttctctaaaaatattaatgtttttatgcttatagtatcaatctttcaattaaaggaacacatgtcacaccaactaaactcttaatatcatgttagtatcaaatttgttattatattttttagtttattgcaatgaaaaataatttttttcctttgtcagggaactaccgtgttagataatttgctagacagtga

SEQ ID NO: 110274 - DNA, 449 bp, Aquilegia coerulea
  Intron number 1 from transcript AcoGoldSmith_v1.013152m (l ocus AcoGoldSmith_v1.013152m.g) derived from phytozome v7. 0 (chr-ID scaffold_22; pos 1465287 to 1465735)
aatagaagctgaaaaccctagggttgcttatctctgtaagttcaatgtgtttttcttctttctttgttttgaattaaaactctaggaatacaaggatttgtagcttgtatgtttgaagaccaaaacaactagccttgacatatgttataaacttatgagttggatgatgtttgatatcaattacagacaggtttggagttcttaaatacatagtgcaaaagattattgttatgcaatccgagcgcagattttagttattgctcatatagtgttcctattcataaaactctgctattcattactaaacttattcaacgatatctttttttttagcaatatcatttcatctggaaaatctctactatacttttttgtgccaacttgatcgtgtatgagctgcacttaatcatgcactaaattttttgcctgtgttcaactaggtcgattcc

SEQ ID NO: 110275 - DNA, 150 bp, Aquilegia coerulea
  Intron number 1 from transcript AcoGoldSmith_v1.009348m (l ocus AcoGoldSmith_v1.009334m.g) derived from phytozome v7. 0 (chr-ID scaffold_24; pos 689783 to 689932)
tctcttctatctttctcttgtgggggcagagagaggtaatgtaatgaatccaagaaccgcccatcatctaattttattcaaaacttccaatttttcttcaaaaggttttgttttatagcaagttgtttgtttttgtatgcagatatagag

SEQ ID NO: 110276 - DNA, 688 bp, Aquilegia coerulea
  Intron number 2 from transcript AcoGoldSmith_v1.022821m (l ocus AcoGoldSmith_v1.022821m.g) derived from phytozome v7. 0 (chr-ID scaffold_13; pos 1431244 to 1431931)
ggagtacctgtgtaagtatttttgttgattactgatcttcctatttcacttaaatatgctcgtcttgtttttaaagtttttatcatgtgtgagcctgtgggtatttgatatctttgcaaactataagtaactgaatgaaccacattgatctgacatctgaatacacatgtacgttctaagtacaaagacccgcgtcatggtggaggtgaagttgtcgttgaatagttcagggtgaataatgagctcttggagcaactataaaattgactatgtatgtaaaatttcccaagtctttttatattaactctaaaaattaacatttgggttataatgcatgcgattcattgtaacttcattttctaacaaaaaaggagttttaaacttgagaggataatagtagtttgtaacaaaagaattttttttattaacagcaagatcacgctaaactagagagatcctttctttgtcgtcgtttatgaaagtaaagaaatggattgtgaaccacagttggtctacaattggaaatagctttgagagcatgtactgggagtccatccacctcattgtacattttcttattaagattctgtctctgatttaataatttaaatttctttttctttccacttatatgtgttaatcttatgttttttatttccacagaattaagagaggtgcttggctagga

SEQ ID NO: 110277 - DNA, 924 bp, Aquilegia coerulea
  Intron number 1 from transcript AcoGoldSmith_v1.003820m (l ocus AcoGoldSmith_v1.003820m.g) derived from phytozome v7. 0 (chr-ID scaffold_2; pos 9433324 to 9434247)
tgggttgatttttgggtacgacattggcatatcaggttggttttcatcttcatcctcaattttcagatcatctatattattgtacattactttgaccacaattagtttaattagctgattgttcattactttgatcacaatcagtttaattagctgaaagtcttttaagttgttcgaacattttagaagttgataagcaaaatcaacatcttgcttattagattccaagtaatacatacactactaaaacacactgacagcgaaacatgtttatacaacctgagttgcaatgaagatgtttaaaatcacactggttacgttcgaagatgtttaaaatccactagccattagcaagctgatccgattgatcactttgtattcctccttgtcttgtcttatgtccttcactattgtgatagatggcgagacttggattatttttgaccaaatatataaccaaccagacagaaaacaaaagaaattttttttcttgatggatgatgcaacctaattcatgcacacaaaatgataaaagagccgaaacacaagattaaatatattgttggaggtatacaaaagaagtcagagtgtgactaatcactaatgtcttcaattgagatagtgaggtgcaacaaattaactcgacatcaccatcatcaccaacttggatgttatgtgaaactacctaacctgctacacatggctgtccctcaaacattttgttaatcttgaaacaataatcatggaagatgcccaattattcaatgaattgaagcatgtcccgtaatgtaaaaatccaatgaggccattgggtttgttatgcatgatctgctatagtctattgaatcactcaaatggttacaccattggctaattaactaactattggatctcgatttattgataccaggtggtgtaacaact

SEQ ID NO: 110278 - DNA, 679 bp, Aquilegia coerulea
  Intron number 2 from transcript AcoGoldSmith_v1.009204m (l ocus AcoGoldSmith_v1.009204m.g) derived from phytozome v7. 0 (chr-ID scaffold_3; pos 4358851 to 4359529 reverse stran d)
ttactcaaaataaagcacaagtcaaaaggagggaggtaaggactttatgaacttttatcctctttttattttgttaattttatgatcatacatcattaataagataaattctgttgttctacgctttgtgttatccactcaacgagatgacactggcttttgattttattttatataatactctttgtactattgtagcttattggtagaagaaaggtatacttcaattggtaccatttttagtttactattatcatctgaaatcattcaggatacagtaatgtcttgcttcccttcagattttcaatccgtttggtcattggtgtttactagcttgtttaagaaaaaggtggatttatagtattttaacccctaaccagtagggaatggaagagattggaaatttgtctgttggaatctagtgcctttcagtctttcactactttaacacccggagatgtacccccaactactttgacttttgttaaccatattgtttccagccacaacaatattattaatatatacaatcagcactgtagcattgtctcgtaagaatcatgacaactcaattagtagtttccatgttaactttttttcccaatgcagtatgaaagtaaaaacaagttgacctcttttatatgatgggtttttgttttgaactttttggtgcaggaat

SEQ ID NO: 110279 - DNA, 949 bp, Aquilegia coerulea
  Intron number 1 from transcript AcoGoldSmith_v1.009204m (l ocus AcoGoldSmith_v1.009204m.g) derived from phytozome v7. 0 (chr-ID scaffold_3; pos 4359567 to 4360515 reverse stran d)
ggcggagcgaaatcaatctcacaaggttagatatgtttctgctgatttcaacaattttacgatgaattcttaacaatttacttcaaatcaaactcttgatttccattattaggtttttttcaacttgctgtttgtttgattctagggtttatagaatatatttatgttcattcataaagttgagcttatgttgtgttgaaacgaatcacatttttagattgatttggtttcattgtagatgttattgtatgatgagatatattaattcgaatattacataagattgattctgttttatctattataatttagtataaattaataaattgtgtttgtggttatttatttgaaaggtttacgttcaaacttaaaaagagaagcaattaaacataaataaataactagcttttgtgttatagtcataagattgttccttttgagttatagttataatctgtgtgtactttaaccaaaaacttaaaagaggcttgtgatcaagcagttgcaaggaaacagagtctaattgcgaatagtcagtcacacaccgtatcatgtaactgaatgggatatatatgtgaataaaatagatagtaagaacattttagagaaaatagtcaaaattttctgagatggcagataagttatagagtgaatttatcatttcaaaaagaaaagttatagagtgaaacgtaagcaatttttgcccttcagggttgcgctttactgtaaaagaagatagtgtttgtgtatatcacttttgagggtatcttgttaacagttcttttacgttgtaatgtggtttctgttcggaagtttgtattataatgatgttttatgttgggagagtgactagagtttttgggacattttctttctgaccatagtttttatcgtgataatactatatggttttaacgttatcactttgcatatgaattaagggattaaa

SEQ ID NO: 110280 - DNA, 512 bp, Aquilegia coerulea
  Intron number 1 from transcript AcoGoldSmith_v1.000978m (l ocus AcoGoldSmith_v1.000978m.g) derived from phytozome v7. 0 (chr-ID scaffold_2; pos 3888498 to 3889009 reverse stran d)
gaagaggtatgacttgtttgtttatctttcttttttttttaatttgtttttttacaagaaattagggtttttttttttagtttgagtaataaaattgagaaatttattctgaaatgaatttttttgaactctaagttatatagaaatagattgtgctgtgactgtgaagtttctgtcttgcataatttgaactctaagttatattgaaatgacgggttttataatcatccttgtgcatatgttattagaaaaatgctacaaactattagagtattaggtacctttgtcttccaagttccgaagctgtttgactaacttctaaagttcttctcttgaaaatcttgttcattaaagctttttaaacttgtgttcttagggaaaaaaaataggattgtgttcgatatttgtcacttttgttctataaataaagctttgttaatgtcagagattgttatattaaagaaaatctataatctatatacacatctcatttttttactttggcaggcatc

SEQ ID NO: 110281 - DNA, 744 bp, Aquilegia coerulea
  Intron number 1 from transcript AcoGoldSmith_v1.002819m (l ocus AcoGoldSmith_v1.002819m.g) derived from phytozome v7. 0 (chr-ID scaffold_24; pos 3202321 to 3203064 reverse stra nd)
ctttcctgattcaccaactgcttcttcttcttctggtaagtttaactcaaatttcacttattttagttaaattctagggtttttagttgtgttttagtgtacaagatatgaaaattgtttgttttgattcttgaaatgtgttttaattgaattaggtttcacatgacattatgtttatatactgtattattaccaagaacgatacaattatacaaagaattgacattttttagtgaaattttgagtctttagtataatttaggtatgttgtttaactaggatgggattataagtttacaagggcccttttttgaatgtgtgtatacttcataatccctggtgaagtaaagttttaggaagaaacacaccaacacgattccttgactttcttgtttaattaatgagtgaaaaagagcttgcttttggtgttttcttcattctttttactcttctgttgtgaggatttatttacaacttattgctttttactctagtaatcacattggcgaagaataagtttagtcccaggttttgactttgagtccctaggttggagggtttgtttgtagtgataactgagagtttatgagggaacaactaggaaacaaaagtttagatcaatttgaaggatgaactggtatcacaacaaaggacttagtaaatggaaattggttgttgataaaatgcttagattatgcttttataattaatattttttattttcatatgcagaggaagatagtg

SEQ ID NO: 110282 - DNA, 581 bp, Aquilegia coerulea
  Intron number 1 from transcript AcoGoldSmith_v1.020831m (l ocus AcoGoldSmith_v1.020831m.g) derived from phytozome v7. 0 (chr-ID scaffold_2; pos 484350 to 484930 reverse strand)
ctaggttggttggttattgttagcatttcaataacgttttatttatttattttaattagggtttaaattgacgaattagaaagatagtttaatttagattttagggttttgtgagttattttgaatctctatatatgttaaaaggatttggaaattggttgaattacttatttactgatcagattgcgggttttgggtttatgcgtttacataaactgtaatattaacttattaatggatacacagtgaaatcattaatccataaatcaaacatttgatatagattataataattatgatcgcgatgtttaatagaataaagaagttgaaaagcgtagggatatataactactggaaggtgaaaccgtgaaagaaaagataaaactgttatgtagttatgagtagaagagttgtgcatacttgtttggcatgctattttgaaatgtttctggtgataatactgtttacaattcagtatccaatcttcttcaccaccttgtctctttactttattttctttcgcttacttattttgactatggtattcatatcctgcagtagtggattttatcacgacccga

SEQ ID NO: 110283 - DNA, 986 bp, Aquilegia coerulea
  Intron number 2 from transcript AcoGoldSmith_v1.018993m (l ocus AcoGoldSmith_v1.018993m.g) derived from phytozome v7. 0 (chr-ID scaffold_44; pos 581624 to 582609 reverse strand )
ggagatcaggtatgtttttttttattatattttcttcttattgagatttgatcaatactgcgagattgttgtctaacatcaactagaatactacttctcaaacaactaagactgagcacaaaacaaactacaaagacccaaaaggcctattcaccatgcacaaaattcttaagagtcatcacactagctacaattgttgtcttgttctagttagaatttatatacaacatcttcatttgtttatgatgtctttttcatacacctagctaattatgattaggattccttttattttattttttggcgtagccaggattttttgtgagggggagcagtggagtactctaattcaatattttgcgaaactatgcagtatacaaaataaaccagaaaaacatgattacaaaattattaattttaattaaaaatttctaaacaaaattttaaattgtatcacacaaatttttttaaaacaaaaaagatattaataatttaacaagtaaaaaattaaaaataatgtcattacacaaaatattagtggcgaaccactggacatcagattgatgatgggtatgatatagcaaattggaattgaagtgaaccaatatttatacgtggatttgatttccatattattagccactttgtatgccaatgaagtgaccaaaaatataaaatgattaagaggaccttacatgtaaataaccaaggatgttgattatcaaggataaattagtaaactcaaaaaaaaaaagtgaactacttcttttctaagcagtacatagttacgtactgttttcaaaacgttgagggtccgcaagtgctaaccctcaaccccctttggctccgccacatttttggtacacgacgacgatttagcacatatgtaattatgattcttaacatttttcgacttctattaactcaaactaattatatgaatctgtgtagattcaagcattcagcaaggatatattgaactatcc

SEQ ID NO: 110284 - DNA, 445 bp, Aquilegia coerulea
  Intron number 1 from transcript AcoGoldSmith_v1.009292m (l ocus AcoGoldSmith_v1.009292m.g) derived from phytozome v7. 0 (chr-ID scaffold_3; pos 5545728 to 5546172 reverse stran d)
gtgctccagtcttcttcttttatactcagtaagtctacactatcagaaactagtacttgaattctgcatatataactttgatgttgcatagcttttaatgttgaattagaaattgatctgcaaactttattgaaaacaaataaatggaacttaataacaaagcagaatgtcaattaagtatgaagataaatggctttggattttgcgatgttctaggggcttaagtctacactgatcagtgaccaccaatgttgtcattcaaatgagatgttctacacttgtttgaaaataattatagccattcatggtgttgttgttgtcaaataggagatcagaaatagaatttatatttctcaccagggattttttatgttaaaattgaaatatcttgaatgttcttctaactcttttcttctggcgataaatgtatttcaggtggaccttt

SEQ ID NO: 110285 - DNA, 224 bp, Aquilegia coerulea
  Intron number 1 from transcript AcoGoldSmith_v1.018275m (l ocus AcoGoldSmith_v1.018275m.g) derived from phytozome v7. 0 (chr-ID scaffold_31; pos 2329911 to 2330134)
agaccgtgggttgaagacaaaactgcaaattgcacgtaagtcttagccaaagtttttatgtaccatgtttctttatataaattatattctttgatgaggtttccctggtgcatgggcaagggaaaaacccttattttgagggtttcttaatagcttgtacgaccaggaaaagaaggttttcttctgatctttagcatagttaatcagtttctttgattgtatag

SEQ ID NO: 110286 - DNA, 900 bp, Aquilegia coerulea
  Intron number 1 from transcript AcoGoldSmith_v1.006336m (l ocus AcoGoldSmith_v1.006336m.g) derived from phytozome v7. 0 (chr-ID scaffold_58; pos 374660 to 375559)
ttggtcaggtacaccaactcatcactcttcactcaaatcttatccaattttgagtcaaaatatcaatacagtattgactgtattactagtaaatttactaaaatttgcattcatgttgctgcttgaaagttgttattcttgttggatgtgcatgctatatgtctgaaatcaaatggaagttgttattcttgttaatggcgatatggcatatgtgactgttaaaatagaaatgggcattcatgatattttatcatttttgttacttggaagtaggttgtatttgaatctatccctgctgttcatctatagtgttgttaggagttaaggcaagcagtttataatactctacacgtaatactcattttgatgtgtcattatcacaacagtctccttgatattactcacctattaggcattgacaacttgaatcccgtttcgctgttggtgtattttaagatcatgctacaggtttcaaattaagcggtgggtgctatcgtgataaaagaaataacttatagtttagattgatatgacccagatatgaaggcaaattttccacagaccgcagggataggtcttacataacctaaaactactcaccccttgtgattggccactgcccgaagtacacttagtgtgacaattctttgaaaatgcaaataagcgttcagccaagtgtcacatggatcagggagttcttttgaatcacatactttgtttcctatggtttttataataaagtttagggatttagaggcaataactgtttatttttggtatatttatttgtgtacgactgtgttcttaatattattatagtggacgagttataaattcaaactgatgcttgttttatgttatctttcgattggcctggaacagcttataggcaatacacca

SEQ ID NO: 110287 - DNA, 918 bp, Aquilegia coerulea
  Intron number 2 from transcript AcoGoldSmith_v1.014795m (l ocus AcoGoldSmith_v1.014795m.g) derived from phytozome v7. 0 (chr-ID scaffold_13; pos 5050725 to 5051642)
tgggaatttccactgccaccattcggacaagggtggtaagtttgattcataatctttgatttaaatttaatatgatggtaaaattatatgatgtcagtcttttatgtttgcacatatgactgggactagcaagggagacttcaatcgcgtataatgtcaaaagaattcaaaattaatgttttgacactaattttctgtagattctatgtgggaatagctctataacagttagcactgtaatatcaaacaaatcgaactgataaagactaaaaagagattaaatctagctcaagtagttttctagttttatgatttgatatctttaagttttgaaacaagttaacgacctatcccatcccattagaaatctatccctttacttcttctttttttatttcgcacggcatttcatttccctccccaccaacagtatccacttagccagatgcaaagcactaaattggaacatgttacagagcccaagaccaccttgtttaacccaacagtggtgcattaaatcttatacatttgcaataagttcttgataagtgctttgattctatgggataaactcactgaaatggtatatattgcaagatcttattagtttttgttctatcacagcatccatctcagtttatgatagcccaatatgaaaaccttgattcgaagacgatatagaacctgacaaataaggcatggaagaagcgagagattgcacatctattgtctatccagacaaatacttcactcttaaacatttaatatatgagcaaagaatgacagaaactgcctcaaattagtctccatgtcctaggtaccaggctgtcttactacctttggtatagtaagcttttcctgaaagatatggtcagtgaaaatgcattcatttctgtaggtttgaatctgtctacctgg

SEQ ID NO: 110288 - DNA, 559 bp, Aquilegia coerulea
  Intron number 2 from transcript AcoGoldSmith_v1.002049m (l ocus AcoGoldSmith_v1.002049m.g) derived from phytozome v7. 0 (chr-ID scaffold_2; pos 2559495 to 2560053)
gaaggaacatccaacctgttgatcaaagcgataaggtatgtattgatattaacttttgttgcaatatgcagatcgagaaatgttttttttgtttgcgtcatgttcttccacttattgagaatcttacattcttacctaatatgtactacattacatacaaaagagttctgaagaaccctacaaagggtttggttaggtaaaaatttggtatttataaatgagatgactgagattgattcgcgactggttctggttggttgttcatgaaaatataacataaataaattccatttatatcagaaacattgtattactattgttaataacttgagaaccctacaaaataatatctttatgtcagtggttaaactatataatttgatatatataaattggaattagtagtctaaatgtctttgtccaggtcaatgaactgaaatgctatgattttatcgcgttttgattcatagtacagtagttgattaattattaattgaaaatgaaattttcatattataatgtgatattcttatgcatgcagttaaggaatccagatcca

SEQ ID NO: 110289 - DNA, 696 bp, Aquilegia coerulea
  Intron number 2 from transcript AcoGoldSmith_v1.008125m (l ocus AcoGoldSmith_v1.008125m.g) derived from phytozome v7. 0 (chr-ID scaffold_34; pos 2609613 to 2610308 reverse stra nd)
tgctttacagttgtgtcggtgggctttaccagcaggtatctttgcacttattttatcgcattacatagatataaagatgcatgtatttcagtttagggcatgactttgaggctgcattgtagagggtgttagcgagatattcaaaatttgcttattaagaagtgttgtatcaattgtgttagtccaaatatcatcgttatttgagctttctacaattgagaaaacaccattacacatacattgttcggattgcacagttttattaaatctgattgaatatataaatttcctaggcaatggcgatgagagtaaaatcccacctagaagtcgatctgtttcagagattattgcgagcattcaaaaaagtaaaattggcatacaagattggagcttaagtgatgttaccgttggattatatcttatctttcttcgtcgagcatcttctgatcaagtagaggatgtgaagggagctcagatctcatccgattctatagtaattgccattgatctttaattatcagagaatagttttagacatagacgacggaagtcattttcttttttataaatatagctattccataaattcagagaagctattttccatggaatggttatgcccatggctcctgttatttaaatattactttattccacataggtacaagacctcatctaccataccgagcttgcaaa

SEQ ID NO: 110290 - DNA, 650 bp, Aquilegia coerulea
  Intron number 1 from transcript AcoGoldSmith_v1.027678m (l ocus AcoGoldSmith_v1.027678m.g) derived from phytozome v7. 0 (chr-ID scaffold_22; pos 1808900 to 1809549 reverse stra nd)
ttttgtatcctgtttttgctactgcaatcaaaatttctgcatccaatctccatcaaattgcatatatggggactccaccagatattagttctcaaaccctctcatctttgaaagatgcatcctttatagtcccaccatttcgtggtgcaagtgaagcagaaatagattttctttgtcacaatgccaggaagatttgtacaggactgcacaatgtcagcaaattatatctaggggattggtatattaaggtacagtatacttaatttacttgtttatttgttattatatcatatatgactacgttttattttttatagtcatactctattctaacataagatcgatgtcttctcagtatctagcctggtttcaagatttattttcatggcatcttacttcatgtgatagtctgcgagatttgaaacttgacatgtacggtactaaggactatgtctgtgcagtaaaagttttactcgaaagttatcccaacctacaaactcttgccatttctgtcgaggtaatttaacagtaggattatcattatgacactacaaattaaatgctaaactgtgttttatttttcttataatgttttacttacaaagtaaagtgttgtctttttaattcttagggtagaaacacgacagaat

SEQ ID NO: 110291 - DNA, 575 bp, Aquilegia coerulea
  Intron number 1 from transcript AcoGoldSmith_v1.004891m (l ocus AcoGoldSmith_v1.004891m.g) derived from phytozome v7. 0 (chr-ID scaffold_2; pos 8779981 to 8780555)
catctttttgtggtgttactggttttagtcttcttgtaagtttgtttcttcttcttcttcaaaatttctttttttaatgttgggggctttggtgcaagtttatttgattaaataatcattgaggtatcttaatccaaatagattgtaataattttttctgctctgtgatgcaatataaatttttgggttcctcccaaaatatattgaaacaatccatataattctgatataaactttggcaaaaaaaaaaggttttgaatttgatgattgtatgttacctttttgttaatggttttgtgcatgtttttagttatggtgagccaaatgtatgctttgtgcttgcttttaactataagtaatgcaataattataaagtggtataaccacctatgaaccctaagatagaagcaatggtgcttggtatagagatgttgtgaatttatggaatttccacaatctcagccacctcggccccacaaagagttgctattgtgtcacaaatcaagtcctcttgtgtcaatttagttggaacttctagattgctgaatcattatttgattttcttgcagctagga

SEQ ID NO: 110292 - DNA, 452 bp, Aquilegia coerulea
  Intron number 1 from transcript AcoGoldSmith_v1.025715m (l ocus AcoGoldSmith_v1.025715m.g) derived from phytozome v7. 0 (chr-ID scaffold_35; pos 1048974 to 1049425)
atcagtttgattgtcacgtcaaccttaactttgtgacctttttttctttcatctggctcgctgttttttatttctatatcttacttaacccatgaatcaaataacttaatctatcatatctgtattaatgtgaataaagcttaatgaatattttacatagaggtatttttatcaatgaattatatggtcattctcaaggattccaaataagtcaggcatgaataaaatcaagttgttagtatcagtcgatagtctgtatacgttttcttttcgagtaatatagtgtaccagcaggtaaagtaataaataccattcctatgattttggatacttaataccctattcttggttagttggtaggtgaaatgctagggttcacaaaatcatttcagctaagcataaactgagctaccgactaaactacagtcgacatgtggttttgcaggtttgtg

SEQ ID NO: 110293 - DNA, 651 bp, Aquilegia coerulea
  Intron number 1 from transcript AcoGoldSmith_v1.011894m (l ocus AcoGoldSmith_v1.011894m.g) derived from phytozome v7. 0 (chr-ID scaffold_7; pos 5093163 to 5093813 reverse stran d)
aagtgctattttcagcatcttcaagggtatgaacatttttttttttcttcctatcattgctttatgttacacttgttgtttcttgccaagcatgtagaaactcattaaaacttccaggattacatagtgttagataaaaaacccctccaactactcacattactcagtcctcctcttgtgaagaaaacagagtgatctacttgttgttgtgccaatttttgaagcaaaaagccttctagtcttttacaataattttggtaatttttcagtattttttccttcaacttgtaagcaatttgaaacctttttagtttgtttgcaatggtatatatcaccttgaaattttgaataatatttgttttcagccaattaaatctatacaaaatgttgaagaaaccccagcagttgctaacaagcaactttttctaaaacatctcaaagacacagattatgcctcagaattcccaaaaggtatgaactttatggattgatttgcaagacaagatcaataaaagtgggtgtcatgactataaactatggtactattctgaattaagttttacatgctatagtattggggtttaatattgattaaactctaaagctattgttaacttgttgtacagattccagaaactcaacaacttgatc

SEQ ID NO: 110294 - DNA, 981 bp, Aquilegia coerulea
  Intron number 3 from transcript AcoGoldSmith_v1.011754m (l ocus AcoGoldSmith_v1.011754m.g) derived from phytozome v7. 0 (chr-ID scaffold_19; pos 1112392 to 1113372 reverse stra nd)
atcatagtgatccagattaaagcagtgatcaataggtaagaaatttaggtttccattgttgttatttgtttctgattcttggtcttacactagagtagcacattgcaaaaaagtgcagtctatttgtcacgtcacgtggtcctcatttaatacaatcatcaaggcaagttcctcatttagaaaagaatcatgctgattgctttttgcaccttcaaatatatgatattaatgatccaaaatatatatacggtatacactaccaagaggttaggagtagaaatacgctccatacactagcgtaagatgcgttggtagcgtcatgtgtctgacttactgaaatacttattaaaggtgtatatgtttatttttttttcattgcgttacaccagtggtgttttaatacaaaggataatttcaaaaggcttgtcattgattggtattgaatatcagtggtcttcataattctatttccatggcagtcatctctctctcataatgcttgatcacttaggttgtgatagttgtaagctcgtcgctacctgattgtatcttggatatcataatttcatacaaaaatttgtaatgaaatttgcaggaaatctgcattacacatactatgtctataaatggactattttgtgaaattatgcacaaatagcatctcgaatccaatttcatgataatacctctttggttggttatcttctcttttcttcttctgccagccagaattatattcgacagctctgcacctcgaaaacataaacattcttgtcaagcttctctttctgtccctaatgtacaatcaaaattctaccattagtgatctcttgtagctgaaaatttagcttgcaacagaaattgagttttttaggggtcctcattcagtggtttcacttcaacaacattagctgatagcatttgttttttccttttctttttccagaagtgaattgtgttggtgcaagttgaaagtgaccc

SEQ ID NO: 110295 - DNA, 718 bp, Aquilegia coerulea
  Intron number 1 from transcript AcoGoldSmith_v1.001899m (l ocus AcoGoldSmith_v1.001899m.g) derived from phytozome v7. 0 (chr-ID scaffold_3; pos 10056927 to 10057644)
atttgggccttgcttgtttctgttttttcctacttgtaaggaggtaaggttcagccccccctccaattataatttttttcaatattaatgaacaaaaaataaaataaaattagagtgtagagtgtagactgtagactggactattcaaagggtgaaagacaaagaagagatatggaaaggaagaagtagaaatcaaactctattacaaaccacacacattccattctaaacaccaataataacaagaaaacaacaaaaacaacaatcaaaaggtatgtaatctacactctcttctttcttacttattattctcaaagggattatatatatatataatttaaagtagaagtttatatttgtccacatttatgttcacttttttcttccaacatgttttcttccccaccaatcaaatattcaaatcttattacttcttcaacttcttcttcacttagcttcaataagctttgttgaagctcagaaaaaaaaaaaaaacaaatggcttcaattgtgaagttattttcacctaatttacctgttgtaattgaacccaagtttagaaatgaactaactagaattcgagcaagtgggaattcttcttcttcttcaatagcattgtcgtcttcggattctaatggtattccttttgttaatggtattaaggaaagtagtaatgaaggaaatggaagattggtttctaggaaaaaacaagtgggga

SEQ ID NO: 110296 - DNA, 815 bp, Aquilegia coerulea
  Intron number 1 from transcript AcoGoldSmith_v1.024948m (l ocus AcoGoldSmith_v1.024948m.g) derived from phytozome v7. 0 (chr-ID scaffold_3; pos 1147965 to 1148779)
tgttcatctgggggtctttattactggagactggagtgccaagcttgctggtcccaaatgggccggagaattttatatgtgtagcctacttgcatgtgggtgtgtacacccagtcacaaaacgccatgtggcaataataatataacctatgtatgggtttagttaaccttagtgggcttatcagttacccaaccactttatagacacgtggcgttatatgattgggtgtacacacccaatcatctcatttaaattattattctaatcttgtttccattttcactcaatgtgctgatgagtggaactctagtcctgattttgtttccattttcactcaatgtgctgatgagtggaactctagtcctgatttttgtgattattgatgctatgttgcaatacttggtaaaccataaaaatagagacgtcacagaatacatgtaaaagtttcgggtgattacatcacttattagtggagtatgacataacctatttaaatttccccttcaatgctatacttagatttgtttatctggcagtattttcccttcaatgtccatactcctgatttacattttttttcttcttcaattactttgccgccgaaggtctccagtgaaatatcaaaatctcttgcttttcctgtgacaaaatttgctttgtaaaaacaaccagcattagctatttagctctctctaatttatttcacgctcaaacaaaaaaaaaaaaaaaaaaactcactctaagcttcttatgctcatcccctttaaactttttatgcaggttcaacatagttggtcaggtattcttacaatcaa

SEQ ID NO: 110297 - DNA, 962 bp, Aquilegia coerulea
  Intron number 1 from transcript AcoGoldSmith_v1.004431m (l ocus AcoGoldSmith_v1.004431m.g) derived from phytozome v7. 0 (chr-ID scaffold_2; pos 9389282 to 9390243)
ttatctactctgttatcttgcaggtaattttctgttacagtttgttagttattattgttattgttattttacgtacaatgcccaaagaacaagtgttggacttatttaatagggaatgcaagcttggatttcaatgaaaatacatgtgggcgagatttgcatttcagtcacgatctttgggcgtaatggtgtaatttgagtatgtagttgacattaactgaagtgaaaaggtcttcagttacttctaggcatgaatctaagtatagataggaagctgacaacatattcaagcttttgaattcatgatagatttggttcgataattcccggtggttagatatatagataactattaatacctattattttaagacatgttgattcaagttcaaaagtttatctatctcaaacaattataactagcaaactttggggtaaagccttatttctatttgacacttatgtgtttgatgatcaccccaattggtttattgttacaatggagtcatggaccagaaaggcattgcactggttgtttagaaatgaattgcataagttttggtctgacgtgttccgttgccctaaagtcatagcctaataaagtttaagagttgaagcaccttcttgcctagctgcaaacatgaaaacataattgtctttaaaaatgttgaagtgcagaggatattacttacagtacttgttattttctttcctgccagaattggttattcatatttctccaccttagttcattttaagaaatgtttgcttattttcaacatctcacttacgaactataaatttagtgatttcagtgaggtcttgtcccatatgcattcaaaggctcttctagtcttctaccttattttacacgagtctcttaagtttagatactgactgtgatatctgaaacatgaactctttcaggacgacttcctaccaagaacgccgacacccttgga

SEQ ID NO: 110298 - DNA, 923 bp, Aquilegia coerulea
  Intron number 1 from transcript AcoGoldSmith_v1.017700m (l ocus AcoGoldSmith_v1.017700m.g) derived from phytozome v7. 0 (chr-ID scaffold_8; pos 4354926 to 4355848)
gtcgtggaatcgacattttccccactggttagtaatcgaattgcaatgcccttatgatcgaaatgctttcaataacatttattatattcagcttaattagttgtgtgtttgctttgtaagttatcgaatgttagtccttttttaagtttggcaagataataaaaggaatgaaatcgaaataagctaaagaaagcggggtagaagtgtttttattaagatgcattagtagtacttgtatagatgcatttattgattttagtgtagaactgtgttgagagactggaaaactagttaaagagaatgtatagcgtagtatatcatatcgaataagcagatcaaatttaagtcttttatgtgaagtagcttgcacagctaatacttcaccctgaagaagagtactactgttatcataaaaagtattcaaatatatatatagttacatctttttataaattcagatattgatagcggcaatgttttggtattggccatttatatgttaatatagatttaatcatcactttcagttgtgcttctctatgctcaagtacttgaaaactttcgtttcagtaccagctgaaattcggtatgatgtctctttcggaggatcatattttgattattttctatcatttgttatccacaccatcgtttgtagattgcttcccatctataagtttgtttttactttccccacttagacactcaaaatagtcgttagtatgatgtcctctataataggaataatagatataccaaatgataaattaattctaatttagacagtggcgttgctttattttcagttataccagtgtttttttctctctttcttctgggcttacaagtataaatcataaatggcacaagcagccttatcatttcctaatttctattgttttattgttttgtacttgcagttt

SEQ ID NO: 110299 - DNA, 783 bp, Aquilegia coerulea
  Intron number 1 from transcript AcoGoldSmith_v1.017957m (l ocus AcoGoldSmith_v1.017957m.g) derived from phytozome v7. 0 (chr-ID scaffold_2; pos 2271730 to 2272512 reverse stran d)
ccttccttacatccctccctctgatatttctcgtactccatatattatcctccaaacttccataattcagacaatatcctttatatccacaccttcttcaaactactacagtaacttttactctggtagctactaccatggttttggtatttacagtgcacaattatacaatgtaagggcatctctaatggttcatcaaatttgatggtccacgtatacacatttgatgctactttgatgaaaaatttgctttgaaaatctgctccatctaatggttcatcaacaaagcggctaatagatgaccgcttcactaaagcgggcctccaacacccgcttcacttagttaaagcggctaatggatgaccgcttcactaaagcgggcccccaacacccgcttcacttagttaatggggctgtccaagtgccacttagttaaagcgggctttgaagtgccactttaagcggcacttcattagccgctttaagtgatttaagtgaagcggtcttctcttgcccgcctcacccagtatcaaaccttaagtttttcatcaaaatttcatcaaatttgatgaacttttgatgatttttgctaaaatatcaaatttgaaaaagttttgatggtccattagatggagtttttttgactttttcatcaaatttgaatttgatgaaagatttgatgaaccattagagatgccctaagaacattgtttcaagacttgactccatgactccatcaatcttccagctaggtttcctttacttggtccccctccatattct

SEQ ID NO: 110300 - DNA, 114 bp, Aquilegia coerulea
  Intron number 2 from transcript AcoGoldSmith_v1.009884m (l ocus AcoGoldSmith_v1.009884m.g) derived from phytozome v7. 0 (chr-ID scaffold_3; pos 10229781 to 10229894 reverse str and)
cggttgtattaattatttttttttcttcttctatctttcaattatatatagttttatgtttgaatttagatgagttgttggtaattttttgtttttttctgatggtattagagc

SEQ ID NO: 110301 - DNA, 108 bp, Aquilegia coerulea
  Intron number 1 from transcript AcoGoldSmith_v1.009884m (l ocus AcoGoldSmith_v1.009884m.g) derived from phytozome v7. 0 (chr-ID scaffold_3; pos 10229978 to 10230085 reverse str and)
ggtaatcgatcagtctttctttcttttatttattttcttttcacttgatgattgattgatcaagttaatgggttttgattttgagttaatgggttttttttaatgtag

SEQ ID NO: 110302 - DNA, 950 bp, Aquilegia coerulea
  Intron number 1 from transcript AcoGoldSmith_v1.011757m (l ocus AcoGoldSmith_v1.011757m.g) derived from phytozome v7. 0 (chr-ID scaffold_26; pos 2845524 to 2846473 reverse stra nd)
gcgacttcaagctcagcactcaccatcactggtaagtggtaactcatcgttctctctctcttccatcatctagggttcttaatcccctttcttgatcactttgaactagaactgtgaggctgtttctcaatcagattagctttattatatgtgcttgtttggatcatcaatattaaagttgtaattatactgaatttctgataatttcaattaatttatgagctgaggttatcaatatactaagtagagttagacacagatatttagttcaatcatatcctagaaatctaatagattaataggtcgcttagatagtttttgattacgctgaacactctggatctcatgggaggggggttttggggttgggcaaaaggcaaagcagcagctaacgagtaaaacaaaaggaaacagtggaaaatcatctgaatcactattcaatttatgttttgggattttttcttattagtgattccaacccaactaattgagttattttatgagttaagctatgatttatttccttttatcttattggtttggtttattcttctaactatccggagaccttgtgatcaagaggcttggaaggatttttttatgtaatttggacacttggttcgttcattttgatgttgttgtttttggttcattattgtggaatgtatttctttaataggtatgaaatgagtaatgaattcatctgattgagtatgttgtcttgcttgaggtgaattttattacttgataacaatttgtaacgtctgtttccattaagacaatcatatattgaagtttagggttttccttctattgttttgatttaactatttactaatcaagtgagtataagtgccaaaatttgattaagatctctgtaaataaacatatcaagatacttccgtgattgtggttgtctattttaatgtaggtggatctcatcttaagtc

SEQ ID NO: 110303 - DNA, 969 bp, Aquilegia coerulea
  Intron number 4 from transcript AcoGoldSmith_v1.007544m (l ocus AcoGoldSmith_v1.007544m.g) derived from phytozome v7. 0 (chr-ID scaffold_34; pos 1774755 to 1775723)
tcgaggaacgaagacgttttttcaaagaagggaatgtatgttcaatctttcctggaaagaccatgcatttgaatttcattttcatccttttaaatggttgagctgtgttatttaagattctttaatatatatttgattgttcatttgtttttccatatttaagattgcaatcactggagtgtggtgcttttaggcacaattgccaagtctcactggtagacaatgcaattgacgtatagggaaactttaatgcatcaagtgaatgtattatattttcttgaaacagaaacatcactacatcgattagcccactgaacatctctttttagtttgtagtcacgattttatattcctcaaaaacttgatgtgtgttgagttaaagttaagaaactcatatatatcatatatgtaggtgcagctgcgaaaacttattgtaaagattgtttgagctttagtattgttctactatattccttataataataattataacagaaatcatcttgtaacctcactgtgtgttattaacaaatataagatatctggaagaatctgaaatatcacacataaagataaaacaaaattggaaacttgccttagcatatgaacttaataatcaacataggatggaaacacaaaggagcattatcttggaaacacaaaggagcattatagataaaataagcaagttgaaactataactgtgtatcaagtttcaagaactaatatactcaatctttgttacttttgtagaatgactctttacacaagttttttatgcttattttggggccggatctcaaacctgtaaataatactgtaatgaaacctataggactgctctatatactattgtctctttcaggtcatgattgaaactagtcctttgtgttttccgttttttgttctaacagtttgaaaatgttgcctgcagaaacaaaatcagcttctatcaagatccaagcaaaa

SEQ ID NO: 110304 - DNA, 792 bp, Aquilegia coerulea
  Intron number 1 from transcript AcoGoldSmith_v1.012318m (l ocus AcoGoldSmith_v1.012318m.g) derived from phytozome v7. 0 (chr-ID scaffold_103; pos 254955 to 255746 reverse stran d)
gcgaaggatttctcttgaacttgaataggtaatctcttatctgaactcttttgttgatttttatttctcttctatatctcctcttctaaaatatctacaaatttctacaaattttggggttagggttttactgttaattatatgctgtgagaaaaaggcggtggggggagtcgcggtaaattagataaggcgaggttattctttgtttgatctgaatcctgaatctgaattgccgatcgagtcgactaccacatgcttgtttcaatgcagaaatttacacaaaagaaaaggattgaaacaagtagtgttggtttcagtgaagcaagcaatggatcaacttatcatgaatattagtaatctgatagtacccaatccttgtcctaccaccattcactttagtataaaggggaccaaagttgattgagtgtgaatgaacaggcacggcaaaccaatgcacatgctttctaatttctaccaatgtcacttgtaaattaatatttggaaaattaatatatagagagaacaaagtcatttgttaattgcaacttaatttgctaacagaaccaaacttgtagtatatactaatggttaatgaagattagaactttataatgaggtttttttatatatcaataatgatgattttgttatgtgtttttgcttggtgtgatttgtctgattaaagtctggtcttgttgtccaatagcaataagatgataaactaaagatcagattcgttttccttgttgtttctttctgattccaaaacaacaaaattttattgtaaggttg

SEQ ID NO: 110305 - DNA, 833 bp, Aquilegia coerulea
  Intron number 2 from transcript AcoGoldSmith_v1.001222m (l ocus AcoGoldSmith_v1.001222m.g) derived from phytozome v7. 0 (chr-ID scaffold_32; pos 368005 to 368837 reverse strand )
gactctgcagtttacctgcggatctattttcttgggtatgcctgcactctcatataaatctcgaactgtaatgttttccttttcattatcaccagtgtatttttttttttatcactaataaaaaaagcataattgcctcagataaaagaaaaatcttttcttcgatcaatcacaaagaaaggtcttataaatcaaactaatatgttacttcttgttgtaaaacataataggttagattgtaacattcaaagtattcatttcttaaaatcgaaggtggtaaacaccatggtcatctcttgcttttgtgcgaacataagttcggatctggtaggaagttggcaattctttcagaaacaaaagtgcaaagacctgtcataacatatgatcctcccccacctccttccgtttcagcgaattgtcattaatattatcctttgagtgacattataacttcttattttgataatcattgttagagagtgtgatagttgttatcgtagttgttagagattaaggagagtgtctcctttgctataccaaattgaataataaaatattaaagaatagaagagaatctattcagctgagagttgattataacaaaggatacattgtccttatataaggagaatatccatacccatagtcttacctatccaatgtgggactaaagccgaatataagatacctctataactcataagatatagtattagttattaggtttactgttagacaaattctagatctaacatttctctaatgtacttctgttattgttgttcttttttttttcagactcaaaatctttgttcctatagcagtgcttgctt

SEQ ID NO: 110306 - DNA, 338 bp, Aquilegia coerulea
  Intron number 2 from transcript AcoGoldSmith_v1.007967m (l ocus AcoGoldSmith_v1.007967m.g) derived from phytozome v7. 0 (chr-ID scaffold_3; pos 8615041 to 8615378 reverse stran d)
gaacaaaggaggccattaaaaaggtatggggttattttttgtttcaatggggatcattcttaatataagatatgccgtctgttttttttcccagccattaatgggaaccccaagagttttattaattcgcctccactggcatatctcatctaaccattctctctgaccagtaatctttccccccaacaaaactatagttttcttctttacttttgattctgcttagaacttgtagcctgtcttagatgtttttacatatttggttagtataacaatggtataaggttatattgatttacacaggcgagaaagaaggcggatctcaatcgaacagaaga

SEQ ID NO: 110307 - DNA, 906 bp, Aquilegia coerulea
  Intron number 1 from transcript AcoGoldSmith_v1.005414m (l ocus AcoGoldSmith_v1.005414m.g) derived from phytozome v7. 0 (chr-ID scaffold_13; pos 286548 to 287453)
accatttagagttctcttcatcagtttcttcacaggtcagaacctttttgaattaatctgttgttattgatttataattttttcatgaaatttgaagtttccaatggtttgggtttccttccaaaaattttaattgttcattaaattgtgtgaaattgatactaaagaggaagttgagctactcaattttatagaattagtgaactgtcaagccgaattagaactagtattgaaattggtacaagtttaagttgctagttagtccaatttgtatatgtttattttatatatcacttatgagagaagatcatttcaaatgtttggtaaagaagtagtttttactgagaaaattatgttgcttaagctttgttttgaatttccaatagataaaacttagaagaattgtgtagagctatgcaagtgtgtgattgttgcataatttagattgattctttgatatagcatttagtaaattagcaccatgatgaaaattacacttatcttttaatgtggaaaacataaaagagttatcttgatgaaccttgcattggtatctaaccttaaatggactttccttgactcaataaactttgcatcacttgtgctgataatttgtttcagattatccaacaggatagctgcgtaatcattcttgatttattagataatgatttttcaaggtttactttcctttatctgtccgacctttttactattcatccatgatatcttagtagagctgcatcatctagagtagatgaccttggttgattcatagaagtcaccttggcatgatttgttgtcaatatattatagtcatcaaacttttgtacagtagaaccgcatttgaaattctaagacttgggatcttatgcaggttcaatatattcagcagaatttcacttt

SEQ ID NO: 110308 - DNA, 868 bp, Aquilegia coerulea
  Intron number 1 from transcript AcoGoldSmith_v1.026737m (l ocus AcoGoldSmith_v1.026737m.g) derived from phytozome v7. 0 (chr-ID scaffold_13; pos 1649202 to 1650069 reverse stra nd)
ttgttaaacttcgatttggtgttaagcgatccccggtaatgattacttctcattctttctctctttatatggaatatttagtcttgggtttgagttagatttgttgattttgctctaaatttgttcaagatttgatttttagtgcaattttagtttgaattaaaaaaatttagatgagatttgggaagttggtgattagtttgagtacaatcatgtttaattagaaattgtaaaagcaattccttattaaatgaagctgatatgtggcattttgcttaattaatatggacgaaatctatgggttactgtattttgcagatgaaatgtttgagcaatatcccttacattttagagtttgtagttctttctaaattatagttttctgccactatctaaatcgtaaaaaaaaagaacaactcaattggaagatatcaatcacattgaatgtctaatgttattcacttgggttttgttaatggaaattgaggattaaaaaggtcttcctttctttgccatacatagtttcatgactacatgagcatcataactgccattttagcaagcacaaaattggaaaagatagggcagacagctgagattttatcgccttgctgccatgtcggcaaaagaagaggttttaatttctttggattcaaaccaatggagagatatgttgaatggaaagatcagaggagagaggaagagatatatgcgtgaggaccaagtgctccaaaatatgcccaaggaaggcattaacagtcattttttttttcattttcggtttttattagattgccttgatcaagaaaatttaattaatcagttttagttataatcttatgtatctcattttgagtggatataggat

SEQ ID NO: 110309 - DNA, 1003 bp, Aquilegia coerulea
  Intron number 3 from transcript AcoGoldSmith_v1.008372m (l ocus AcoGoldSmith_v1.008372m.g) derived from phytozome v7. 0 (chr-ID scaffold_58; pos 296643 to 297645)
cgtcaggctactgctcaggtagcggtttcattttccatattttttttcttttgaaacatgtttacaagaaaatacactggagacgtttccaactagaatggttttggtagttgcccagaaggagagtggggcaattaatgcaaaaattactcagatataatcttatggaatccaccttgtttatcctactgctatagcagatctaaaagggatttataataattgtatttgtgccttgtactgtagtaaaaaaaaaaaaaatatatactggatagtgtgatatcaagaaaaatattgtgtaaaaagttttatcactgcaaaagaaaaatatcaaaatttattataaaacaagcattttaggataataagatagcaatactttaactatgaaataacaaaaaatacaaaaataaacactcttgtgcctttaaatctaagtgtgtgtgtgggcaaaatatatatgcatacatgaaacagagccacagcataaggtttgtgtgaagtacataagttgtgaacataggaatggcaataaaaatttcggtgaagaatcaagttcagaacttgtaaacataggaatcactaattggttagtaggcttatgcagtctttagggtccaaatttgtattcttgtactgtggttaggtacaagtaatgtcagggttttgcattttgggaatataattgtaaatgcaccatctcactttatgcagggtaaacagctaaaagtagtatgccaacaagaattaaactctagatttccaacctgattccataccccacattctcttcaaatgaactaaatgtcttatatgacatcatgtgtccacattcaaaatatatagcaaaagtagctatgtttccaaaacaagtcctggtctcaagatcggtaagcccattctagatctcccctgattcttatgcttttgatcaaactttatttatgcaagttttgtctttgttgaaggtgattgcatctcagaagcgttttgaaaatcaata

SEQ ID NO: 110310 - DNA, 390 bp, Aquilegia coerulea
  Intron number 1 from transcript AcoGoldSmith_v1.015509m (l ocus AcoGoldSmith_v1.015509m.g) derived from phytozome v7. 0 (chr-ID scaffold_2; pos 8442872 to 8443261)
atagaaaccagctggttgttttttcttcatataatttaaatagatattttttgatgcacattttgtttgaataataacttgtgcgcttgatgattggcaaacgaagttctaattaaaaagctcattgatgtaattggtgagaaatgtagcattattgatattattgtttattttaatgtaccatgtacgtgttagatccaagcttggcatggagcacttgtatctgaaaattcaatagagaaatcaaatggaaaaaaagaagaacaaaaggttagtagatcgttgttgttatctaggttaaactatgcttagctttatagagattggagttttattgaatgactttcttttgcagtcacttcgtaggctagctcaaaatcgcgaagctgc

SEQ ID NO: 110311 - DNA, 594 bp, Aquilegia coerulea
  Intron number 1 from transcript AcoGoldSmith_v1.003149m (l ocus AcoGoldSmith_v1.003149m.g) derived from phytozome v7. 0 (chr-ID scaffold_13; pos 1776502 to 1777095 reverse stra nd)
caaagaagcctggttgtgaaaatagcttcgttctggtaaactctaactctcttttctctgcgaaatttaagtaattttggtgtttttattgcaatttgtgtcataggattactatgaagaaatggcaattcaattataattatagttaaatttgaagtctaaggttataatttttctgcggtgatccagttcccttctctgagatttaattaaccccatagatatcttctcagctatgaaattgcagttttcgttgatgcttgcgacttatggaattttggactttagatagacggtggttaactgcttttgatgatatgtagttaaaatagaatttgattcaagtgatttccaagcttggttgattgatatgatattatcttaattttctctgttcttttaaaggtccctttattgggttatttgaaccaatcatttagtttgttatggaatcgggaattagatccactttggaaagtcttaaataatcacagctttttctgaacttttacccgtctgttatatgagatgtttaatatatgttgttgatgattttaaggtaaaagtccatacattaattgataacgtagaagg

SEQ ID NO: 110312 - DNA, 383 bp, Aquilegia coerulea
  Intron number 4 from transcript AcoGoldSmith_v1.000239m (l ocus AcoGoldSmith_v1.000239m.g) derived from phytozome v7. 0 (chr-ID scaffold_91; pos 336690 to 337072)
ctgctggaagttcgtgattacctcaactttagctgctcacacttcctggatgaaaaataatcttttgtaatttgttttcttacccatgccaagtacttttacttccaagagcctgagaacaagtaccaaagaattaatattagatattaaaaagatagtctaggccatatatatatatatatttctttctgtttttgtctttttgtttcaactatggagtttgcttctttggttgcatatgccagatgatttcatctcattattttagtttgagctcagatctttcctattttttattcaacaaataattctattcttcagaggttccattctgctttgatataaagcactatctttacataaatgcagggttttcaaaaatc

SEQ ID NO: 110313 - DNA, 697 bp, Aquilegia coerulea
  Intron number 1 from transcript AcoGoldSmith_v1.000777m (l ocus AcoGoldSmith_v1.000777m.g) derived from phytozome v7. 0 (chr-ID scaffold_3; pos 8750017 to 8750713)
aatttgaggtatggttttaatttattagataataattgtaagttttctgttgtcattgttagtttatatgataacaagataatgatttataaaaatgagaatatgctgtaagataaaaggaaaagaattttgaatttttgatcaatgtctatttactatgctattaatatgcatggcgccataggtacataaacccctcatttcacctcaccaattccagtgaataacagaatcagttgaaaaaaatctctgtaatctttcttcttttttttggtaccctcgcaacctcctttttaaatttttgctatctttttctcttttttttttccagattagagaaactagttcaccgacaagtgcaaaagaacaataaccaatttttttgctcttcatgaaagtcttatatttcaaaaatgagtttatgggagcatgcctttcttaggtgttttcaaaagttttctatgttcaacagtttatttctcccgttctttaagataggtgccaatcgtaaactttttgacaagaaatatttctgttaagagtatattatagatccaccttataatctgtcaacattattagtgagctttgtagcatccttcaccttaacattctgcattgctgtctggttaataatgccctaatgggtctcccttgagtcatattttaaatttggatcactctttctttatgtagg

SEQ ID NO: 110314 - DNA, 840 bp, Aquilegia coerulea
  Intron number 1 from transcript AcoGoldSmith_v1.002296m (l ocus AcoGoldSmith_v1.002296m.g) derived from phytozome v7. 0 (chr-ID scaffold_34; pos 1491618 to 1492457 reverse stra nd)
ccgcgttcctcgtgaatcagttgcttgttactgaggtaggaaaagtgttatacttgtgttaacccatgttgctcttacggctagtgcgagtggctatttactattgtagttttgtctctactggtgactaaaggctcattggaaaagcaagtatgcaattactaatatttgtgaattggctaatcctagtatagtataactcatgactcatatatgttctgcttttagttaaacgtaaatgatgattctttggataaatttaaaatccatagataattttttgtactgaaaaaaaagctgacatgttagtgccgcaaaatattaaagatataaggcccattattccattcacttgtcattttgtcaatctcttcaaacagatttctcatttaaatatgtggctaaatttgtatgtacatgcatgtatgaactctaaactataaataacgaagcatttttttcctcattataagcaataaggagtttacaaaaaaattcgctgatcttttggagaagttgctgttgtaaaacatgaaatttgagatataaatggaagcaaattttgttgtttgaatcttctatgtgtgttctggctctagacaacgagcaccgcatcctccccaatcaacaccacatcctccggtgatggaacagctttgtatatatttatgcatccatttgcatggtatgtctgtcagcatgtgacttgtgagactttgcatctaatctaatcccccacttttattccatttgtacatttttatattgcatattttgtgctgtgtttttttgtgctcatggatttcttgttgtgtatcatgtagttggaaagtgaaggac

SEQ ID NO: 110315 - DNA, 828 bp, Aquilegia coerulea
  Intron number 1 from transcript AcoGoldSmith_v1.017445m (l ocus AcoGoldSmith_v1.017445m.g) derived from phytozome v7. 0 (chr-ID scaffold_26; pos 854540 to 855367 reverse strand )
gatagagcggaggagttcttttcagcaggtatctctaatgtctcaggtgaattataattactgttcataaacaaggctactgtaggtatgcatctggagtgtactgattgtctgattcttaaactggtacacattcaaattaaaccttgataaccagtcaccctaaataggtcattcattgggtaatttagttaggacctaatcaaacacatctcctctgagttagtcaacatgttacagatttggaattagttctcatttgaccaaacaactgtttaggtcttaattagaatcaatttttttctctgtttggtcattttctccctccaaaaccgaaagaaaaaactgacatgttatgattagaatttggtcgaatttgcctaaacccaaggaaaagttggctgaatttgcatataccccagacttttattttatttgagttaacccccagactgtcaacttgtctgttactgagctgtctgctgactaggatgataatattggttacccgaaaatggcatcatcatagtataatgttccatgggaggtaatgtagacatttgaacaactattcagatatacactacagtactataaaaagtaccaggaattccgctcttgatttcaaagatctacattttgaagtagtgtatatctggaattgattttgatttgtgttgaattgaaacacatcatcagcatgcacggattcagaaacttcttcattctaagaaggtaaataaaccgattaatatggtactctctctcatctttagatctgttacttttgcagaaagaatcgtcgaatcactaagctcaatcgaacta

SEQ ID NO: 110316 - DNA, 437 bp, Aquilegia coerulea
  Intron number 2 from transcript AcoGoldSmith_v1.007631m (l ocus AcoGoldSmith_v1.007631m.g) derived from phytozome v7. 0 (chr-ID scaffold_3; pos 9906328 to 9906764)
ctagcagtttctggagctagaggtaatggtggctttgagttttcaagtttgttgttgattttactgagaatgttttgattttcttgaataactaaacaatgtaacaaaaataacacaaatatgagtagaaattgtattgtgccaaatatgagttaaagatatattagcgggtgcttagtaattcctccaggttttaaagcaattgcttgtatgatggcacccatgattttattctggagtatactttgattcttatcttgcaaataataggtaggaatgttgttttttacaattttgtatttattcttgctatttatcgaagtaccctcttacatgtgtacactagccaaattataaagtgccaccttttaatattgttaatgctgcacattaacattatccctttttcaaaatatttttagagcttaaagtcaagg

SEQ ID NO: 110317 - DNA, 969 bp, Aquilegia coerulea
  Intron number 1 from transcript AcoGoldSmith_v1.003648m (l ocus AcoGoldSmith_v1.003648m.g) derived from phytozome v7. 0 (chr-ID scaffold_39; pos 60879 to 61847)
aagaagggtttgttaaagctacagattttaaaaaggtatgaagaaaaagtatttttaatggaaattttcatattttttattatgttttgtattatttattgaaattgtattgatttgagctttttggaaaatgatttgaggttgttaaaatttgtgttaattatataaacttgagatgtttagaattgaagtaagaataagagtttgcgacgattttttgtacttacatgaaacacataaacaatcacagagaaagcagaataagttgataatggcaatgcaacaatcctcaaaataccaaaatctactgatataataccatgttgatgattaccccctcacgccccctgtcgttgatgcaatgtattacattttcttatgtaccaacggccccctaggccctagttggacttgaatcgtcaacccctcaaaagtcaaaaactattgccttgtgatactatcattagtatgttaatacatattatgtaagttgccaggcccggtcgaaaaacgtaacaaaaattaatgattagtattactatgttaatgaccactggtctaatatggaagacacatgtcgaaatacaggctgggattgggcctcgaagtattggaagtctcgtaattttaaaaaattcactatcaaactggagaatttgttagttgttacacgccatctttaaagtgtaagccattgttattttcatcaaaagtatcatgtgaaaaaaattctttgtgatattcttactgatgaagaataaatacagaactccatgtgattttgagtcctgaatttattctgtctaatgccaaacggtttgaatgtgtctatgttaaaatcgttagatagcggcacagcattttgttatcattctgcatttgtacgcatccatcaatctttctgtagttgtttctcaaagtttcagtaattcagtttatatattgtattgcagataacagctggaaact

SEQ ID NO: 110318 - DNA, 717 bp, Aquilegia coerulea
  Intron number 1 from transcript AcoGoldSmith_v1.024853m (l ocus AcoGoldSmith_v1.024853m.g) derived from phytozome v7. 0 (chr-ID scaffold_13; pos 2707358 to 2708074 reverse stra nd)
agctcctatttcacaggaaaaacttgaagaggctggtgagtgcctatcctgacttaaatgttttgaagttcatgtaaatgagaaaagtttgctatcttctgttggaattctaactacccatgttagtagtatcatgtctttccttttagtatctgattgtttcgtgataaaatgatttttttttcctcctacatcactgattatgttacagttttgttcggcactccacaacttttagtgtgtatttgatttcatttggaacatttccctagtcaagataagaagatggaagtaaatttatttctcttcatttgatatttgaaggcttcaacaactcagataatattaattttgatgtttatattgcatcaataccattttcagacctaggaaagaaaattaacctgctttttgagtgagcaagactagctgggttggttacctgctgctaaccacatttcccaaattcctcaaagtggggtttttatgctgttgatgtttttatgaatactactgtgtcagtttggagtttcattacttatctactcatcgtagccttttttgtctgtgtctacaatgatgcaattacgtcttcttctttttcgtgtttgaagtttctattatggaagtcagtctttacatagcctatgtgtgaattcttagcatgtgcaccttacatgtgtattcttcttgttgtagaaagaaaatctcgggtag

SEQ ID NO: 110319 - DNA, 710 bp, Aquilegia coerulea
  Intron number 1 from transcript AcoGoldSmith_v1.021767m (l ocus AcoGoldSmith_v1.021767m.g) derived from phytozome v7. 0 (chr-ID scaffold_13; pos 5485067 to 5485776 reverse stra nd)
aatcaggaatagtgagtttctctctctcttctttttcttttttatgacttttgcgatttgcaaaattttgaattggtttgtttctgagtaattcagatctgttaagatctggtttgaaaaaacattgatcttgattcttttcgtttaagatctattcaatttggttaaataatgtagaatttgtaacctaagagaatatgtgagatcgaatttttatgattcgttaatgaattgattgcgattttacagaatttaaaaataatttgttttttttatattaacatagtgtttgagaaatttatagagcaaagagattgaaggaaattagcgttttgttgttattgtggttctttctaccaattggcttggctgaagagagcaaacttattatcctaacacaatatctcaaatagcatgatctttggtgtagaattgttggctttgctgtattttgcataatctttatggattcaattttgccaaacataaaactatatatgatcgtagaatagaagctggtgcaattcagttatgcctttatgttaagaccgtcatgaagtgcattataggtttttttttttaaaagaattctatgtattgcaagtcacctttactaatgaaaggtaaacttattatagtttgtgatggatatatgtttcttttatgtttttgtagtgattatctgttcaagcttttgctcattggagatt

SEQ ID NO: 110320 - DNA, 810 bp, Aquilegia coerulea
  Intron number 3 from transcript AcoGoldSmith_v1.000423m (l ocus AcoGoldSmith_v1.000423m.g) derived from phytozome v7. 0 (chr-ID scaffold_13; pos 1997035 to 1997844)
ggttgcccaaatttgaagcatcagatttagagaaggtaattatgctattttgtggtaactgatgtaagaacctatttaacaaactcacccagagaaaacaaactttagcacctagaaactaaatatgacttctgtttgaaaactggaacaccccttcttcaaagaaaatagttaaactcatcgtcatcaatattttcactatagctgaaataaggacccctttattatcaaagagccgaattaatatactgcaaagtgaggatggctgtcatctctgcttatagtttaatagttgtgcttgagtggaaatctaggttatctatttaactaggattagatatgtttctaggcgaactagcgatgtctgaaagttgaaactgatttatttagtagttcatcaataagcttgaattagttgatgaataatattacttgaaaaatttaattgattgattaaattcttgataattacattgaaattgtccttatacaggatttgctaacttgcaatacaacaatgcttatgttaaaggacatccaacaagtttattatgattcaataagataacaagctaccataggaagctagttaggaaacaatggtggaaagcacaatctagactttatacaagaaagggataaaacactcagtgtcgtacttatacagtgtcttcatgtatattggtttggagggattgatactatgttatcaagtactggatcttttccatttttctatttgttttttagtgttctaacagtttgggttttcttatatgttttacagggatctattacaaaagttttgga

SEQ ID NO: 110321 - DNA, 780 bp, Aquilegia coerulea
  Intron number 3 from transcript AcoGoldSmith_v1.020778m (l ocus AcoGoldSmith_v1.020778m.g) derived from phytozome v7. 0 (chr-ID scaffold_3; pos 2800199 to 2800978)
cacccaaatatctaacagagtcaaggttagcagtttttctgtttcgatagtgatttgtactcttgttacgtttacacaattggtttttatgtttataaattatgagagtgatccaaaacaatcacaaagatatatttaccaacatgcaaatgatgagttttaagaggaaaaaattgtcgctcaaggttttttttcttcttattcatgtaaatggaaaataattcaaagttagaggggattttttctttgccccatttttggggttacaattcaaaacagtggaagtcggctaatccttgtgtgtgtaacagtgacgaagtgcagagtggcaaacaaaatatgccaacaataggtgctcttaaatcaaagagtgattagtggtttaaatgtaatagggttttattgaaaatccaatactcgaaagattggatatataattgagaagatgactgatatgaagaattcatatctagtatgacagcaggacctaaaggtgtccagtggcccactggtcaagccttgggatgttgcacctcatggttttgagattgaaatctgacagtccctgcaaggttattttgagtattagctccttcaaaaattgtcaaattgatatgcataactagttgagatacaacgtggatggttactgttgtcctgttaccttgtcttcttatatatattccatttaattgtgatatttagatataaagtttatgtacaagaaaccagtgtgacttgcaatctgttatgattgcaggaagggatctcgactaggac

SEQ ID NO: 110322 - DNA, 650 bp, Aquilegia coerulea
  Intron number 2 from transcript AcoGoldSmith_v1.012286m (l ocus AcoGoldSmith_v1.012286m.g) derived from phytozome v7. 0 (chr-ID scaffold_26; pos 224555 to 225204 reverse strand )
acagtctttgtaagatccttactgaaatattaatactaccgttcctatgtttacatatattggccaaaattttgttttaatttatgagttttataatgtgcatctaatatgcaaagttccaaaccccttgtctaaagttcaatgctttgtaattatcatgtttattcgaactttctctaataattcagatttgatgtcttagatgctatccaaactggcatgccatcagtaacccttaccaaaacagttactgaacttgtgacgtttttacttctttgccaatgcttcagggaaatagtctttgagtgaaagaatacatgtatatggcagattgaattgtgttataacaacaaaacatgctttcttgtgttagttgtatgcctggcattggacataatctcaatgacaatgatgtattcattacgagtttcatctcaacttatcatggtgtggtattacgcttttaagaatgatatttctgtatacataataatataatatcatatatgcattagtgaaatatgtattgccatccagattaatttctgtagcccatataattccaaaacgaagcgagtaaagataatggtgctttcattctaatctagtcttccaattgtcatttccaggttcaaaacctactccagcaa

SEQ ID NO: 110323 - DNA, 577 bp, Aquilegia coerulea
  Intron number 1 from transcript AcoGoldSmith_v1.012286m (l ocus AcoGoldSmith_v1.012286m.g) derived from phytozome v7. 0 (chr-ID scaffold_26; pos 225215 to 225791 reverse strand )
tctttaccaacatcgagcttcattgaacgaacgttagttaaacttagatttcatcattcggtttgaaatattatgatttattgattccacttgtcatttaattttagggtttagtaagtatttgctggaagtggaatgatataatttaggggtttcttatgttttaatcctagtttagatctgttgattttagtgactttgaatgatttatagtaattgcttcaagctttgatatttgatttcgatgcataacatcatacatttggtatacgaagtaaattttgttaggattgcatttgactgattttgtgaattcaaatcgtgaaattctgatataagaagttgcgtgtttcatgagaccacagaataatgtgatatttgggccgagtcattgctactgttgttgttgagtcgataagtgctctgtcatgaattttaccttaaaataaaatttgtctcttatttgcactatgagaactgtagtgtattatcttcaaggaaaaaaaaatagtataacagaatttcattggctttcctcgcaggacggaccagattcagaagatccaaagcaaagcac

SEQ ID NO: 110324 - DNA, 620 bp, Aquilegia coerulea
  Intron number 2 from transcript AcoGoldSmith_v1.003165m (l ocus AcoGoldSmith_v1.003165m.g) derived from phytozome v7. 0 (chr-ID scaffold_35; pos 1609123 to 1609742)
tcaagacttcacttggtcccgttggacttgataaggtattcattgttgcaactttacattgaagattgtattacatattcattggattgcgatattgaatagtgtagcttttgttcattatgtttgatgatttaaggagtctacttggtatttgatttatgtaaaatgcgaaaagcagtacaaatagcggttctgttcgaggcgagtagaactgtagaagttcatgtacttagcattgaagtagttacaattagttcttcccaatttttatagaagtaggcaagtagctaatgttagttttatggagctattatagaataaagtagctaactaatagataacttagtgcaacatttatgtgacttgataaagtcctagaataaattgacttggtgattaacttttgtgggtaacttgacattccattgtccacaacttaaatctgtttctcttcataaacttaaaaaaaagctaggctttggacaaaatatagtacgcttcagtttaatcatccatctgatttgtgtgtgtgtgtgtgttttttttttcattactttaaaacaatgtgcactgtttaatcacacatatctaccgtgccttggcatatttattctatccag

SEQ ID NO: 110325 - DNA, 705 bp, Aquilegia coerulea
  Intron number 1 from transcript AcoGoldSmith_v1.006758m (l ocus AcoGoldSmith_v1.006758m.g) derived from phytozome v7. 0 (chr-ID scaffold_13; pos 1425120 to 1425824)
ccaaagataaaccacgctttatagctagtgcttcagtatgttcagatcacgaccatttactctctctcctcgtgcaagaataaaatggttaggccatgaaaatagaacataacctatattgctttcatgtaatgcaaacacaaacaaacaacagatttcagagtttggtcttgttatgatttctttctaataatgcaaacacaaaaaaaaaaaaaacagatttaagagtttggtcttgtattcttccataaacatgttacttattcaactacaacacattcactagcccaaaaaagtgaactatattggttcctaataaccatcaaatttgcttgcttaacccaccacatggcacatgttgagttaggcacccagccaaacaaatgccatcaagtctatccaactattttttccaatttgaatagaaaaccaaaaatcttcagtgtatctagcattatgatttatgaattatttgtgtttatatgtgtgtattgcttcttgacgtttgaaaatgtgtacacatcatcaacaccaccaaatcttgtggtgaaaacacgcaaacacacataatacatcatctgatttaagctcaactcattctttataaaattccaatttctaaaccatataaatttaggacaaaatccatttcacctttcccgtactccaggtcttctcttccttttctatctacaacttctctat

SEQ ID NO: 110326 - DNA, 869 bp, Aquilegia coerulea
  Intron number 1 from transcript AcoGoldSmith_v1.014946m (l ocus AcoGoldSmith_v1.014946m.g) derived from phytozome v7. 0 (chr-ID scaffold_16; pos 1435694 to 1436562)
acttaagtagggaaaataaaaattttgactccttagtataggtagaaatacactacccacccccaacaagttgccccgctgttatatcaattctcaataatccttggagatataacatataactgtactttcaaagatacttgtacaagtctacaacataccctcaaggagttttcattttcccaatatgataaatttattggctatcaaattgccttttaaataaattttgttgaaataaatttataagagaaaaattgtgtttcgtcaccatgtttttggggcaaataatttgctcagcttcaccacttgattttttttttatttgcatttcgtcaccaatacgtcccagcttcgtcaattctaacggtcaactcaactttgacctggtcaaagtgttatcacacaacaaaggcttgggtttttttttctctattttcccttcgttgttattgttcttcgtttcgttgttcttcgatttcttaatttattgaagctcgatctctgtcaagtatatttgaattagtcaactaatggttgactttgtcaactaacgagggtgagacggaatggtgactaaacacaagtaaaaaaataaagtggtgactctatccaaatataccccaaaaattgtgacgtgtgtccaaaaatctcaatttataatcaaccaatataaattgacaaggggggcctttccaagaaactgcttaaatcaccaatataccaatcaaatacctaatatgccaatttatgccccttctttattcatgtcattatgtcaaatttatgtttggtttgcatatgttaatgatacattcccgaaatttgtaacaggtcattcttaaaaacctaccccctaacagttccct

SEQ ID NO: 110327 - DNA, 595 bp, Aquilegia coerulea
  Intron number 1 from transcript AcoGoldSmith_v1.017770m (l ocus AcoGoldSmith_v1.017770m.g) derived from phytozome v7. 0 (chr-ID scaffold_3; pos 3692209 to 3692803)
attacaagcctttagctgctgcaagtataggccaggtgatttgactgacaatttggtactcaattttctcacaaattctgatatcctttgctgctacagtatttgatcttctcaatactatatttgtgtgtttaatgtggtcacatatgtatttgagaggttactgattgtattaaatatttacctcaatacatccacaattttgttttcttagtttacgagctttcctcctcttaataatggctccaaaatgttagctatatttagacttaattttcctgctgatcagaaaattattttaatgtttttgcaaccatgtttcttgaatattcaaaattgtatgaatggactccgaagttgtatgcaggcttgctgcagtgtagcactggtccttgtatcctttacgttttcttatttattctctgagctttgtacacgattagagtgaagttgttcttcattttctttcttgtattaccccctcataatcgttaataaaagttttatatataaacggaaaaagagagctgttgattccatatctaaggcttcttaatttgaaatgatctttaggtccatagggctgtcacaaaag

SEQ ID NO: 110328 - DNA, 664 bp, Aquilegia coerulea
  Intron number 2 from transcript AcoGoldSmith_v1.023456m (l ocus AcoGoldSmith_v1.023456m.g) derived from phytozome v7. 0 (chr-ID scaffold_13; pos 2520212 to 2520875)
cccacagctggtaactactttctcatttgctcagttttcaacaatttaagtatatttactagcctatgtttgtttgacttactagatttctttcaaattaaatgttgatactctgcttgtaatttcacccgacaaagggctttgaaagactagattctgcaagccagacagataacaaagttatgccttcaatcattttcttggttatttttatcaattaaacgcagctacccagaggttactttggattctcctagcgactagcatctgtttatataaaaatcaaaaagaaaagctaatatagatggaagtaccatgtaagtttaatattgtcaaatttggtatttaacaatcaaaatcccaactcaattgaatttccaatttgacgggcatcagtaatagtaaatatttaaatcataagcttatttgaagatgaatagggatatagaatctgtattttgaccactattgattgctgaagaggttgtcatttagattattttatcggtgattttgtgctagaactcacgtcatattaagtatcttgctgcatgtggcttttactacatactgttctttatggcctttgccttgtttaaatgagtacatgtgattatatggaagttggtttatcaagcatacataatatttttcctgtacaggc

SEQ ID NO: 110329 - DNA, 822 bp, Aquilegia coerulea
  Intron number 1 from transcript AcoGoldSmith_v1.025266m (l ocus AcoGoldSmith_v1.025266m.g) derived from phytozome v7. 0 (chr-ID scaffold_2; pos 7285528 to 7286349)
gcaaaacaattcctgatattacaggtactatttataaatgaattaattgtgtaatgtattacttagatctaatttttatctttttaatcgttaattaaacgagagtttagggaaataaagtttcataagttgatcaaattggaagtgttggaacagagaaaaagtacctgaagaatgtgaatttgaatgctaaagaactcaacctgcttcaaatagaagagttaaagaaagaatcgttgacttcgatcactgaccttctgaacctgcaattgtggaaatatttagtttaaattgaaaacctagaaatcaaatcacactaatgaaatcgaagtacaacacttacaagattcaaatctcgatgaaatcttcgatataggttttttttttttcctacattgattcaagggtttgaacgcttcagctgactcgagagagagagagagagagagagagagagagagcgcgattgttttgttctccagattttgaacgaagaaaaaccaacgttttcttttgtcacgttttgaatggatggcctttttaacggtggttctcgagatttgtataactaagttgtgcggtgatgatcaggtactggttgaaatatactggagtagtggagttggctatcttttgtttgatgaaatgccatatagatgttttttttatttttttatttttggtgatgatatagatgttattatcaatttatcagttatcaaatgaatgaactggtttaacataaataaacatactatatttgttcttgttcatgatttactcctatgataattccacacagctgaaatattggggctacct

SEQ ID NO: 110330 - DNA, 500 bp, Aquilegia coerulea
  Intron number 1 from transcript AcoGoldSmith_v1.024062m (l ocus AcoGoldSmith_v1.024062m.g) derived from phytozome v7. 0 (chr-ID scaffold_936; pos 6305 to 6804 reverse strand)
aggtaatggacctattcgctaatagttttattgtggcccatcactgattgttcatgccttctttttgctgatagcatttgattattttgaaatttattcagtttattcttatgaactaatattagaacaaatgatcgaaaaaagaaaaagttatgtgttcagataatcaagccttatttgtggtacgaccagttcacaacttacctcacccatagattatagcaatgtatccttttcgcgtagtctcacttctttctgtcatacgaaacacccaagattaacaaagttactgttcattgagtatcacattttattgcctgatggtaatgatttctctttgctttcaaagtgcttgttcttgtttttttccttgttgggtgtctgtaggaggtaatacttgtcttaaaacattttggtaacaattattctttgcatgtagcattttttaggtgataatctcgagtatgtgtagatgttcttacctttttttgcactgcagg

SEQ ID NO: 110331 - DNA, 1004 bp, Aquilegia coerulea
  Intron number 2 from transcript AcoGoldSmith_v1.026307m (l ocus AcoGoldSmith_v1.026307m.g) derived from phytozome v7. 0 (chr-ID scaffold_2; pos 7292004 to 7293007)
cagctggaattctttctgaatctggaacagcaatagtgagagagtgttcaaaatatataccgcatactgcttatgatatcatgcatatgcttaatactacttcatgaagtcgtttttaaaagattacgatgagttactaacttattgaaaatttctgaaaccgatgcaaactaaattgtatattgatcttcaaattatcagtttatgtcaaaaatggcgttctgacttcttaatgtaagttcctactagataatgctgttagttgacagaaaattagtttgtattagtattcaaagttgagaattaattctattattagataattatatataagggaaaattagacttaacccccccccccccctattttggccacgttttgaataaacccccccatttgtccaagtttggactttacaccctccgtcagctcccgtccacgttaacacctatttatattttttcttcccgaaatacccttccctcgttcttttggaggggttaagtctaaagaaggaatgaggggtattttagaaagaaaaaatgcaaataagcgtcaacttgatgagagctgacggagagggggtaaagtccaaacttggacaaattgggagatttattcaaaacgtggacaaaataagggggttaagtcaaaatttccctatatgtaattattgatatggatgctacatcaacatcttcaggaaatggtgaacacatatatatatttaagatcctaatagagcttgcgtgcagaaacttaatagtgaattagacaaaataaggggggttaagtcaaaatttccctatatgtaattattgatatggatgctacatcaacatcttcaggaaatggtgaacacatatatatatatttaagatcctaatagagcttgcgtgcagaaacttaatagtgaattagacaataagactgacaagttatcgtgtttaattatgtcaattatgcagggggataacttgtccttgggcgagcaggttgagta

SEQ ID NO: 110332 - DNA, 974 bp, Aquilegia coerulea
  Intron number 1 from transcript AcoGoldSmith_v1.011315m (l ocus AcoGoldSmith_v1.011315m.g) derived from phytozome v7. 0 (chr-ID scaffold_2; pos 5660208 to 5661181)
aaggaaagggcgcagctgatagagagacttctttggtatgaaactattccctatttccctttcatctaaaattctgtcgagcatttagcatgagttggatcatattctattttttgtataataatagggagttgttatatctagtagatttttttgataattgaatagtatacgagataaccaatttagcggtacatatgtgaatgatttaagtaaaagacaaaaatttctattagattaaagaaaagggcttgtgggaaataaaattccttaataaaaatagcaataataagtatttttcattttttgctgaatttatgactactatatttaagaagaatgagataatgaggagtcttcctacagttatctattgtggatctttccttaggtggtttggcgccgattttttgtttttttgccttaccttgaattgccaactgtttgtgagcattttatcttgctttaattttaggcattggacatcgttccttcttcattatatatatattactttccgatgctcctcttatcaaaggagtgatgcatctcctctgctttacttttggttgcttcaccgttattcgattactgactttgtttatcatctattacaatgagatgatcttgaagaatcggtaacaaagtttgtcgataagcacttaagctctatcagtgccaaatatggatatattttctgctagtcacttgtttcacaattttgaaaactttgtttcattcaatttagtttttcatatattggtagttgagatggttgaatgtgagtgtttttaggttatggaaccaacccccgctctcccaaaagaacaaaatcaaatatatcataaaagttaataataataaaaaatatttgcatgcgattaaaatttgacccttcaaactaattgttttctttttatcctcttcttttttcacacaactttagcggcagtttgcaagaatctgtggagata

SEQ ID NO: 110333 - DNA, 671 bp, Aquilegia coerulea
  Intron number 1 from transcript AcoGoldSmith_v1.004490m (l ocus AcoGoldSmith_v1.004490m.g) derived from phytozome v7. 0 (chr-ID scaffold_13; pos 2937418 to 2938088)
tgttcagcaggtgagacaatataattctcatgttttttcttgtttctgtaatttttttttttttttaactttaattttcatacagtattgaaaattgaataattctgtatgatttttttaatgtgatgatgatctctgttcttttagatttcaatgtaggtttgttttgtatattagatccatgtgttgttttagatatcaatgatatcagataaccatgaagatattggttttttttttttgtttagatcttgttctgttaatgtagtaattatagttggttttatgttctttttcatagcttggatttgtttgttaattggatcaacttgttgtttcatgtatcaattttgttttgagaaagagttatgcttaatttggttgaggaagtaagtgagtaaggcagtcatatggattaatttggttttatactcaaaattttattattaatattgatttcaatattaataataataataatttgtctttgatatatatgtttgttgacttgaaccgttcttcaactatccagctccatttgtctttaccaattgggcgtatataagctttttgacgttattcagtcaaaacaacacattgttattttcccttcacccttacttgtttaacttctttttccatatgcaattaggaagcattggaggttcacg

SEQ ID NO: 110334 - DNA, 1003 bp, Aquilegia coerulea; identical to SEQ ID NO: 109241
  Intron number 1 from transcript AcoGoldSmith_v1.001755m (l ocus AcoGoldSmith_v1.001752m.g) derived from phytozome v7. 0 (chr-ID scaffold_2; pos 10019678 to 10020680)

SEQ ID NO: 110335 - DNA, 469 bp, Aquilegia coerulea
  Intron number 1 from transcript AcoGoldSmith_v1.022920m (l ocus AcoGoldSmith_v1.022920m.g) derived from phytozome v7. 0 (chr-ID scaffold_112; pos 278359 to 278827)
ataatctttctcttcgttgcattcgagctcaacaggttttttttttttttttttttcaaaatacccttttacttatatgtaaattttgattttaattgagtaattttgagttggtattgatgattttcaatctgcggtttgttgggttttgtttatttgttcttacattgcttttattttgttaatttggattaaaaattgcatttttatgttaatttgattggttgattattgttttagtgatttgggtttgtttaaattagtgggaatttggtgtaattgttgttaatttgataagaaattagtttaaaatcagaaatttggcgatgaaaatgtgtccaatggaatcttagaaaaattgggcaatatagaaatattattgaattcttcgaaagggttcataagccaagacatttttttgggtgtgttggttttgcagtcggattccagtgacgaagcagctgtaatc

SEQ ID NO: 110336 - DNA, 157 bp, Aquilegia coerulea
  Intron number 3 from transcript AcoGoldSmith_v1.009737m (l ocus AcoGoldSmith_v1.009737m.g) derived from phytozome v7. 0 (chr-ID scaffold_13; pos 3065356 to 3065512 reverse stra nd)
ttagattcttcatcttctgcaaagaacttccagtggtaattattacaaaaacccatcactgaattctgcttatttttttttttaaagtattttcatcagtttgatttctgaagaaaaccatgccacccacatgaacaggttttgaaagcttttgttc

SEQ ID NO: 110337 - DNA, 754 bp, Aquilegia coerulea
  Intron number 1 from transcript AcoGoldSmith_v1.016609m (l ocus AcoGoldSmith_v1.016609m.g) derived from phytozome v7. 0 (chr-ID scaffold_7; pos 7045949 to 7046702)
tggggacctgcccctccattttggatcactgatctgttagaggcagacaacctatcctttgtaaatttttaagctcataactaaatttttaagctcaactgcttctgagcctagcaatccaaatgtgtcagatcatcaatttatttatgagctcctcaggagagtgcagaagataatggatagcaacgtgatgttcgaacgaatatgtatttaggagaatcgggtttgctatccagaaaggacttgccgcgcagtttgtagcgcgtttgtcctctatttttgtgtaattctttgaccttatcaataaaatttggatttacattaaaaaaaaaaaaaaaacaaaacaaaacaatttgtttgcccgcgtaaagccaacgaccatacaaaccaacttttccctctttctttcctcttccgtccatttccttctctagtctccactcaatcacgtctacatgaaacaaattctcaaaaccctaattcatctctctctctttctttcaattcaaattatgagtaatttgaggtcgatttatcatcctcgcgcaatcttctcatcattattgtgttgttgcagtagagatcatcttcattttcaagctcgattagggttttctttccatcattcgaattacagatcatatcgagtgtcttctcctttcatttcttcatctcagttctttcttccacatttcttaagaaatcaccgtctttatcgagtcaattccagaagaacacttgttcgagcgtctca

SEQ ID NO: 110338 - DNA, 489 bp, Aquilegia coerulea
  Intron number 4 from transcript AcoGoldSmith_v1.026412m (l ocus AcoGoldSmith_v1.026412m.g) derived from phytozome v7. 0 (chr-ID scaffold_58; pos 1174821 to 1175309)
tgactggaagctgaagcttcaacttcacaaggcaagttttatgcttcaccaacttttaaattggttggaatcacatttctcctactacgtcaacaaaatctgcgttgtagactaattatacaattagtgagataatgtgttgtcactctgtgtttaggccgtcccctcctatattagcaagcaatataaaccctgtatatttaaaagcattcttcttgatgctttgatacaatctatttagctaccaccaaattagcaaaatatttacatatcctgtttctttacaaaaatctgcaaggtagtctgccatctcttttctaggatctcctcatgtaaacctcttcaatcatgttgttgcaactatgtgtatggtcttcatcttaacaaagtgaatgttctaacaatattgaatgttttaacatttaattgattgaacaatgtaactcaaactgattttctgttgattctccattattctttagaagcatt

SEQ ID NO: 110339 - DNA, 514 bp, Aquilegia coerulea
  Intron number 2 from transcript AcoGoldSmith_v1.022832m (l ocus AcoGoldSmith_v1.022832m.g) derived from phytozome v7. 0 (chr-ID scaffold_35; pos 385739 to 386252)
tcggaactggttacttcattgaggtttgaattttgtttcaattcctcaatgaatatatattttttcccaattaaatgtccatttttgtatgcgttttgattgcttcgatgtgttttgttttcatgtaaaggtagggtttttataatacaaattgtttattgcatttgtgaaattgattgtaaatctctgattccaccagtcatatagggttttagttggtctacaaacaggttattttttgagctaaagtggatgcttgtgttgtataaagcttgtttatattggtgataatggtacacatattcacataatcttcagctcaattttgggcatatgttctaagaaaaatgtctgagttcttactgacttcaaaagttttttggttctcataaacaccagaaccaagttttcagtcatgtagatacaaaaataatgatacactagtgtctttattcttatattgtaattatacgtctaacctgatattgttatctgacgttcttatcagaaaacc

SEQ ID NO: 110340 - DNA, 968 bp, Aquilegia coerulea
  Intron number 1 from transcript AcoGoldSmith_v1.010195m (l ocus AcoGoldSmith_v1.010170m.g) derived from phytozome v7. 0 (chr-ID scaffold_2; pos 8957803 to 8958770 reverse stran d)
agtaccaaattagtgtgtttgataatccccaaaaggtataactataacatcttttaagttcttgtagacttgattttaattggtttcaagtggataagtgtgtgtttgttgttgttgttatatgcagtttgttccaatcatttgtagtagtggtttttagatttgatttactctgtcgatgatatattgaatttttgtatgacttcttaaacatggggtatcttggattctttatgcctttctatgatttcctgactttgggtattttggatttgttgtgtctttctttcatatggtttattttaaaattggatattttggatttctatagctcatcttgaaatggagatgtacttttgtttataagaattgggttttttggacatgttatgtgtttttattatggttcttaaactgtgggtatcttgaattgttttgtattttctatagtttttaaaattctgggtatctttcatttgttatgtgtactatggttttcaaagtttagattttggatttgttatttgtctctatggtttcttaagtagtttcctttaactgggtgttttggactttttcttgtgagctgtctgaaaggtaatcttgtatagtgaaattttcttttagaatatataattgagactgtttatggactgaattatcaaagagaaagtgggaagaaacaaagggatgttgcttggattaattgtcatctagatgagagtggactgcacaattaggtcttaacataggatcctcaaatctagcaggtttttcatggattagtgaatatttttatcatagctagtatcccaatctccaaactctcacttatgtctatttctaagacgctattaaggtatatcaaacaaacttcttcctctactactcaatcaatcattcctaaactgttattaattgagctttccgtttgctagtgattatctttcgcagttggtgttacctcg

SEQ ID NO: 110341 - DNA, 518 bp, Aquilegia coerulea
  Intron number 1 from transcript AcoGoldSmith_v1.020895m (l ocus AcoGoldSmith_v1.020895m.g) derived from phytozome v7. 0 (chr-ID scaffold_25; pos 82304 to 82821)
cttcttaaaacctctcaaaccaaccagttttccaggtaaaagttaataataataaaccttacagattctctcttttatgtttaatttatctgctttttttttctgttgttgaagttctgggaatcaatcagttgccgttaatgtgtctaacatcaaacctatatcttctaatattgcttctataatgttacttgttattatagaataagaaaaatgtggccttttcaatgtgaatcaaggtttatgggaaaaaagagaatacagtttttcccttttttttttttcattggttaaatataactcaaataaagattccagaatacccatttgttgtagtatatttttatgctaatttagctttgaaatgtgggaaataagataagttgtttctttggcgaggaatctgtatgcccaatttgtttagttgattggataatttggatgttgtgattggaaattaacataaataagcaccttttgcagtgtttccgagcctgtagagaaagaaaagagtaagt

SEQ ID NO: 110342 - DNA, 897 bp, Aquilegia coerulea
  Intron number 2 from transcript AcoGoldSmith_v1.020895m (l ocus AcoGoldSmith_v1.020895m.g) derived from phytozome v7. 0 (chr-ID scaffold_25; pos 82894 to 83790)
atctttccatatatcagggttgcagcaggtgcgttatctgtatgtgtgtgtgtgttttttttttcttttggatattagaagttgatacaatggtcattgacctgattgaaggctacactacttcaatgacatacaccataaccttcagtcaagcccaacttgttggcgttagaagtcatcatgctaattgctttagagatactgtgttaatcctggtcaaccattatttgcaatagtaataactcatcactaacaaccccttggagtgtggagttgaaactgttgtagatattccattaaatgcaaccaataagaacgatgggaagagtctttcagtgaggttgtattggcttttgaaaaataagtgatcaaatattcaaattagtatcctaccttcagttgagtagattgacattttttagtatctttactacctctatgaaatcgtttgtaatgtccgataattctgaaaaaactctattgtagaaatactccagcactgtcagttcccaatgattcaagaactggtagaatttccacttattaattgtccccttcgtttcaatttgtcatgttcatcttgtatataataggcttgtccttcagttttaatataatttccactttccacgtcctaaagaggatttgaggggaaaaatcaaattgtcattaaattgtgggcttacctctgtcaaggcaaaattagtacgatcaaatagctgtaaccaactcctgcttataaatagcgtggaattcgttggcacctacatacaacttagataacagttgtatggtctccaaatgtggtcatgtgcttcatgtgatagcaaaccctttatattccaaagtgaaataatttatatcatcaatattgttcttaatatgttcagaaaggcc

SEQ ID NO: 110343 - DNA, 815 bp, Aquilegia coerulea
  Intron number 1 from transcript AcoGoldSmith_v1.001531m (l ocus AcoGoldSmith_v1.001531m.g) derived from phytozome v7. 0 (chr-ID scaffold_3; pos 2266845 to 2267659 reverse stran d)
ttaaagaagcccaccacatttttgtgcaagttgaagtgagtattttttttttctgaatcttcttatagagcatgacatttgaattcgagcccttttttatatgttactggtgaatatagtagctagaagcgctagaagttattgttattctttaatcatgtctattactgcgtgtcagagactgtatgttttgataattgcagtggatctctgagtcatgtttaggcattagcaaagtctgttttaatggtttaatatatggtttaatctgcaacgattttgatttatgataagacttttagaattttgaggtcctgtacatgattcgtttgcaattttgctatcacctatcatagagaggactcttctttgtaattagtgagcatattttctaatgtatattttctcccattcctttccttgtatgtgcgacactagtgtgagaattatacctactcagtcttttcataaatgtaagtttcaactcatagccattatccaaaatgattgagttagtctccaatgtcaagactctagagcaattgaaaagatgaaaaaaacataggatagcatggtagaagcttggagacaaagttgtgaaccattttttctttgacttgagtttgattaatttgttaaagttgttattacattgaaaacacctaaaaaaaaggatcttgatttgaagcttttaatcaatttctcataagtttatgcctgtaagaattacgctttacgcctttatctccacagtgccatttgtttgttgtcaagactgattttttgtatattctttttcttttgaaggtttagga

SEQ ID NO: 110344 - DNA, 578 bp, Aquilegia coerulea
  Intron number 1 from transcript AcoGoldSmith_v1.003228m (l ocus AcoGoldSmith_v1.003228m.g) derived from phytozome v7. 0 (chr-ID scaffold_34; pos 2491609 to 2492186 reverse stra nd)
aattcaattaaatttcatcccttgtgatcttagaggtacaccattttttttttgtatttttaaaatctcttggtcttcttcttgatgactttcatgttaaaatatatctactgttttgtatttgattgattttctcaggagaaaaaaagttgtgtgatggtttccaagatttttagctttcctatacctgtggagtcttctttttttgtcctatcatgacttaaattatagtattttttgactttttggtttattataatttatttcatacttcaatgtgtatatcttctaatgagtaagacctctctaccaacttctatgttgaacacatctgatgaattcatttctatgttatcctgaatcttttatatacaataataactctggattgtttatgcttgattcatattccagatttacatcatcagaaaaatattccagatttactgttacaacttgttatttgatcctaaatttttgggttcattttcggaataagctatcaatgtatattgtgatctcaccacctgtaaatcttttcaggtgcaacctagctgcgttcaagggagtttagaggt

SEQ ID NO: 110345 - DNA, 579 bp, Aquilegia coerulea
  Intron number 1 from transcript AcoGoldSmith_v1.010389m (l ocus AcoGoldSmith_v1.010389m.g) derived from phytozome v7. 0 (chr-ID scaffold_13; pos 2095547 to 2096125 reverse stra nd)
actttactgtcaaggttagtattttggatcaaatataatgattggttatttaaatttgcaatttttttctgtttttattgatgggttttgattagatgttgaattatgatgatgggtttcttagattttgtttcaaagttgaaaaacatgattttgttttattgtttggttttctcatttctgcctctttgatgcttgttttgattgactttttgtattaatatactaattttgtttttccaactgtgaatatttgtttagtttatttgaattattatctgcactaggaatttttagattgtcttctgcaattttctacttgtttgtgtgttatagtggaggaatttttcatcaccatgagtatgaacttttagatgattgttgttgccttgttggtgtcttttaatcgtaattatggatgaatatctaaggttcttttggttaaaattggtcctttttcgaaagaacaatcaaaccttttgcttttgtatatgtatatattatatatgtttggactgaaacattgttatgtatgtaaactcattactcatatttgttaccattccattttctcgcagg

SEQ ID NO: 110346 - DNA, 526 bp, Aquilegia coerulea
  Intron number 1 from transcript AcoGoldSmith_v1.007942m (l ocus AcoGoldSmith_v1.007942m.g) derived from phytozome v7. 0 (chr-ID scaffold_2; pos 4767787 to 4768312)
tcctgggaattggagggctgttcctactaatacaggtaattgaagggctgtttttttttttttttttcttttgataaatttgtggttttattaatcacaaaaatgctgtttacaatccttgatctgcccacaccatcaagtttagtgagatacttctttggtgaatcagaatttcaccaaaacagcttctctgccttttcttctgctaatgagataaacccagctatcttcaactctgtcatataaaattccagtagttttgtgtgttgaataaatcttccagagatgaaattgactgtgtaagcccagagaaatcaataataccatctgataacaaaacatatcatttaaccattaggtcttttacataaaatacactctccatcaattgccagacctcttctgctaaaaaaaaaaaccaaatcctttttcttctattatatatgaagatgcttctctcttattagatttgggtttatatagatttgttaattatgtgatcttttgtgttttcaggtttgcttag

SEQ ID NO: 110347 - DNA, 696 bp, Aquilegia coerulea
  Intron number 1 from transcript AcoGoldSmith_v1.000152m (l ocus AcoGoldSmith_v1.000152m.g) derived from phytozome v7. 0 (chr-ID scaffold_2; pos 6773980 to 6774675)
ttttcttggttcctactgtacatttggttaatcaagtatgcatctctttctcaaccatataaaaaaaaaaaatgcatgtttatctctataattaaactcattaggtgtttttttggctaattaaatgacttaattaactttaaaaacttgttcaatctattgataaacaacttaaacttgtgaattttttctttaattatatagtgaggagagggagaatgtgaggtcaaaatcatcaataaacaccaagtcaataatgtttgaccatatttcagaaattttgactgggagaatggagatggcaatggtacaaaaaatgccatgatcttccctgttgaagttttgatgttttggttaaaagttgacgtaattgaagcccaagctcaatgttagcccaaaaggttcattatccaacaaagcccaactttaacttggtttgggcttgggcttattgactcctgttacccaattaagtctgacaaacatggagaactatcaactctaggaatctacaggtgtagggaacatgagcttgagttttcagtaatttagcctaaaatatgtatattggtttcagagaataataagattagtttagcacttttgctagaggaacaacaatgttaataacattttatttctttttggtttgtggtgttgtggcatgaatcataatagcaagctggagttgtgaag

SEQ ID NO: 110348 - DNA, 679 bp, Aquilegia coerulea
  Intron number 2 from transcript AcoGoldSmith_v1.024717m (l ocus AcoGoldSmith_v1.024717m.g) derived from phytozome v7. 0 (chr-ID scaffold_16; pos 3501142 to 3501820)
ctactccaggttagtacactaatatcaaaaatatatatcacttctttaatcataagtaatttctgttaaaagctggtttgaatcttgtgggaaatcacaagttgtgtcctttttttttatcattgacattgaacctagttttaaaataaaatctcattacatgattcatgaacatcataattcataagagatcatatatatacaaatacaatcatgtcccaaatttcatgttttttctctagttttaatttagactattattagattttaatggtacccttcgagtcttaaggcatcagaattaactctctagctaggtctacaaacccgtacattttaaagccagatggtaggttcatccatcaaagaagacatgcattgaagcgccagttggagataactggatagacttcctaggtttttaataacactacatacataccctacatacattgaccttcttttcacaaccaaaagtccatacaaaattaagtaggtaacattggcattcaggactcattaataccaacaagctaagctacctaattttacaagatgtgtagttatttctactgcacttattatagttgctaactcgttattatctcatgtgttgcttgggactggtggcctaatggatgcaggtaacatatttcaattgtggaggtgtttcccttgg

SEQ ID NO: 110349 - DNA, 633 bp, Aquilegia coerulea
  Intron number 1 from transcript AcoGoldSmith_v1.026656m (l ocus AcoGoldSmith_v1.026656m.g) derived from phytozome v7. 0 (chr-ID scaffold_39; pos 557690 to 558322)
gaaaacaattcaacccagttcagataaaaaggtatgaattgaaaaattgaatcattttggtctttgggattgttggggttttgggtttttttttttctcttaattatttgtttatatgaacgtattgaatgacacatttggggaattgggttgcacgtaaatcccacattttgtggttgaagaatgttttctgacatggtttttttttgggtacctgtaaggtgtttgattaagtgtccatactagaattttgattggtacatgttaagtaagaatgcaaggtgtctgacatgacaatattaaccaaataatggattatggtacattgacattagaaatataccatatctagatagttagtaatcattcattgaggaccattatgatgttacattttccttttgttgatagtaattgcaatttgatttatcgtcgatagtagaacaagttatgtccttttagaccttcagcataatgtgcaaattttggtccctgctcactggcgtatatacatcttataagtatgcttatttaatagcttgtttgttgcttgcatcatgggtttattacatctaaattctgttgcaagggttagcttaagtaaatataacttgttaattcgttatttatagg

SEQ ID NO: 110350 - DNA, 622 bp, Aquilegia coerulea
  Intron number 1 from transcript AcoGoldSmith_v1.026201m (l ocus AcoGoldSmith_v1.026201m.g) derived from phytozome v7. 0 (chr-ID scaffold_1073; pos 854 to 1475)
aaaacttgatagaaaataatagggtgtagagtttttaagcctaggaattatcataaacaatccattgatgttgttccatatacaaaatggatgaagaagaagctctgtagcagtcatctttagaaaactccaaactccccgacaccaaatatcataccagtcatatacattatataccccacacgattcaaaattgtaagcaatcgttccaaatgatgagttacatggatcctgtattgtttgtgcaagatttggactaaccccaaaagcaacaattttgagttgttttcttgagggccattttgtaaaaaccccacaagattatgttgatatttgcgtttaccccactaaagatttttttttagtcttatcactagcaagttaacgattctgtctgcttaccgtttgcagttgctgacgtggctagaacttaaaccagctggcttatttaaaacgagaaaatgctgacgtggttttttgttaaaaaccgaggacaggtgtgatgatccaacggtcgagatggggaattaatccaacggttgtaataagagggaactgatagtataaagcagaacacttgctaacaggttctctcattactaacttctctcagtctcagtca

SEQ ID NO: 110351 - DNA, 518 bp, Aquilegia coerulea
  Intron number 2 from transcript AcoGoldSmith_v1.004689m (l ocus AcoGoldSmith_v1.004689m.g) derived from phytozome v7. 0 (chr-ID scaffold_36; pos 689586 to 690103)
tgattgtggtactatattttcacggtaatatagtcattctgcctggttctatattgagcttgattttagttttttgtcttaagaagtaagcataagatccaaacaagagacatgagcactaaagcctgaaattgatttttgtggtggttatatatttgtttgtctgatattctcagagaatacgacacatctctatccttctatacatataagttaaaaaaaaaaggggacaaagatgaagcataaatctattcagaactcagaagaacatatcatcgatctactttttgatgcttcttcaatgatggcataagatgttcttctgtgacatgctatcttattgttgtgctcgttgttattgttttactgtcattactgccttattgtttgctgttattgttctgtattgcttttagtttttttcttactaagacttataagctatttgatctatacttatcttcatgtttttgttatgaacagacgtgacagttttctcaatcatagagctttttgtg

SEQ ID NO: 110352 - DNA, 660 bp, Aquilegia coerulea
  Intron number 2 from transcript AcoGoldSmith_v1.001452m (l ocus AcoGoldSmith_v1.001453m.g) derived from phytozome v7. 0 (chr-ID scaffold_2; pos 6643651 to 6644310 reverse stran d)
tgctcagcagagaaaatctctacctattgcttcaggtaatcatttatttagttttttttagtttaaaaggcatttacaattttctattagttttgaaaatttacttattgatgattcagtgtgatagtaaagctttaagcagtttactaatatgcttacaatgctgatttactttcacaacttaactaatatacgagatgcttttgctataatgctatctctatcagtggcttttgtgtattcaaaataaaaattggtaatgactaatgatatacatagctagtttttgtttttcttctgcattgcattttcataagcttcgaatgtccaagttaaaaagatttttgccgagtggtgtgcttgttatgttagtagtagagtacaaatctgtaatgagaggactgtggctttacttttatctggaaaaaaaaaaaaaatgtctcgtgcatctattttattttttaatctcccatttatagatctctctcatgaaaatatactaatgctgataaaagggatttgatgccgtccttcggatatgttgctaacaatctgtggtcgaaaatgtatattattctctagtttcatttccactatcttattcttgttgtcacaattgtcttagttgaaaagcgacttgttgaagaggtgaggaagaat

SEQ ID NO: 110353 - DNA, 588 bp, Aquilegia coerulea
  Intron number 1 from transcript AcoGoldSmith_v1.021718m (l ocus AcoGoldSmith_v1.021718m.g) derived from phytozome v7. 0 (chr-ID scaffold_13; pos 1539607 to 1540194 reverse stra nd)
gctttggatctgcgagcacacagtcaaaggtatttgtttgtgtgcacagtgcactatatgattctcttcaaactgggtctttttcatgcacttcatccctacctcttttcaagaatgaaacgacaatactcatctgcctatctaagaaaagcatattgtctttctactaagcatttggatggtcgaatatatcaacatgaaagtgtgttgtttataaattataactactaggactaagcatacaattttatttctgttatgatactttggtggttttcagattatattttcaaaatgatcatgtacccattctctggttgctatgttgtaagcgtactatgatgttgaaaagctttattctgtggcccacaagtccaacattcaattgatattatttgtggaatattctaattggagtcctgatgtttactagattttggtcattctttttgagtcttatataagtggttaaagcttcgactgacttaatgctgtctttcgttaaccgtgattgaattgcaagccttttactatctccctggcattgatgcagattattcgaggctctgatttttcattcagtactaa

SEQ ID NO: 110354 - DNA, 810 bp, Aquilegia coerulea
  Intron number 2 from transcript AcoGoldSmith_v1.013286m (l ocus AcoGoldSmith_v1.013286m.g) derived from phytozome v7. 0 (chr-ID scaffold_22; pos 1545813 to 1546622)
atcctactgttgaaacatccaccactacttttgtggtatgattacaatgacttaagctaaattgcgcgtttatttagaagaatttaagattttatatgtattgttatttgtatatgtgtaatttgattcatagctattcacaaaaaaatttgtttttgatttctaggctatatataaacctgtcattgtcacattgtgtcttgaaacttaaaacttgagttgtcggagatgtatgagaagtttacagcaacattgttctagtctattttgttgaaaatcatgtctgtttgtatgcccgaaatcagaacatgtgaaagccgttatgtccataccaaggaataatttggctatgctggtgagatatatttcataagataagtgcgtggactagttattgtgctgcagcgtgtcaagcccatgtctgtgataacaactcattcaatactacagatatagattagtattagtggactgttgtaggagttcttgtatgagttggaagaagatttgtctgtctgtccttttcttcttttttcttttacttctcgttctccactttcctcttcctcttctaagcatttccctctctcaacctatcactgatcccaacaaccttgtggtattcttgtattatcatgcttatagtttttggttattgtttgcatcttgattgaaactattttgtaatgatgctatatcacctcaattgttaagtttctaaaatctttttttgcttttcttcaataaatatattgggaagctattagttgatggtattcatggtatttgatgggcaggttccaaaggggc

SEQ ID NO: 110355 - DNA, 982 bp, Aquilegia coerulea
  Intron number 2 from transcript AcoGoldSmith_v1.019634m (l ocus AcoGoldSmith_v1.019634m.g) derived from phytozome v7. 0 (chr-ID scaffold_26; pos 2011553 to 2012534)
ttggactgtgctaggagtgattctagctgttatctgtaagtttttaaattctctctggaactttattgttaatatcagttataggagagaggtgtaatttcttttattgatattgttatcgttagttctttatgttggtgttattcaaataaaggggtgccagtgatatactctttgacacacgtaataattttagaaattaaggtgttcaatagaagatcttctagtgttttcaaagtcctattgtgttttatgtttgaggaagtctacttcttccgaagatttgatgctaggttgatatgttgtgagattgcttagggtttgttttatatgttgatttgtattatagaaaagtttatagaaccttgaaagtgttttggttcattcaatcattgaaaggaacaagatttttttttttctaagacagaatgacagattatgttgatgtagttcagccttaaaggccctttttttaattttgcatagtgtatgttgaatgattggagtcaatgttatacctaacacaattagctcaaagcgtgcaaacttttacaatcaaatggtataatacagacactggtggaaaagattttgaattgaatgacctgaaatcaaatcaacatttaaactttttaggtgagagagacctatcgtgctttttacgcatcgtaaggtagccacaattagctcaactagtaacgtttttaactcatttggattcagagattgtataagtggcctctagaatgacatgtagattccagatccagaagaaagtgtattgtgttatcttcagataaaatgtttttgtcttgatttccaaagtagtattgcctatgctatgtgggaatgacacactcattttcacatgacagcatcaattccagtttcagaaattgtgtgcctgcttttaaatatccgcaatggtaggcactataaagtaaatgaatgactaaactttaacttgtataatttgatacag

SEQ ID NO: 110356 - DNA, 485 bp, Aquilegia coerulea
  Intron number 1 from transcript AcoGoldSmith_v1.019593m (l ocus AcoGoldSmith_v1.019593m.g) derived from phytozome v7. 0 (chr-ID scaffold_8; pos 7074707 to 7075191)
aggtattggatctggtttcttaacttatttcaaatccctgagtcagttatgtgctccaatttcaattttgtggtctttgatgcaattagctactgggctagctcttcatttgacttcttttgggtgtaattgacaaattagatcaaccaattccttgtatttataaaaagaacgttctttataaaacaaaataatgtagaagctcggtttctcccatgaaaagaatgagtatatggttgagatacgtgcctccataaacaaatggttatcattggattggaacaactatgactgatttttccattgtttgagtttggatagataatgaaaacctttttgtaggatatctaattgttgctacttcatcaattatggtagctgcgttaaggttctcttctttataactattgtaggtaaggcatctgacaagtttattatatttggtcatagggaattacgaggtgttgcggtcaccttgtctggaa

SEQ ID NO: 110357 - DNA, 965 bp, Aquilegia coerulea
  Intron number 3 from transcript AcoGoldSmith_v1.019593m (l ocus AcoGoldSmith_v1.019593m.g) derived from phytozome v7. 0 (chr-ID scaffold_8; pos 7075470 to 7076434)
tgtggatcccagcatacaagtaagtgaccctcggctaaaatgattgctcttatcttcatatgaggcgattactctctactcttttcatatttagaagattttcttgaatattatgctaggactttttcattcagtacaagacaaagcaacaaatagagaagataactagttgctcagagttattattattttcagttcacagataattttattaaatgtgatcaatcatatggttctgaaacaaagcgtgtatgaagtagctccactcacttaaacttgcacaagtgtttatggatatttcgcctgaaaatttaactataagtctataacatagctgatttagaatttttagtgggccaattcgagcaggaccagtagaggatttagccaggcctgctctgttatgtaatcactggggccaatcatatctccaatgatttttttttttaaatttattttaagaatgcagttaggaggagttggactcaatcttccatatgacaagccattaaactaccactagtaaatactagtttatcgaaaatatacttcaattctgataaaagttgcacggacatgatcataatatatctaacgacacaccaatcttgaaacacctatttaattaggttagaaacatttaatgagctctatttctgtgactctgtgagattgatcttcatgcacaaagattcatctgttataccttagttcattgtgtggacggtcaggatttgttttcacgggattttttactcgtgttttgactcaatgctttggttgccaaagtttagggcaatagtattttgtttgtttttcacttgagaaggataggcttatatgtgtatgattctgtatgaaatgtgttctataactatatgttttacttttgatagtacaggcatcataaactatcacctctttttgcagggattctcgttggtatagcctgtttttcattctct

SEQ ID NO: 110358 - DNA, 762 bp, Aquilegia coerulea
  Intron number 1 from transcript AcoGoldSmith_v1.008116m (l ocus AcoGoldSmith_v1.008116m.g) derived from phytozome v7. 0 (chr-ID scaffold_8; pos 5623702 to 5624463)
cttgtgaggtaatcactctctctaaaccataataatttgattttttttttttttttttttttttttaatttatggaaatatgtatttgggtatgtggaaaattatttgtagattgattagttgtatcttatattggtaaaagttacgttcattttgcgcaaaaaggtctaaattgaattttgttgttgatctttttaattagatttttggacataccccatttgaaagtcgaaatttgagatacccccatttgaaaaaaaattgagatacccccatttcaagatagaagagctttaccgccgtaggttagttttatgatggacggctaagataacaccacatcttgaaatggggccatctcaattttttttttttcaaatgggggatatctcaaatttcgttgggatgtcttagtatgaagatggagttttcacatcatctttgttttatcgtttgtggctgtcatattaaaaaatgcatgtattattaatcgtaattttaacttaagttaaaagaaaaaaaatatatgtttgaagtatgattatgtgaagatgcataagcattagctgtattgatagctgttctacatgcgagtgaatatttatacaaactgaaaatcgtctaatgtttcatttgatcatacggccatacgggtcagagctggtgatgtttaatgattcatcccactttgaaaacgaatcacacactccttactgtttttatttagtttcatttcagacatctcagtggttgtgtaaccaa

SEQ ID NO: 110359 - DNA, 485 bp, Aquilegia coerulea
  Intron number 2 from transcript AcoGoldSmith_v1.017952m (l ocus AcoGoldSmith_v1.017952m.g) derived from phytozome v7. 0 (chr-ID scaffold_3; pos 7441926 to 7442410 reverse stran d)
cttgccgcaattgcgatcatcaggtctcttcttcttcgtcttcttcttacctaattagggtttttcctgtttcatcatttctgtttatacctctttgtttcttattgagattgcttttgaagctgataacgagtataaaaccctaattttttatgttaaaagtgctttgtgtttttcgaattgacttgaccaagaagtcaaggacataaatcactatttttgtagtgtaactgagacattagggaacaaaagtcagaaagctaatataattttacttagtcatattctacttgtgccgtttccaactgtgtatttatcttctgtttttgaattcaaatctggttgtttattttttagggaagctcatgtaatcaggttatctatctgcatttgacaatgaacatatagttattattgttatgatatatgaataacattgaactggaacctgcaggaggctgcagaaaacaattgcgtctacagaa

SEQ ID NO: 110360 - DNA, 590 bp, Aquilegia coerulea
  Intron number 2 from transcript AcoGoldSmith_v1.007190m (l ocus AcoGoldSmith_v1.007190m.g) derived from phytozome v7. 0 (chr-ID scaffold_2; pos 9038749 to 9039338 reverse stran d)
catctacagctcctgattccttatttgaggtaattagttttattaacaagttcttcaagttcatatgttttctgcaaattgatattgaagtaatgcgcaaagaaatgaactttattatttgtctttgatgaaatgagtatatttaagtattgcataatctgtttggttcaatggtacgaactttaggcttccaaaaacagaactacatgaaatttgataatgattataggcggaaataacaaatgagagaattttttcgcacatttcttcatggtagttcttgagagtgagttaaacactgaattgcagttgaattgtgttaaacaatgtcactaattaagctgtgtcttttgcaaattatggtttcgattttgattttgagcgtattctttcctgcttttatgtgatacaatactgtaattcgatctatatatgttcatactagtaattttattcttctaaaagttcagcagtacttgtagttttatgttattatgagattgttgtctgagagagtggattaatgcatacgcattattaactgattaaatttaggttacagcaattgttacacaaccaccttcaagaaa

SEQ ID NO: 110361 - DNA, 768 bp, Aquilegia coerulea
  Intron number 1 from transcript AcoGoldSmith_v1.020897m (l ocus AcoGoldSmith_v1.020897m.g) derived from phytozome v7. 0 (chr-ID scaffold_93; pos 167421 to 168188 reverse strand )
acccaagaacaagaaatccaaggtcaaagactgtggttagtaattgaacttttttttgatttttgtgaattttttttgattttttttttaaatttttttgtgttttgggtatgttggaatttgaatgctaatgttatttttgatcttgttatgattttttcttcgatccccaaatgcgtagattttgttaatattaggacgagtatactatttttatgaaatgccattgatgtaggatgggattttttttttctatgttggttgcaatgtgattgaaatacataatcactagaagaattataatcttttacggcatttatacatgtattgtatgtatccctttagacaagaaaaggccatgtattgtatccacctgtttgaaagggcgatatgtagtagctgcatttaatacgactacaaggtatgctgcactttgaagagacccctagatggatttatccatacgttttttttttccagtataatagctagagcgataacaacagtcttgtacaatacagattttaatggaaattgtgtcacaataaacaggacaaatgcatattttattgatgcaatttggataattcttctgtatcagaaatataaaacatttggttatcttatttaactttataatttgatcttctttgttgttattctaattgaaggttggtttctaaaataaaattagaaactatttgacttatatgtggtttcctttttttcttaggtgaaattcttcttagtgtatcattgtcccaaaac

SEQ ID NO: 110362 - DNA, 533 bp, Aquilegia coerulea
  Intron number 2 from transcript AcoGoldSmith_v1.019445m (l ocus AcoGoldSmith_v1.019445m.g) derived from phytozome v7. 0 (chr-ID scaffold_24; pos 3337798 to 3338330 reverse stra nd)
ctttacaagaatcccacaaacctatgttttagcagctgcattaaggggctaaaattttgcttaactccataaaatgatcatgggaagaccctatcaaagatgttcctttctcttcccaaaatcaaatcatttgtgttcctcctttgttgatgtaaatctcaccaaaggcatcagcataatattttaaggtaaacatttcaagacacctcccgtgtttttagtttgtacgatcacacactatcttttctggatctattttgttggcactcttctttgtcggtagttcttctgttgtcataccttactaagattacacccttacgaagacgtaacccgggaaggaacgcaatgtatacccatcgatgtatttgtttaagcggtcttcatcgactctgagagtccgaggttgcatagttctattatatgtgcatccttttttatttttcccttttcagaaaaagggtttattcagtgtacacctattgttttctgataaaacaggattccagtaatcttcgaaggtgatctggcac

SEQ ID NO: 110363 - DNA, 645 bp, Aquilegia coerulea
  Intron number 1 from transcript AcoGoldSmith_v1.005648m (l ocus AcoGoldSmith_v1.005648m.g) derived from phytozome v7. 0 (chr-ID scaffold_119; pos 54401 to 55045 reverse strand)
ttgtttactagcaggttattattattctctaatttttacaaatttgaagtcaatttagtgttactctcacaattgcgttttcgagaagtggatatctttgtttgattgaaaattttgatttggtttcaactctctagtgttccctgtgttgtttataattacttcattacaatatgcttttgggtctttgttttcttggtacaacctgagagatagaaactccaatttatacacacttgtaactaaagttaatccactatactttgttttctatgcgatacttcatccattttcttccatttaagaatgatgttcttcttataatgttagtggatataggcggattatgtttttcatagatcgagttcttctaccccaacgaaaatttatttcaaagagaggttgggaggctgttagattttgcgaattgatttcttgcatatagagaatagatattgtgcatcatcaattcgactcccacagggtgttcaggaatttgcattttctttgcatttcctttataccaggcttatgttgttaagttaaattagaatagatattgttcgttgtatatacctgtattattaacgcttctatgtcaagttgtctatggtacatgaccaaccaacccttttatttaacaga

SEQ ID NO: 110364 - DNA, 637 bp, Aquilegia coerulea
  Intron number 1 from transcript AcoGoldSmith_v1.007196m (l ocus AcoGoldSmith_v1.007196m.g) derived from phytozome v7. 0 (chr-ID scaffold_16; pos 4023208 to 4023844)
gcatacagtatttgctctattctaatttctcaaaggttagtagttgtattgctttcaacttctcttcttgtttatccatgtttgctatcattacacctaattagtagtagtattcatcttgattcttgaatcctaacttgatatacttgagagttgaggctacaatctatgttaacaagctttaattagagtaaaattataagtgttaagcagaagaaaaagtttagggtttaggttttttttccctctagtacttttgaagaacagattaaaaaaaacccttggaagcttatttgacgaaatcccttctttacatgatgaattgatgcgccaaaacgaaatttagggttgaaatcatcaaactgatgggcctagaaatagaccaattttgactcaaaactctttacatggcacaactttgcttctcctgcggagtatgactcgcaaagtaggagtcaactaaatgtataacgcacgttttaactcgtgaaaataagttcatctttgtatatagtgtgttaatgattatgatgaagtttgattcttgtgtcctgaaaataaagtatagttcttcgtacttacgcgtgatgtcttgatcttaggtgaattcttctttgcttccacaaatttttattgg

SEQ ID NO: 110365 - DNA, 879 bp, Aquilegia coerulea
  Intron number 1 from transcript AcoGoldSmith_v1.009874m (l ocus AcoGoldSmith_v1.009874m.g) derived from phytozome v7. 0 (chr-ID scaffold_2; pos 6477502 to 6478380 reverse stran d)
cacgtggaaggtaaaaattcttctaatcttcttccaaacttttaatttactcatttaatgcattttgtctctattatactataaatttcttcatacccatcttccattttcatctctttcgcctttctgtgacttgtgtgactcatcatcattcttcttcttcttcttcttctctgttttgcttgtaagccttttttttttctttgttctggttgcatgtatgtttgattctttgaaaggttttttttttttttttttttttaatggggcttatttttaatggggtttgggatttgggtatttcttattttgtagaaaaatccatggttttggtagattttcttcttgttttgagtccttgtaagcctttagttttatattgtagtttaccatttttttttttctttaattcattgtcagtgatgtttgagttggattgctttgtcttgtttctctgggttttgtttatttaatttttttggtcttggaagatatggcttgttttgttcttttggtagggatttgttgttaatccatttgcatgaactttgaagtttctgaacctgacttttgttgcatgttgtgtagcattttaaaaaatttggttttttggagttgattctaatttctacctatacatgcaattggtagagatgggatcattgagatgatttggtgatgaggtttttttttctgttgttgttgttgttgacagattagcaatgttgagattgaaaattatggcttgtttgttattctatttgtttcctagttattatctacatttgattagagatgaaagtttcagtataattctgtgacctgagttagtcttgtgatttgtatttgttgtagggccattctagccttctcaagaga

SEQ ID NO: 110366 - DNA, 840 bp, Aquilegia coerulea
  Intron number 3 from transcript AcoGoldSmith_v1.010998m (l ocus AcoGoldSmith_v1.010998m.g) derived from phytozome v7. 0 (chr-ID scaffold_2; pos 6359233 to 6360072)
ggtcagtctggttgtacttttccatcatctgccaggtaaatatatttgcatttcatttttttttctgaatgatgaagaaaattcatgtggcatgatttcattttcttatcagttctatggtgctgtagtatagaaaagcatgtggtatgactaaagattttttgtttttctttctgttgtgtacatcatcatttgtccttttttaatcaaatggaaagggaaggaattcctttctctacccacatgtttccactgtgttgcatttaattaagcttttttgtaaatagaatctaacaccttacctttttcttctgcactctaccaacttgaactgtcttaccatttttaccttgtgttcttggctgtagtacccattttaattaaccaataagttagatggtatgtaccagtaccgctcaccttcctcacatgcatctacaattattgatttcattaaggttagatccttagtgttttttgtttggaaagttatgatgtaaagaaagatctagagattccactatagctgtcatgatgttgatgctaattacttgtaacatttcaccattattgatgttttggtgctttgaatttgaccacctaaagctagtgatttccatttggtttttgggcttaatcttgtcgcaatgttatttgcttctctgttaacaaaacttgtgggtttgtttactttttggataaatttatttacatctgttctaattaggtgaatgcagttcaactgattttgttttgttgggtgatggcttataatggtggttttattttctcttttttttttcagtgggggaaccacaccatcaacaggtggtggtactg

SEQ ID NO: 110367 - DNA, 714 bp, Aquilegia coerulea
  Intron number 2 from transcript AcoGoldSmith_v1.025804m (l ocus AcoGoldSmith_v1.025804m.g) derived from phytozome v7. 0 (chr-ID scaffold_91; pos 67517 to 68230 reverse strand)
tgagttttgttgtcccagcagagatttctcttttggtgcaagatccaaggaacaagaaattgttgtcccagcagagatttcttccatggacaataactcagaatactcatggattcccaatctttgcaaactaaagctagacgcgcattgtcagcaatatgcaacaaatccttaatcatccataagagaagggctggaagatgagaccatcgtccactttctctgccttgattgtcatcgttttctttcataactaatattaacgacgatgacgacaaatatatcaatcttctgactataaattattctaccagaataaaattcagatcgaggtaattctctcaatcactgacacagaaagaaagaaggtagttcatgtaatacatgcatatatacgatatatatgggtgcgttgagaactcaaattctattatgataaaaactctaacacaagtccataacaacaacttaacattgatcatctcttatataaggcagagtacaaaatagaaagcaaataaatttttttgtcgggtgctagaaccagtttcactgggggctgggcacccacgcccaatccttggctcaaccatcttggccaagtgaactatcttcttcttcttcagaaccatcttgacctgactgtttttttattaagtccagtttctccttttttattaactccagtttcgcttttgcagtcaatcccttcat

SEQ ID NO: 110368 - DNA, 885 bp, Aquilegia coerulea
  Intron number 1 from transcript AcoGoldSmith_v1.006570m (l ocus AcoGoldSmith_v1.006570m.g) derived from phytozome v7. 0 (chr-ID scaffold_3; pos 5863197 to 5864081 reverse stran d)
gacgccttgtcattgattttctttgtaagtcataatcatatatatttccttgtgttgttttttttttttttgctatatatcattatcattccattgaatttatcattgttaacaatgttgtgatgaacgtgttgagaaaatttaaatattttgtgtcaattttgtggaaaattgtgaaattaattaagttaatgaatatagatttcgagatcatacatttttttaatatataattaagttaaagagtatagaaaagttcaaaatgcataaacatgattcatgcacagtataagacatggggatggatgaggggtaagggtaatgtttctttcttcccactaaacacggctacgcggttacctaccaacatccctgaccaaactttcctctgttctatgttctgagatgttgatcacgacaccaccaactaagatccaaatttctgtaccctattaattgaattcaaaatttgaatccaccgacaaaatttagagtggtagtctggtacatttttgtgcatttcagtttcaatattgttaatcattttgctgagagttagaacttaattagcatctatggattgtgtcaaatgtggcaattggacctttctttgtcacattgttctgatctggtttcaatcttgtaatgtcattacaatgcgaactatttgttaattggttatcttaaataatgtccatgttcgaatgaccaaagataggttgcattagtggagtgaaaatgtgaactgtaagtgaagttgaggtttttttttttttttttggtgcaaaactctattgttttttaatgagcttcccttagtgtttcttaaaatgggttgtgattactgcaggtgaaagtttgaattcaagttacttaagtccatat

SEQ ID NO: 110369 - DNA, 768 bp, Aquilegia coerulea
  Intron number 1 from transcript AcoGoldSmith_v1.010522m (l ocus AcoGoldSmith_v1.010522m.g) derived from phytozome v7. 0 (chr-ID scaffold_58; pos 1372854 to 1373621)
aattgagtgaaagtttcaaactttagacatataaggttggttctgcattatgtatgtatagaatgagtattctttgtattcaatttactggtttattcacccagatcagagcagagtaataagggtaattttatatactaatggtgtcttctaggtaggttttgatatatgattttattttaaccattcagccttgtatcatctttctaaagttggccacaaatcaatgcatatgtattttaaccattcagccctgttattataatttttttatgttatttttttcagaaattgtattcagataaaaaggaattccatttagaatttcaaatcttttgtttctagttacatcctaatagaatatctgtaatttttcttccttctctttgtagtaatgttgtcttaaacaaagaaagacataaagaatatattttttagtgatcgttttttatcattagggttgaaaaaacattaaacagtttgttaaaccaaggtgtataaggagaattatagccgttttatcaaccattcatctggttggctgcgaaccacagttgtcctatgccacatccgatgcacaaaaatgagggtcaaagactcaactttaaatagtaaagtttcattcgtgttttatgtttcagatcttttactcaattcagccctcatttcatgctttatttattgtttgataattttgatttcgccttagtagttgcatttttttgttggatttcgtcttgcaggttcaaccttactgtggctctcacc

SEQ ID NO: 110370 - DNA, 1022 bp, Aquilegia coerulea
  Intron number 1 from transcript AcoGoldSmith_v1.000110m (l ocus AcoGoldSmith_v1.000110m.g) derived from phytozome v7. 0 (chr-ID scaffold_2; pos 4317492 to 4318513 reverse stran d)
caacacaaccaaaagaggtaagcaaattttgttgctttggtgttactagaaagtagattttggattcaattaaccatgattgaagtgttttgtaccttagtaataactggcagattgatgttagtttgagcaaccttttgaatttttttagcttatttgcattaaaatgtgagtctttggaagtttaattgataacaatattgtaggtttgtctataaatttagtgacctttctgaaattataacatttagttccaaatttaatacactagcaagtttatgtttatcttttcggaaaagaaaccataaatctgaacagaatacataattatagccaatgaagtatagacgccatcataagatcacttaaatatgctatatggaagttatttgtaaactagcaatgctaagtttttatacttgtggacgttgattcataagtcataactgataaactacatccagagaggtgctcctagaaaatagtcaaagggtgataggaccttgaatactcttttgtgacaaaccttgtagtctcccactttcccttttatagtcaaccatttaccaattgaataaaaagtcagatctatcgatcaaacagtaatgctatgcacctgttgatgttcctcatacccattttctgttcaaacagtaacagctttaatatcacttgatttttctttttattcttggatattattagtgtccggattactgagatcacaattgggttatagacttatagtcgataatatatctgatttgacattatagtgtcatagtttgataacatagtagtttatggttttggtataatgctgatagttattacgtagtagtctataatatttatgacttaacgttattgtttgtgtcagagcttgattacatattagtttatggctacgacataatgctaataagttattaaaggctttttccaatactcccttcggttaacattcaattatttatcttattgcagtggccttcttcagttgaagttgtagatcattggga

SEQ ID NO: 110371 - DNA, 892 bp, Aquilegia coerulea
  Intron number 3 from transcript AcoGoldSmith_v1.007736m (l ocus AcoGoldSmith_v1.007736m.g) derived from phytozome v7. 0 (chr-ID scaffold_91; pos 630025 to 630916)
accttcaaattacttgtggaatcaatttcccacaggtaaccccatttcccttttgattttatttctcttgctacttagtttatcctaaacaaacactatcaaataacttatattcatacatggtcacatggaatatattgttccttcacctttttcaaaatctaaacaatccaattaattcatacaggattatacatacagaactaaacttagcaggttcaatataagattctctctcatgaattatttcatcttctctttgtaactgtggtgtccgtttttttttctgctgttaaaccaatttcagccgcagtacacatttacttcttctttcttttttttcgtaaaaaaaaaataaaaaaattcaagagtattgcaaaatcttcaaataaaaacagatttacatcctcatgtgatgctaagaggtctaattgtttcacaacaaagaagaaaagatacaacttcttctaaagaaatcaaactgtaagctctctattcacttaatgactggcggttggtctcaaactaattagatgttattcctttttatgattgccaactccattatcctatacgatcagggatttgaccaaaaaatggctcaccaaatttctggctttggacgttattaatttgaaccatttttccttttttgttatatgatgttaattcccataggaataatattcgatttaattcacttcatgttaacttttgaagttgtgctgcttttatcccttgtaattcaaaatggaattttctgattatcaagttagattttgcacgggatcgtggactattagatgtcatcaatactgtgatactggggtaactaagtttgtggtcagatcccaacaactttgttctcgcaggtgccagctatcggttgcca

SEQ ID NO: 110372 - DNA, 784 bp, Aquilegia coerulea
  Intron number 1 from transcript AcoGoldSmith_v1.012522m (l ocus AcoGoldSmith_v1.012522m.g) derived from phytozome v7. 0 (chr-ID scaffold_16; pos 456042 to 456825 reverse strand )
tgattgtggaacgcggcattcaccgattaagttctgtaagtggctttaattcatttttttgaattctctgctttggttttctctctgtttggtgaagtaggaacattttctaattcaatgggtttggtgaagtaggactgtaggaacattttcttgtatccaaaaaacatatatgtattgcgtgtatctgttcgattcgtgtttgcagataataaatgtttctgtttggcaatgagttatggtcaaatttgattcccctcatgaatctatttcgttcgtgtagccatgtagttctctttgttttgtttgtgtaaatgtatctaacgccaatatgaaccatagcatttcgtgtttcaaccatagcatttcgtctactaggtttaatcctgaagaaggagtaattgccttgttctgagtaaaggggaggccggtaggggcttgggagttatatcattttcattcttggccatgtactgatgtacatcttgtcccatttaccctgttgagaaatatgaatccttttctccattcaattacattcgtagtcatatatccagtcaactaatgtcttgttaaatgttaacgtgtttgtactacttcataattgtgtgaataaactattagacttcgattaatgatttactattcaacttacagaaaacttaatttcattgatcatagtgtttggatcaattgattaagatatggatcatgtttcatcttttgctgattatgtttaaactttgcagtggttgcagaaaacaaaccgaaagcctttgttggg

SEQ ID NO: 110373 - DNA, 457 bp, Aquilegia coerulea
  Intron number 3 from transcript AcoGoldSmith_v1.004761m (l ocus AcoGoldSmith_v1.004761m.g) derived from phytozome v7. 0 (chr-ID scaffold_25; pos 504499 to 504955 reverse strand )
tctcgaattgaagtaagatgaaatctccattcaaatacctttcagtttcttgtcaatttcaattgtgattaacttctatgaaagaaaaagaatcacctagtcaaaacttctatgcttataatgcatagagaaatttcgtattctgggaattttatatacagtacgttttgtcaactatactcatggcactgcacgtccacactgtgattcaaacacctgtgtcagtgtccactttagtaggagtaggtatatgtaggtggcaggcatttcatacctgtgttaaacttcagaacactcatatagtgtcattcgaatacagatcaaagatattcgaaagaaaatttttaaatacatattttgcgactagaaggttagatacaaaattgaatttgtgtttcagtatcagctcttgtttgttaaatgatttctgtctccttgatttactttgcatcagcaa

SEQ ID NO: 110374 - DNA, 339 bp, Aquilegia coerulea
  Intron number 3 from transcript AcoGoldSmith_v1.027024m (l ocus AcoGoldSmith_v1.027024m.g) derived from phytozome v7. 0 (chr-ID scaffold_13; pos 2875017 to 2875355 reverse stra nd)
aagtaagtccaccaaagtgtttttttttgttttattgagatttttggacatacccccgtttgaagttttgaactgagaaatttgagatgccccatatgaaaaaaaaaaaaggcataccccatttcaagagagaagaaattattagcggtaatgtagttttatgatcgatggcttagatgataccacatcttaaaatgggggtaatgtctaaaatccactttcaaatgtagggggttaattaagctgtaatgtagtttttttcttcttatgacatgcacaacaattaaattccagttttcactaatacacgtgtatgttttactgttcaagtaacaatcc

SEQ ID NO: 110375 - DNA, 930 bp, Aquilegia coerulea
  Intron number 1 from transcript AcoGoldSmith_v1.014143m (l ocus AcoGoldSmith_v1.014143m.g) derived from phytozome v7. 0 (chr-ID scaffold_31; pos 1871936 to 1872865 reverse stra nd)
cggcttcatcaggtatttagattttgactcaccatcgtggttcagttttagttctatagctgctcagaatcaaattgtaaaaaccatactgaaaccaaatagctcttccaaagtagaattgtcgaaacaaatgcttgcaagagtcatatgagaaaacaaatagaaaactagattttaattgttgttttctacagtccttcatgtcttcatgataacatggtgatgcttcacatacccatgtgttcatgtatagcaaaaatttgaataggttaaattcctatagttgtcttaataagagactttgtcttaatatgctagaataataaaaaaaaaatgatggtattgttgacatacgtgattaataggatcattcagtttcaattcatctttcacattgtttacattttgtcaaagcttcagagaatgtagtaggattagttgtctgctctaattcctactcagaaaggttgtcatagcagtcagagaatgtgaaggtcctctatatatgtacttaaaaacgaaaaaagaacatttggtcatccatccacccagagatatacaatgtttgtcttcatatatacagtagatctacatcatatattacaaacaaatagctatgttgcaggttttgaaacttgcaaagttcttcttggtggttttcaatgtataagaagttgcatatatacacattacacaaggttgtcaattttgtaaaggaaaaaagaaaatagagaaaaaaaaaaccttgacaaagtcagggatccctgatctccgaacacacctcatatgttatcagtgtgtgtgggtgtgggtgtgtgttatcagtgtgtgtgggtgtgggtgtgggtgtgtgtgtgtgtgatattcatgattgtatcagaaaatcttacagcttccttaatcaatgtacagctattgatctgataaaaa

SEQ ID NO: 110376 - DNA, 678 bp, Aquilegia coerulea
  Intron number 1 from transcript AcoGoldSmith_v1.003506m (l ocus AcoGoldSmith_v1.003506m.g) derived from phytozome v7. 0 (chr-ID scaffold_13; pos 1171878 to 1172555 reverse stra nd)
agtgtgctttactttgacattcaagaggtaatcaattgaattcctaaatttcttcaattttaacgaaaaatttgatatttggagaaattgaatttggtcaactggaagtaaagcttagagatagataaacacaatgtgagagtaggggtgatgaagttgatttgaaattttaatttgtatcatattctggggcactactattgttgaggttagaaatgagcacgaggatctgaacactacaaattctaaagagccacctttctaaagagatttcgttagagatagactgtttaagtttagctcttctgtcaaaagaagaaggagggaaaaagaaaacccttgcttaagatatgtcaatacctaattagcttatgtgccacaaacctgcataccaagaatgttgctaatgtacagttttgaatggattggaattttgcatctaagaatgttgatgaattgtatgtctatacattaccaagtaggctagaaactgtggcatgtagttttgtgcagttacattagggattaagattgcaagttagattgcactttacacctgttgtttatttcaacactttttatcttttaaagggatattctctgattctgccttgcactcatagtttattcttgtttgatgaaggtaaaaggaaaatcaattaggccttgtgcaacatt

SEQ ID NO: 110377 - DNA, 497 bp, Aquilegia coerulea
  Intron number 3 from transcript AcoGoldSmith_v1.016823m (l ocus AcoGoldSmith_v1.016823m.g) derived from phytozome v7. 0 (chr-ID scaffold_116; pos 47137 to 47633 reverse strand)
gggcgagagttacctttcttctcagaataaggttcatttccctacaaatatgcatagtggtttaaatatgatcatgtataagtgttggtggagctttttttccattacattccaaagctcgatctattgaacacttcttttttatctaatcactaaattattttctttttattgacttttctgtcttttatactagctgttgatggtgttggtttgtaagtgtgtaagtataattaagctattctttaaatcaaataaaggtcatcatatcatgttcggtgttgcttacccagattaacatataacaggttctagagttaaattgttcaactttaaattagaaactccccggcaacatcttatcaatatcattcaaacgtctatcgcaaaatgaatatactgaagaagtactatcatacattaaactatttattgtgtgaccaatccttttgatctatacaggtttacaccgatctcaaggataatagaccgcacgt

SEQ ID NO: 110378 - DNA, 557 bp, Aquilegia coerulea
  Intron number 2 from transcript AcoGoldSmith_v1.002452m (l ocus AcoGoldSmith_v1.002452m.g) derived from phytozome v7. 0 (chr-ID scaffold_2; pos 5294928 to 5295484)
ctggtaattacaattcacaactactctttatttctctattttattgatttttaattttacagaaatttgaagaaaacattttcagttttttttatttatttatttgtgtaaaggtgttatttttattgagaaaagatttgattaggttagatttatttcttgttaatttctaattgtggaaatgttaaagtagtgtagcatcattgtgtggtccaagagttgtctattttatctttagattgtgcattttatgtggtggacatttgaactttaaaaaccctaatccaattgtttttgtatctcagtgtttgttaatattgtgaaaagatttgattttgtttaaaagggtgtcttgttctttaactaacaaaagcccagtgaccatctcattctgaaatatgctagtttggagtaaagtgggtggcacatcatttttagctttggataatatttgtgttgttgactgttgaattttaactatttaatgcaattgaataagaaatgctatttggtgatgatatgtgtaggtgaaagattaggtcgtggtatcgttacgg

SEQ ID NO: 110379 - DNA, 263 bp, Aquilegia coerulea
  Intron number 1 from transcript AcoGoldSmith_v1.002576m (l ocus AcoGoldSmith_v1.002576m.g) derived from phytozome v7. 0 (chr-ID scaffold_36; pos 367068 to 367330 reverse strand )
caaaggttagtttttgattttaagccatcaatcgttgcaagtaaaataaagatctaacactatagtaaatatcttacattatatactacataatcaaattttctgggactaaaacatgttcggtatatttaagctttgctaaatgtcaaggccacttcttttttctgttcggaagatatgatatatggttttttaatggtggtgtaactcgtaagcattgtataatatttactatacttatatttactattaaattttttcag

SEQ ID NO: 110380 - DNA, 785 bp, Aquilegia coerulea
  Intron number 1 from transcript AcoGoldSmith_v1.007151m (l ocus AcoGoldSmith_v1.007159m.g) derived from phytozome v7. 0 (chr-ID scaffold_22; pos 2148026 to 2148810 reverse stra nd)
aaaacttctaacactttcatcttgttttacaagaggtgagcttgggttttttttttttacatttggttttgaatttgtttacgtttctttcattctgttttgattacgtgggtctttgttttgttgtggtttgaactaaaatttggagtttttaaggtaaaaaagcatatgggcagaagtgttttggatctctagtgcattatagataaggaaagactcattttttggtgttttctgtttgaaaaaatggatttgggagcattataggtaattaagctaattgaatttagtagtataaaggaatgttttctatattgaattagtgtttcatatgcaggaagatttaaagtatgttgtttgaagattgagttttctgaaagtgttgatatgaaattgagcttttttgtgatttctactctaaattgggttgttatcttaagggaaattcaacttattctcttaaaagaaggaattttaggtagaagggaaactacagtagattgtttgacctgattttccatttcatgtaagtaattttttttaaaaaaatggtggtatgttattctgttattttattgattcaatacgtcttttcttttcgttttccatgtttaattatgtttttttgatctatcgtgtagtgtaagaaagtagtgattgaaatgttcaagtataagtcaattgtcattgttaaaacttaagaggataatattgaaactgaggaatttgttccatacgtatttgtttcaggtggaagttttgtccgggaaagtggtggtacagca

SEQ ID NO: 110381 - DNA, 506 bp, Aquilegia coerulea
  Intron number 1 from transcript AcoGoldSmith_v1.000688m (l ocus AcoGoldSmith_v1.000688m.g) derived from phytozome v7. 0 (chr-ID scaffold_3; pos 9623199 to 9623704 reverse stran d)
cttcatctgttctctttcttcaacaactcaaggtaattgaaaaaaaatctttagaatcagatctttttgttagttttgagagtgttttgaagttgatttctttgttaatttgagatggaattctgttcatgaaatcgatattgtgaatcattattctcaatttaattattgaatttgatcatgttcttaattgagatgaattttgaattctgtgaaaagcaaactggacatttgttcatgaaattgatattgcaaaacagtattctcaatttgattgttgaattttatcttgttcatataaaatgtaagattttgatgtttgaagtgcaagtgtgatatgtgccctttttgttgttgtttagttaatactttaatagatgagaagttaatcgatgttttatttgttgacaaagtagcaacgcaatttcctcgtgactattggagaagatgaacaaacatctccacagctatcacctctttgccttaaggtttttgaccttgataag

SEQ ID NO: 110382 - DNA, 324 bp, Aquilegia coerulea
  Intron number 1 from transcript AcoGoldSmith_v1.009121m (l ocus AcoGoldSmith_v1.009121m.g) derived from phytozome v7. 0 (chr-ID scaffold_2; pos 10186499 to 10186822 reverse str and)
aacactgaagcaaaaattaaagaaagaaacaaaaggtaattgctttcatcttcactctcaatttctttcatattttatttatatagattcattttcagattccaatcaagttttctttttgggatttagggtttttgtattgcatttggggaaacttcaaaacttgtcttttgttaattctgaggtttaaaacagtgatttgaaaattattataaattgtgtaattttttgttgtttgtgtagttcttgcaagtttttgatgttaaagttttgatctttgttgttgcagtttttcctggctttcaactagggttctagaagcga

SEQ ID NO: 110383 - DNA, 705 bp, Aquilegia coerulea
  Intron number 2 from transcript AcoGoldSmith_v1.006577m (l ocus AcoGoldSmith_v1.006577m.g) derived from phytozome v7. 0 (chr-ID scaffold_68; pos 88243 to 88947 reverse strand)
gtcttcaggtacatattttttgtttgttacagtaatagctatatatcctacaattgcatggcaatctgacgatcatatatataagacaaaattacaaggtttgatacatatgggcataggaatttaagagttgtaacaaaatactgttatagaatcattgctcgcaattctttaacgcagtgatttctacctctatttcttgtttagaaagaaaaaatgaaattagtcatcttaattatttgtcaaccttgataaaaaaaatatacaatcatataataaatagtaggtgtttcttcagtataccaaacaatctaatcgactgatgttaggaggtcctttaagagtcgagtgggactgaaactcatgtctgttcttgaatttttttgatttatttttgtctgtccaacttattttcaatttttaaaattcttctctgttttttaattttctgtccgtctttttctgtttttgtgaaatcccttctttttttttcttcctctcttcccctaacgtcggtctccaccgtatcacggttctatattagtcatatggttacaagaatcaggagtgcaagaaactgtcatttgagatgcagaaatgaaattcaaataatatatgttttataagagagagaacctacaaacttatgtaatatgtatatgcatgtatctgtgagggcagattgctgtgaagaagttgaaagcc

SEQ ID NO: 110384 - DNA, 981 bp, Aquilegia coerulea
  Intron number 1 from transcript AcoGoldSmith_v1.002972m (l ocus AcoGoldSmith_v1.002972m.g) derived from phytozome v7. 0 (chr-ID scaffold_8; pos 3639369 to 3640349 reverse stran d)
gtttgaagaaaactcactaattctaattccccaaggtttgtttgtttcttcattcatttatgttttttcaaagatgggtaacttgtgattttggatgttattatgtttcttatagatattatgcttacatgagtagaatccaatgttcttgtttttcattaaattcatcttatttctctattgttcatgcttaattgctgtgtttacaagtttttttcgaaatggggttcttagtaattgattaaagatgtgatctttcttgctgttttagctgtttgaggttattcttgaagtatgttgtgtgtttgagaaagagtgctagacaagggtttaagggggttgggtgaaattcacttctagtgaatgggtatgcttctttttgggtaaaagtatgaattgttggctttgcttggtaatttgctgcttaacatttaatgaaacttaggtgatctcagccttttgatggtcttcaccataatttccatcttactcgagtgcaagagtatgctgccaaatttcaaagtagatgtttgatgtagtatgttgattgtttatctgataaaggcctccacttctgtcttctgtcactacttcatccttcgttttgtactgtaaaatgttaattctgtagtatagaagcatccttgcggatcaagagttcagaaccttatcaatttgggatcatatatagttgttcacaatttcacctttgttttcccttattagcattgagcttgcttttacagtccttgagcttttgatgggagagaggctgagagaggattcttcaatccagatattaaacttcgattaacaaccatgacatagttgtctgcttgctgttaagaatctctgcaaatgcttaaataattatgtaatcagtatcttcagttgatttctctcttgttgataaatattattctgaaatcttaatgtatttgagcaggcctaaacgaatcagttctattgaagcattggata

SEQ ID NO: 110385 - DNA, 640 bp, Aquilegia coerulea
  Intron number 1 from transcript AcoGoldSmith_v1.007480m (l ocus AcoGoldSmith_v1.007480m.g) derived from phytozome v7. 0 (chr-ID scaffold_2; pos 6550308 to 6550947 reverse stran d)
tcttcgatacaagtaagtaggattttttttttcttacaaacttctctattttttttatttaaatgtttatgcttgtggggtttttgttaattctaggttaaatgtgtgtagtttgagattttagttatttttgtgaatttagagttggtaaaggtagtttatttttcttagaaattaataggttatagtcatacccaacttcattgaagaaagcaattgtatttatgtcttgctatagatgacgatgtgtattggggagttaaggaaataattattggattcgttacttgttgtaaaatgtaacctttttatagttgttctttggtgaaagagcttgggtacatttatcagtctccatgccgctaaggttctagttattgaaattaatgagttgcaaaaaatcgattcgtttgatggattctgaacattgtaaattttagtgttctgttggagatggtttaataaacatactactttcgaatcaattgctgatttattgagttatcccctggcattttattgttccatttgctacttttgaggtattatggtttatttatgtttgctttaattaggcattacttgctcatcccttagcttcttattagctcattaatttgttgattgcagttaggcagac

SEQ ID NO: 110386 - DNA, 606 bp, Aquilegia coerulea
  Intron number 1 from transcript AcoGoldSmith_v1.006600m (l ocus AcoGoldSmith_v1.006600m.g) derived from phytozome v7. 0 (chr-ID scaffold_13; pos 4806128 to 4806733)
ttcctcagacatcctctctgcaacaattccctaaggttattctctctctctctctctctctctctctctctctctctctctctctctctctctctctcttaagtcataattaagttacttttgtttattgaatttgcccatggttagttagttagtttaattcatgtatgtatatgttgggattttgtgcaaaacaccttttatttgttagactattattgtgtgggagactgggagttctattttcttctttaaatttgctgatttgtattgctagaattttttatgagctgtaaattaattttgctttaaagtttgctcattttattatagtgtacgaaactttaaaactttgaactttgctggtgtgttcccattttatgtttcattagctataatatagtacaattataaaaaatgcatttcggataataagggaaaacacatcgacatttataaaaaaaaaaaaaaatccccaaaacactttattgacaatttcacatttcttttcttatttttgattgtatatcaaagcttcccactgcaagatgtgataattataattgtgcagattgtcggtgggaaggctcccacttggtcttctag

SEQ ID NO: 110387 - DNA, 996 bp, Aquilegia coerulea
  Intron number 1 from transcript AcoGoldSmith_v1.011011m (l ocus AcoGoldSmith_v1.011011m.g) derived from phytozome v7. 0 (chr-ID scaffold_58; pos 456018 to 457013 reverse strand )
gaaacgaagagaaagacagatcgtattaaatcaaagtaagtaacgataaaccttattaatcacgagatcacgttttaaatagatccaattcatgtttttttcttcttatttgtttgatgtttatttgttcgtaaaaatggagaaatatatcttgaaatgcccaatttcttatgcattttcatgattttaataatatgttgatttctcaccctttaggatgatcatatcatccatcatcttcatcatcatccatacttattaagttattagtaagtcatagaacctataataatgtgttgtcaatgtaccagtgattgtattgaaaaaaagtaacattgaatcacataattggagaagaagggaagtatttagtcttttctacaacctataacaatgtgttgcatgcattcccgacttggtagtcatcattaattagttcttgaataggtagatgtctttatattatccatatgttaaaataataaagtgagcaatgccgtatgtaggttctaaagtcaaaattacagccccctccccctcccaagaaaataaattactgcattagtataacacaatgtaaaaaggggattcagaattttcttttaggaagagcaactgctagaggaatggatcataatggatttccatgcttggccatcttcaattcgatattataacttgataaacttaatcataaggtttttggttttattccaaatgtcaaactattttatcttttgcatggtggagttgatggatttttatatcatatcgtcatctaaaacataaatccttccatattactttttgctgagaattttactttattcaagtgaaaggatattttgtttccatttgccatttttttttttatttttttattttttttttataatatgcattgatgatcgagtcaatatctgcattctttttctgggtacagttggttatccctaatataattttatttttgcttcagaggaatcagagtcaaag

SEQ ID NO: 110388 - DNA, 734 bp, Aquilegia coerulea
  Intron number 2 from transcript AcoGoldSmith_v1.017878m (l ocus AcoGoldSmith_v1.017878m.g) derived from phytozome v7. 0 (chr-ID scaffold_35; pos 715460 to 716193 reverse strand )
ctacgagaagaatctgaatcaggatctgaaagaaggtatatattttcaattcaacattgctatttgcaaacacaacaaaaattaggaatcaaagttatttgtaagcatcatcagtgttattctcatcttttagcttatcctttgtgaatatttcaacgtgcaattggcttgtgtttttaagaactactttgcttattttgcttgcatgatcatatcaaaacagtaagatctgttcgtttagagttgaagttgataatttcagatggcgaggtgcttttgttcaactgtatatttaagattcattgtcttacttgaaactcattacttgatttatggatgccatgtctttcttgccatagagttaaagtttgactacttttaggagtcactttcctagttgtgactcatttacttggtgcatatggcttccatgattcataggaaagaacttcgcctagttttggtggagatctactgatctaataaagactttgttgtgatgcatactatgcgtggtacaaatcttgcagttatcattttgagatcattgggttctaattgtaatcttgcagtgtcatgattcagaaatgcatggagagaggggagcttgtaccttcggatgtaataactgggcttttgcaaagagccatgcagaaaagtgctaagaaaaaaaattctaattgatgggtttccccgcagcttagaaaaccgtgcttcattcgagactttggtga

SEQ ID NO: 110389 - DNA, 810 bp, Aquilegia coerulea
  Intron number 3 from transcript AcoGoldSmith_v1.010600m (l ocus AcoGoldSmith_v1.010600m.g) derived from phytozome v7. 0 (chr-ID scaffold_13; pos 1266501 to 1267310 reverse stra nd)
gtcctagagaggtacacaattttattttatcgagtttggtttgaaattaaacatttagatttagtggtagggtgtaggaatagatggagaaagtaaaaaagttattgagatgtgtaattgtggggggagagtgacacaaaagatgcattttttttttttgtttttagacaaatgagtaatgtgcaccactacagagtatggggggctgattcgatttagttggatgctaaagtcaaattaaagtatttggataattgtaagagtatatgaggtatagcaagttgagatggataagtgaaaaataaaatcatttcataattgatttattttaggaaattagatacaccaaaattctgaagaagatcattagatgattgccagtattgagtaatacttggcaaatgatgaggtaaaaaaatttctggagacgtagcaagagaagatgtgtaacatgcctttacagaagatattgattaatagacaatttaccaatgagaaaagatgaatctagttgtatcaagtaatgagataatataatgtatcagcattatgaagaccgggattcacacaataatgtccctatgcgtaaacttacatgtactatcctgagaattacaaaatagttctgttgaaggaatatgggtcctcttggtgatagatatttgctactttcatgtgacatgaattgttgtagatgatattgctaatataattttgagaactaaaatcattttcttcttcaccacagccacttttttaatctaatatcacttatatttttctgtgcaggtccaaaataggggccaacaa

SEQ ID NO: 110390 - DNA, 172 bp, Aquilegia coerulea
  Intron number 2 from transcript AcoGoldSmith_v1.010600m (l ocus AcoGoldSmith_v1.010600m.g) derived from phytozome v7. 0 (chr-ID scaffold_13; pos 1267345 to 1267516 reverse stra nd)
ggtaagttttttttttttttttttcccaattttgttttgttaagaatcaaacccttttcttctttcttgttttaaggttttagattaattggaactaatatatagatatgcaggtttatataaaaagtctaatatacataatttttgaaatctcagttcggcgatttttgaa

SEQ ID NO: 110391 - DNA, 704 bp, Aquilegia coerulea
  Intron number 1 from transcript AcoGoldSmith_v1.001215m (l ocus AcoGoldSmith_v1.001215m.g) derived from phytozome v7. 0 (chr-ID scaffold_13; pos 554145 to 554848)
gtgcctttgccttctggggtttgttctttaaacctttgaaattatttgtgatcatttgttttgaatttcaattgttgataatttgggtaattagtgtttcagaaatttttaaatttaaatactacattttaaaatgagttatatggtttgcaattactttggtagtatcctagtttaagtgacttgttgtcgtgcagaatgtatgtatgttgctggatagatatatatatatatacttttaatgaatttgagatacgaagacaatgcatgttgtcaattgtgagtatataaacatacagtattcatttacacatatcaaggaaatttcagatacgtttgttgtctggctataatgttgctttgcttaaaatagacacgactatgctattcatttcatggcacatagtgcatcttgcgaatgtgttttgaacattataatcaacatattttatctagcagtccacatggtgacatggttttgtatttttgttttaaaggatcaaaacttcagttctaagcaatttcattccattttgatgattctctttttagtttttaccaataccacattgagcctgtttttcgtaacactgagggtcttgtttgttgtttgcctaaaatagtgattagagttcaacctttttgttttatcttattttttcttgacaggtctatatccaagatcttatttgttctcaacctga

SEQ ID NO: 110392 - DNA, 505 bp, Aquilegia coerulea
  Intron number 1 from transcript AcoGoldSmith_v1.019171m (l ocus AcoGoldSmith_v1.019171m.g) derived from phytozome v7. 0 (chr-ID scaffold_7; pos 1769403 to 1769907 reverse stran d)
ctagtttgcattccactgcttccccactttaccatgtcatgtacacagactcatgttctacaagctctgtgcaaatatgaaaaaggtcacaaaacttaatttactagctccgagtcaagagttctaagatcttacaacattatggtgatctctaagacttgtaatactgtagttcactcattcctattcgccgccttagttatacttatttctacatggatctctattgcaaccgtataaaaaaccagcttatggtatcatacgatctaaaaatgaaatgtgttacaagtgttgtgagcaaatttttttttgatctttagattttattcaagtattttttttccctgtgcacttaaattaaattccttcagtgagcaaaaattgtcataattagtgttttctttcttcagttatgtttttattccccatgatttactgatccaagaattcatcttttgactatgatgtaggcattttctaaagtcattagaagctgggtatcaaa

SEQ ID NO: 110393 - DNA, 640 bp, Aquilegia coerulea
  Intron number 1 from transcript AcoGoldSmith_v1.009982m (l ocus AcoGoldSmith_v1.009982m.g) derived from phytozome v7. 0 (chr-ID scaffold_2; pos 9594778 to 9595417 reverse stran d)
ttcaatatcgcaggtaatctttcatttcttcttctttcgtttttgctaaaatacgcctgtagttctacttttcctagagataaatttggggttaaacagtgtcgtgtcatactgccttaaatcaagagagactagtagactatcagaccttcaaagaaattttttgaaaatactgtacataaaatgtctagatatctcgaattcagtctgtcagaacttttgttgaaaggattttaaattgatggtaaatcgtgagtttccaactagtccatcaaccaaaacttcacacaactatgactaggaagagaatgaaagctcaaatcaggaaatatactagttaaagattggatctcatacagactgtttagctattctataacaaggtgattaaagaaggttctcttaaggtacaagtagtgtgctgcactagttctacttttctcgaaagctatggtggatggtaattcacgtgcatgaatcttatagacaaaaggtaaaacaatgtacatgaatcgtgagctagggtgtataggcattcaaactaaaacaatgcatatattggggttgtgacaaatttatttatatttagttcttactgaaaattatgttaatcctataaattttggttcatcaggattaa

SEQ ID NO: 110394 - DNA, 944 bp, Aquilegia coerulea
  Intron number 1 from transcript AcoGoldSmith_v1.009489m (l ocus AcoGoldSmith_v1.009489m.g) derived from phytozome v7. 0 (chr-ID scaffold_3; pos 1955535 to 1956478 reverse stran d)
tcttcattgttggaattggtttgttaaacctggtactacaatcttttctcttactttagttattatagaattcaagttgtagtaatgttgaatctttagacttaaatgttgtatttgttctccaatgctgcttgaatgatgttctgtgtatgttgtggaattgaaatcttgttatatatttttgtaaatgttaattgcttggtattatttaagtacaaattttagggatcacattttttttttcttccccttttagacctaacctaaaattttaagtgattatatattataaagcttcaaataaattttataaattttgataccaactccctcctttcaaattatttagtagaaaaaggggttttctcttagaggttagtgctcattatttttgcaaaagaaatgttattatcaagtcaagatatgcagtttatgtcgaaatatggttccttgcacaaaatttgtgtacatttttttttctcattgccttgaattgtttaatgtgttttttttgtttgtttaaactataacttttaggctattattaatgtaaataatgtacttatatctctaactctctagtttgtgcttcctccttcaaaaggatttattagatcatatgtactgtcgagttgtgtacagttcagaatatcccccccccccccccccacacacaaagcattgtttgggaattgatcctcgtaaacattacaaacgaatatgtattagttgtcggttgtccatataatagggcttagtagaaattgatgtccataaaagctttgaaacaatatctgttaattcaatcgtgtatatacaatcaattgatcatcatcaaataagtgtaacaactatgatctttgataccttgttctgttttttttgtattgcagtccaccttattgtttgctattaattctctgtgccttttcatctagcttgaa

SEQ ID NO: 110395 - DNA, 909 bp, Aquilegia coerulea
  Intron number 4 from transcript AcoGoldSmith_v1.012335m (l ocus AcoGoldSmith_v1.012335m.g) derived from phytozome v7. 0 (chr-ID scaffold_291; pos 13759 to 14667 reverse strand)
ggctctttcaatatctttcagtaagtttacacacctgtaagcttctagtattgatatgtgctctacatctatatttcatgcttctgtttacctcattttcgttggccatggcaaacaatctcaataatcttccccaactgtaaaacttatttgtttgtgtaactaggtatttctactttctgatttttttgttgaaacgataagtcccaaatgtttacaagttttgtaatgttttcattgaaatgataagactaggatctcccctttttggatgtgtgtttgtttggggaagggaaggttgagatgcatttcatgtgagaaaacattgatcaatcaaatgaggctatgtatctacttgtttgtaaccagaactttgatgtgaatattccaaggtcggaatgtccaatttcatttgaaaaacatatttacctaattatcactatcatcccgtagcaatttgtgatgtgggaggttaattccgccatatattattaaacctttttttttagttttatttttttttagattttaataatccaaaatgttcctgttatgatctaatttatatttcctctctcctgatgtttacagaatttgaaaatttcccaacttttttttagtgaaaaatgctgtaaatatttggagatataaaaattgcaaacttcagaaggttttctcatcctcaaacaagttttgctttccaagaatagcttctatttgtcttgtataactgtataagtcggtctggacataccgtatattatagtactctttttctatcatataatatatttgaggctttctttttaactctcatatttagtttttttttttcttatgccataatgatattttgcttatttgctatgtgcagacagtttttgcaactgatttgctgtcccgcagtgt

SEQ ID NO: 110396 - DNA, 559 bp, Aquilegia coerulea
  Intron number 2 from transcript AcoGoldSmith_v1.002425m (l ocus AcoGoldSmith_v1.002425m.g) derived from phytozome v7. 0 (chr-ID scaffold_16; pos 4739504 to 4740062)
cattgattttcaaggtttgcattataatttctcttctctctctatgtttttttcttttttttaaaaaatttctacgaaattcactaattaaattactatctttggtttttgatcttgttatctcaaattcaaatagatgtaagcaatttattattcaaatcgagttatagtagtacagtatttagatcatgtaattcaccaacttggggcagttcgtcgaggaagtagaaacgagaacgagttagaattattataacttcaaacctcttcccagttcccaacaaaatggagagttttaagaaattgaaagtcctttttccaatttaaagtttttttctacttcttacaaatatcctgatccattcgcccccctaaccccttctttctcctgttttaccgctacagaatctaatgtatgctatctaatctaatagtattaggtctgttgagcttgtttttgacacaaacacaatatacagacaatagattgatcattcacagattctatttcactattttttcaggttttttttaacttagacaatagttagctctttgg

SEQ ID NO: 110397 - DNA, 509 bp, Aquilegia coerulea
  Intron number 1 from transcript AcoGoldSmith_v1.016514m (l ocus AcoGoldSmith_v1.016514m.g) derived from phytozome v7. 0 (chr-ID scaffold_83; pos 818593 to 819101)
cgtgtaacatagacggtgaggttgatgacttgattcctgaatcagagtttttcacgtctctcctaatcctcttcttacttgaatcaactactacttcactcctaagtggatcagtttttaagcattaagctacaaatccatataaatataaataattcaatactacacttcagacccaatttgaattttgaacagtaacagtaatgtgaattttatttacgagcaatgggaaagtgcaggatatattaaagtttctccagattcaattatgggcaaggaagacaagaaggaaagacgtatgcgacacaaatgaggatatccttaaaatcatgtatgagtatgacttgtggtaatttcattcagagaattagagttttgggggtagttttatgagttcaatttgagcagaaaacatggttgttgctgtgttttgtctttggtgatacaacccggtaagtctagaagggaaagatgcaaccatgtttcaacagtagaaactgttagttcta

SEQ ID NO: 110398 - DNA, 988 bp, Aquilegia coerulea
  Intron number 2 from transcript AcoGoldSmith_v1.002988m (l ocus AcoGoldSmith_v1.002988m.g) derived from phytozome v7. 0 (chr-ID scaffold_22; pos 3099694 to 3100681 reverse stra nd)
ccaatcattgccctggtaattctcaattttgcttttttttttttccttcttcaaggaattttcattttatgtttgatttggttttggggtttgtttgtttttagatttttctctgttaattgattggtttttcatttttgtaattgggattctctttaaaaatttataattccaaaagaacattcattaggggataaagggatagttattaggaatcatgcttcaatttcatttgaaacttaaaatgtgaaatgaaattgattatttttttatactgaaccaaactacgcatatttgatcaaatcaagcatattatgttatatatgaaaaggccttaaggatttgttgtcatcatggaatactaatgcacaagggaggaataggtaggacttagtcatggaaaatgtccttgattggaatcgaattcttttttcattctgatcacatcttcttcagcttaatatataggagtacaaagctctaaaataaaggattttgcaccttccatgtgttggttttcattaatatggtttatattgacaccaaggaataaagatgttggattcccttctgaagggtatcaaggaattgttgtatgtttaagctgcttgaaattatatgtttaggaactataatttttgtagtctatggtctatcggggtactgttatttagcattgagatatataaatatgctttttgtctccctttagtgccttaactaagatggcaaatccttgtaagttcttctgttctttgtggacgtgttgacccaaatgatataaatcttaggtttacttcatgttttacacaagtcgctccctgggcaaagcatgggtagataagatattgtggtaattttcttaggttcaggaaaatcgcttcatatgtacaagatctttgaacatgtttatgttgttgaccacgataagtcgataactacagtactgaactatgttttgcatatacatgtaacttcaggagccgtt

SEQ ID NO: 110399 - DNA, 812 bp, Aquilegia coerulea
  Intron number 1 from transcript AcoGoldSmith_v1.021863m (l ocus AcoGoldSmith_v1.021863m.g) derived from phytozome v7. 0 (chr-ID scaffold_529; pos 3926 to 4737 reverse strand)
acgcgcgtacaacgaggttttcctaacaatgaactcaaggcgagataaccatggacatccaatatcacaaaattaatgtcaaacaaccgagtgccggtttcgtagataaccatttgacacccctttaaggactaaaacagacgacttttctccttcttgatctcttttaacgcagtaaaaggtgaaatttgataaaataagtggaattagaaaggggctgtggttagatgagataagtctgctgcagaattaaataaaactttgggcagtacatttgatttgacatcattgtgagtttgtgacagcttacataatacaagagacatatacaaagtgcattaacatggtcatagaattagcattttcgattaagtaatggtcaaataaacttataaataaatcatgagatttttggacatacccccatttgaaagtcgaaatttgagatacctcatttgaaaaaaaaaaattgagataccccaattcaagacagaagagctttacggccttaggtgagttttatgatggacggctaagacatctacatgagatattcatacagtatgatgataaatgacatgatgtattatttcaaatgctcttaattatagtgctgaaacgttttcaaatactaacatgaatgcttactagcagtggtgtatatcatacatccagctgtttatattgattactgaggaaacttgtatgctttattttgaaaattaaataacacagtgctgttcattatgttactgtggtggttctctttctctaatttgatgaatataatttggctcttgacattgtaggac

SEQ ID NO: 110400 - DNA, 670 bp, Aquilegia coerulea
  Intron number 3 from transcript AcoGoldSmith_v1.024516m (l ocus AcoGoldSmith_v1.024516m.g) derived from phytozome v7. 0 (chr-ID scaffold_61; pos 1208349 to 1209018 reverse stra nd)
ccaatgtaagtgagttttgcttggaagagtctatccaattcatgtcttattgatatatatatatatattgtggatcattttgaatttatccaaacacattgatatcggtttatgatattttaatttttttcacaggatttcaaagacgtcttttatattgcagagtgtctggtggatgcatatacagttgtcttaacacagacggttggcactggattggtaagtcctactagctaaagtgttttcctgtctctgtagtttgaatatatgcagtttacttaagcgcattttgcgttttttttcttttattaaatttggcaacagtagaatctttgagcgtattcaaacaagctaatatggccataaagtgattagtccatcagataggagatgttgaatgatctgattgtcacctggtggcctctgaatcacatgttggttaagtttttggctggcacgttatacttatctagctaataattgatgcacttgactaagttggcttacttcagtgtctatcttcctgacctttaccatttacatcagtatggctgtaaaggtgctgggttgccaatggaatctaattgactcaaatgaattttctgttgaaattctgagcttatgtgcaaacatcatttatacgtaaacatattcttgtccatgttaacag

SEQ ID NO: 110401 - DNA, 396 bp, Aquilegia coerulea
  Intron number 1 from transcript AcoGoldSmith_v1.004580m (l ocus AcoGoldSmith_v1.004580m.g) derived from phytozome v7. 0 (chr-ID scaffold_13; pos 5362821 to 5363216)
gaatttcaggtccttcatcataccattaattagactttaaattggttgcaactttatatatcatataattataccatgaaatgctaacaatcaaagatgaaatatatttaacttatattttatataatacatgattcattgatttgtagttgtttctcactttatcctgactgaaatgattattcgtagttcatagcacttgaatcagatcttcaaatgtatatataacactctgacttcttgaagatcttctgcaatttgtttggtctgcatactacaagatcaaagaaaatgtatttaatgttttattagttattttctttaatattttattaaattatgttctcattccggaaagtcggtgtgtggctgcaatgtgaaggtggggtgacttct

SEQ ID NO: 110402 - DNA, 931 bp, Aquilegia coerulea
  Intron number 2 from transcript AcoGoldSmith_v1.005234m (l ocus AcoGoldSmith_v1.005234m.g) derived from phytozome v7. 0 (chr-ID scaffold_13; pos 940520 to 941450 reverse strand )
tgcagtccttgctttgcatcctttccaaggtaaatttctattccagaaactaaacttcattcaggaattttgttatttactgtcaagagagtgtaaaacaaatgttgagaaaagaaaatcactataggttaaagacacaaattaatttatttacatgtttttacacttaagaagccggaaggcattttagagtgacagggatgcataaaagtaatgcaatccaatgttttttttttctcgtcatcattgtcatctcttggtctgaaaattaagggtgttcacctcctcgttcttcttagatacaatttatatagacaatgagtcatactgtttgtctcttcctttgaatcgcaccttctattaccctggaatttagtacacagttcattgtttagggtgaggtcaggaaactgatgtaaagcacagctggcagaagccaacattgtgttatgtacgtcatgttctttgtgctattcgcaagggtcatatatgcaaccaacatattattgaggtaaccgagtagtgcgataggcttttaatttcatccaaccaagggtgtgcaacccataaattgggcaggcagagaagtcctctaccgccatcacccatatgaaatatacaactcaaagagcaccacctaagtgcaacctgcatgccactctttgtgcctcgagtagtagcttcctgtcactagattcagggagagctacgtacttctgaaaatagctattatgaatttggggaaaaatacaatgatgtgcctgaggtgcaaaaactgcagaagtccttcttgatctggaatagtactagttaatgtgcggtagcagccatcatttttggtgaagttatgtagctccttattatattatgaaatcttcaaagcaaaacttcatcttagtgtaatttttcatctcaggtagaagacgcggtc

SEQ ID NO: 110403 - DNA, 635 bp, Aquilegia coerulea
  Intron number 1 from transcript AcoGoldSmith_v1.013335m (l ocus AcoGoldSmith_v1.013335m.g) derived from phytozome v7. 0 (chr-ID scaffold_55; pos 744300 to 744934 reverse strand )
tggtgtaagtttatttaacttcatacacctttttctttagtataagattgcatgatgctgttcggaacgatacaaaagtaagatctagagttgtaaagggtattcattcaaatgaatatgtgatgttgattacctatatgagccagagggaatgatgtctggagacattattagtaattaatataaatgaatttaatagtctagcaactaatgtcgggtataagaagaaagtttcccatttttgttcatacggaatggacagcttaacttatgccttacatccaaaagaaaagtagggatctatgatacccaggttattgaagttggccaaagtattgggaacttatgtccttgatatcagttgtccctaggtagatgtatggactgctgatgtgccgtgtttggatatgtgccactgttgcattcacaatctaaatacacatggtttgaaattcgccttttaagatagcaaatttcttgtgttgcttatagggaaagtgggtgcaaatcctaaccaaaagtcaaaactgaagtagaagtcaattatgtaatgcatacagggattttcaacattgcttctcaagtcttctaacatgtgctttttacaggacccacctgagcaggctgttgtcact

SEQ ID NO: 110404 - DNA, 699 bp, Aquilegia coerulea
  Intron number 3 from transcript AcoGoldSmith_v1.006319m (l ocus AcoGoldSmith_v1.006319m.g) derived from phytozome v7. 0 (chr-ID scaffold_2; pos 6485807 to 6486505)
tttcagagcataaggtaaagtatctcaaagcatgcttctaaagtttctttctagtgtggacaaaagatttttttcatgattgaatctgtagatttcagttttgagcctataacttggttgcaaagttaccgttcagaaaaaacttggtcgcaaagctgatttttattggtctaagaaaatttcatacgttcaccaaaatctttctattgacaaaaatgatataaataggaaaactatataaagtgagctggatgatacagattattatggtaacaaattcttttttttcgataaatgattgaaagaacattttgcattgatcagaatcacctacaatactgaaaatttcaaaaccaagatacctggtgatttggcagcctattgagtctttcttggtagatttgcaaagtatctgcatgtaggaaaataaaataagtaagaaatgggcatattgccgaaacataatggctttctatttctgtaatgcgatcaatcatgtcttacattttctcatgtttgggatcatcgtcgaatactgcactgtcatactgctctcattttggaaagggagttaggtggaggaataagtcttattctggaatcgttttgcttgcatgggtcgtgggaatgtttttgtgtatattctttgcccttttttttcttgatcggtaacagctgtaaattctttgcccgtgtaga

SEQ ID NO: 110405 - DNA, 895 bp, Aquilegia coerulea
  Intron number 1 from transcript AcoGoldSmith_v1.019283m (l ocus AcoGoldSmith_v1.019283m.g) derived from phytozome v7. 0 (chr-ID scaffold_2; pos 2444791 to 2445685 reverse stran d)
gcgagatttggtgaagaggtaagcctggagcgttacctctgcagtaacgctagcatttctcttataaatattggtgttgtgtaaccataagaatttgagcaaagaagggagcaccataagaaagtatgagtgagggagatttgtgaggaaacctaaactaaggtttcattagttattgtgtagctcatttctcaattatcaataaagctatctctctttgtcccgtggatgtaggcatattgccgaaccacgtatattattgtgtttccgtatttctgctttagtttacatcttttgtgtttgtttcttcattaatcatatcaagatcctgtgtatttatcataacatttttgccatgttcgcgatagtagtgtgtccgtaaatgccatgatatatggatttgaatttgttgtttgagtcaatagagttctagtgagtgcatagttgccctgcaaaatcaatatacaatagtctagtttttatttagcccgaagacttcctttaatcagatcctgcctacattataccccttttcatttcagatcattttaagtgaattggattttaatctcagccactggatgcatgggcttatacggcttggaataaggagtgggatgggagtgatttaggaaaaatatatctccaaactgcttttgccaatccgaataaataaataaataaatagttggaaaaatataatggtaataatgtagataaaatgggacatattcatttgaaaagtttgaataatgactctcataattaactaactaattagggtaatatgagaaaatcaaggatagaatattatgtgagattatacatttgaatttcaaaatactactacatgtctacagctagcttcatctttctctggtagagaatcagccgt

SEQ ID NO: 110406 - DNA, 763 bp, Aquilegia coerulea
  Intron number 1 from transcript AcoGoldSmith_v1.003387m (l ocus AcoGoldSmith_v1.003387m.g) derived from phytozome v7. 0 (chr-ID scaffold_3; pos 1617911 to 1618673 reverse stran d)
agcagagattacagaacaagtgaacgaggtacgaatattatttttattggatttgattttttctatgtaatttgttagttaaggttgtttgcagttgaagattaatttatctgtttaattatggttaagtttcgaactcttttgataaattgactttttttttttttttaatcttacaagttagaaagaatccttggtttattagtgtatatgcaatagtggggttttgtacttaatatgtaagaaatttgatgtctcaataatcatcgaatatgatgcagaattgatgtagaaatttaatcgaatttgcgctctatacattgagtttctctgttgatacacgattttaagattaatttttcaaactatgcagttaaatttaattatgaatttataccaagggaaggcttttgttcagtgattgatatcaacaatgttaagacaatgctcatgactttctaattgctccccgactccggtcattcggggatttttgtgataagcatgaagagtttatcctaatttcatttggaagtgacagtttaacgatcacatggctcttagtaatttgttgcttctttctgatgtgtaattggtctgtgcctgtactaactggaaaaatctacatccaccctttatggatggggctaatgtgttaacagtttccacgtgttgttgtttcttattgggaaatcaccctcatttattttggttctgggttatatcataatccgacttttgttattttgattacacagagagc

SEQ ID NO: 110407 - DNA, 704 bp, Aquilegia coerulea
  Intron number 1 from transcript AcoGoldSmith_v1.009994m (l ocus AcoGoldSmith_v1.009994m.g) derived from phytozome v7. 0 (chr-ID scaffold_35; pos 2229406 to 2230109 reverse stra nd)
gatcttcttttaacatacatcatcttcttctctaggttagtaatgatattcaatatatttattgattgattgacatgtatgatgtataattcttctaattaaacttttttttagtagtttttatgatcgatagtttaggattagggttttgagattgttgattgctcgatttgaatcttaaaatacccatgtttctccccctttttatgatttattcaaaagatttgaactttgttgtatttaatcagatgttttgtttgataatagcttgtttgattcatctgttgttatcacttgtcattctttttatattattgaaattctttgtcttgtaagctttgcgatcaaactattttctgctttaattaggcacttaaacattgcaataccatgtttcccttcatgagtgtttgcaaatttacaaaccaagagcagatttcattattttacacagatgtaattgaaaaatatatcactgtgacttacacttccagcgatggttcgttcatatcgataggacaatatggataatacttaagcctcctttccatctgttaatgcaatatctatgactttgagtgtttttttttattacggataacttctttcatctttctctaatgaactatgcattatctatattattacttatgttgtttgatctttatattcatgcagtgtgaattggctgtctagcatctcaa

SEQ ID NO: 110408 - DNA, 668 bp, Aquilegia coerulea
  Intron number 1 from transcript AcoGoldSmith_v1.013568m (l ocus AcoGoldSmith_v1.013568m.g) derived from phytozome v7. 0 (chr-ID scaffold_58; pos 1309226 to 1309893 reverse stra nd)
gatttataaactcatcaaaaagaagacttgctctggtataacctaaagtctcatcatattctcatcccctttgttgttgttttttatttttatttttcgcaggtattgctattcgtacttttttggtcgaaatatatgaacaacgtaacaaaatgtctgttttaggatcaactggggaaaacaaacctttgaggattttatatactcatcatacaatctcttcatcctctatctcctttcaatcatttcaatttcttaggccaaaggcccagaactagttactgaggtttcttcaccatggttatataggcttttgctttggtatttcgtgcgcaattatgtgactgacaagattctataaggacttcacattttttcattggaaaaatgagcagattaacaatgttcttgcaaaatagttttaccacaagattttggtataaaatttggagtttgtgccctttctattgcaaaaaaaataaaaaaaaatgatttacattataaggcacaccaagtgactgggataatttgttaagacagtaaaattttgaaggataagctaaaaatatattgattttagtagttgaaaacttgaaataacttttatctctattttgtgttgcatctatttaggtctctcactcaagtcccaggaagtcactgctatc

SEQ ID NO: 110409 - DNA, 632 bp, Aquilegia coerulea
  Intron number 1 from transcript AcoGoldSmith_v1.020804m (l ocus AcoGoldSmith_v1.020804m.g) derived from phytozome v7. 0 (chr-ID scaffold_16; pos 2908312 to 2908943 reverse stra nd)
cttctattcagattggcgaagccattgaacaggaggttggttaagttgaatttgagttcaattttatctttgatatgactatagtgacatatttcttggcttaccattatatgtattgataggttttatttctctataagtttggattcataagtttctcttgctagaaggaaaattcaatgaaatttgcattttaaggttgtaaaatgttttgtttacatgtctgtgatgttaactgaccacaaattaaattctgcttccatataaaaaagttcactgtgttatggttggtgaaaacatgactctcttgctttgttatgtattgatacacatagcgaggacaattaggaggcatcatttctcatcttgaaaaatagaatattttctgaaagacaacactttaaactaaacaaggcccctcactgaatgattttgaagagaacactgtcacatgtctcctagcaagaggaacttttgttgcaatttggagtgttggactagggtattctatcttccaaactcctggtactagtacaacgttgtgactttcttgaagactccgagttatgaattataagcatctttgcaattgaccaggttaggatacacagatttttggagaagacaaagaa

SEQ ID NO: 110410 - DNA, 645 bp, Aquilegia coerulea; identical to SEQ ID NO: 109974
  Intron number 1 from transcript AcoGoldSmith_v1.007537m (l ocus AcoGoldSmith_v1.007537m.g) derived from phytozome v7. 0 (chr-ID scaffold_83; pos 708105 to 708749 reverse strand )

SEQ ID NO: 110411 - DNA, 892 bp, Aquilegia coerulea
  Intron number 1 from transcript AcoGoldSmith_v1.012214m (l ocus AcoGoldSmith_v1.012214m.g) derived from phytozome v7. 0 (chr-ID scaffold_2; pos 6665271 to 6666162)
aatccttacttttggcagctctcccgccagatcaagtaacctttctctctcttagggtttttttactcatatatttaattttagggttttatagtgaaattagggtttttgattgattgattgattcttccacaaattcatatgatgagggtttatcaatagtgtttgttcataatttgaagggtttttaaaaggattttgagtctctacaactgccgaaagttaagttatacatgttgactgttggttctgatgtgagaattgttctaagtgatcaatgtgacaccattcatgttactacctagtttctcatacttggagtgtgtgtggataggcttggagtaaagaatgactcgggtaagtgtaacttaacaagtgtatgtggttgtgtgagcggcaaaaatgttgaaatatgtttataggattatgctcacttaaacaaataagttgattatactccttaaaagaaaatttactttatctcatctggagtttaggtttattaaacaatagtctagtcactagtgttgtatgaatctataaatgtaaggcttgcgcaagtttgtggtatcactgtcgtgaagcaggacaatctactgctaactattattgaagctttgatacataaatttctagtgcagcgtaaaattgttttgtttgggatctgattgtagtttcactcaatgtcgggaccttatttatatttctttatacatctccatttttatgctacctatgattctgctacacatacaagccttccatagttcattgtggttattagaagaatgtactttctatggatttatccatcctatcaaaaaacttatagatataaaggtccgcacattgtatatagattcatttctggaacactgtttatgcagttggc

SEQ ID NO: 110412 - DNA, 342 bp, Aquilegia coerulea
  Intron number 1 from transcript AcoGoldSmith_v1.003900m (l ocus AcoGoldSmith_v1.003900m.g) derived from phytozome v7. 0 (chr-ID scaffold_2; pos 4798319 to 4798660)
ttttctcctgtagttgaggtcagtgttctagtgttcatgtacttgaaattttaatagataacctcattagagattttgattgttgttatttgttaaagtgttttctttttcattataaaattaaaattatgaaacctgattaacaatttcaattgttggatttctatttatgacacatttgaatccctaatttgtttactaaaataaatagagtttgatttgtgttcttcttaaaatatgtaaaaaaaaccctaattacttagtttagagatacaaacaaatgtttagtgggaattattttgtaacttatgttgtttaattgttgttgtagattaaaaagga

SEQ ID NO: 110413 - DNA, 698 bp, Aquilegia coerulea
  Intron number 4 from transcript AcoGoldSmith_v1.004997m (l ocus AcoGoldSmith_v1.004997m.g) derived from phytozome v7. 0 (chr-ID scaffold_26; pos 199546 to 200243 reverse strand )
ttaaagtaagctgtcctttttcccattttttcttttgcaatgtattcgtgtaaacagtaaaattatttctatccaaacaggtcatctttttatttttccaagggctgctgggttgcataatatagaacttttttccttgcatttacgataattacaaataatgataatgaattctatataatttgagattctgtaaatcatctctacatgtcagcaaagaattgctggtcctaactttgtctgggagaagaagctcattgccgttggtacatgtacttgagaacataatttgaagaatcttcgaatattttgttatactggcataggttaagttataaaagtgttctgtgcagtaatatatttcttttatcaatgtgtttttcgagagagttcactacaaattctttttgtttaacaagtctgtccttagaggctacataaatttggtctttgtttgtgtacctttatcttgtttgatttacacttctattgaaatttttgttgtaatgcttatttgtgtgtaaactcacgcgaaaaaaaaagaagctgagaaacatacaaaaaaaaattgaaccagtctacaagacttttgtattgcaaaatttgattacagcttctgaacttcaagttaaaatttctcatagcaaataatttcactgaaataaacttaccgaatgaatctctttgacttgcagaac

SEQ ID NO: 110414 - DNA, 1055 bp, Aquilegia coerulea
  Intron number 1 from transcript AcoGoldSmith_v1.004900m (l ocus AcoGoldSmith_v1.004900m.g) derived from phytozome v7. 0 (chr-ID scaffold_2; pos 5830278 to 5831332)
tgaggaagtctagacctagtagagctcggcttgtggtaacaatacttatccatactctttgcttttgtttttggtcattcttttatgattttaatatgagtttaattattgaaattagaaagagtagaataaaaaagggcgagtttttttgttggtaagatgcaatctgggctaaaattaaaatgttcatactatgaagtaaactagttgtaatcaacccatggatttttcacgttaattggtttccctcataatcggtagattttgagtagtaagtagtgaatgttcttacgagtggttgaggtcataaaacaacttagtttgatgaggaagttctaccacaatgcaagccacacaattaaggagggagaatggtttttgtcgttcgagcattaatctcgtatacccactaagatagagcttcaagaatttcacagctacgtaggtgccgaggagagcctagggagaacaggcacaattttagctatgacaattttttcctttatgcaacaattcttataaactggaggaatgaagaaagccccggttgataatatgccactgattcacattttactaaagaacaaaaaatgccaccaaagtgatgcaacacaatctctgtgtattggacttttatcagagaattttgatcgattatttatatgataaaataaaactgaaaggctgcagtctggaaaataaaattgtcatgcagaagagaattttttgccaaggcgactggttgataatgacaatagaaagatgacatcggattgagtcttccacaatgcgtagaccagtcaatgtttcctagataatatactttaatagttgggggaagagtccatctgtatctttcaagcataactattttgattcacttcttatatgcattctatctatttttatgattttggagaacctttcagtgatttagttcaatcaagttcctattatgtttgtagtgtcagacatgattcatgtacaaggaccaccaacatttccaataatatttggcagattccaggtcctcgtccttctaaaggtgcaacgat

SEQ ID NO: 110415 - DNA, 850 bp, Aquilegia coerulea
  Intron number 4 from transcript AcoGoldSmith_v1.011069m (l ocus AcoGoldSmith_v1.011069m.g) derived from phytozome v7. 0 (chr-ID scaffold_2; pos 4647270 to 4648119 reverse stran d)
agaacgcttttggtaagcgctttaacatcaatatgtttgcttttcctgcgaatcttgttttaactcgcattggtttatcttttttaagagtgttttttatgcataaagtattattttcggctagcagttctttgagctttgttacgacatcaagtaatggtagttaaatattgagaattgcaaatcttttttaaaatctggatgcagttgttttatttattgtgaacccggaaatatttagatcagaaagggttgtttcatttatcatgccaccaataatctcagttttatgtgctcttactcttacttcattcaaagcataccttgttgctcattatgtttgaagcattctagtagatgttttccaaataattttattcatatcatatttctttcagttttttccaagcatgctttccttaacattcttcatatgatattgttgtttgcatcattttggagtttagacactcttataaataagacttatatcaggggtgatcttctataatagctttggaaattaagagaaatttattgttgtagtagaatggaaatacgatcaatcgtgatcttgatcattttatgcataagtgaggaatgcattttagagagagatgcaaatgatgatgcacaaaatgaatgtacaaaagagtcgtgcacacttgatgcagaagaaacatacagtataattatcaactgatgcatgcaccttcccttcttatgactttgcagctcaaattttttgtcaaggaaacttacattgtggaggagttaattatgtttaaaactaattgcattcaatctttttgtagaaaaacagaaccgccaggttcagatttgttctaag

SEQ ID NO: 110416 - DNA, 529 bp, Aquilegia coerulea
  Intron number 1 from transcript AcoGoldSmith_v1.013580m (l ocus AcoGoldSmith_v1.013580m.g) derived from phytozome v7. 0 (chr-ID scaffold_267; pos 985 to 1513)
gcttctgtgatcactgaagtgctgccagtatcaggtataggtcttcagtatgagctgaaatatctagtagagatgtcaggagaactgttactagttgtcaagtttttgtgtgattataatgatcattatgaagattattgagaaactacaaatagtgctagtataacaaatgtgaattcaaacaagcaaacaaacaatacgcagaaagtaaataacacacagagatttttaacgtggtaaaacccaaacagggaaacgtccacggttgtcctcgcgacaacaaaataatccactagatgaaaagagatgtacaaacctatcaactacctgcactcactgcgagttgatactcctggttatctctaacaccttgacttcaccagagcaccttgatgtacgcacaagacactcgacttcttgatgaacacacaagaagactcgaagccgaaatcacaataactcttaaagatcacaaagatatgaattgagaaaagggggaagaaagggaattgagttcaatagccacaaa

SEQ ID NO: 110417 - DNA, 696 bp, Aquilegia coerulea
  Intron number 2 from transcript AcoGoldSmith_v1.001495m (l ocus AcoGoldSmith_v1.001495m.g) derived from phytozome v7. 0 (chr-ID scaffold_8; pos 4502116 to 4502811)
aagatcccgagggggttctctttctttctctcgtatatgattctcagatctctattcttactttaattatatattacaaacacataaacatttaactctgtttctattctgcgatgttcatcttctagggttttctttggattgcagaaaaacgattacaaatggatggatattatggtaaaggtaatattcatgaaatccccgaacgtaatggattcccagaaacttcttcaggttagctatgatattctagcctttgctattttgtttgaatttaagcattttatttgtgttctatcatattatttagatctaggattttgctgtttgattaaattatatgctattggagttcaaattgatttattattttggaaaactgttttggggattttgagttgtagacaattgagttacttctgtagttcgtgattaagggttttgtttgtggattttttttaatttttatttgaaggttttagactagttttgtatgtttagggtgttcacttattggaaaatccatacttaatgaaataaaaactcaccttttgagcttgttatatgtatgtttcatgtttagagtgttctctttgtttcagaaccaaaaagaagacaatgatctaaagatgtgaacattgggaagagagagaagaataagaataagaagagggtttattataagaaagtgattta

SEQ ID NO: 110418 - DNA, 984 bp, Aquilegia coerulea
  Intron number 1 from transcript AcoGoldSmith_v1.008691m (l ocus AcoGoldSmith_v1.008691m.g) derived from phytozome v7. 0 (chr-ID scaffold_13; pos 1656025 to 1657008)
aatttcctctttttttggcagaaatcaattcaattgtcggtaattgatcttcaaaatctctaattctgaatattttttatgttctctttctttcatgaattgaattattgattgctatgatctgaagttttgcgatttgaatctttctgatttgtgtagttttgattaagttttagatctggttatacgaataaactattttagtatgatttgtttgatgttttagttatagagtttacaagttgtttataattactttgcaatttgatcatatgatgaagatcggttctgttttgtggttgaatttctttatgaacatctgatttgactttgtgattagtatttggtgatttagattatatgttcatgaatgatttcttcgttgctgaatgatatgatgttatgttgtggaatcggtttattgatatgttattaggtgttgctgtgccaattgtttcaattgtttaagctcattttgttagaaagattatttttactgactggatggactggcttgcggtgattgttgattgctttgtcttgttatcactactttgatgttagtaagctgcatgaatattaagatgcatgttgccggagaaatatcttgattaaggacaaacttttttatttttggaatgctaaagccgaacataaagaatccatccccaacacataaactagttttgagtagtatgttcactattagtatttaactattaaattactgtaaaaaatagcttgttggcattgttggagtaggcttaacgattctgcaacatttgctatttgggatttgatcatattttagttgtacttccatgcaaaaccacccttattttttttattaatgtttagttcttgttctgatttactctgaccaagaggatctctgatctttgagctctagatttttgtggtaaagttgactctggaactgatgataaggagtttatcatatgtagggaacactagggtttgaaa

SEQ ID NO: 110419 - DNA, 947 bp, Aquilegia coerulea
  Intron number 1 from transcript AcoGoldSmith_v1.007754m (l ocus AcoGoldSmith_v1.007754m.g) derived from phytozome v7. 0 (chr-ID scaffold_26; pos 2076950 to 2077896)
cattgttaaaggtggaatttttatctaattttgaaatttgggttgttttttaatcaatcgaattatataagttttagttaaagttttcatctttatgatttactttttaatacatgatatgacttttccatgtaaaacttcactttgattgtaaattagatggtggatttgtttttcggaatgcagaccctttgacatttgtaaattagacggtgatatgttaaacaatattttccacatttcctatttctgcattacaataatcatgcccattgctagctagcaatgaaatggaagctatgacaataatgaattgcaatacaaacgccatgtgtgatgtgtcattagtcgatgtaacaattagtttctccaataagtaggatgatcataggattacgctactatgggaatcttaaatgcgggtgactatcaagattagaagttagttgtagtatcatggtcctaagttattcgcatagtactgctctttttaggaatgtggatgcttatgtactattctgtcgtaatataatgggggaatcagtaatgctcgatgcgtctataatgaatttgttgtgtcagttattacactttggatgataccggaagtatttatttattacagaattttgttcatgtacataagatgattctgataagcatgcacatcagtgtgcaccttttactcatgtttttatactgttggtcatttgatctttggattttcctgaagatgtttctgtgccttcttatcgtttttttcttgtgatttattttcttattgcaagtattggtttttttttttttagatattcttctggaaatttttatttgggcaactattttgatacagattacagaacactctctaattttctccaaattctaatgctgggtaaagatagcaaaatgagataattaatatattacttgtcgctgtgttgcag

SEQ ID NO: 110420 - DNA, 694 bp, Aquilegia coerulea
  Intron number 1 from transcript AcoGoldSmith_v1.024393m (l ocus AcoGoldSmith_v1.024393m.g) derived from phytozome v7. 0 (chr-ID scaffold_34; pos 2169109 to 2169802)
accctgaagatattgaacgcgacatattagcagaggtgacttttgtttattgtattgttttgttttcaaattatgatgaaagcttatcaatctttctttttattcacgtttttgtagtattgcgttgtttaaatttgaatgtatatactccagttcaaggtttttcacttgtagtactgtgcgaagtctatagactgtgagctcccaagtataattaggacaacagaataaaatgaagaatttaaaactgaatacttatacaaatcattaagagtggttattctgttcgtaagcctcataatctaaggatatttcgtcatttcttgttagaggaatatggttgattatcttggcttgcttttgaactgagtgatcaataacaaggtattgagttataatgatcaacaactcatattatactttggagtaattgtatttatatttgaagcagtttgtttcataacgtatagacattcttaataaccagaagaagggcatttccaaatctgtcaagaatgggtatactttgtttctaatttggatacagaatgcatgaagttagttaaatgtgatatgtgtatcatttattttaatcacatacatgaataaagtttttattcattttaaaagcacaatttgaattaataaaatttagtgatgattatctgatgtaggcaaaggacaaggcaggtga

SEQ ID NO: 110421 - DNA, 637 bp, Aquilegia coerulea
  Intron number 1 from transcript AcoGoldSmith_v1.019466m (l ocus AcoGoldSmith_v1.019466m.g) derived from phytozome v7. 0 (chr-ID scaffold_8; pos 5612162 to 5612798)
ctcttcaggtatatatatatcttctacattattaaaatgtgattttatttatttattattttttttttttgaatttgtggaaatgggttttgtaattaatcagtttttaggccattttggatcaccaatttgcgataaatggcgttttttttatctgtatctttcattaagtttgtgtggcatatgttaggtatattttgtgactagggtgttatgtgtgtagggcatttttctttctctgtatgtatagattcatcgatcttacattaagtgtggtgtatgttaggtatacattatagaaatctgaggtatacattacctcggattttgtctatggtgactggaaagagggttaggtaaaattagtataaaaaaaggtgctatacaaactcgaggatgttactttggattttgtcgatggggagagggtttagtgtgaaatgtgtgctacatgaactttggggagattacttggaattttgtctatgggagaggattaggtataggtatagcattctttgtgtactgacaaattaataaaagatatctggtcaagatacagtagaaagaaaactcaagtccttcttagagaactccttagtccttacagttctgtcgtgtttttttattattgcag

SEQ ID NO: 110422 - DNA, 760 bp, Aquilegia coerulea
  Intron number 1 from transcript AcoGoldSmith_v1.001745m (l ocus AcoGoldSmith_v1.001749m.g) derived from phytozome v7. 0 (chr-ID scaffold_16; pos 4724125 to 4724884 reverse stra nd)
ccgaattctgagctacaataaaaggttggtggtttctcaagacaagtgtattctgtctgcgtttctatctaagctttagctcgcctcgcctcaagatttcatcagttgattagaaagtaggttgctcatggcggatctgaatctctaattaatactaaatgtctaaatgtatgtgaatttcgtcgtctgctctgtgctggtcgctattaattaattagttagctagttaatataatagagttgaaaaacaactactccaaactccaaactccaaactccaaactccaaattcaaggttggtttgcaaattgcaattataactacttccaaatcttccagcatcctatcctaattacagtatattgttctcaatcactcagcaataactataaattattgtgagagatactagtaatgtaagtaactccaaattccaaattccaaattctagctagctagtgtttcaattttaataattcacctctctctctctctctctctctctcactgtactttgaatttggaaacgaaacctccattaatgagctctgtcttacttacaagtacacattttctgaaataaatttgcatagtacgtatttctattctattttttttttttgttggtttctcttcatactagtgtgttttaatttatgcatttctgatgagttcacgagatatatcgtttcacaatttcctcatgatgaccacctctcaattcttcttcttcaggtttgcaaaagttttctcaacttca

SEQ ID NO: 110423 - DNA, 981 bp, Aquilegia coerulea
  Intron number 3 from transcript AcoGoldSmith_v1.022497m (l ocus AcoGoldSmith_v1.022497m.g) derived from phytozome v7. 0 (chr-ID scaffold_24; pos 799259 to 800239)
aattttctgagggaggtaatttcacgaccctaaattattcctgatcggtgactctttttattcgtaaatgaacgaatctatcaatttttgtccaataggtagcaacaattataactgttgcccaagtagttgtctttgcatttaataattattgacggaattttggaatttctcagatgaattacaattacaaatgtcataatgttttactgagatgaattctcgaagggatattattttacacttatcaccgttcattttatcacacattatttggacccaatcttataaaaaatttgggatttgcggttgtcaagatttcaagactatttcagcagtggggtcattcatttggttttgcattacgtctgaaaaggaatttatgttataaacttttaattgtaaaggggttttgttgaagaaatcatcgatattatcccttttttaattatagataaaagaggttccttttcaaataggtatatatattcttcagttaattattctgtgtacaaaaaagtaataaataaaggggaaaatcttacagataaccctgaaatttgaagatcctttcagtttttaataacaagtaaacttaactttagatacttgaatggttgtaacttgtaagaggataagtcactcactcaccttaaaggcttaaactgatattatgtttcaaaaagcgcaaactgatcataagaattatccttggacttttgagattctcagaacgagtaacactcttctgaaattcttcaagatcatatctcatgtaagttagggttggatgtttgtactggcaccatgttgtacatctcaactcgcataggaattttttttttcccggctgttttactaaatgaaaaagttgcaacccaaagtcgttttaatttggctgttatgctccttttaaataatggtattccgatgtcttttggaccagagtacattcaactagggtttctgccaagaaatact

SEQ ID NO: 110424 - DNA, 943 bp, Aquilegia coerulea
  Intron number 1 from transcript AcoGoldSmith_v1.012457m (l ocus AcoGoldSmith_v1.012457m.g) derived from phytozome v7. 0 (chr-ID scaffold_2; pos 6355253 to 6356195 reverse stran d)
caactttgtcgacgactttcaacccttggtgagttcacagatttgttttttttttgtttttttaatttaatgaatgaatatctaaatttctctagtgtttcatggttaaatatgtctttgatttcatcaatcctctatcatatgttattgattacttcttataataaattttaggtcattttttcttaaaaatcatatacaataatagtaataatgataatatgaaatagacacaactactctgggtgggttttggatgaaattgtggagggagaacctaaagaagcccccaatgctaataatgaagatgtttagttttgaaactttttcgttttaaactatattacacgatccttcgttgttctgtttgtggcctacaatttaacatgatgtcacagcttgtgacgctaacttgatgttgctgtgtgttcggcattctaattgaatttatttgttgggaaccatgaattaagtaggttctagacaatttaacatctcctattaggatctgttccttgatttagatccacaagtaataaactggcaggtatggccatcatcagcgggataatttttgagtgacacaatactacacttatcattgtgatcttgagatggttctactcatggttagatggttacgaatattggatagagtaggcaaaagatttagtagtaattagtttattggaataattaaccgtgatcaagtcatatatattttgcgatccggtgagttatctctttgatttctttccgacttttgtatcaatgagaggggcactgttactatagttgttttccttttaattgtaatcttcatacagaattagctgattaactaacagacacaattgtaattgttcaatgttcatttcattgtttgattattttgttttctttgacagatctttaacaaggccctcaatctgccgtcgtgttg

SEQ ID NO: 110425 - DNA, 657 bp, Aquilegia coerulea
  Intron number 1 from transcript AcoGoldSmith_v1.016650m (l ocus AcoGoldSmith_v1.016650m.g) derived from phytozome v7. 0 (chr-ID scaffold_13; pos 2898799 to 2899455)
gcaacggtacgtacctatgtaattagaaataatgtttcagattaataatgaaatgttgcacttctttcaatatggatttcgtatgtggcaacttttttcttgtattgtattatactattgtttgtatacattggtctatccatctaagctagctcattatcaaatttttaagcatacaagttacataacatttatagactttagatctaatcttttatatgtgagctcatttggggacatagttatccttattatttaaggacattcttcttgtatgtaggcatattcaatgtgtagatttatgaccagtgacttggtataacccacttcaacccacataatattttttttctcaagtccaacatcaggataggaacctttgatcgtgagattaaaagaagaaccccacgttttcgggttacttgggtttttaaaacccatagagtgttttgagtttgtgttgttggattgaattagttgtttggggaagcttgctaattcatttaaattgaaaataatagttttaaaggatgtttgaatcatacgttcaagtatttgcctatttggtcaatagtgctttcttcatgatatgtttttgtttgaacaccccataaataacaatttattattttcagatactacattgactataagttg

SEQ ID NO: 110426 - DNA, 536 bp, Aquilegia coerulea
  Intron number 2 from transcript AcoGoldSmith_v1.016650m (l ocus AcoGoldSmith_v1.016650m.g) derived from phytozome v7. 0 (chr-ID scaffold_13; pos 2899543 to 2900078)
ctcgattatcaggtatggggtagttatgtgtatacatgtttatgtagatatgggaatgttggacattacatagatatacatatgtggaatctaaatattttggggaagaaactctacttgcaatcagagtggtgatggtaggcaacgaagtggacaatgaaaatatttttctaacaaattctatcaaatattatatgggttagaaagaatttgtaaaaagaaaaattgagttgaatatatgattttaaataagaatttttatgtgtgaacaaggttttgagatacattgcagccatcttatattaggttgtatccatctatgagattaaatagcaaccttgttgattcttttcattgtgttccatgtaatagaaggttgtacccttttgtgtggattatactatattttttgcttttgctttatattattatgtagaatattggaatgtaaaccttatcctgttctcttcggtaggaactaatgattcctttactgagcagattgaaaaagtagtcctatttcttttagaacagca

SEQ ID NO: 110427 - DNA, 593 bp, Aquilegia coerulea
  Intron number 2 from transcript AcoGoldSmith_v1.009694m (l ocus AcoGoldSmith_v1.009694m.g) derived from phytozome v7. 0 (chr-ID scaffold_2; pos 4542127 to 4542719)
cacaaggtggttccttacttttgcttgtttataatttcatggtctggttattttcacattatgtttttagtgccctttctaagtttatcccaccaccacaatctattatcttcttcatctcaccgatcttgaccaacgtttgtaaccattcgaggttttacgctatcttcagatacaatgtagttggaaattgaagtggcagatattcctccatttgtatttgaaattttgaatcatcattgaggggaggatgattatgaatgtggtggtgccagccctctttatccaagtgatggaagatagaaaggttagggatggctgaggtggtggaatatacaattaaggaagatagcaggttagggatagtggaggtggcgaatgatttaatcaattgttttggtggaatgtacttagaaggggattaaagctgttttaacttagtggaggtggcgaatgatttagtcaattgtgtggatatacaaaagcttaggatggaaactcccagacccataatgttagtcattagttttttcccttagtagattattcagaaaggaggaatgcctaacttttggtttgtcaggtgaacttcg

SEQ ID NO: 110428 - DNA, 740 bp, Aquilegia coerulea
  Intron number 1 from transcript AcoGoldSmith_v1.006402m (l ocus AcoGoldSmith_v1.006402m.g) derived from phytozome v7. 0 (chr-ID scaffold_36; pos 675310 to 676049 reverse strand )
acgactttctcattcctggtatgttggttggttgcattcactattcatttttaagatttcaagcttttaatcaaggtttatgaatgtgcatgaatgtttgtaactttatataattttaaagcttttctgacatttttttcgtaaacattacattgctattaatgaaggaaacattgtagataagagtttgttgatgttttggaatacagtatcaagcacattctctagaatctcaataagaaatgtttctattaatgaagggcatatatgctaatgcatcagttgaaaatagcttgtttagcatttttgtaatcaaacattgtcaatttaaaatttcattggtttacgtggtaatggtattttactatttttattaaggttcacgatttaaggggcacatatacatcatgatcgatattttatgttttgtgggattaagtaaatgaaaatcgaactatgtaatctaacttgactgagggttgtactcaccatatttttgttttttatacattgtcaagtgacttatattatcctatttcattttggtaattggaatgaataaccttgttcttctctgcattatgtatctttttgtatataaatagattctcaataggcatagattgctgtttagtaaaggtaaagatgtcaacgttttgcttttgaattaacacaagattgactaaaacttttgttaggcttcactcagggaataagctctatactttcagtcaggggaa

SEQ ID NO: 110429 - DNA, 559 bp, Aquilegia coerulea
  Intron number 1 from transcript AcoGoldSmith_v1.017310m (l ocus AcoGoldSmith_v1.017310m.g) derived from phytozome v7. 0 (chr-ID scaffold_2; pos 8338997 to 8339555)
tttcccataaccaaattagtcttccacaacaatttgtcccgcagcaagacatacccctttcaattccaagggatgattttcgctactattttgaaaatgctgttttatctttatcgacatcaacgttgtccagttgcagttcccaatttgtggttggtgcattatgtagcaatgcagatgtcattgagatgagtagacctcatgatgcataatggttggtttttagtgctgataaggatgtagaccaagggtacaccatagtatctgagtacgatttgactgatgatgatgaggaggaggaggaggaagacggggaggaagaggaatatcaggaagaggaagaggattcagacgacgaagtagatggttataaagaaaaggaagaaataatagaagaaaagaaaacaaaggaaatggtactgatccaagaaacagaagtgggaaaattctcagatattttgttttacaaggggatgttgtatggtttaaccaaaatgaacgaactagtgatttttgagttgcaggaggatttgagagctacatatagaattttgaacgt

SEQ ID NO: 110430 - DNA, 943 bp, Aquilegia coerulea
  Intron number 1 from transcript AcoGoldSmith_v1.016275m (l ocus AcoGoldSmith_v1.016275m.g) derived from phytozome v7. 0 (chr-ID scaffold_19; pos 465028 to 465970)
tcttctggccctctaaaatttgtttgactttggaccacaacagagactgcctcatacaacatgtgcttataggttgtggaaagttccatattggtaagcaatatgttcatgccagagtatacaccaaccaattgtgggcatagctgaaaatagttgcaaaggtgcagataaatctagagtgtagggggttaatacgaggtccaagctaaaaaaaattctgcaattatcatctctctaaataccccaaaattataaatatatttctcaatgttaaagtcaataacctacaatttcgaataaatgacaaggcacttcataaaagataaacataaaaaaattaatcatattgaagcatgtactctctcgcgcgcgcgcagatgatttcatctatatttagaatatgatatcaatgaacatatatgtacctgagacatctgaatttatatactacctgccagtgtttttctacatggtctaataatgactattgtaacagaaagtaaccgtcagcgggctttcggttggaagtttgtgaaccacaattgaactcttatctttacaagcagtacatctttaacctgcaattaacagtcacctaaattcattacaccgaccaccctctactctttatattcctctgcttttcttgctttcaactttgatttcccatttcccatttcatttcatctccaccacatagctaattagctagtccactacttctaatatcttcgttacctagtttattacatatacacccctctggttatgttagctgccttatacttcaatccagctgagagccttagctcttctcttgctctcggtttccctcgcattagattcttacgctaccgtaggttgaggattacagttttgtcctcttaaaactatgccaaattctagaaacaatcgacagcaaggtcaagaagagaagggtaga

SEQ ID NO: 110431 - DNA, 835 bp, Aquilegia coerulea
  Intron number 1 from transcript AcoGoldSmith_v1.025315m (l ocus AcoGoldSmith_v1.025315m.g) derived from phytozome v7. 0 (chr-ID scaffold_84; pos 96493 to 97327)
gagtgattctgattcttggaagatttgtaaccctggtatgtgtttacatgttttattttttattcatcatgacctagctagagcattaattttatggcacctacttggatgaattatgacattctgattgcgcataattaattgcatccaaacattggcacaagtaggcaaaattgttgcccgccattagttgaattctctgcgcattgcatccaaccattggcatttggcaagtagtacacaaaattgttgtcggccggcacctgaaaaatctagttaaggtggttgtgttgtgttgaatagatgttgactatgtggtctgttgtacgtgttgtatgcttgtatgatggcattacattttacaacagattttcctgtttgtatatgtgtttgggttaatgcatatcttagctttgattatagtttgttggttctacaaaatacaataagggcccgatatatttgactacgatcgatgatagaatataaacgaaaatgataagcacaattgttatcgatttttttcttcttatccgtaagcttctgaattccatagagttaagtaagtatattccgtagaacatgcaaaattaattaagaccaaattgataccgtaatatttttgttactttgttaggaaaatgtacctcgggttattcatattagcaaagagccaaagatgtatatatgttgttctgacaattagaaaagatgtttatgctgtactaacaattagcaaagatatcataatggttaattaaaataaattcatttattttttatatgctttactcatctaattgacaaaggcatttttatttactgggtgcaggtg

SEQ ID NO: 110432 - DNA, 318 bp, Aquilegia coerulea
  Intron number 1 from transcript AcoGoldSmith_v1.013710m (l ocus AcoGoldSmith_v1.013710m.g) derived from phytozome v7. 0 (chr-ID scaffold_34; pos 2486074 to 2486391)
tcgttccgagtaatacactcttcattctctatatttttcttgcattttgatttatatttcttttctttatcactgattcaacttaatttttcaagtttctaaaaagtaattttttttgatgaaaaatcttatgagacttttgtttgatttgatgcttttcttctcttatttggaagtgaaattagggcaaattatgtgaatttgtaatctgaaatttcatctcttttcaagaaattcttgtaattacttctaagtattaattaaatctcgatttatgtttaatttgatgaggtgtttgttgttttgtttagtcgtcga

SEQ ID NO: 110433 - DNA, 621 bp, Aquilegia coerulea
  Intron number 1 from transcript AcoGoldSmith_v1.002392m (l ocus AcoGoldSmith_v1.002392m.g) derived from phytozome v7. 0 (chr-ID scaffold_7; pos 5755145 to 5755765)
atctatcttcttcgatttcagtttaatttgaatcggtaagaacatatatcctcttttgcagcagatctgaagttttttgattttgttctcaaactcattattaattgttctttcgtatttgatgaatttgtttggatcttgttcttcatatcattcttatgatttattcatttgaaattttgtacactcttagagtttgtttgatgtaattgagaaattataagaattagagtagaaaaatttaagctgaattagtgtttttagatggttttgggaagaaattggaattggactttaattattacgagttagaatttgatttcaataagaaaagcacaaattagaaactagggcaaattaatttcacaagttgggagttcattgcttcactgctttagttcatttggttagaatggacaatataagtaaattgaggaagaagtgtagttttagacttttagtatatgtcgtgtgtcaaaaagaagtagattggagttaacaaagaaatatgtttattgcaaactatgacaaatatagtttataatttagagagtaattcatattttctatgctttgtattttgcagctttgcggtattccctatattgaacttgggctgta

SEQ ID NO: 110434 - DNA, 802 bp, Aquilegia coerulea
  Intron number 1 from transcript AcoGoldSmith_v1.020858m (l ocus AcoGoldSmith_v1.020858m.g) derived from phytozome v7. 0 (chr-ID scaffold_7; pos 7229002 to 7229803)
ctgttggtaggttgtcggtcaggtcttgcagaagagaatacaatttcccatttgagcaacatttagaggacgatctagacgtagaatagctcaaacgaccctccccattttagagatctgcaggttaaaattggctagaaacaaaagtcatcacagaccattgaatgttttcttcctgctgtcttggtatatgtgataagcacaagatatgcactggaaccaaattataaagagaataaaaatatactacttgatatctttccattgagaacttctaaaacataaacaaatcattttgtctatatccgaatgatactgagattcaacttccagactccatccgttcatacaagtttaaggttttggcaactttgtgcactggttttaccttctgagggatcacagtcaactgaggtgaagaaaatggttatacacggatgaatcaaattttccaagtttgtgtttatggatatacattgcatatttcatagcattgattgaaccgtacaatagactcagaccatggattcatgcacttaatctagtcgtacatgttgggaatcccctattatatttcaatgtaatcccttcactgactgctacatgagccttggctttactagatgatttgaatggattatcaaagtatgtatattttttttgcgttgtttagtggtagtacgatttgatttgccttttatgttgtacacatgaaatattgccgttggattatagcaatgcttactataatcatgctcgctgatgaattacaaaattctgttattttgaattgtttgtagtg

SEQ ID NO: 110435 - DNA, 743 bp, Aquilegia coerulea
  Intron number 1 from transcript AcoGoldSmith_v1.010450m (l ocus AcoGoldSmith_v1.010450m.g) derived from phytozome v7. 0 (chr-ID scaffold_26; pos 2138643 to 2139385)
atcaattgattttttattaggtagtagtagtttgatatttagttcaataattcgattagtagtgttttattgacagcgcttgctagtagtttttttcttagaaataattgtataatgtggtgaatttggttaattaatttgatagtttatccttaacttgatgaactatagttttttcttggattgattgatttttgagaaaatttatgtacttgagttgtgtgtgaaattttcattgtactgctcacagtcagacagtctatgtgtcatttgagcgttaatgtgatatgagtgtaccaaaatcgtgtcaaccaataaccagtgtttctctatccatagtttaggagatgtgattttggtagtgttagggcaaaatcgtatagataatgtcagacttgtatactgcacattagagcattcttactctggttacaattaggcaacattaggacaacgtgggatgcagaacagtgatagaaggttgtcaggtgtgaaattgggatttgatgtgagaagtgcgagggtgatgagaaacaatgaacaacattggtgggagcatgagatttttgtgttctctctctcaatgtatttacaagctggacttaggcagaccgacctgttatatacaggccggtcttttcagagatgaggctagattgacacactattgtaaacttgaagatccggttctgttaacctaactagtctaaaaatgaccattgcaggctctttaaagaagaaaa

SEQ ID NO: 110436 - DNA, 835 bp, Aquilegia coerulea
  Intron number 1 from transcript AcoGoldSmith_v1.003193m (l ocus AcoGoldSmith_v1.003193m.g) derived from phytozome v7. 0 (chr-ID scaffold_2; pos 2237343 to 2238177 reverse stran d)
ttcttcttcttcttcttcttcgttttcttctcttggtaataattaacaactcttcttcatcttcatcatctttatcttctatgatgattttttttttttttttcattttattacttttgatcttattatctattgatgttaatttgtctgttattggggttggtgacttttttttgtttgtttgtttgtttgttttatagattctaattccagctatctcaatacttgagacttattccaattgaacagatcttatgttagtatttgtgattgattttattgatgaagaagaagaagaagcaaaataattgtttttgatttatttagattttgatcaaagttcaattttagtgtttaaaataggtctatgttgacaagttgcatgaagaacattaacattttccttcaaacaatttaattcttctgaccccaaaggcccacacaatattttcactttgagaattcaatagaaaaaaataaatccaataattggcacacaagtttttcttctggtagtctagactctagagtttggtggcaattaattgtagtttgtgttttctcatctgactcatatattggcaatagactgtcagatcatcaaccatgctcaattgaagtttaacaccattataataatatatgcagttattttgttctatttggttgttgagttgttagtttttgagctgatggtatgttaaaatctggattaaatatgaatagttttgattttaagcggctttacaaacttatattctgaagacaagttcattgcgtgatggaatatgtaatttcaggtagaaattctagccgtgcaagaggcatttgtagg

SEQ ID NO: 110437 - DNA, 249 bp, Aquilegia coerulea
  Intron number 1 from transcript AcoGoldSmith_v1.001459m (l ocus AcoGoldSmith_v1.001459m.g) derived from phytozome v7. 0 (chr-ID scaffold_36; pos 1429259 to 1429507)
ctccttcacgtatgttttcatcactttattccctttccaaatcttaatttttttttctttacatcagatcgaatttggggttttattgatttggggtttcttggtaatgttaatttcgattaagggttttgattatttcgcaagttcttgaagatcaatttggtaatttagggttttaaattttttctgattgaagtggtagcaactttgttagggtttaatgttacgaaattgattattgcagctttt

SEQ ID NO: 110438 - DNA, 401 bp, Aquilegia coerulea
  Intron number 1 from transcript AcoGoldSmith_v1.005077m (l ocus AcoGoldSmith_v1.005077m.g) derived from phytozome v7. 0 (chr-ID scaffold_3; pos 2191757 to 2192157)
tgaatctttgataactctgtccaaacttgtggaaggtttgttcttgttccttagaatttttgaaaattttcgtttatttgattagcttttatgttgttcagtgtaaactatctacttcttctgcttgctctccatgtcttcttctcttcttcataatactgatatttcgatttcaatttggaagttttgctcacaatttgggggttttgttaaatagcatgatttctggtagtataatagcatcactgtaatgtgttttgtatgcaattttgtggtttctaatttctaaacttttgattgtaatgcgtttttggattattgttttccttcaaaattagtattgttacttttataaatgtgagttgagttgtgacatactgtattgctcagatcttcagaag

SEQ ID NO: 110439 - DNA, 326 bp, Aquilegia coerulea
  Intron number 1 from transcript AcoGoldSmith_v1.008467m (l ocus AcoGoldSmith_v1.008467m.g) derived from phytozome v7. 0 (chr-ID scaffold_13; pos 1521857 to 1522182 reverse stra nd)
gatttcaggttagttaaattgatctaatcttcacttatattcttctttctttaagatctataaataccctcttcactattttctcaaggaattcaaatttgttcaacacccatatcttcattttttttttctaggttcttctagggtttttcattttggggtgtggttgtttttactttataatcttcaaactcaaaatcccattaaagggtagttttgtttttctaaaatagtcaatgggtttgtgttgttttcctctattatcatttctatcgtgtgtattttgagtttcattttggctttgttcttggtgcagattaaggtag

SEQ ID NO: 110440 - DNA, 167 bp, Aquilegia coerulea
  Intron number 2 from transcript AcoGoldSmith_v1.023552m (l ocus AcoGoldSmith_v1.023552m.g) derived from phytozome v7. 0 (chr-ID scaffold_7; pos 3911765 to 3911931)
catcttatctggacttcttattgtattgcgaagtaagaaatttcagtgtttgaagtaataattttgataattcagttgggttttttatgtttattctttctttttttttgttttgaatttggtttttcttcgatgtgcagatcgaagaaatttggtccttttttgaa

SEQ ID NO: 110441 - DNA, 721 bp, Aquilegia coerulea
  Intron number 1 from transcript AcoGoldSmith_v1.024767m (l ocus AcoGoldSmith_v1.024767m.g) derived from phytozome v7. 0 (chr-ID scaffold_61; pos 160505 to 161225)
gtcgaaaccatctcctctaacagctattatcactggttagtcttgcatatattttcagttcttcataacaacaaaaaagttaattactgcgcacaatatactaatatagctatagtaatcctgacttctttatatgaacagatatgcatgctaaggtttaattgaatgctagttcattcataataatatgctcatcactgttttaaaccagcttatcttgtttggaaatggaattgcatattacttgtgcaactcctgaagtttctggagttgacttttaaatttgatgttagttgttgatagccctgaattgaagaagtttttcaaatatgagttactacgaggttcagataaaactttctgcaattcatgactcatgacatatttgcgcgcagtgtcccctatgcatgttatatatatgttcctggacaaaagttcctagctaggttttgtaagagtaactaatctgatcactcaatgtcgattctaaatttttcttgtattggttcaagtcccttaactagatagttccgtaataacttcgcaacaccattagtagtgtatctaatatgaaacatatgtatcatgatattgctttattccttggatataaagattgagtaacatgataaaatttgatcaaaattgaagatagtccttcttcatcctaattaacgattgaacaggagcaacttcggggataggtgctgaaactgccaga

SEQ ID NO: 110442 - DNA, 473 bp, Aquilegia coerulea
  Intron number 1 from transcript AcoGoldSmith_v1.004211m (l ocus AcoGoldSmith_v1.004211m.g) derived from phytozome v7. 0 (chr-ID scaffold_55; pos 1194199 to 1194671)
cacatcacaaagttgtctactcctaaacagatcttgtaagtatctcaatcttcttgatccaagttttaatcatataataataagatgatcaatttcgtgaattttttggggtttagtaatcatataattttttaagttaataccatttcagaaataggaattgggttttttatcgatttttattgtggaaataccaaattaaatttatttctgttgaatgaagtttgtagtttagaaatgaaaaggggttcaatatcaatttatgctcatagtttcaattttcaaatgcaactgccttatttgaatatggaatttagattctggttaaatgtagttatctcttatcattatcactaaagatctatggtgccagagatatattgtaactgaggtttacatctgtttagtattaagactgacttaaatctgtttttgtaggtcatttaacccaaataaccgtttgatatcagtga

SEQ ID NO: 110443 - DNA, 231 bp, Aquilegia coerulea
  Intron number 1 from transcript AcoGoldSmith_v1.014068m (l ocus AcoGoldSmith_v1.014068m.g) derived from phytozome v7. 0 (chr-ID scaffold_58; pos 1253449 to 1253679)
acttcccttttccattcatttgagggattatacatgtgaagctattgagcaattgtaccaaaagaaatcaaagattttattatttaatggtcatcccgagaaaggttttcttcttttatctcttctttgtgtcatgctttatgattgtatttttacatgaatctttttcctttgaaacaaacaatatatttatttaaatccaacaacccttttaacatcttgattatatag

SEQ ID NO: 110444 - DNA, 485 bp, Aquilegia coerulea
  Intron number 1 from transcript AcoGoldSmith_v1.026740m (l ocus AcoGoldSmith_v1.026740m.g) derived from phytozome v7. 0 (chr-ID scaffold_2; pos 9967039 to 9967523 reverse stran d)
ggatataacttcatttttacggtactcccctcttccctttctttttctgtgattttcacatttttaagtatttgtttcatcatttttgtttgcacagtgttctattcttcaagaaaccgtagctgacattaatattttgaatatgctgttctgattgattatcaactacaattaatatgtggtcacctcaacctactctatcttaatgaaatctgcactttttttttacctacacatgaaaatgagaatcctaaataatatgttgtaagaccaaagccataggttttatttttcatagatgcagtaaggcgaaatagtaatcagttggcgttcctcagaaactgagtcacttttaattgcaagcaaccatcctatttgtctttcttatattgtcttccattgtcattcatttggaaaagtcttcaaagctatttttcacacctctcaattttttgattggttttatgttccaggatactgatata

SEQ ID NO: 110445 - DNA, 619 bp, Aquilegia coerulea
  Intron number 1 from transcript AcoGoldSmith_v1.006362m (l ocus AcoGoldSmith_v1.006362m.g) derived from phytozome v7. 0 (chr-ID scaffold_26; pos 2353066 to 2353684)
tgggtcgattctcatctcacttgaagattggaattgtaagttaaatgtgcttttcttcttcttgtatttgtttttgaagtgaaatcaattaagaaaacattaataataataataataataggagaagttatttaattaatattgataaaaccctcaaaaactgttgtaatagtaatcacttaagaaatatagtaatttcaatttggtttattttatttagggaatgaatgaatgattagaccaagtaaagatatacgaggttcattttgtttgcttctttggttgtagaaaacctgattttggaaaacaatttaactcaaatctgttggtatgcaggaaaaaaaaaaaaaactagaataaagtaatttcaattgggtttttgcccacttttgtgtatgattttagtaaggatgttaacatgcatgcatgacaatgtacagcatgttttccacatacagatgagatcccatcttgtgttgatttatctggatgagagtctgagacgcttgataagtggggttgttctatgtttagcaatattgtttatttttttggctgataaatctcatatgaggttgctatgattttattttatttgatttacaggttggactgccaa

SEQ ID NO: 110446 - DNA, 457 bp, Aquilegia coerulea
  Intron number 3 from transcript AcoGoldSmith_v1.010428m (l ocus AcoGoldSmith_v1.010428m.g) derived from phytozome v7. 0 (chr-ID scaffold_13; pos 2116505 to 2116961 reverse stra nd)
gagattttaaccttttcgagaggtacccttttgttttcaatcttttttttttttttctgaattcgattatatccttagtccttgctatagaatttgagtttttattgtttttttaatgaaatcggttattatacttggttatataaaacctccaatatattctgacaagattagaaaattattgaatcgtttgactttgagtatgaatgtatgatgatctttgtgacttagttagaactcatttgccccaaatcacaacttatttcaatttcatttgcgcaacaaaagtgaccagaggaaacattctgctaaattgaaatggaacactacaccttttcaaaacttaagtgggatcctagactagcacaaagcttctcactttcttttctctgtaactctgtggcatcctttttagtcaacttcttgtactgataatactcgactttgtgatacagtc

SEQ ID NO: 110447 - DNA, 778 bp, Aquilegia coerulea
  Intron number 1 from transcript AcoGoldSmith_v1.011948m (l ocus AcoGoldSmith_v1.011948m.g) derived from phytozome v7. 0 (chr-ID scaffold_13; pos 3962156 to 3962933 reverse stra nd)
tcctcatcgttgttcttgccattattgtctaccaggttcgtttctccaatcaatgttcccttcctttacaacttcaatttcatgtttttattttctaaaaccaaaaccaaatctagggtttgggtttgggtttgggtgttctttttttaatgaattattaaacttgaaattatgatttttgtggaaagtttggatctttgattagatagacaatataatttgtccaacactttggtttttggcttgcagtatgtttagtgttgtttttatttttattttttattttttatttatgccaattgcctgatttgtccatatgggatcttagagaaatctctgttttagcgttttgttgcgaaattaaaactctgaagcagaaaaatagatgaatttgtccatatgctacttatctatctccattgctcgatattactttagcatctgaactcaaagcagatgttatagtgaatatcaatttcttagatttgtgaaaccatggagatggttttcagtatcaccgtatcattgcattaaattttattcaggtcactgattttcatttgacaaacattattttcgtttgacgttgcacaaggcagctttcagcagtgaaattcacttactctagggttacatgtgactagtgttggactgtttctttattatgtgaagaccgcctgcattctacacaatcactgaatacactttctgtttctgccatttgctgtttagctaggcaaaacgtatagtctgacataaaattcgtttcttgcagctc

SEQ ID NO: 110448 - DNA, 420 bp, Aquilegia coerulea
  Intron number 3 from transcript AcoGoldSmith_v1.004114m (l ocus AcoGoldSmith_v1.004114m.g) derived from phytozome v7. 0 (chr-ID scaffold_34; pos 2351609 to 2352028 reverse stra nd)
gaggtgcttgttatatatttatttatttttttgataagataaaactttattaaaatcttaaacaaaggatgatacaagaaagtacactgagagaagtgagtaaggatctcactcaaacagaaatacaaaaacaaaccccagaacacaataaaacctccaaaaagagcataagaaacagagtacacccaaactcttaaaagactaagtaccggcaaaaagattttcccaatccaacaccaaatctctgaaatgatgatgttgcctaaaactctggaggtgcttgttattgaccttatataaaatagtaattgagtcattgcactcaggatgggcttgtatctcaaattttagttcgaatttgtttttttcttgttcttcacttctggttgctgatttgttgctttttatgtcttgcagcaa

SEQ ID NO: 110449 - DNA, 888 bp, Aquilegia coerulea
  Intron number 1 from transcript AcoGoldSmith_v1.002440m (l ocus AcoGoldSmith_v1.002440m.g) derived from phytozome v7. 0 (chr-ID scaffold_61; pos 889283 to 890170 reverse strand )
tcagtcttcaccaccgccacgaccaatcaatctaagtaagtttgtttaattaaattaaagtttcaatctttatttataatcatgttttaattgtttcatgttgttcagggtattcagtttaattcttccattatactaaagtttcaatttttaattattttttgttttaaatcaccatgaataataatattcaatttccaattgtttctctttgttgaatttcttatctttgtatctagttatgatttgcttatcaatctctgtttgttgctaaatattagtgtttttgtttactttttgtcgaaatctatgaacagagaataaattcagttaaagaagaagtttctagaccttattgaagaataatttattgaacaattatgtttttggtggatttttgttttgcgtttttgagaagattggagaatctcaaagctgttttaaattgtttggttgattggaattttaaatttcaaaatttccctcgtgaaattgaattgaaaagacttgaagacttcgttactttagggacatagaattaataaataattatcaaaatattacaccaaataataatatcgacaatggtggttagaattaatagtcaaattttcttttctggagtaattgtgttaaaatgtcttgcttttatatattctataatagtacagaataagtcgttgaggttgctatttatggaaaccgatttcttagatataccgtgatttgattaattacttgctttagattttggattttttgagagatcattgatagataactaaaagaattgaaatcgtggattgtgcacctctctatatgttctaatagaattgcatgttcttggttgcagagactctcgagctgtcaagaggattttcaaacaag

SEQ ID NO: 110450 - DNA, 276 bp, Aquilegia coerulea; identical to SEQ ID NO: 109531
  Intron number 2 from transcript AcoGoldSmith_v1.008237m (l ocus AcoGoldSmith_v1.008259m.g) derived from phytozome v7. 0 (chr-ID scaffold_34; pos 1757860 to 1758135)

SEQ ID NO: 110451 - DNA, 875 bp, Aquilegia coerulea
  Intron number 1 from transcript AcoGoldSmith_v1.004995m (l ocus AcoGoldSmith_v1.004995m.g) derived from phytozome v7. 0 (chr-ID scaffold_2; pos 4282947 to 4283821)
attatagatcacaagaaattaacccagatagtaaggtattcatcagataatcttaattagtaaagttgtttcttggaagatttttgtttaatttgttaataaattaaaattgaaaatgcagataataagtttatatgattttttttaatgataatgagagtttattagatggtattgcaattctttggtatttttttttttttttttttttgaatttattagatggtattgcaatttttatcccaagctataaacctgcttgaatcagtttgtgtcaatgtgattaattgatttgattatgatattggtgtactgcatagttgtgagactaaggataacaacaccttagacaccttgcatcctcgccttatgccccataagtggattggttttaggccttttcttcactccataagtggattggtgaaagttatgaaggcaattcctaataaagctcaaatttataaaaagaaaaaaaaataataaaaataaaaataaaaaaatatgttaatgcattactttcctcatcttgtttctgtcatatctgtcttgcttttactgcacgaactgtcttatttattttgcaaaaggcaagctggggttaggcagacccctaccagattttattaaagagaaaaacggataaaaattacatcctagggtataacttccctgaggcatcattcatcagaatgttacagagaacttctgggaatgtcgtatagggtaaacaatatcagggtcatgagggaagcttaaacgaactgtcttatttactccactttagattttgcatagcagcatacatatgatttttgtcatgttttccaaagaagagtgacttcattttttgcatttttctttcaagcagttaa

SEQ ID NO: 110452 - DNA, 985 bp, Aquilegia coerulea
  Intron number 1 from transcript AcoGoldSmith_v1.017158m (l ocus AcoGoldSmith_v1.017158m.g) derived from phytozome v7. 0 (chr-ID scaffold_2; pos 5899049 to 5900033 reverse stran d)
gatcaggtaaagtgtcttttttactttaaatgaaaagaaagtaatttgagttcacccttagctatattgtgcttccgatggttacatactgcatacaaaaaaataaaattagaaatgaacacaacaaaatttttgaattagtgaaacactgaaactcctacatcatatttttttttccatcctacatcatttgaagtggtggcctagtggggtacataatttcctaagctttttatggggatgtccttagtttgttacaatcctggagataaattgcagttttatatgaatgtgtagaagttcaactatctttaagaagcgcttacaaggaccaagattaacctaactaattgtaatgataaagaaaaaaagactacattaatcttatggtgctcctttaggaattctggtattactgccgacactgctaattacaattgatcaatataaactttgaggataactagtcctgcaatctcattgtaatgatgttaaagatacaacgaaagcattgggaaattatttaaatggttgctcgagattaagtgtttgtcactagatagtgataaagtccacctgttttttcacttctacaattaagtatgactatctttgtatgttctctttttagcccaattgaaaacatgcctttgaggagaaagagtagttcaaaaatctttcatgttttaggattgtgcagaataaaattctcccctgccataatgtaaaattccgaaccaaaattgttcaaggcggtaaaactctctaaccttctccccacatgcttccagttatataaagattatccaccaacaaacaagtcctattttaaagtgaaaattccttgacaaactaaacaccctcttgaactttgcacagcaaatgctccatgttcatggagattacaattagaatgattttaatttagaaattatataattgagttacaactcatttgtatatactgacaggcacttcttaaagg

SEQ ID NO: 110453 - DNA, 706 bp, Aquilegia coerulea
  Intron number 3 from transcript AcoGoldSmith_v1.015860m (l ocus AcoGoldSmith_v1.015860m.g) derived from phytozome v7. 0 (chr-ID scaffold_36; pos 2096880 to 2097585)
gagagaagtgccaacagcatttaagttattcactggttagtatacaaatcccctcactgtttctttataacttgattattattagaggactttgattggtgaaattagtgttacatattcagcaatgaacttccacagtctattctttaattctttagccaaaacaaaaatgtctattttaatttgagtgaactatacttgaacaaatgcctttttaaataacatggggaaaacagaatctctcagcgaagtgtttgaaaactcagaacatatacaagttcttggtgctgatgattaaattgatgacctactgttgacttcttatgactttgaatgctcaccaaaaccatgttccatcatgttaaagatgtgggtttttcacctctttaccaagtctagcatttatatgtattcttatttcttaaaggtcatcaggtttggtttactttaaggaattttgaatctattgtagcctcatagatgtcaggagtactaagactggtgattgatcagatcacacatgagagtgaagaggaaaaatggattatttttgaacagtatatttgttccagtctgaattttcaaatacaaccgactttcattttgaattttgttttcaaagttggcgaagaattgagtatctctctcactaacatgaattactgttacaggttcagcgtgggtggttctatctcgctcatttgtg

SEQ ID NO: 110454 - DNA, 748 bp, Aquilegia coerulea
  Intron number 1 from transcript AcoGoldSmith_v1.007983m (l ocus AcoGoldSmith_v1.007983m.g) derived from phytozome v7. 0 (chr-ID scaffold_8; pos 4081346 to 4082093 reverse stran d)
gaattgctttgtaagttgtattgttagatcgaatcaaagtttgaccgtcatgaagctctgatttagtgatttgtattattattacggagtattactgtattagttaattaattgctcataaaaatgaagaaccccacttaatattagattacaaatgtcaaggccgggttgatcttggtttgtctgttgtctttctataaatactactgtattacttaatgtttttgacatttatttggatgtaatttatgttgttcgcatacaatacataggtattgtatactgtataatacagatctgtccttaaaaacccattttacgtgcaagataaaccgatttaagtgagggattatggttttaattggtccttagagtcaccgagaaggcttgtatatatgcacgatttttgtgtggaaaaacgtatatcagatttcgagttatgtactttgtgcaacaatagttgacatatgttggcgtatataatagtataaaaaatgtggacatactatgctcattgtattcatcagctttcaaaaggttgggaaagaggtagcctctgaataccataatagttttcttcttaaaagctaatcaaaatggaatcatgtttgagaaaaatgcaagcatttgtattattcacaatttatatatagagaactgactttctttttgttggaaatttggttttaactattatttctttgattccacagccttgggagacgtacagagctgatctgtcaattga

SEQ ID NO: 110455 - DNA, 931 bp, Aquilegia coerulea
  Intron number 1 from transcript AcoGoldSmith_v1.004850m (l ocus AcoGoldSmith_v1.004850m.g) derived from phytozome v7. 0 (chr-ID scaffold_7; pos 1844600 to 1845530 reverse stran d)
tctttaattgcagtcaaaaaccttttcaataacaagtgagtagatattttattttttctaaatttttattttgtctgttgtgataatgtattattggtgttattttctttcttttgctatagtagtattagtgatagtgatttaatggattaaacaaatttttaatgtgtacctaattgcgaaatatagaatcaaaactgtcggtgtgccttttactgtgtgtctctatgttggaatggattccagcagtgtggtttgttttttgtacctgcaataatatattgaacatttagattattatagaaatcaagagaatgaatgatctagtggagggcatttgtaatttgtaaacccttctctttcttcttcatttttccataaaaactgctaggtgaaagtaaaatcattcataaaataggtaggttggggttaacaaccagaaaaatacatcaacaccaagaccctcggttagatggaccaaactgcagaaagctcatctagctataaaatgccccaaagaaatgtctctaaatcctatgaggatgatctttagttgataataatgaggactttttatttttagagaatggaatcatgagacgtcttacattaaccgcaaaacgtgcaaccaagatggggaataccctgcaatgttgcagcaaggcttgagacttctgaaagtgatgaatattcagtccaggaagctgcactagctagtggacagagcattttcatgttcacaatatttaggatacattcatcttgagagaatgtagttgataaatcattaattttagagtctctagaagatttttggggaacactgaccctgttttatgaaagcattagtttatgttgagctgtttttcatatacctcaaccttgttgatttgtagaggtcaggccgaacaggagtttaaggtggaagttg

SEQ ID NO: 110456 - DNA, 991 bp, Aquilegia coerulea
  Intron number 3 from transcript AcoGoldSmith_v1.001037m (l ocus AcoGoldSmith_v1.001037m.g) derived from phytozome v7. 0 (chr-ID scaffold_2; pos 5204579 to 5205569 reverse stran d)
acaaccctacctcgccattttcctggtgcgtttcttctggttaactgtttacactaagcagttgagcattattaaattcatttgttttggtcctactgataatgggtgtattaggttttggcctacttctgaccttgagattcttatggagtgttgtttactacctttattccttctctggatgtaaggttatgtaaacatgttaatggtgatgtaataggttctatgtacatcagaatgtagctgtttgatatatgaatacaggtgggggtctgcctaaccctagcttacttgtccaaaaaaaaacaaaagaaaagaaaaatcatttgttgatttttattactgaactagaagaatcatgttttcattagctatattgttgctttcatctaagaagcatcaaactatattaggaactttcccaagagagggctgaaccaaacagtctttactagagagtagcccacgccattttgattctgattctgagcttgaggtccatcaccaattcaccatgcaagatttaaacctatgtttatgtcatcttttatgaatgacgaattgttactaattaattaaactccatctgcctaattttactgtactttttatatttttaatcgcaatttttctagaattctttgatatctttaaataatttcatttctatcttagtgtgtgaactttaaattacttcctgcaaacataattaatattttttcttttcatttcgggcacttctatccatatcgtagattcatttactatacaaataccatctgcgctttcacctcttttttgggggggaaattctgttagtgttcatggagctacatttttagcgcttgactattcatgcccacatcatactgtgagatcttattttgtgtgaaattgtacgtgcttgcgtagactctgattgtggattttactcttgtatcatcatattcttctagagatactccgcttctatttcaaggagaggttggaa

SEQ ID NO: 110457 - DNA, 1021 bp, Aquilegia coerulea
  Intron number 1 from transcript AcoGoldSmith_v1.027480m (l ocus AcoGoldSmith_v1.027480m.g) derived from phytozome v7. 0 (chr-ID scaffold_39; pos 1411263 to 1412283)
atctccattgcaggtaagttttatgtttgaattttttttttttttttttgttccagtttattaatcatatgttaatctagaattggaatttgtaattgattgttttataatggtagtttagagtctgattatattggtttgccttgaaattaactgcgaaacggatttgattctaggcatttttttgctataatttgcatgttatttatatatgttgttttgttcccaaatatgaaaactgaagttttttttcatcttgaaaaaatcgaatttgtgattttgtagtagtttaacataaattaattgaaaggaaaatgaattattaaatcgagttttggttaagtatgttaattttgttgtaatttttacctaaagaaagaaacaatgggcttgcaccaattttgtaaatgaagaacacaatcaaagtgagtttaatctattgtttcatgcattatagaattgtggattgcgcatgcctaggtgccgaaatcattttccagaactttcatcaaaatgggaaggaaaacaaggttggcataatggcatgcgtgtaggcaggcatgtgcagttttcacatttgtttcatcccacttgtgcgaaaacaaacaacaaaagtttccgcaattcctatttgccatgtgcaattgatgtcattgtttctccaagacggttagagaaaaaaacaaaccattttgtcgtaatggcctttttttcaccactgcgcactgcccacaaacacataatttgttggcgagcaacatttaggagaagcaaccctaatcagtcctgaaaagctgaggtttatgtgttgaaaaactgtaattggtatttgtaaagtatatttgtttgtttcttgatattagtttgcgaaaaaatttgtattgtttctgattttgtcattttatagtgtcattttgtgctaagtctttatatttatgtttaatctgctgaactgctgtgtcttgtttatgtgatacacaattcaggactgttcaagaagaggaggatatatcaagtcaac

SEQ ID NO: 110458 - DNA, 1013 bp, Aquilegia coerulea
  Intron number 1 from transcript AcoGoldSmith_v1.004041m (l ocus AcoGoldSmith_v1.003040m.g) derived from phytozome v7. 0 (chr-ID scaffold_84; pos 242176 to 243188 reverse strand )
ctaagcttagttcccttgagaagcatcttcaagaagtaagcttatatctctataaaatgtgtattgtgtgattcctttaagcttatatctctattaaatatgtattgtatgattccttttgttggatataatttttgcttaaatgtgcaatattggtatttggtatgtttctccatctccatgggattgaggaaaacatatcaaagatatcttgcattgatgtgttgcactaacatgttactatgaaccaataatatcattgttctatttcgattttgggatcttctttttcttggttgtgatttcttcatgtattcgttaatgtatgtatcatatatactccgtcatatttggtgcgtgtatttcgatggtttccgcttatggtgataagtagtaaaaataaatattcgcatttatgttgggctgccagaaattgttaatggccatgtttgacacatcacattgcatggttaacttcgaccctctccgaaattatgatacgactagcatagcatgaggtggtactgtatataggtgcccagcttcttctccgctcattggatgcacgataagtttttctgtccaataaatctttcacggatttaggtttgcccttgtcacatctcatttatgactttagctcattgtttctaatttctatattctagcatgtgttcccatgattgctatggttctgatttctgacttgtgagtttgtttgaccaaaatttgtttaaagtagaaaactgaggatggcctaatgttataagctccataaaaaatcttgtctagctaacagtatgatatagccaaaataagatagaaaagaatatattaaaagttaccacagacaaaatgtaaggcatcctacttcagtgctgctaattctctttattctcgttctgggatcatgtatataattatgtttgacttggtggggtttatatagtgtttgtgatttttttgcttatgatgcaggtccacagggctatccagatcttgagagacaagca

SEQ ID NO: 110459 - DNA, 943 bp, Aquilegia coerulea
  Intron number 1 from transcript AcoGoldSmith_v1.001415m (l ocus AcoGoldSmith_v1.001415m.g) derived from phytozome v7. 0 (chr-ID scaffold_2; pos 9635456 to 9636398 reverse stran d)
tccggcaatttacaattccaaagtatcacagcaaaaaaaaatttcatctcggtttgacaccaaggtgatttttctaactttgatagatgcatttatagtcttcaatgtttctgctgtaaccatcatctgcggacttcatctgtttcataattcttggactttaatgacttaatttttccaatacattcatctgcccacagcttaagcttgtatggataaagtttaccaacaaatcacacggcttgacaaaaccccttgtatgccttagggtcagcctttcgccagaggatgctggataacttattccttagggaagacacatatctgtttacacctcaaactgtacctacgctgtatagctatgatttttatgcccttttccatctcaacggtagatcgatagacttgcatagccttcatgtgatcatctgttaagaaaagacaccaaatctttttaaatgtttttatgagttgggatgcacttaaaataaccataaaaatgttaagtaactttgtgaaaagaattcctctttgatagcactgttaaataggatgggaattgattttttttgtactctgtagccggcagctgcagctgatgcatcgaatctcttccaagtgtaatggaaactaccttaactaccttatctactcaaatctttccttattgaatacttattattacttaatgcaagtatttcttttggactatacactaaaatatactacatttgatccaccattaaatgatcatctggggaattcgaaagtttatggacctttaagtctagtaagcattagtcttaatgtattgttagatattcccagccaacattatggtcttattctggttataatattttagttaatttgatttcaaagtctgtagtgctgaagcggcaaccatacttatgcagtgcatcttaatttgcagttccataat

SEQ ID NO: 110460 - DNA, 1037 bp, Aquilegia coerulea
  Intron number 1 from transcript AcoGoldSmith_v1.012249m (l ocus AcoGoldSmith_v1.012249m.g) derived from phytozome v7. 0 (chr-ID scaffold_3; pos 7557993 to 7559029)
gaagtgaagactttgaaagttcccaagaggaggaggtaatacatctaatagattaattaccaatcatctcttttcaaattgaacaaaagcattcaaatcaaaactatataaattttgagatttacattctttaaagcttaatctattactattaaatatgttaataattatttttgattcttattttcatatgatcctgtaagtgtgtcatggtgtcacactgtcacctacatatgtacaattttgttttttccttgcaactagtccacccacattgtgatatatatgacttctttcgtccataatgaaatgatcattcagctgaattgtgtcggttgtctgatctcatagtctccgcgatattattgaataaaaaaaatgatagtattaaaaaaatgcatgaatagcaccaagggttaacctagaaaatgacttcaaatttatttcatataaatttttagcattttaaaaaagttctctagctatttggcagatatttttcttaaaaatgaatggttacttaataagaagcgagcaccacgatataaactgtcggtagcaatttttgatttagatttttatttccttgataaggaccttttgttgtttattaacaaaatgaaaaattaagaatcatatgtccagaaccaaccatattctaaaacaaatgatggtcatagatttataaccattgggtccgattgagaaaagaaaccaagcagaatggtactgtgatgtgtgattggactttcattccacatgtctgggccattgaggcaatatatattgaggttaacactcggttctggtcgactggtcccatggaagtattgatttgggtacgttcaagcaatgttacatggtaacaaaaggtctgcaccttttttagggaaaaaacttggaatattgattagtagttttcgaattttcatgcatttatatgtagttttcgccatttttgattcttttccgtctgggctcctagcatgtatgagcaatttgtttatgactacaggtcacctctttggataagaaat

SEQ ID NO: 110461 - DNA, 753 bp, Aquilegia coerulea
  Intron number 1 from transcript AcoGoldSmith_v1.010352m (l ocus AcoGoldSmith_v1.010352m.g) derived from phytozome v7. 0 (chr-ID scaffold_13; pos 2588856 to 2589608)
taaggacccttttcagttcatcttcttctgacaaggtaccatcattcttcactcttaattctgattgttattagattctaataatttttccctatgttatctttagttttgattatatattagcatttttattgtatataattatcttactcttgaagattcttttaatgagtatatggattgtgctttggatagagatttactcgaaagcttattttgaatttacctgattttccactcttgagaatctatatcatgcactaatcttatttttattaaattttgcataatttctatatatcctttaaaagatttgttgaattatgttacattttattagtgtctagaatctgtgttttagctggaaatagtgattaaatatccatctctctgaagtttgaaatctgacatactataatgaccatactttgaaagtttgaagctctcgtcaagagtttgttgaattatttttgaaattattgtctccatcaatgatttggaaggattagggtggttgtagaatgctctctactagtgaccttgtcaattgttatactaattaagaaaaggcaaacatttggaacggagactcaattgaggaaaagataatatttacaatttattaggttatgttctgtgcaatactggtgaaattatttagtatttattgtggatattttggtttgttgttgttgacccaattttatttcatcacaaggaggaagaggtgaaagggtccttgtgattggtaga

SEQ ID NO: 110462 - DNA, 908 bp, Aquilegia coerulea
  Intron number 1 from transcript AcoGoldSmith_v1.027114m (l ocus AcoGoldSmith_v1.027114m.g) derived from phytozome v7. 0 (chr-ID scaffold_16; pos 4428076 to 4428983)
gcaagtacaaagtcatatttatttattggggcattcaccaggatatattaaaatattcattttggagattttgtcaaagctttctgatagcacccttgactccttgagtattttattaagcattgccgcattttaaaaattagtgtaaggatattttctattgagaatttaagatgcccacttccttaggttttgttaattaatgaagtgaaaaggaaactattttatggaaacctttgtccttattattgtatggacatattgacacaaaagatgaaaagaattgatcatattcaccctaccaggcatgcattgtaaataatcagcattgttgaattccaatatgaggcctattttcaattaagcaacttttatgtagtcatatggttaattggctggtacagaatcggaatctaatgtgtttgtagatacctccttagtttttttccagaagtttcgattgtttttttttctgttattgttccaaacatattttgtctctataatctatgccttttgtatttgacctttggtaggttatctgtgcacacaaattacagattaagcgttagcatagaatgttttttatacatgtaaagagaacaagtatggcatgcatagtaatgctttgaatgctctttgttatcagaaagtagggaatcgggatagttcatccagcattcaagctataaaacttagtggaagtcgtccttgaagactcttcaatagtaatttacactgaagcttaacaaattgcattcaattacttaaaaagactaggagttagacggcttgatgctcctctatttccagttgagcagatttgttgtcttcaaatccagaacatgttttcttgaatcaacataatggcaggggttggtagtactcagagcttaagaaaggctctt

SEQ ID NO: 110463 - DNA, 579 bp, Aquilegia coerulea
  Intron number 1 from transcript AcoGoldSmith_v1.001282m (l ocus AcoGoldSmith_v1.001282m.g) derived from phytozome v7. 0 (chr-ID scaffold_34; pos 2743230 to 2743808)
gcactgaaaaggaaaaacgagctaagaagaaacaggtatcatattggttaagaaagcacggtgcattggctttgttaggcccttccttttatgctagttcagtttcagatatatcgcctgtatcttgttttcattggcttcccttgcatctggtaggttggctttctcattctggcccaagaatcgattctccttgtgatttgttgcttcttcttggatgttccgaagttgttatgaaaatagtaaattattttgtacaaattggtcatacaatgtgcattattatgtacaaattagtagtttattttatgttatcctacaaacttgcatcacaaacgtgtttttccttccggcctgacatgtatatagcaattgttttttgaatcagttgacattggtaatggcattgtatgtttcttttaacttgtgttgcttttcttataaatgacccattttgtcatttacttgcatagctttcggaactatgatattctgatacttcagaatagacttgtaccgccttttgacttttattttcccccagggtaaaaacaagcggaccagtcgcaaagggaaaga

SEQ ID NO: 110464 - DNA, 651 bp, Aquilegia coerulea
  Intron number 1 from transcript AcoGoldSmith_v1.012536m (l ocus AcoGoldSmith_v1.012536m.g) derived from phytozome v7. 0 (chr-ID scaffold_58; pos 1382870 to 1383520)
gatttttaagaaaatatcttgtacctcagaggaaggttattgggattggaatagtcaacatatagctagtaatgtgatcttctggcgcataaaacccttactgtacatagtgtagcggcacaatctttgtggtgagtacttagtaggggttctatcagtgacaatcaaatagcagccagcagtcgacatatgagccaaccgactgaattgtgatgggattacttctaggtgaattgtcacatatcctttggtatatggaccatagtacaaaatattgcgatacatcaatatatatcggttttctagaaaaaaaaacgatacgatatattcccggcatttaccccttggtgtttatgcaaagtatcggtcgatatttcccgatatttagattattttttttttttttggaaataatttgtttattccatttttagtagatatggttttttagacagcttaagataactcattctgctatttcatatctataagaggatgaacaatggggataaccattttcgaaggaacataaactatacttacatacagctcaagtcttctatgcatctttctgatttatgaaagttccattgattggtttccttaacatttgcagtgtggagctccaagtgtgctgccaacaatccaaca

SEQ ID NO: 110465 - DNA, 346 bp, Aquilegia coerulea
  Intron number 1 from transcript AcoGoldSmith_v1.002401m (l ocus AcoGoldSmith_v1.002401m.g) derived from phytozome v7. 0 (chr-ID scaffold_19; pos 2845123 to 2845468 reverse stra nd)
gagaatattaattgtgtctaaattatttactgaggtaggttttttcattcttgtcttgactcatgatgcttcttcagttatctattgctttcaacttcataattatcttctaccacttacatattcttctttctaaattcctttgaattttgaggacagtaggagtgatgcaatctgaattctcttgactatagtctaagtagtacaaactaataattaattagttactttaagcttttatgatgaggaacatgtctttcaatcccttttgattaattctctgacatatctcttccttattctgcaaccaggattctttctatttttgtttcaaagctcacatctt

SEQ ID NO: 110466 - DNA, 833 bp, Aquilegia coerulea
  Intron number 1 from transcript AcoGoldSmith_v1.009341m (l ocus AcoGoldSmith_v1.009341m.g) derived from phytozome v7. 0 (chr-ID scaffold_3; pos 1596962 to 1597794)
atagggcactgcaactgtttctgttttgggttcaagtaagtctccacaacctccccattttcttcttcttcttgtaatttaatttaatttttttttttcaaataacatggttgtacatttttaattttgaagaaatgttcttctttgtgtttgatggaggttcaatttatttatttatttttcttgttgatttgttgataattgttggtccctaattgttttttttttttttttaaagaatatttcattatttgtttatatatttaatggggacatgaatgaaattggaaatgtgaaattttgttaggataactgtgaataagaggatgatggttttacttgtgagcatatttgaaataaagtttgtttgattagttatatgccctttttcattttcccctaaaactaaatctcgagtgatgggcttagactcatcgacccctactacctgcatacatacacaatacactttatgctctttgcattattcatcttataattgaagttattgaatcagatcaaattaatgttagaaattaatgcattcatgttatctgctcatcccatgagaataccattatacatattttgaacaaaatagaaacaaagtttgtcttaatgggtttgttttagctttctacgtgttttttgtttatcattttcggttttttcaagcaatcgtgaggtaatgcggtttcctcttgtttaaaagtttatgtattctgtgttacagcagaaagttagaatccttgtattaattgagtaaaaaatgtcattttgcatgtccatcttcctaaacttatatgttggtacaaatgtgttcataggcttaa

SEQ ID NO: 110467 - DNA, 589 bp, Aquilegia coerulea
  Intron number 1 from transcript AcoGoldSmith_v1.009477m (l ocus AcoGoldSmith_v1.009477m.g) derived from phytozome v7. 0 (chr-ID scaffold_13; pos 4049281 to 4049869 reverse stra nd)
tcaagatcgaaaccaaaaccaaggtattattattattattattgaattgatatttgataaagaaacctaaccccagattgactttgttgatcttggggttttacttgattttgaaaagaaaaattgggtatgttttgtttgattttttagctaaattgctttgtatttattattatattgtccaaaactatagtacccaggtgaatgtttcttcaagtaaaccctagataatgtgaaatttttcggaattttgttattgtgatcttgtaaatttggatgtattatggtagtgttgtttagatgttgctatatcgtatataatgggagagatgcattttacacgatagtgtttggtcgtgttggtgttcttgtattgatatattatctattgaggtttttggtaaaatgtacttttagactttgcaataaataatggatggtacttggtatttctatgtatcttatacaagaatatgaagctgtttatctttgtagaaattacttttcttttcattctgtgttaagagtttccctttcatctttctgttgaagatttatgctataataatcttccttgtggtacaggata

SEQ ID NO: 110468 - DNA, 764 bp, Aquilegia coerulea
  Intron number 1 from transcript AcoGoldSmith_v1.024755m (l ocus AcoGoldSmith_v1.024755m.g) derived from phytozome v7. 0 (chr-ID scaffold_32; pos 1292870 to 1293633)
gcgtaagtaccatattctctttcttttactactacttcattttagctagttctgttgatggtattgttggtgtttgacaatttgcttggtagcttcacctatgactccatttttttcttttttgttgtggttgaacaggacttggcctacatgggttttgagcttatagagtctttgtatatgaacaaattatcctccacaatgacagaaaaataaaatgtgcattttgttgttttaatggagaaattgaggttaattgtgacaattgggtgagaaaaaaattggatgattgtaaatagatgagtaaaggacttagtgatgaaaatgctactaatattcggaatagaagtgctgcataatttgtcgagtagtttactgatatgtcttcttacatcaagatagtgtagtttttgttgattgatctgtagctgttgggggggtttatttgaggtttacataaacttttcgggaaacgttcgacatggagacacagagttggagaatctaaccacatacttaaaccaggataacacattctttctttactactcaaacatttcaacaaaagcttattttccacaaatttaggagccatccgttgacagcctgagtgggatgcatgaccatgttagattatttgtcactattgagtgtggtgtttgttgaaagtatctgattatttagctgtgcctttttctgtcgttttcttattcaaatttcctctggcagctgaagggctcatattggcatttcaaaactacatt

SEQ ID NO: 110469 - DNA, 719 bp, Aquilegia coerulea
  Intron number 1 from transcript AcoGoldSmith_v1.002568m (l ocus AcoGoldSmith_v1.002568m.g) derived from phytozome v7. 0 (chr-ID scaffold_87; pos 626273 to 626991 reverse strand )
ctgcatcatcatcacttcttcaattcccaaagcaggtttgaatctcttgagttttcttttaagattcttttttcgcagtcatatcatatctataattccatttctaatgtaagtagtaagttaagttggcttaaaccctaatttttcgcagtgatagcaatttttttcataaattttgctggctttgttatatgaaaatgaaatgaaactttatacttcgcaattaatcaataactgggattgtgttttaataccttgaaagtgttgtcaaattggtgtaaaaatcacggagcaacttaaggatatttagttaaggcctagaattcaaagggtactataaattggtgaatgttgtggttggaggtaaaatcctgagtagtagactaatatgttagttatgataatgatgtctgacaaaaagtgaatcaagtatgccaaggcatttttcaagtgtttaagttatatttgcttttacgagaatttttgtgattttatttccagctttgttttacttatcatattttttttgtttatgaggttttctttttgaatgcgtctattccctttgccctattatttttgttttcttcaatgttatattttcaaaaagctcatttatgttttacagccatataatttaccagttttatttttattcacaattttgtctgtttatgggttcaggaaagccttggaaaaaggacaaatcaaaggcaaaa

SEQ ID NO: 110470 - DNA, 858 bp, Aquilegia coerulea
  Intron number 1 from transcript AcoGoldSmith_v1.019558m (l ocus AcoGoldSmith_v1.019558m.g) derived from phytozome v7. 0 (chr-ID scaffold_2; pos 7646138 to 7646995)
cagtccttgctttgcctcttgtccaaagtaagctttgatatatcagattttactctttgatttgttatctgaagattttggctttccttacgtattgtcactacaatttgccgtaatttcttctattaattgaagtgtacattttcagtcaaaaactatatgtgccatgacttaatcttaaaacagacgtcaaaccctttaagtctttaattgaagtgtttttccaaccacattagtgagattagctatagcttgaagctcctatttttggagatagatcatgtctcaattgtaggttccacattaaaagaagctttctttgatcatatgtttttattatttgtttcatagatgtaaaaacattaataaaggaatgaattagctcgtggccggccttccatatcatctgttgatccatggagaaattttaccttgagttttatcactaataaaataagtaaacatgctaacaagtcattaagaatcaattaatatataggtagtgatctgggctcattaacttaataattcaaatgcagcaaaaatttaaaaacttttagttatgttgatgtttttgtcccaaaaactaacaaagacaattatttagagcaacaccaacagtactctgtccccaaattagcgtcgggacagataacttaactccaaccaggcattgaaatagcttgggcacatcagcgcatgttaagatagtaacagtatgatacttgcagcacaatcgctgatcatgacttttgactctgtagtaagaataccctagtgagacggtaacatttgacattacattagctttctggtagtaatgtcatttgaatgtttttcaggtggaatatccagtag

SEQ ID NO: 110471 - DNA, 1052 bp, Aquilegia coerulea
  Intron number 2 from transcript AcoGoldSmith_v1.002777m (l ocus AcoGoldSmith_v1.002777m.g) derived from phytozome v7. 0 (chr-ID scaffold_13; pos 5768433 to 5769484)
tgacgtatacaggaactattggttcacctctaaaggttggatttaatatttccttctttatacttctattaagtcttacctggtgagattactatctgggggttttatatctacaaagggaataacaaagtcccccagttttacattattggttccacgcaaagtacttgacttcactgatcttatcgatcatctgatattttatgattttatcagtatttccactcttaagttggtttggaacctgacactttctttaatagtagggctctatgtcagcatgtgtcttttaggaaccagaataagtttaaaacacttatttttataaactttttttacagatttcagatcatatctggactcttagatttgttgctgattcagtattgactgctattttgattattttaattctcttttaacaaactattaagttatttacacgggtagacgagaatttccctggtccaagttcaatgcaataactgctgcgttgcagcaactgatttcgagcttatcatggtacttaaaccagttgcaaattaaaagtttgaaactaatttaattccttaaacgctcaatggaaattgatagtctctgataccatgaaccagtgttattaaatcttgttgattgaacattacccttttaaataaaatggaatatcctgggcagaaatttctggaccaatcagacaatagacaatttccaacaaggagtcgggaaaaaaaaaaacatttttgccatccatatgaaaccaaatttattttgtatcagtttttatgtttagcttgtacacgtcacttgcctaggatcctcacatcttaaagttttaattcactgaattttgcttctaatactacataccaaactattttagtcttttaaactgaggctagtctcacgatgctttgtatattctcaatcctatgtatagtgtaggagtttaatttagcatctctgcgccactcacttaggtatgggtaatcttctctgaaaatacctcctcatgtgcagggaaatctcgagtcaactttgtcaacagaaattat

SEQ ID NO: 110472 - DNA, 896 bp, Aquilegia coerulea
  Intron number 2 from transcript AcoGoldSmith_v1.015875m (l ocus AcoGoldSmith_v1.015875m.g) derived from phytozome v7. 0 (chr-ID scaffold_35; pos 96875 to 97770 reverse strand)
aaggtttgcagaggacttcagccggtttaggcagtgtatgcaatcatttttttttttatctatcttacaacttttattaaaatgaatgcccacaaccatgttgagccgcatttccgttcgttgcttcaacacataaaattgtgaaaacaagaaatttccatctgtaggccttttagatttatgtaaacacatgtttagtaaaattttgctagtccattggagatgtcattctaggcttgtgtatctcgggtaacgtcatctatttttgcgtaagcacttcagcacatgtaattttggattcgaaatttttagtccatttttcaaaaaaaaaacaaaactacaactcttgtcttggacttggatggataattaagaccaaagtggaaaagaacaagtataataccaaagcttcttgattgatcatgttgccctcatcagttctgttgagaccaaacacttctctttgttagcatatggggattgctccctggtcgtaactacttatatgaccacacgtgtaaaaaaaacctctatggagattttttgagtgtggtagatcattaacttgcattctcccaatttacacgctgtttccacttgaacgtgattcttcagtacatagttcccttgtgcagtcaaagacacttttgttagtatgcaaaattttcttcaaagttaattgcctcagctcattcattgacctttcttgatctgttcgaaatgtcagtttacttatagtgtcaacttaaaatcattagaaggaacacatccaaaaccctttttctggggtgttttagtatatatattacttgattactttaactacagataaccgaacttcaacatcaaatgggaatgcaggttataatagattcacaacctcttactgtggctgt

SEQ ID NO: 110473 - DNA, 263 bp, Aquilegia coerulea
  Intron number 1 from transcript AcoGoldSmith_v1.013115m (l ocus AcoGoldSmith_v1.013115m.g) derived from phytozome v7. 0 (chr-ID scaffold_3; pos 3173177 to 3173439 reverse stran d)
aactcacaagggaatctctcaaaactattgttcttgtaaggatcttcttactgtatagataatcagttcattttcaaataatagtactacttttgactaaacattcctggtatgtgcaggtgtagaacattaacatgctctgcatctgtgtcatggaacttatacttttagtctactcttaacttaattgaaacgtaaaaaacaaaaagagggatagatgttatgcactctaatcgtactaactggtagaaatgttccaggac

SEQ ID NO: 110474 - DNA, 714 bp, Aquilegia coerulea
  Intron number 1 from transcript AcoGoldSmith_v1.014915m (l ocus AcoGoldSmith_v1.014915m.g) derived from phytozome v7. 0 (chr-ID scaffold_86; pos 404882 to 405595)
ttcaaaaatgtatcatttgctgccatttcatttttgtggaaattttatctgttatttttttatataattcaaattttattgataagatcaacgaattacacaaaagtagaggacaaacgcgctacaaactgcgcggcaagtcctttctggatagcaaatccgagttttttttttttttaattattgagtgttagagcatctccaatgctattatgagttacaatgtcacttttatggatatgtgaggatgtgaatcctacgtggcccaaaaaaaatctaatgcacatcaaattaaaaatatatctccaactattatccgtaaaagtaaacttgtatatgatgtgttaaattgtaattcataaatttctcgttctaatccattttttatgaaaataacagctattttgctcattaagcaatactcacaatgtgaaggaaagcctctacaggtagatgatcaatctcacaatgtttattataaattgtgccacatcatatttacagtgataatagaagattgcattgaagatatttttttggactcaatagctattaatcctatatggcttttaattttcccccaactcatgttagcatcggagatgctcttatataaaaaatatatgtactgtggctagaattttgaactgatttcgtatataatatcatcgtaatacaggtaaaacacatttcacttggattggaccaaatccg

SEQ ID NO: 110475 - DNA, 432 bp, Aquilegia coerulea
  Intron number 1 from transcript AcoGoldSmith_v1.000445m (l ocus AcoGoldSmith_v1.000445m.g) derived from phytozome v7. 0 (chr-ID scaffold_2; pos 5815620 to 5816051)
aggccacattcaaaaaccaggttaaaatggtttccctttctctactttcttttttaggagatcattatcctgatgctttatttgcgttgaacatattagacctttgatggaactgattttgacttgaggcacctgttaaatattaagcacctttgtggctgaaccatcatattttgtgcctacttgacggaactttgaaatcttctgatatgatttgattttgacctttccttatatatgtagtttatcttctataatgtgagtggttaattactcacatatatcttaagttaaatgttgacaatctcttgccgatcaccactcatgtatagagtcaataagttgtttttgtttagtttaattaggatttttattaatgtgtttttcttttgttcaggtttctgaacttcaccgtgtttatagaatacaaag

SEQ ID NO: 110476 - DNA, 596 bp, Aquilegia coerulea
  Intron number 3 from transcript AcoGoldSmith_v1.018942m (l ocus AcoGoldSmith_v1.018942m.g) derived from phytozome v7. 0 (chr-ID scaffold_44; pos 1092797 to 1093392)
agtaaggatcaagtctgcagttcacttgggaatcaccccgtaggcccacatcaaacttcaggcaaatatgattgtttattttaacctttcagtatttaactggcgaaactgaattcctttaccctttacaaaagtataagattgaagcactaatttttttttattacaaatagaaatagtattacaaggtaaatggtctaaatagattttagatgggaggaatgtcacaagatatccttgagaaagagaaggctcggtttaattgttatgcaatatgaaccttactcaatttaattaaattaagtttctgtcagttcttcagttgttgtgctcaaataaatatgtttgctagaatttagagggggcaaagtcatgttagtggtttcgaatttccttaatctttctatattttattagcagtttcgaatgtagtcttgtttattttcttttgacttctcgtaattttcaattattgaagatcttttgttgttttcactacacttagtgattttctttgatgctgtatattgaaagacatgtttctgatgtctgcacttgatttttccaggtatatcatttaaaggcaatccattaag

SEQ ID NO: 110477 - DNA, 932 bp, Aquilegia coerulea
  Intron number 2 from transcript AcoGoldSmith_v1.023800m (l ocus AcoGoldSmith_v1.023800m.g) derived from phytozome v7. 0 (chr-ID scaffold_88; pos 68176 to 69107 reverse strand)
tttagcacatttttcactgttgtaaggtattgttttttactaaaagaaaacaaatttaagattcttcaatacttttaatctaagcaaagtctgctatatgtaccagggatttcacttttggataagaaatatggtcatttgaccatctcaattttgttattgttaaactaatattttcagcacgattctatgcaggagcgtaaccaggaattttgtttaggagagagggggggggggaatataagatgttagtgtacaccggaaaattactataattggggttcgggggcagcaccccgaattctttttttacttattagttaacaataaaccagattttcttgagtttaatctagattttgactatgaaaacaatatataagatacatacatgataaaatttatatcaaattctatgaaaagtaaagtattaatgaacaaaaaattatatatacagtgtcttttctcttgataaataaaaaattgtttagtataatgtttttctactttgaaaattgtaaaatgggataagtaatagactaataggtagcaaaaagtacaaagaatctttgaaaaaatgccaatcaactaatttttgctgaacactaagtaacttttttcaaaaattttgggggggccatggccctcttcaaaccccccccccccggggtttcgcccatgattctatgcattcaatggttgcttattttaatcagtaaattgagtatggaatagtttcttgtatccctgtgtgataagttcacaaactttctagcaggaattacaaacctgaccatttaactatagactattgtcttcaagatggaaatatgtgatatttattactttgaactatttctcaagtgcaatgtacaatgctgtggcccttcatcgtttttttcaactgttttgcagtgacattcatccagaaa

SEQ ID NO: 110478 - DNA, 580 bp, Aquilegia coerulea
  Intron number 3 from transcript AcoGoldSmith_v1.008711m (l ocus AcoGoldSmith_v1.008711m.g) derived from phytozome v7. 0 (chr-ID scaffold_16; pos 1541649 to 1542228 reverse stra nd)
agttgaagaactgctcttcgtgcttgttttttgaggtaatttattgccctgggcattatttaagtatgataatttgtaatgttgcttggaactagattcatgtggctagggagttttattgtgaaaaatgcacatcgatttgcagggcgtcagataatttgagataaattttaatatattcgattaactttcagatatgggggtatggggcagtatttagaaaaaaaacaattctgggagcatcttcaacttctagttggtggtgacttggtgtaaggttttgcgacaaattattaacgaatacttttagatcatttatacctacatacgaatgttaaaaagtttggatagctttgatgggccgtcatctgtaatatgtactctttctaccactatatttagtctgcacatctttctaactactaattcaaagattttactccataatttttaggtcacttggataagaggacaagatttctgtaatgttgagtatctttgctgaattatctgttgtgttgatggtacacttgttctgttctcattgcagtgcaggaagcagaaggatctctacctttgg

SEQ ID NO: 110479 - DNA, 958 bp, Aquilegia coerulea
  Intron number 1 from transcript AcoGoldSmith_v1.027402m (l ocus AcoGoldSmith_v1.027402m.g) derived from phytozome v7. 0 (chr-ID scaffold_22; pos 4124580 to 4125537 reverse stra nd)
caaaacaaaatcaaaaacaagagcaaaaagttttggtgagtcttattaaactgcatgctcattgtttttctataatttttttgtgatttatctttcactatttcactcttatgttttttttttctcttcttcccagtcttttgggcaaattaagtgaaattatacagcttaattcaattgccttttcaggtgctatgttatgttcattattgtctctttcatggattggatccaataacaggcagtcaaattggtcattcaactactgtcatcatatcatcagtcatgtcactatatttcccagtttttctattctaaatcattagactgttatttgtcctgctttcatctcgtgccaactcatgcaaactaaaagcattatacattttattccccaatagagtcaagcatattggtaacagcattcaaattggtcattcaactactatcatcatagcatttgtcgtgtaattatatttccagtttttctattctaattcattagactgttgtaagtcctgccttggtccttcatcgtgcaccaactcatgcaagctaaaagcacgatacatgttatttaccccaagagttgagttgagcatattattttagtattggctgtacgtggtgttctatggattctttttgtgatacctgaagaagacaacaaatctttgtatgtgttagattgggtacatgcattgttcatcttcttccatatttagcttgcatgttgattacagtcagacaatgcatctttgtcacattcgccttgcccttaaattttcgatgaattacgtagtgatcacttgatgaacaattagcctcgacgttaactgaagttcatacatgtttgtttgttttcttctgatgcatctagctaacgcctttttttcttgaaaggtaactgttccaggagatagataggaagaccgacctgcttattatacgtgatagt

SEQ ID NO: 110480 - DNA, 736 bp, Aquilegia coerulea
  Intron number 1 from transcript AcoGoldSmith_v1.008137m (l ocus AcoGoldSmith_v1.008137m.g) derived from phytozome v7. 0 (chr-ID scaffold_19; pos 3445030 to 3445765)
ggtcactgacttaccaatcgaatcactcaatttaggtcattcttcaacttaattcagatgtaattttgttacatttattcaaaatttaactcaatgtgaagctacattattaaccctaagtgttgcattctgaattcactttactttactataattagattagatagatatttattgatttattatttatagataattaaataaattttgaggagtttcaagatttgagatttggtatcataccttagttaaagtataaatcttttttttttttagaattatcttaaattcataccttaattttgtatatatctaacaaggtcacaattcaaaatggttcacgtcaaaagattgtattttgggagctaggtctagaataatttttaattggacattgacaaatttggtttttgttacaaatctggatacttttaaacttggcaggggtttgcgtaatgtgctactgtttttttttttttttttttttttttgcatatcatctggcatttgattgactagctaaacaaagatattttctttttttgttttccagagtttattaaaatatcatgttaatatataaattcatatcattctgtcttggtagttggtactgtaacggatgtctagatatgcaatctttcattcccagtataaacaattttatgtaaataagtgttggatcactaattaatcagtcatttctaatgcttatttttttattttccagaggata

SEQ ID NO: 110481 - DNA, 491 bp, Aquilegia coerulea
  Intron number 2 from transcript AcoGoldSmith_v1.000193m (l ocus AcoGoldSmith_v1.000193m.g) derived from phytozome v7. 0 (chr-ID scaffold_91; pos 374086 to 374576)
gtctcgccttcagaatactgactctgctgaatcgggtatggattttatttctttcttattatgccaagttttgaatgcatgattgatgattcatttatatgtgaatgagaacaatgcacccttgtattattggttctaagactttggatgtcagtttggtgatatacgtctacttatgcaaatcattttgaggtacctttaattccattaagtggttgagactcgggaaatatatcctgctgcaagaagcatgatgtatatgtaggataagaaaagacggctaacattcaaatctaaaccagtccatactagattatttccaaaaccatgccagcttctagtgtgtatatcatcttttcccttctgtttcattaagaagatttccaaaaccatgaaagtttctagtgtccactgaagtggcataaatataaatctcatgattgggttttgatacttgcaggacaatttaattcttcttggggccattctgc

SEQ ID NO: 110482 - DNA, 740 bp, Aquilegia coerulea
  Intron number 3 from transcript AcoGoldSmith_v1.012434m (l ocus AcoGoldSmith_v1.012434m.g) derived from phytozome v7. 0 (chr-ID scaffold_22; pos 3648233 to 3648972)
cattcaaaacccttaaaaattccacaatttgagtacgtattgagaagctttccaataggtgactactgtatctctttgaagtactcagatttgattctataaaattcactctcggataatctattacttgatgtgaccttccaactgagacaagatactaataaattgcttgttatatgtactttgttcggtcacagattcagccctaagaacaattttagttatttacgaagttaatatagatatatattctgctgcatttgtttcataataagtaaagattaatctatatcttcaaactaattctgcaagaaactattttatgttgtaatgcttcaggagaattagtggaatatattttctactttccaactgactactatgttttgacctataaaataactgcaatactggaaatgaaattacctggatttccatctgtaaataatgcatgtgtcactcacaatgaagagactaaaagatatagcctggcttcaaaaaatgattatacagtgaactagggaagttttagtaacgacgacaataacagaactgcattcccatgataaacattattaggtagtcgttgcctcgttgcccttccttgataactcttttcgttcgatagctgtcatgttcttatgaaactgagaagtcaaattgtagtccagattcaaatacaagcaaatctacctctaactctaaacagcaatgcattttgtaggtctggttctcctagt

SEQ ID NO: 110483 - DNA, 990 bp, Aquilegia coerulea
  Intron number 1 from transcript AcoGoldSmith_v1.002724m (l ocus AcoGoldSmith_v1.002724m.g) derived from phytozome v7. 0 (chr-ID scaffold_34; pos 540936 to 541925 reverse strand )
caactcgacattggctggttagttttgattttctgttacttctttagctctcttgctttaaaagaagataatgactttgtataagtaaagggttgcttcagtttttcaatggggagtgaagttcaatttattggccttgatgacgaagaaagggtttaaattcattatatttcattgtagtgctattcattttgttattcttattggggaatcagtaagttttggtatgattttatgtactgcattgtgtagttgtacctgattcagtactgtggatttgtagtcattacaattaaaattgaatgtggatagaacaactgttttttattatggggaaattcgtaagcattatgacatttgatttccattgcgtagtagagttgttggaatttgattctacttagccattctgttctacatagattcaattctttttttgggtagcggttttcaaggtcagaattttaagctcaagaaattaaaaaaacatgttttaaagtgggtttaagcagttaaggttataatttacattacttagcttaattatgtgtaaggagtttattccgcagtataagataaacgtttttcttgctcaaggggcgagaatatatgctttaggatgtttgtgagagttcgtttcataggatgtagtcttcatattttatttgctgtttgccagttgcgcctttatggggctggtttcccatgactgtggcgtgtcttgttctagacgactagacctggtttcagttctttgatccttcagatagaatgactagtatcagaatgtactttattgatcttaaaggggaagaagagtgttgttattgtggtattggctcattagggagataaataagtttcctctttcaaatgaaatagtactgtataaggataaaatctggatgagctagcttaatgtaaattgtttcacatcacactgactggtctaactttcctaatatcactggcatgtttcaatcgtgtagg

SEQ ID NO: 110484 - DNA, 959 bp, Aquilegia coerulea
  Intron number 2 from transcript AcoGoldSmith_v1.010812m (l ocus AcoGoldSmith_v1.010812m.g) derived from phytozome v7. 0 (chr-ID scaffold_26; pos 1561043 to 1562001 reverse stra nd)
ctgagattggagataagacttttttcgcggctgcggtaaagtgtactatttgttgatttaaatagtttgaatttttgagaatttctattggtgtgattatattaagaatttttactaaagagtttgaatggattaaggaatagtctgttaagtttaaattttaaatttagcattcaacattgatggtgatggtgatcttacttgcaccaataactagtatgaaaatgaaataggaacaattttgaagtttttaaggagatctaagaaacttcattgattgaactcaatggttttcttgacatagggtgataaggaatatatcatgaacagttcattagaacttaagaacaaattctttttgttatgtatatttgaaatttatgaatcatgaaataatttggaacaatttcactaaagttcgaaacctttattgaagttgtattatgaatatatatattgagattacggtcaacagtgagatgaaatggtctaaattacaccaggagaacacgattccagttgggatccctcttggtttaagatttttgtgcacgatggctttgcagtaatgataaaacaatatttttgtttgtttaatgttttgtaagaaagttattactgagtgaagcccttagcgttggagtttttgtctggaatagtctaagttggtctcctggctttactcattagtagtgattttcgtagattcgttcccattttctatcctatgcatttataatattttcagtgttttcttattgtgcttgctagctagtttcgtagagattgaactttgttttttgcttgtttaatttggatgtctagatatgtaattggtagaatttggtgtattactacagtactactgctctctctttttctcttccttcccttgtggatatcttggtgtctatatgttaacattaaattgtgatgcatgttttgtcaagatcttggcc

SEQ ID NO: 110485 - DNA, 319 bp, Aquilegia coerulea
  Intron number 1 from transcript AcoGoldSmith_v1.015688m (l ocus AcoGoldSmith_v1.015688m.g) derived from phytozome v7. 0 (chr-ID scaffold_79; pos 284978 to 285296 reverse strand )
ttcaagaaatcattgaaaaagctcctcaggtctttttttaatgataccctttatttctttttatgcttaattgttatagattgaatccagtttcaattctttgacaaaaactatttatttttctatcatacccattattgattcttaataattttaaatttgaatgaatggttatttgaaagggtacttttagattatttgatttaggaatcgagaattgaagaagactgtgtttgttgttgtgacttggtaaaatagcatttgatgagagtttgtttgtttgtttgtttcttttgttgcagcttccagaagacattga

SEQ ID NO: 110486 - DNA, 847 bp, Aquilegia coerulea
  Intron number 1 from transcript AcoGoldSmith_v1.002490m (l ocus AcoGoldSmith_v1.002490m.g) derived from phytozome v7. 0 (chr-ID scaffold_7; pos 3335704 to 3336550)
acgggtgttcgctagaattttcttagaagttagaacgacgcgacggccgaacattatcctcttgcttaggatatgcatgtggcgatgatggtgtatttggagctaacctaccacatctatgagaatggtttgaagatttagcatcatgatccaatggtcaaattataccatcaatcaggtcaacatttgaccagatattgtggggtcattggacacaaaagtcaaataaaaacaagtcaatgaaccgacatgtgtttaacacaaaatcttttttaggttttagataatctggtaagtaagtaaattacttgaaatgaaattcaaattccacctaaattcaatgcaaattaatactgaattttatattaaatttcacgcggagaaatttagacagcttgcttgcttagctgattctctctcttacacataataagaattaagaagaagaagaagagaaagcttgcgaaagcttgacatttcagccgaaaattttcccattttttttttctatttttagtaataaaatcccaaagacaaagctgctaacttgcgcatgtaggcctgcatttgctctctcttgtaatagattcatggcgacgtgaaggatcaaaaaggttttgctggtttagtttcttttaaagttttatttatagagaaattagggtttatagttttataatcaagttaactgtgttagggttttgttttacttcatttggaactttgggtattgaagaaaattgttgaatttgattgaattagtggaaaagttttgattttgaagagttttgaagtatatagtagtagtttaagtaattagaaatggtagatagagaagaaactcgta

SEQ ID NO: 110487 - DNA, 891 bp, Aquilegia coerulea
  Intron number 1 from transcript AcoGoldSmith_v1.020695m (l ocus AcoGoldSmith_v1.020695m.g) derived from phytozome v7. 0 (chr-ID scaffold_19; pos 3987555 to 3988445)
ctcttactatagaggtgcacaagggatcattcttggtacgtagttttttttatacgtgcattttcgtcctttttttagcagcaaggatttaacacaaactcatgtcttgcaaacactatagaatattggttcttgttgatttcttttgaattaagtgagaaacattcaataatgtggtgatcttataattctataaataaatgtctttaacagttaaacagtgacttgatgaactaatatatatctttgtcaatacatggattcttttccttcaattgtagaccacaattcatttgttcttttcaagtcatattgttactttatgcaactcagcagctctacagttatttttaatgcattgaacattatatggagatgccaagttacaaagaagtctctagctgttgatgaagtttatatctcccgtctacattcttgggacatagattaggtctacctaacaagaatagaaaacaagtgtacatgaacattcaaaacttcaaaattctaatttcgaaggaccatgtataactaactttgtttccagtctctcagtatcctattccttacatttaattcagggtgatagaaatgcattaaaatagaagaagcgaaatgggattgtaggctttcattagacatacatgcagatatgctatagttttacacaagttgtcttatatagaaatgccatcttttcggaagccatcatccagtgctcttgttcattgtcagaataaatcaccttgtcccctgtcttgtctgtttttttttttgtctgatattggccatttgatctgaaccgatctccattctagatgttgtttctctgtctcaatggatgatttgaaatataagtaattcaaaattattttctccttttagtttacg

SEQ ID NO: 110488 - DNA, 681 bp, Aquilegia coerulea
  Intron number 2 from transcript AcoGoldSmith_v1.003542m (l ocus AcoGoldSmith_v1.003542m.g) derived from phytozome v7. 0 (chr-ID scaffold_34; pos 446100 to 446780)
gtacggtggaatcaagtgtgctgtcattgcttgtggtaagctttatagtaattataatggcctttttttcgtcatttttcttcgattttcttctggtttttcattttcagatttatggtttcatatatgaaataattgttcaacatttattaaatcttaattgggacagaaaaagtcttttcattcatgtcattttcccaaatctgacagttcttgcgatgttttgttcatggtgtgggggagtgggggacgttggtctattatctgtcgtggaccataaatgatgatcaaatctcatatgttgggctttggcattaaagttggttctcttcataaatgggcctcaccttgactaacttgggagtccaattacaatgttaccaatgacattacaatctgacaatcatttttacttagcttaatgtacagtatgatcatgccatactacatttctcagttaattgtcatgactcatgagtacagtagttacatggatgcaaatgtgataagaagtttgataatccagatatttctgcaaattccctatctgacaagaacaagcgcaaacttggaaaaaactaaacttgccatcactatagtcatatacatggactatctaactctttgaatgtttttctgaatgtagttgtggaggtactggaaaatctggtgttcatatca

SEQ ID NO: 110489 - DNA, 962 bp, Aquilegia coerulea
  Intron number 1 from transcript AcoGoldSmith_v1.023940m (l ocus AcoGoldSmith_v1.023940m.g) derived from phytozome v7. 0 (chr-ID scaffold_13; pos 686826 to 687787 reverse strand )
caaattcccacagagacaccccaaaccttcttctggtttgtttcttcttctttaatctttctcgattatatatttgtatatgaatctcttaactcgtgtcaatgtacagtttttttttttttgtatttgataaagaaaatttggattttttttttttgcagaattgattgacttatggttattaatctaaacttggtttatgttcagaattgattgtgttttagaaataaatctagatttaatcgattttacatactttgattttcattcgaaacaatgaattccccttttcagtttgttaagattttgtggagataaagtgttgtctttagattattctaagtgacgagatgattaccattgagactaggaaatattggatttgaatagaatatgaactgtggttgttgccagtgaagtatgaagtgaacaccatagtttagttgtgcaaaaagtagcataatgagttttatcaggtggaatgattggaaaataatcagctaatgacattctgaaatgaacatctgaatgtttgacggtgctaattgagataccgaatgggtataattagccttcccctctctctgaacatcaagtatgacgtgaacaccatagtttagttgtgcaaactgcaaacaatggcaaaacgagttttatcaagtggaatgacgagaaaataatcagctaatgacattctgaaatgaacttgtgaatgcttgatggtgctaattgagatactgaatggttattagcaattagccttcccctctctctgaacatccttaattctagtcagcaaatttttttttgtctctcgatttttatacattaatagtcactgctgcttgatttcaaatttaatattttgttgtgtgttattaatttggatttgtctgaagtcttgactctaattgaatcaacgtttaggttctggtgctccacctccatcatcatctatagct

SEQ ID NO: 110490 - DNA, 704 bp, Aquilegia coerulea
  Intron number 1 from transcript AcoGoldSmith_v1.009200m (l ocus AcoGoldSmith_v1.009200m.g) derived from phytozome v7. 0 (chr-ID scaffold_58; pos 384440 to 385143)
gagaagaggcagatcgagaatctctctcaacagtgagatttccgtaaaactaaaccctaaatcaccttttcattcttatctctgttacgttcctttcttctttcatttcatttattcactctttcactcgaagttgttagggtttgatgattgaaatctgtgaaagaatttgattgtattttttcgcttgaaatttattttattaaaatggggtttgtttagatttatgaagtatatgttattttccatcacttgcttctcagttcttactgtttcatggttttatttggatttagtatagttgtatcaacatattttgattaaatgttgatgattatggttttgattaacgattattacaaatgataaatgaatagagttttaggattttgggattctgtttatagtattattgcttgagatgaaatttttggattgataagccctcaatgaagtaacacaattaacacatcaaggcttatgctttttcatatatttattttataatcagatgtaatgttaaaatcttgctctaccaattagttttgtactgttttccagaagaaaaatcaatatagtgcgaactggtctaatttatgcttaaacagttttagtattccagagaagagtttttgttatgtataattttggaattattttgcatttcaggtgtttgttaagtcacagaagtcgagagcttactt

SEQ ID NO: 110491 - DNA, 320 bp, Aquilegia coerulea
  Intron number 1 from transcript AcoGoldSmith_v1.007620m (l ocus AcoGoldSmith_v1.007620m.g) derived from phytozome v7. 0 (chr-ID scaffold_16; pos 3452019 to 3452338 reverse stra nd)
gtttcagatactcttaaggacgattcattcaccttgtaagtcactattctctctaaccctacctatttagctttgattttgaattttcttcattacccattacttataactattgttagatcttagatcagtgttcaattttttttatttttttttcaatctgggggtttgatcatatatggattttacatgaaagtttaggcctttttttttttttttttaccttgataatcatatgtttatgtgggatttatgtcaaagctgttgtttttgataatttctgtaatttatgatttgtagtgtgatagaagaagatacaa

SEQ ID NO: 110492 - DNA, 744 bp, Aquilegia coerulea
  Intron number 1 from transcript AcoGoldSmith_v1.008315m (l ocus AcoGoldSmith_v1.008315m.g) derived from phytozome v7. 0 (chr-ID scaffold_34; pos 2702177 to 2702920 reverse stra nd)
gtttgcaaagaagagatcaaacttcaaagctgaaggtaatttaccatttctttttttcttttttctattcattcaataatataatgagtagaatagaagatttggattaaaaaaagttctagggttttacagaggtttttgttattgatcactgttttagactttggttcagatcttcaaatcatatatatataaatgaagtgaaaatgttgatgtttagggtattttcatttgtgtggtttgtaaacaatcttattttttgtggaaataaactatttaagtgatttgggctgttatgaaattgcatttggtttgattgagtgtgcaaaagaggctgttatttatatgaattagatctagtgttccccgtgtcggtacacttgttcttagaaaatcataatgtgataaaatcagtgggagagtttctgcttgaactccttcaactgtttctagcagattggagttttaatttatttttattgatttgatagaaaaaagacttttatttattaatgaaaagagtgtataagaaactgggtaagggagagggctttgatggattgtagttgttgtacggaatctgacaatgtagtgacatttgttttggtcttttggtgtaatgaaatgatttattttgccttttggttattattgatgacaatgatataagtgtgttgaacttgtgtttcgtgtttggaatgatatataggtctgactctacggccagtccacattctgttatag

SEQ ID NO: 110493 - DNA, 818 bp, Aquilegia coerulea
  Intron number 1 from transcript AcoGoldSmith_v1.020615m (l ocus AcoGoldSmith_v1.020615m.g) derived from phytozome v7. 0 (chr-ID scaffold_2; pos 1606181 to 1606998)
aagaagttgttgaggattggcgtcgtcgaaagcaggtagttttttaacctttttttgtgattattgaaatgtttaagttgagattttaattattttggtgttttagtagatattgattattgtaatgaaatttttactgtaggtaaatggactagttttggtaatgtattaattatggctacaaagatattagattgggaaaataaatgtacatagatatcattcgacacggaacaaacagatggggatcatcatcttgtatttatgttcaactatggaatttaaaatggttttttcagtggttagtgctaattactttattttgttggtaaagatgaggaacactttagtcaatattactatgttaaactgaagtgtaatacatgagtggtgcactggttacggacttaggtaaacctgttttaaatgttgtttacagaacatggttcaagaacacattttcgtaagaagtgtataccattttcctgcatggtcatggtaaggaaagttgttcccaagaaatgacttctcatccagccattcattttccattgtagaccttaggctttggtctttaagatttttactagttcaacctgttcatcatgtttatggcagctgattgattttgtataacgatattgtttgtttccccgcctcttcaatgtaggcacctcatactgaattttgtttgattattaccttaccattccatggcgagttgtggacgtatccgttttgtctattaaccgtactatccacctttcatgtacttacctgtgtaagaaaattgataaaaatgttgtgctggtcttagg

SEQ ID NO: 110494 - DNA, 585 bp, Aquilegia coerulea
  Intron number 1 from transcript AcoGoldSmith_v1.024991m (l ocus AcoGoldSmith_v1.024991m.g) derived from phytozome v7. 0 (chr-ID scaffold_19; pos 1354067 to 1354651 reverse stra nd)
ggcaggtaaggttttctcttgtgttaagtctcacagacaacttttccttcaccaccatactctcactcttcctctttatttcaactccctctctatttttctcaacaccatttcttacttttgatcttggtttcagatccttttattcatcaactaacactaccctttttgctgatcagatgaagcaaagataagttaccacttaaatccaaaatactgtaaggtgcttctttatttagatttcaatacttttgtagatttttttttcactgttttcatcaatgggttttttttaattttgaagtttaaaactccccaagaagaatttttctttttttctttcatcaacaattgtaatggaaagcaatggtttgctacccaatttgacttgtggaatgattagtttagatatacctttgcaacctcataatacccaacatcattcaagtcatattcctaacaactctagttctcaccatcaacaatatccacagcacaaccaaccaatgctagctttcacttctcatgatcctcaatgtgttaaacaaagtatttacccaacttaccccaccacgaaaggcaaac

SEQ ID NO: 110495 - DNA, 534 bp, Aquilegia coerulea
  Intron number 1 from transcript AcoGoldSmith_v1.015652m (l ocus AcoGoldSmith_v1.015652m.g) derived from phytozome v7. 0 (chr-ID scaffold_34; pos 1953620 to 1954153 reverse stra nd)
gaaggcttgttcatttattgtgggtaagctatcgatctctctagctacatcaacattacttttcacaccaatatatataatcttgtgtcacttctatagctaatttctccataatgaagaacaccatggctactatatatgaaatgatatagctcacttttgaatactttagatttactctacttatgcacttgatcgagaagattttgtaccctgtatttgaaaacttctaagttcaatatgcctgtttgcctagtatactcgcacataattaacttcatctgataagccacaccatatattgttcaatttgtactgcaaggctttgcttggtgtacagcaagcctggccattgtatacattatccacttgtaaatatcttatacatatatgcaatacttttctagtattcaattaacagttcttctgtaaagtttcgtaattgtgaaaatggacaacaactatatcgtatttgattcatttcacttaattaggaatacttttgtggtgtttttttttctccatcaacaggtt

SEQ ID NO: 110496 - DNA, 848 bp, Aquilegia coerulea
  Intron number 1 from transcript AcoGoldSmith_v1.017443m (l ocus AcoGoldSmith_v1.017443m.g) derived from phytozome v7. 0 (chr-ID scaffold_26; pos 1892420 to 1893267 reverse stra nd)
cctgaagtacactatcaaaaatgagtagatagttaaaatgtgaaagtcatcatatttgtgtgtaccaaagctggcagattggcttttccttctgtatgtgcctgctcattaatatgaaagggttgtgaactcttaggtcttgaaggggaaggctttgttaaaagaaaatcaagcgtttgggaattcaattgcttcagatatcatggtactcactccattttacatgtctacatccttttggttttccttgatattatgtccttttgggcctgttgagaaatgcacttaatagtttgtacagaaacattctggctgatggagttcaagcctggcagtgttttaagattcttcatctaagtgacaaactgcattattaagcgaacagagagttaggaagggcacgatctgttcctttaacttccattcccgagagtatggtcttgttatactttttgagtgcatcgtggacaacctatatattatgagactgtatcatgcttggtatggattttcagtactggtaccgtcatatatcggaagatattttggatgagactaaaaaggattactttgtatctttccctcaagagttggttattcggacttccaagtttcttgtagttttgattacgtaatattcccacaaacggtttcctccattagtgattaagttcttccttgtgcaggaccttattatggcagggagaaaccgagcccctcgttatactgcaagcaatggtccccgaggtttccgtgatggtcctagacctgttatgacacaaggatctagaccattacctcttcaccctgcattgctggaggaggagctggaaatacgacgggaagac

SEQ ID NO: 110497 - DNA, 1001 bp, Aquilegia coerulea
  Intron number 3 from transcript AcoGoldSmith_v1.011603m (l ocus AcoGoldSmith_v1.011603m.g) derived from phytozome v7. 0 (chr-ID scaffold_16; pos 3202983 to 3203983 reverse stra nd)
aggtatttgctagcccatagatccatttgttcatttgtcaatgttttcaacttcaaatgatttgtcagaagttttgttacatatagataaatgggttgctactatactgttgcaatgctataatgttactagctaaattactatccttgaacaagttgaaatgttttctgtgagtgtgtgctttgtttgtaaatgaaaatctggtaaataaatagtattaaaccctttgttttaattagttaattgtgtaagaatgtgtaattcaggttttgtctcacaaagtgtaatagctattctcattgacatcaataaagaccatatacggtattgtgaggaaaagctttggtataacgatcagtacagtatttgttattcctttacatgttcttattgctgtatgtgattctcattaattagttttgtgctatctcgttgtccaaccatacacttaagcttgccttctatgctttatgaggatgcatttgctgtatagtctatcggaaattcaccattaaaaccacatgaaatgtgtcatatttattgaggaattaactgttgtggatcaatgagtatatttcatagttaaatgtgaaatttgggtatttaagtcattaccacaaggaaatgtaagaatgtaacaagtatatcaagatagatgaacactggaatctattgaaccttgcaaagagttgcatgcatcatcactgttttccttgtcattattataaccttgttattattgtattggtgatataacatggctagcttagttatctagctaggtcatcttcttcagtttatgcacttgttccttttcagttatagttttatatttggtttctttggatgtctggttgtctatgtatcgcctttttttttgctaaggccatgtatctcacatttttattagcgtcatgtctcaaacctttctaattaagatgtatttaatacggatttggatcacagatttttgagaagaatccaactaagatcaagaactt

SEQ ID NO: 110498 - DNA, 287 bp, Aquilegia coerulea
  Intron number 1 from transcript AcoGoldSmith_v1.011603m (l ocus AcoGoldSmith_v1.011603m.g) derived from phytozome v7. 0 (chr-ID scaffold_16; pos 3204216 to 3204502 reverse stra nd)
gtgactttcagggttcgttaatcttttacattcgtctctatttacttattcttctcgatttgtttttcatcatttctaaaaccccaaacttttcaaatcttcaatttttttttttttgtgattttgatttaaaattgaagtttttagatctttttaagaaatgggtttttcatttcaatcgaaaataaaaaatgggtatgttgcagattgtgatttaatggtgttttggattttttttttttttttttgcagtttcaccagtatcaggttgttgggagagctctccc

SEQ ID NO: 110499 - DNA, 788 bp, Aquilegia coerulea
  Intron number 2 from transcript AcoGoldSmith_v1.027140m (l ocus AcoGoldSmith_v1.027140m.g) derived from phytozome v7. 0 (chr-ID scaffold_7; pos 3152722 to 3153509 reverse stran d)
tgaacttaaaaagaaaaagattccctttatttgcagtaagttggattaattgatattttgttcagtttgatgcttatgcttatgtatattgggagtttgtatacattactgtgatataatagatagacctcgtaatgagtaatgacttcaaacatggcaactagaattatgctagaagacctgttttagtttgtaggactccaaacatgacaaacagataggaggttaatttgtagtggtgcttgaggttctccctcacgagtcacgcccccttttatttttagctgctgtaacttatccacaacaatcgataaaaggttttttcacctaaaaagacctttttttttttgtagtaatttgtaagaaaatgacaaggtttagcataagatataaatacttgaaattcgtattgatttgcaagaatcacctctattatattcaatttgttatgcatttcatctttccatcgaagttttcttattttggtttgtaatagtactctagtagtatgcagttatccacatgtattgaagttgtcaaacttatttgaactgaccaaatgcccaccataagatactacaattcgaaaaagcatttggacaagtgttgtgatctgttttaaaactaaaaaaacacatacaaaaaaaatgtagaatgaccaatatacctcaccaaatcttcactatgactcaatacccttgcgaaagaggggatttttctgtactgctcagtgagtgtattttctaccatacaacaactgtagtctggtctcaaattatttctaggaa

SEQ ID NO: 110500 - DNA, 297 bp, Aquilegia coerulea
  Intron number 1 from transcript AcoGoldSmith_v1.022609m (l ocus AcoGoldSmith_v1.022609m.g) derived from phytozome v7. 0 (chr-ID scaffold_13; pos 5358384 to 5358680)
acaacggaattacaggtcattcatactaccattttacacgtcaaatagttcattcatactagaaagaataatgccaatctgttatttataagataagattaagtagtttttttctagctagtgatatctcaccttatcctgaggaaaactttgcttcgtagcacttgaaatcagatcaatcttaagcaatcaaatgaagatcaaacttggaatcattgttgttgttgttcaattattttttgagatatcatggaattaaaatgtgtgtggctataatgtgaaggtggtgtgacatcc

SEQ ID NO: 110501 - DNA, 389 bp, Aquilegia coerulea
  Intron number 1 from transcript AcoGoldSmith_v1.003314m (l ocus AcoGoldSmith_v1.003314m.g) derived from phytozome v7. 0 (chr-ID scaffold_2; pos 6091014 to 6091402)
ttagaggtaatggattgctttccaagatttttatttatatgcaatttaagcttgaagaaagtttgaaatttttgtagtttattttatgcatttcagccttttcacattgaaagagtttatgcttgaataaaatttggattttattgttttccagttctttttactgtagtcatattataaactattggcaaccatgagtgttttgaggtgttttgcataaggctccagctatagctcagaaaaaattgaaggtttacataagcattaaattagctgcaaaagtaaatttttatctggctttttgtttgattatatttataagatcgttttgtgttttggttatatgttctgcaggtggaaaaggaagaagccgaacttatttttgacca

SEQ ID NO: 110502 - DNA, 833 bp, Aquilegia coerulea
  Intron number 1 from transcript AcoGoldSmith_v1.026159m (l ocus AcoGoldSmith_v1.026159m.g) derived from phytozome v7. 0 (chr-ID scaffold_3; pos 6813168 to 6814000)
caaaacttaaagtgagtatgaactcttttgtcacaatacaaatgcattaaaagctgttttagttaaaatttaagggcagagaaaaattcacttcaggattgtaatgatgtaagagaccatacatattatgtgccatcaaatggtcttgtgttttactgttttagtcatcatgtattgtacaaaaactcatttttgaatagtggtgtagttgttttccacgtggtagcttcttttacaacattttattatcatggtttgttatacagcatatcgaaaaagaaaaggaactctattataacttgtgcacaactgaatacgtaattattattgtacctttgaagcttgttataaaaatgtcttaaatttacagaaagttgcggctgcatctggtgatatgaggaaagccctatgtgtttgcaggtcggtatcaaatatcaatgcttaattgggttgcaccaaactttatttttatattgcagaccatggttttcatatagcttgctcttgtttggattatatacatccaaaagtacaatttgtagacaagctagtgtcatctattatcaaataatcttctaatccttaaccatataattatgtgttgttaaataatcacgagaaaaatttgaagtggtaagtagtactgtcagtctgtcacagagctactggcgaatatataattgcaataagcacctgaagcttccccgattatctatgtccttgccttgaaagaatcatatttattgtggtaaatctattgtaatttgaacagctagaacccagtgttatcggaaaattgcacgttgacacttctttgttttattcattttcag

SEQ ID NO: 110503 - DNA, 896 bp, Aquilegia coerulea
  Intron number 1 from transcript AcoGoldSmith_v1.012826m (l ocus AcoGoldSmith_v1.012826m.g) derived from phytozome v7. 0 (chr-ID scaffold_68; pos 214138 to 215033)
ttccaaatcggatatagttggtgctgtatttgcaggtatgtactcctttctccttttctattgaaattttgtacgagttcatgctagctttggttttctctgaactcactcatttgtgctcacaagtgttcgtagaggagataaatagtttagtgacttagcttgtgtcttcgcaattgacttcgaaatctggacattattccaggctggtattatctccccttcatctttctgagttccttcaccttcatcaacccgagtctcaaatctgaaacagaactttttactggcgattagcatcatcatacaagacaggagggcaaaatcgaaaagaaagtctatgcagacatgagctaatatgatttaggaaagaacagagtatttgaccataatctacagagtatttttttcttcttggaattcaatcacctgttttgtgattgaatcaaaacttaatgtatacataaagaaaaaaaaaataaaatcttatttcaagtcacaacgtccataaatttgttgaaatggtttactccaaaggtagttagaccaaccaatcatgataaacattctaaggatttaaaaactcaatcgtaaagtcgtaattgttttatcattttgaggtgaaaagagagagagagagagagagagagagaggggtttatatattcagacctataggcaatagccaacaccaaacttgaaaagaattccaaagacaatttagacaaataatatatcctaatgaatttaattgtacattactacatatttgatttttcaaagagtatacacgcatatggattatgagatagtaactttgaagtgatcaaaagattggtttatgatctttgtaccgggaaaaatacattgacccaatttctttctgtgctgcagtt

SEQ ID NO: 110504 - DNA, 286 bp, Aquilegia coerulea
  Intron number 3 from transcript AcoGoldSmith_v1.002553m (l ocus AcoGoldSmith_v1.002553m.g) derived from phytozome v7. 0 (chr-ID scaffold_26; pos 1702969 to 1703254 reverse stra nd)
tcaatatttgaggatttaacacagggtatgtgtatatctgtttggttgtgtgtaaattttcctcccagctgtttattgatgtcactgttttatcatatatttgaaccctgggatcagattttttttatgcttccctgctacttacaatttttttttcccatatattagtgtcaccttttgtttatgtcatcctttcattatcttaagactttgagtcttgttgtaacccgtctctatcttctgtattttagatcaagactctgttcgtctattggctgttgagggt

SEQ ID NO: 110505 - DNA, 540 bp, Aquilegia coerulea
  Intron number 1 from transcript AcoGoldSmith_v1.009399m (l ocus AcoGoldSmith_v1.009399m.g) derived from phytozome v7. 0 (chr-ID scaffold_58; pos 234009 to 234548 reverse strand )
tctagttccactggtaatttttctatctctttcgcttaggatatcgaaatcaatttccttcatccttaagttctagggtttatgtaatttctcgagcttttttttttttttttttttttaatgccccatcgtcaaaaagaattgctattgatttcagattaattgtgtgaattaggtacaaactactttagggtgttttcacctctttggttcttcttttattcagattgattatgggattggtttcacatccgaataataattgcttattgttatatgattcgtttctaggttttaagccaagaattattaaaacaacaacttaacttaatttctatggatggatgtgaatacaatttaatggttttgtatggaattcatgggaactcacttttatactttagattatattctaactacaaaaacaaatacaacacctatacatcaaacaccatcctactatatgcttcatcttatgatagataaacattgacttctgatgtttgcgtttttttaaaattttgaatcccattgcaggta

SEQ ID NO: 110506 - DNA, 635 bp, Aquilegia coerulea
  Intron number 2 from transcript AcoGoldSmith_v1.010816m (l ocus AcoGoldSmith_v1.010816m.g) derived from phytozome v7. 0 (chr-ID scaffold_3; pos 8073625 to 8074259)
tgttaccattattgtttttgatattgaaaccaccggtctgagcagagaacttgaaagaatcattgaaattgctctgcgagatcttaatggaggtgagaacagtacattccagaccctagtaaatcctgaacgttatgtgtcaaaccattatctccatgggataacaactaacatggtgagcgggcccagtgtccccaggtatgtcattactaaaagttgatatgattctttcagaagttatagtgaaaactgttgagttggcttgtgctttgtcttattgttctgaacttttcttgtgtaggtttaaagatttgcttccaatcttattggattacgtccaaagccgccatattcccaatacgcctattctatttgtctctcacaatgctcgtacttttgatgtgccttttttgataaatgagtttagccgctgctctgaagaaatcccttcagattggcgatttcttgacacactctctcttgctcgtgatttggctaaatcagaaggttagtttctctcactgtcgaagcttaccattaaaaatttgatacacagacaagacaatggtcttatgatattcaatcttatgctattaataggtggaaaagatttgcctggaaaatccttgcaaact

SEQ ID NO: 110507 - DNA, 745 bp, Aquilegia coerulea
  Intron number 1 from transcript AcoGoldSmith_v1.008008m (l ocus AcoGoldSmith_v1.008008m.g) derived from phytozome v7. 0 (chr-ID scaffold_16; pos 3941025 to 3941769)
gctaacaaaggtatctgcttggtaagtacgaatataaatcaactatcactagacactaggttcattaatacttaaaaaatatttactgaaatttgatttgtgtaattttttagcaaatgatcgcaggtgcaaccgataccacaacaattaccctgacatgggcactttctttactactgaacaatcaacatactttgaagaaggcccaagaagaaatcgacaccattgttggaaaagatagacaagtaaatgaactagacatagagaaactagtctacctccaagcaattgtcaaagaaacattgcgtctctacccagctgcgcccctgtctgcacaacatgaggcaatggaagactgcactgtggctggctaccatgttcctgctggcacgcgtttgataacaaatctgtggaaaatacaacaagatccacacatatggtctaacccaagtgagtttaaaccagagagatttctcactacccaagcaaatgtggatgttagaggtcaacattttgagtacattccttttggctcaggaagacgctcgtgcccaggaatctcatttggccttcaagttatacacttgacattagcgcgtttactgcaaagctttgatttcaagacctcattggatgcattagtggatatgacagagagcccaggactaaccaatatcaaagcaactcctcttgatgttctaatcaccccccgtctccctgcagatctatattaatctgtgctttg

SEQ ID NO: 110508 - DNA, 1002 bp, Aquilegia coerulea
  Intron number 1 from transcript AcoGoldSmith_v1.007168m (l ocus AcoGoldSmith_v1.007168m.g) derived from phytozome v7. 0 (chr-ID scaffold_39; pos 292090 to 293091)
gaaaggcttggtaaagatcatccggaaataacaaagtaaggataatccttcttgttttatttacatttgatgattggaatggttgttgaagtttttcggttagcaatagatttgcttattcagtgttatatatagatttttcctgaaaactataacagtgaatccaccaatgtctgacaagaatttataagtctttgaataagaacatagttgacagttacgactccattagatcttaatctcaactgtagaattcatccaataacttttatcgaccaaaacaaactgtgtttattactatgtcgtaagttcaaaattagtttgcagtttcacgtacatatgttgtcaaaaacagatgatcattggaaatcttcattaggaagaatgatgcaacaaacaaagatgtgaaacaacacgattcattcttcatctgaagctaggagaaatgagagagggagagcggaggtttccaccagtgttccagtagtgaggtttacatctgacatatcttctcaatatttggttatgagattctgcttctcttatagcttctgaaaatttgggccaacccgcgaacagccttttagagcatttatattaccaggaaatggagaaatagaggccagtaagtcatgagactcgtccttgcctctcgtgattaaggaattgccctgagaaaagacagcacataaacttaacactggtatgtagtggtttggtccacactaagtagagaaagagtaagagcaaccttactcagatttatagtcccatatccctgtccctgcactgagtctcgtggtgattctagctgttgacagttattgtattagtatcattcttaatattggttcatttttgttttggaatatgaatagagcttacttcctttgtttccatcggtgtctcttttttacatgtttaagcaaatcattgagttcctgtccttttaatctcttactttttgcagctgcctgaaactaacgaatgattgctttgcag

SEQ ID NO: 110509 - DNA, 752 bp, Aquilegia coerulea
  Intron number 1 from transcript AcoGoldSmith_v1.010911m (l ocus AcoGoldSmith_v1.010911m.g) derived from phytozome v7. 0 (chr-ID scaffold_36; pos 11797 to 12548)
tctctttgttgtctctctcatttggattgtttcaggtaattttgtttacttttgctataatgtgcttgattttttttcgatttatgattagagaacagaaatccataagaatgtggtgtgggggtttaggttactattattgtcaattttaaaactttgcaacttcacccatttaactctcattacttaggaaattaattatattttgacaaggcaatttttgcgcactccttattttcacatttagaagattttcatacacgtcttttgtaaattgaaaaaaataaataagtgtgggctgtttggcgtgcactgcagttatttccatgatgaactgatgatattattttttgggtatattatataatgtgtgttacccatgtagttcaaccctatcaatattattttaagcaatatcctttataattctattttccaatagttgaatcaaatgcttaatgtttatgatctgttgtagtcttgtttcgtttcttcacttttgacacttgttacccgcactgcttattttagagtgaagcggatggtatagatttaacttctcctagattaagttttactttacctgaagcttgaatgtatcttttttctttttcgaattctgactttttgtttgatttatataattttgtttgttgtcattgtggtattaatattaagtttgtaatactttgatttctggttcatgaatttaattaggtcgttttcctaaaatatccaagattgatagattg

SEQ ID NO: 110510 - DNA, 158 bp, Aquilegia coerulea
  Intron number 1 from transcript AcoGoldSmith_v1.019715m (l ocus AcoGoldSmith_v1.019715m.g) derived from phytozome v7. 0 (chr-ID scaffold_3; pos 9022535 to 9022692 reverse stran d)
aactccaacttctgttattggacttgctggacctggtaaatatttaattatttattttataatttttgtttaattaagttttaattattgggaatttagaagaaaaaataatattgaatttgatttgtgtttttcaggggctgctgaagttataccat

SEQ ID NO: 110511 - DNA, 546 bp, Aquilegia coerulea
  Intron number 1 from transcript AcoGoldSmith_v1.008656m (l ocus AcoGoldSmith_v1.008656m.g) derived from phytozome v7. 0 (chr-ID scaffold_34; pos 1568907 to 1569452)
tcgtatcttacgcattgttggaaaatacttcccaggttttttttcttcttcttcttcttcatctctactttgtatagattgtttgctttctttttagttcaatttgagttttctttgcgaaagtttgatcgaaactttttgaaattattgagggttttaagaaattggggtttggatttaaatttgagaattaagaaatttaacttttggggttttgtagtgaagtgtttttcattgttaaatttggcttgaaagtttgaaactttgggcgttttcttaaattaattgttgtcagttgtgtttcaactgctaattttcttaatagcataattaatttcagctttgctctgagaatttaacccgaagttatgaaatttagggtttctgttttgaagtacttctcatgaaactgctgtctgcattatctagctctagttgtgaaccttgtatatttgttgcgaaccttcatccaataagctgatgcaaatttgtgctgtttactgatatccagctcctgtaataagtgccgaacggttgaagaggtat

SEQ ID NO: 110512 - DNA, 486 bp, Aquilegia coerulea
  Intron number 1 from transcript AcoGoldSmith_v1.004954m (l ocus AcoGoldSmith_v1.004954m.g) derived from phytozome v7. 0 (chr-ID scaffold_58; pos 510602 to 511087)
ggcgtacattaaagcaagggtgtgtttggctgaaggttttacaaacaatgtatttttacctttttagagtagacttgatggactatatgatccagagtgagttgtttcgtatctcgaggtgaaattgacggtaatatataacaggaatagtgtttattaaggttgacgagaaagaagagatgcttggggagaaagattgtcgttattagtagacggaatatttattaatttaattaatttgtgattaatgacggtggtggtttcggtatctttgttttgttatgtgggacccagttacattttttccaagtacatggactacttggatttgggcttaagcatgagatttcaatcaaaagcccaaggttagtttggtcaaaacatcgggcggagaatctaatgagaccgaaggagtcgttggctgttcaactaaaaatcataagtgtgacagaaacacacactctctctaaacttccaaaactccgg

SEQ ID NO: 110513 - DNA, 614 bp, Aquilegia coerulea
  Intron number 2 from transcript AcoGoldSmith_v1.008757m (l ocus AcoGoldSmith_v1.008741m.g) derived from phytozome v7. 0 (chr-ID scaffold_2; pos 7007154 to 7007767)
caaagtcactcgtctgaggtatatttgtttttatgttattttttgtgattttctcagtgaatgaatatggtggtttgatcaattaaattgtttgggtgacttaaggtgatattcaacttttttatgggaaagatttactagaaaggttctattaggtatgaccagaaagtgcgcattcaaaacatgataaatccttcagaagtaatttctatttaatgatcaatggataatttcagtttaagtaaattttgcaagtgaaatgaattatatgttgtttttgcttgtaaagatataaaatttcagtcctttttgggtctttggtggcagtgtcttcactggatgaattgtatacgctctgaccctgacacaatcatttatattctttccatttcaatgattgtaaagatcagcataaatatatacagtatcataaagggtgcgattcttatttgttcttaaattttcatatactgtgttaacaagtaccatgttatggtaacattggtacttgggcaattagtttttcttgggcaagcaccatgtcatttgttctcggtcaatatgtgcatgttttgaatggaaatgatcttgcagattataaggttttcacaaaa

SEQ ID NO: 110514 - DNA, 1062 bp, Aquilegia coerulea
  Intron number 2 from transcript AcoGoldSmith_v1.004069m (l ocus AcoGoldSmith_v1.004069m.g) derived from phytozome v7. 0 (chr-ID scaffold_91; pos 203208 to 204269)
aagcttccgatcttgacaaagaagagagacctgaagtaaatttctctttctctatattgtttgtatttgagattataatggttaatgtgcatttgatctctgatttgaagttctgttcaattttttacttgataatgatgttttaagctttgttgagttgttatttgctaatgttgatgattatgttatgctgatttcggaatgctgttggcctagatccgtgttgtaaatttctatggagttgttatatgttaggttgctcacttcacttgttatatttagttagagatatatgatggattttacattttgcacaatcttagattataattattagtgagcgattgatctctgatctgaagttctgttcaattttttacttgatcatgatgtattaagctttgttgagttgttattcgttaatgttgatgattatgttatgctgatttcggaatgctgttggcctagatctatgttataaattaacatggagtcgttagtttgctcacttgttatatttagttagagatatatgatggattttacattttgcacaatgttggtgatggatattgctattataaacttttttgcattaaaagaagtttatatatatattttctgaggctggggattctagctggcttgacttgttttgacttaatgttgaacattttgtcaaataattatgttctattcaacttgtctaaatgccttgtgaagatgcatagatgctcaacatacaaacactggaatgtcccaacgtatatctttagttgaaatttgttatgtatccatctttagttgattttagactgaaatttatacttgccgtactcggatatgcaatatcgctagttgagcttggcaaaagttacttttggtaaacctgtctctacttgtaggctacagcctaacaagagctcaagttgatccttttcatatgacttatccttggtcaaatctggaattgaattggtaccaatgttctttctaagtttctaaactggattatatttttgcacaggtactctctttactcccacctttcaaaggaaagtc

SEQ ID NO: 110515 - DNA, 528 bp, Aquilegia coerulea
  Intron number 1 from transcript AcoGoldSmith_v1.001706m (l ocus AcoGoldSmith_v1.001706m.g) derived from phytozome v7. 0 (chr-ID scaffold_56; pos 759510 to 760037)
tcttctcttcctctcccacttacagattctttgaggtaaaattttagaccttgtttggctattttatctatatatttgaattttattggaaaaagaccaaaaaagctattaaaattgattcttctgattacttgaaactgaaataagttgcaatttgtgtacatttatttaaaatggtggattatttaaacttttaattttcatggaaaaaagtgctgaatttacctgaagtaacttacttcaagtaagtaaagttgggagcaagtttcaaacaagtaatacagacccactttttttggtttgtttcaaatgtttagaaaaaagagatgaacaattgaagcattgaataattagaaatgaaattacactcaaaatgaactaattttcaggatttgcgataagttttatttgaaaataagtaaaatatcatttacatactctagacagaatagcattacttgatcaatacaacgcaattttacaatatgttctgttacttttgaatatgaagcaggggtaatactaagg

SEQ ID NO: 110516 - DNA, 443 bp, Aquilegia coerulea
  Intron number 2 from transcript AcoGoldSmith_v1.001706m (l ocus AcoGoldSmith_v1.001706m.g) derived from phytozome v7. 0 (chr-ID scaffold_56; pos 760212 to 760654)
catcccgtgaagagaaagtcaccagtcttaaaactgtgagtttttatatcatggtggttccttctttcgttatttttgtttttgttgttaggaagtctttttttacttaaggggtacgcgtagatcactgaagttttgtgttgagttttatgtatgacacgggagtgccctgcagactgttgtaggcttttgttgtaggaagtttcatagaaaccgtctaatgagtacttttgtttggttgttttcttatcacgtaaaatagaactcctaaatcttcagttggtcagctagtatttcatgaaataggctatatccatgcatgaatgaatatggatttgaaatatggattgatgcatcacaatatcgtagatgtggctattgcaagctttttttattactctatcttggtttgagacttagttcactcctgcagggcttggtac

SEQ ID NO: 110517 - DNA, 556 bp, Aquilegia coerulea
  Intron number 1 from transcript AcoGoldSmith_v1.005160m (l ocus AcoGoldSmith_v1.005160m.g) derived from phytozome v7. 0 (chr-ID scaffold_16; pos 1991152 to 1991707)
aattgcttacactacaagcaggggagcgcctatttgtatgtgtttcagtgctatcatgatcataacttgcttgtgatcaattatagtaaatgattttggaatgatatagttcgacaatacatgtttattttcattatatttttctttgatttgtggattagtgtgacggcattcctcctagatcaacacagcaaaccaaatacatacaaagactccttatacacgtctaagctatgaagacctttagcaaatgagatctagactatcttattaccaccaaatgattatgccatcagaattagaaaaatagcaatctcttcttttttccatgtaattgacataccatgaaaacatattttgcactccaagcacacgttgattttcctgtccaaatttctcgtgaacatgcttgcactgaaatattttttagcctgttttacattattttaggttcaacacattcaagtgcaatccaattctgaagcatttttgttatatgacatgccatcattctttggcaggaacttgcaagacagctacaagatcaagcaaattt

SEQ ID NO: 110518 - DNA, 954 bp, Aquilegia coerulea
  Intron number 2 from transcript AcoGoldSmith_v1.008553m (l ocus AcoGoldSmith_v1.008553m.g) derived from phytozome v7. 0 (chr-ID scaffold_26; pos 630931 to 631884 reverse strand )
tagaaagaagtcttcagtttgccgctcttgacgtaagttcttagctcatatattcagcaaatgcctattttttctaagtttccaagtagatatttatctcctgaataagaattgatatttttgtttaccttttgaaatagataagatgcttttcgttgatttcaaattgctttttttttttttttttttttttgagttccttttttctttagtcgctgggaacatgtttaaggttgtttctcttgaaaaggttgactttcctttttaattctatgatagtgcatctaagttactctttttccgtgttaatcgcgtttttgttagcataaggcattttctctcgctaagagcagaagctacagacaaccatcctctcatcagtcatcatacacattacacaatgaacatctgcttttagaaatacagaagcagataggaaaaatttttggctagattaaaagatacatttgagatttattaatttcttcttcttactattgttattatattttattctcttatttacatcaagacttatttgtatgaccaaagttactgagtattttgtaaatggtgttgctgtaaagcacttgaataatatcacccgacaattgatgattttctacttgactagggttcgcctaggtcagagagaatgatttggaatcctcgtcctttaaatgtactcgatcacctttacacgttacaaaattagaaacatccacagtccactgataaatcaccaattaattaaacgagaacatgcatggttgcatgcatgcaatcgtaacaccacctctctgtagacgatctggtctctttttccccaactagaggttgatttagtggttttgtggttaagaaatgatattttaatgacaagctgcttgatattgctattacctaacagatggctcactatttattgtatcataggcctcttctgctgaagaa

SEQ ID NO: 110519 - DNA, 639 bp, Aquilegia coerulea
  Intron number 1 from transcript AcoGoldSmith_v1.008553m (l ocus AcoGoldSmith_v1.008553m.g) derived from phytozome v7. 0 (chr-ID scaffold_26; pos 631957 to 632595 reverse strand )
ctggtggtcttcgcggttttggggcagcaaagcaggttttccttttaaatttattcgtttatgttttattggtacttcgtaattcatatactatagtatcaactatcaacgctttgatttgataaatgaatatgttaagtgtaaaatgttggcactatggctgcatgctttaaatttcatagcttaacaaggaattagaatgcatgatgaatttgattcataattgaagtatacataatgattatgcttcgttatgaataataatgtctatccgtcagcctatattgttgatttgttagattttatgacagaagattgaaggtgttagcttgctgatcattctgtatttgttgtatgaacgtctgtcaaggcccgtgaatcctgcttagtgcacaataaacttgttgtgcttttcttgggtgtttgcatagagttgtaactgcgtaacttccccatatttttaggatttagactcaacccttgtgatgcaaacataccctggctctatttgtcacatttattcagaatatttcttcaggatcatgattattcatgaatatagaaaatgctctttatcttttaagaatagctgctaaaagactaccatgatgtaggtaccttatcgacattacaccttgg

SEQ ID NO: 110520 - DNA, 239 bp, Aquilegia coerulea
  Intron number 1 from transcript AcoGoldSmith_v1.010562m (l ocus AcoGoldSmith_v1.010562m.g) derived from phytozome v7. 0 (chr-ID scaffold_44; pos 605593 to 605831 reverse strand )
ctttttcacttgatttctctcagaatttacctagggtttgttttcttctcttactttctaatcttttatcaaataatttgatttttttatttttgattttttgaagttaattgaaaaaaaataatatgtagattaagagaaataatagactaattgaataaatttgatatatgtttatgggaaaataatttgtacaatataatttttactgttcctgcagtacagaaagcagctgagtg

SEQ ID NO: 110521 - DNA, 565 bp, Aquilegia coerulea
  Intron number 1 from transcript AcoGoldSmith_v1.002367m (l ocus AcoGoldSmith_v1.002367m.g) derived from phytozome v7. 0 (chr-ID scaffold_93; pos 209920 to 210484)
tcccttctgaactaagttaaagccaacaaaaccaggtattttttttttcacttccttatagtctcttatttttattggttgtaatggagtttattttgattgagatctgattacactttttttttcccagtcatttatattggtttttgagaagtggtatttgattttaagtaaatatatgtgattttcttatagtgggggacttttggatcttttgtttttaatcttgggtagttaggatttttttggaatatttgaagaaatccatattatattgttttagtgatctttggggattcttcaaattatgttgtaagttttttgaatccaatttgttaactatatttttcttattaataatactatatgttttgaacttttgatgccttgatcatgtaatagtttcagctagttcattttgattatcaaattatttgcttcattttgatgttattgaagttgtaattgaagatcaagattttgcaagtgatgggtagattttttttatttttttattttttctgaatttggaatttgaaattattgcagatcatttcggttagta

SEQ ID NO: 110522 - DNA, 800 bp, Aquilegia coerulea
  Intron number 1 from transcript AcoGoldSmith_v1.001512m (l ocus AcoGoldSmith_v1.001512m.g) derived from phytozome v7. 0 (chr-ID scaffold_13; pos 784010 to 784809 reverse strand )
tttattaatcatcagtcaacattataaagtaaagggtaagtctatgtttatttatgaatatatgttttttttttttttttctatcttcgatttgatcaaacaggttttcaattgcacttaaaacaccccatttcttagtaataactgattgattagtgagttgttttagtgattagtggaaattctatgtgagttatttcaatttcaaaaactactgaattttcttcttcttttgtttgatgtttttattgtacaaagttaagaaattgaataaaatttgcaatcttgtcacagttttgaatccgatgatgattccaactatgtctgcctgataaatagattgcaattttagactttatgttaacatggaaaggaggggagttagatgtgatttgacgagtttagtattgggaacataatatgatcaaattattgttagttcaatggtgggcgagtggcaccaatgttttgattgagtttgtgtcattttcgacactaaaattagtggcaaggtttttttttttttataagaaaccgccatagtccataaacatcaggtttgatttatactttatgccaataaagtttgagaagtttgatttacaataagtacatcacagtaacttccgacacatgaagaatgttcccatctattctacaatttgagggaatcactgaattgaatcgagtattcttagggtttgtcatacttgcaggatcatgtcttgacattgtctctcttacttaaaatttggccctttgcaggtgttggtgaaagagtgatttgtttgtaaagcaag

SEQ ID NO: 110523 - DNA, 539 bp, Aquilegia coerulea
  Intron number 1 from transcript AcoGoldSmith_v1.010642m (l ocus AcoGoldSmith_v1.010642m.g) derived from phytozome v7. 0 (chr-ID scaffold_35; pos 2197730 to 2198268 reverse stra nd)
ctaagctcagtggaaggttcacccaaggaggtaaaccgttaacacactttttttctcttttgtgatttctatagactgttttcaagttatatttttttaagaatgtgacattgtttgaagaattgtggatcaaattgtcattatagtgctaaaaccccaataataaattgatcaaatttctgttgtctgtttttgggtaattgggtatgattgtcgatttacaataatgcaaaagatattgaagatttagggaaatgggtatttgggcattggtgttataactccatgttagttcgacgtattttgatttttcatggggaatctatttttcgtgactgattgttttcaagtaaaatatgcaagaataaggcacttattaatggaacccatatcatgatttttttttgtttggtatgtgggtcttgttcagtataaagaataggtgaatagttatatgacaatgtgtgctcttggcaatcgttaatgaagctctattcagaatttgaagtttatacgtttgtggtattcattttcaggtt

SEQ ID NO: 110524 - DNA, 650 bp, Aquilegia coerulea
  Intron number 1 from transcript AcoGoldSmith_v1.012006m (l ocus AcoGoldSmith_v1.012006m.g) derived from phytozome v7. 0 (chr-ID scaffold_7; pos 6675831 to 6676480)
attgtcaactcgaaaacatcacttacacttctaaggtttgtgaaggattttgttttgtgatttggggttttttcgtgatttaaaccctaaatacatagatctatatgctgctaaccctaaataatgaatttgatgaagttatattgacattgtttatctttaatacttgaatttgatgcattgttgttgataaatctttatacttgattgtgatgaagggaaattagttttgaagatttgtttttatgattttgggattatttgattgggtttgttatatgagaaattttgctatgtaagattcacctatcttttgtgggaagtaataagtagtagatgctggatggatattgtgggaactagtaaatgggaataagtgattatgggaattgtatatctgtaaaagaatactaatagacatgaattagttataagaaacactgataagtgatatcttctgaatttgttgttgtgatggtagatgtaaaattaatatattctgtttcttaaaaaaatggtggaaatagcaaaatagttagcattgtgttgaaatgaaaaccattaaattagtgttgaaatgtacaactattctgcaatttatttatttttaatgtggttatgactgactctacatatctactttttgaagg

SEQ ID NO: 110525 - DNA, 783 bp, Aquilegia coerulea
  Intron number 2 from transcript AcoGoldSmith_v1.009522m (l ocus AcoGoldSmith_v1.009522m.g) derived from phytozome v7. 0 (chr-ID scaffold_2; pos 4088882 to 4089664)
aacaacttgacgtacgctgtgaaacaaaaaccaaggttcgtagaaattattacctttgttttcggctgatgaaattgaagtttcgtcttatctggttcactatctcagaaacacagttgtccttgaaaagtgaaaatcggtttgggaaagaatgtctctgtcatatagcttcatatcaatggttgttgctccaagtaaataccacaaatgaatatgaagttaaaagaaaaacagaaaagaagatatagccaaatgggcaagtgattgattactaacagtgaactatttgtattgtaagattctctacaatggtgttgtatatcaatgtatttgataaagagcctagaaacaccaaaagaaagtagttgatccatgcttattactttcaggttatcacttcttttttttatctaatttgactacactttatatgggaatacccctttgatttataaaatgttgtgcttatatggttatttgctaatcatgaagttcttgtcaagtggattatgaatttgtttagttcacatcccaggagagaccttgaaatcttcttaactcatagtaattaatttttttttttaaccaacatgtcctaatttagggattgttatcaatctgaataatcaataatttcccaatctgtccttttcattcgtacacatattgtgctgatcaatatcagaaacaggcattaatatatctcataaaaagttaaatttcagtacaatgcgatccttatttctccactaaggtaccaatcagtctgatggttgcaggata

SEQ ID NO: 110526 - DNA, 515 bp, Aquilegia coerulea
  Intron number 1 from transcript AcoGoldSmith_v1.001777m (l ocus AcoGoldSmith_v1.001777m.g) derived from phytozome v7. 0 (chr-ID scaffold_2; pos 10060204 to 10060718 reverse str and)
ctacgggtaccaggtacctctctctctctcttgatttttcatttttcttaaaagctgctagttgtttctctctctctctctctctctctctctatatatatatatatatatatcgagatttgatttcatatctgatgtattgaaagtggtgcgtgtatcagataggtttttttttttttttttttttttactggtttcgcatttcgcaattgcatctatggttacttggttagaaaggtttttcattattaaatttactcgttcctataatcttattgcattccagttattagctctcgtaatggatcccaatggcttttgtaattgcaacctggattttaaaagcttttggaatcgagatttgttgttgagtttatgttaataataattttgtgtgaactttccctgatttcaatttgggtcttttgaagaagatctgtgtatagttgacattattggtattgatatattgtcgtgcaggttctgtaattgaccacgttctactccatttgtat

SEQ ID NO: 110527 - DNA, 712 bp, Aquilegia coerulea
  Intron number 1 from transcript AcoGoldSmith_v1.024086m (l ocus AcoGoldSmith_v1.024086m.g) derived from phytozome v7. 0 (chr-ID scaffold_57; pos 779926 to 780637 reverse strand )
gctgctactacaagtttatacgccacaacaactatgtgagttaacctacctctatggtgtatattatttagcttagcatattttgtaaatagtaccactatgaattgaaattcactttgtctaagactggtgcccctgtttcgaacatgttcgcaattttccattttacatgatctgtctactttttacttttaggtatttagcttacggaaacaagttaagtttatttatctgtatctttatgtgagggaaagggtaggatatccatcttccagtgcctccctagtccctactgcgtcttctttgtttccttcctggtatccaggataagttgggtagagacacctctttctcttgtctttatgaaaactcaagtttaggcggtgtgaagacacattagattgtgatggaaaaaagttgattattagattaattgttgtaattgggaaaaagggtcttgtttgtctaatatttggattgcgaattattgatcacactgtttgtacttgaaccctaatgcgtcctttgaatattgttgatttgagagatatggtcattcaagcctcgagaattttaagcttagtgtttgaacaaaattatcaatgacaccataccacacactgttctagtggttccctaattgatttcctctaatactgtgcatattcatttgtacgcagtttaggacagcaaggaaataacctctctcaag

SEQ ID NO: 110528 - DNA, 611 bp, Aquilegia coerulea
  Intron number 1 from transcript AcoGoldSmith_v1.010770m (l ocus AcoGoldSmith_v1.010770m.g) derived from phytozome v7. 0 (chr-ID scaffold_48; pos 1586049 to 1586659)
gactcgagttttctggaattctcgcaaaagatctggtaatattattttcttgttatttctcaattcacctagctactgattacaacaactcagagatctgtatacttactcttcttcgaaagcttatatcattttcatttaatttatttattaacacacacacacaattaataagttgtatatatattaaagaagatgaaaattaatttgcactgacccaaacatatatagatcagttaaaggtttgcagactagacaaccctttgaatttaaataacataattccataatcatctctcaactctaaaaaaaaaaacaaactaattattaggaaaaaaaaaaggctatttgtctaatattgactaattcaattgtgtcagacaacagtccaaattaaaccttcatgctggcccggacagcttctatgaaatgaaaatatgaaatattgtattatgtgattgataataaatacttaggatcagtgatatgatgaccacctgggaagtcttgatatgattgataatgctgacaccagtaactgggattaggcatagattgtgagcagtgcttgatgatcatttcaactgaactagtactctttttgacagcca

SEQ ID NO: 110529 - DNA, 454 bp, Aquilegia coerulea
  Intron number 2 from transcript AcoGoldSmith_v1.017826m (l ocus AcoGoldSmith_v1.017826m.g) derived from phytozome v7. 0 (chr-ID scaffold_13; pos 667751 to 668204)
gaagtgtaatacttgctctcatttgtgctattttggtaagcatgaattaaccacaatatacaagcttgttcagtatatagaaatgaaagtacagtgcttcttgagtgtggtacatgaaaaaagagcataatagaagaaaatgtatagggaatggacccttcactagctatttgattagatgtctaagccattcaaatctggttgactatttacgtatgagatcctctgattggtagagttttaacagtgcttcccaagccccccctctcttcccttcaataaaaaaaagaaccaattttcattcaggtgattaaaaataggggtcatttttgttcaaacctggttgatgatgatgtgatacaattacttgcatcttattcattctttcttgtttttttttttgttttttttttttgcagattcacaacaagttattaacactattggttatcat

SEQ ID NO: 110530 - DNA, 929 bp, Aquilegia coerulea
  Intron number 1 from transcript AcoGoldSmith_v1.011686m (l ocus AcoGoldSmith_v1.011175m.g) derived from phytozome v7. 0 (chr-ID scaffold_3; pos 3007075 to 3008003 reverse stran d)
caatctctactagtaagtagtactaattgtaattctcttgtctttctgtttaccagttgtttagttttaattgcaatttcttagtataaacttttgtttttcttgttattgattttcagctttcgtacaaactatttccttatgattctacttgttcttggtatgttcaattattactactcccataaacccttattttcattttttccaatttatttaaattcttattaacaataattaaatgtaggaattgggtttttgaaaaggccacttgctgtagttgctgctattttaactgggataagtgttgcttttctcaacgacaggtaattggtcgattatatggcttggctatcttgctgagttaattgtttaattgagctattggggatcttggtgtagttgggttgtcataattttacaattagtgagtaattaggagatttttcatgaaataacatcttctcttttattattattatttatttttacccttactactgtattccatattcatgtcctttgaaagtttgaaataagtaccaagtaagtaagattacccatctcggatcaattcaacatacaaaatggataatatttttactaaacaaattagtacaatagagtgaacaacatacagtatctctaaaataaaagggaaaaccacaagatcaaatattatagtatatgaacttctgtcattttctattttttttttttttttgtttgaattactggaacacacctttgcaccatttttgagaaaacatgattatatgtataatgaatgcttcttgctattgcatagatttgtgttgttcaatctatattattttgttagactttgaatgcactatgaacctttttcacctcatatgtactgtatattggttctaaggattgtaattacagctttgcagtcactttta

SEQ ID NO: 110531 - DNA, 395 bp, Aquilegia coerulea
  Intron number 3 from transcript AcoGoldSmith_v1.026360m (l ocus AcoGoldSmith_v1.026360m.g) derived from phytozome v7. 0 (chr-ID scaffold_58; pos 983323 to 983717)
tcaacggcatcagctagctcaagtgttgtatttgggtgggttttaatttttctgttacatttacattgtgcagtgatcttctctaccctactgctgtgctcagtttccttgcactatagatataagaacaaatttgtccatgttctcagactacctccacagtaagtctggaagtgcattatatatgtgtaatggcaaaagatatactgcttaaactgtgaaaagattagaaatcccttatacgtgaatctgaggaaatcatatgccccaagggttgtgatctctgaaactttatttatttgagtattttttttttttttttttaagtatcaatacattaattaagcttttatgatctctcgataggtgtggtgtccaacagacgggaaatcttg

SEQ ID NO: 110532 - DNA, 595 bp, Aquilegia coerulea
  Intron number 3 from transcript AcoGoldSmith_v1.011776m (l ocus AcoGoldSmith_v1.011776m.g) derived from phytozome v7. 0 (chr-ID scaffold_2; pos 5222497 to 5223091 reverse stran d)
tttttgtacctaaagacgactggtttattacaaaggtaagtttcatatttcacttgccaatgaacttattacatacattaagttagaagccacttattcctacatagttgcatagttttggatgtctctagaacttgttcttgtacacctttactatgctatatctctaggaagtaggaacttagtgagctatcaatgtaaacattactgctgcaaaaggtagccacattctgaattcctctcacaggctttaattttgatattttactcaacagtaaaatgtattatggttataacataatggaggtaattttctttatagaagtagtagtaaactaagttgatattgagtataaggataaacaagttcttagcaaataagaaacatcgaactatgcgaattatgatatgtttgaaaaacataaatctgagataatcagttttctgttccacttcattgggaatgactgtaattactaaaaaaaacgtgtttttatgaagctttcattcttttgactgcttgctgagatttatattgtatctgattatcattaatatggaactttcagattccacttgagcgatatctaccaac

SEQ ID NO: 110533 - DNA, 965 bp, Aquilegia coerulea
  Intron number 3 from transcript AcoGoldSmith_v1.000904m (l ocus AcoGoldSmith_v1.000904m.g) derived from phytozome v7. 0 (chr-ID scaffold_58; pos 668062 to 669026)
tcaaggtgagcattaccaaactatctcagttagtattttgttgaaaaaaaatcatgttttgctggattataaaatgcagaggtgtgccattgcttatgtatccttttatcaaattgtccttaaatattcattcttcactggtcttcaaggtttaatgttttgtcttatatatatagactgttaaccatatatatgtcttatcttcagtaataactaataagttccataattgtagaagttttttctgaaaaatagtgttctggttagactaatagtttgtgtacatagataacaatcatgggtagttggtactgtctttccatcactatcaatgtccccctccatcctctcttatgtaatgaaatgccaatgatgctgctaattgttgcgtatatactctggtatgagaaatgttaaagagtaaaccttttaggggtgagcataagcttcatagttatagttgtataatttagcatcttattgcactttttactccctgtttctacccactcaaactacctttactattgtttgttgtttctaataacaaaacacagaagaaaatatcataaaacttctctctgagtaatagccacatttgatgtaatctgcacctcatcctgtttaccttgtcatcagttgattttttttctttttaagcataaattttcatggtatcctggcagttccgggatgtaagtacctagcctgactcaaacagtcacaccatagttgccacaaattgttatttccatcagtagtggccttcaatctgtaggattctcaattgttacctagtatcctactgaataatggtgacattcttattattttgggttgtacctgctaaactttagtatttctgtaacatattacgctagattataagaaaatacatatgactgttcctttctaatatacttatttcagggtgagaaaggagaacaagagtatattgcaaagat

SEQ ID NO: 110534 - DNA, 656 bp, Aquilegia coerulea
  Intron number 1 from transcript AcoGoldSmith_v1.022743m (l ocus AcoGoldSmith_v1.022743m.g) derived from phytozome v7. 0 (chr-ID scaffold_22; pos 1857961 to 1858616)
ctgagaatcttgaggaattgaccgtaggcgttctagtgtgcagaaattattattacaaattatgtactccacgccttcactgctatgtctctgataagaaagtagatcaaaaatattattatgctcctaatgttatgaagagtgtggagattctgcaaatgtgtaccagtttactcaaggtaagtttcacttctacactattgttttaagggtgttttctttattcagttatataaatatagaccattttctgtattgctattaaatcaatggtaacatatttaatcctatcatcacagagagttccgagactagggtacatatatccatttgaaaatttgcagatagtttcaatcattttggatctcaaagacaagatacaagtgcatatactttcacatgtattgctcaaattgtgtgtccaacttcagactttaaatattaaggtatctccactataactatatgactttgaattttttttttttccaaatgattttgtgattgcaacataaagattaagtcctttatgttgcgtttgcccttctcttatttggtttttgcatcatatttatcatttcagtgaactcgagctttagaaatatccatggtccagaaatctcaatatatttatcttctgtttttattgtagggag

SEQ ID NO: 110535 - DNA, 601 bp, Aquilegia coerulea
  Intron number 1 from transcript AcoGoldSmith_v1.026550m (l ocus AcoGoldSmith_v1.026550m.g) derived from phytozome v7. 0 (chr-ID scaffold_8; pos 3953751 to 3954351 reverse stran d)
cttcacaagctaggattgagtttttggcaaaatcagtaagtatactgtattagattaatattgtttttttagtttataattgtgttgcttttcatcataaaagagtttccaatttttctgtgtgttttccttatataactgggattgggattgggattgggattgggattgggatttaagaaaaggctataaaagtgctagccgtgtcttcattaattagcaagtagtagcaagcataaaagagctcaacaaggaagaagaaaggattgagttatattggcgacaatttgatcaagagaagacctatatatattatttgtgcctgaatgctctttaaatatatatatatatatatagtgtagtactctcttaaatactcttccttgctgtacttgcaaatcaaacctatatctcgcgatttttttaactgagttttgtcattgttttctgacagacaaaatggatataatttcccggtggatgatgtggttttctacacttttgggtaagctactaggtaaattatttactggaagcagactaatcaatagacatggccctaatgatgctttataccagaataaactttttcttctcccag

SEQ ID NO: 110536 - DNA, 902 bp, Aquilegia coerulea
  Intron number 1 from transcript AcoGoldSmith_v1.023727m (l ocus AcoGoldSmith_v1.023727m.g) derived from phytozome v7. 0 (chr-ID scaffold_55; pos 305391 to 306292 reverse strand )
gttcacacctgttggtgaggtatatcaaattatcaacttctcccctttttacaattaaattctaggatttgttaaaaattaaaaaaataaaaaaatttagggcgaattggtaattgtccaccggtttaaaaaaccaatttgcgattgcccactactttcaataaaattggagccccaccttttttgaattttcggaaggtcgaaccaccgataacttagtcaaactataatcttttacttaagtacccttacatttctctaagtacttgtttcgtaaataccacgttggcactgtttgacacatatgcaagtaaatgacttcatatcttattgtttagtaaaatcaagaaccaacgtgttaatctaacatgactcatgaagggtaatctaggaatattaaataaaataccacatcttgaccaaatcaacggtggtttgaccacctcaaagtgcaaaaagataggggtaatctccaattttgttgaaagtagtggataatcgtaaattggctttttaaaccagtggacaatcgttttattggcaatttagcttaaaagccaattggttagtgctttataatgtgaatcaaatttgtccacgaaatattcttctgagtaacttacctagttttagttatgtaggtgacacgaagaaaatcctaaaccagattgcattggtaataagggtacttaatatctaagttgaaaagttgaaaactttcacccaagcaattcacttgattgtgagcattgtggtgttttccctgtgcatatattgttatgttcggcattttgttgtttacttctttataattctgtctgctatttttaatttggtggattcaagaaatccaaaccagacatgctgaataaatgtgatatttcatttatacaggtcaaact

SEQ ID NO: 110537 - DNA, 801 bp, Aquilegia coerulea
  Intron number 2 from transcript AcoGoldSmith_v1.005601m (l ocus AcoGoldSmith_v1.005601m.g) derived from phytozome v7. 0 (chr-ID scaffold_61; pos 73497 to 74297)
ctggtggttctgaattacctattaaatcagctcaggtaattgatcaactatctttcaatttagagatctgatgattccaatttcttttcattttgaattagcttgatttactttgtttttatcaatttgaaagtgtttcctttcaattgagtttggaatgtagtggttatggtctcatggaagttgtttttgatccaatgtgatactaaaaattgttgttgatgcattgctttaacgaattttggtaactgttatatggttgatcttgagtaggtggtaactgatctggtttctttggaatgattttatgagtgttaccatcttaaaaaaaaaaaaaaaaagtaaaagaagtcatttgttaaacttggttgttgtgattttattaatatgaggttaaacatcccttcgtctttggggacatccagtaatattggaacattaaagagaagattagcatgatgtcattcacttttaatactatatgagtcttttgctaatcacaatgactttgaaaccaaaaacagaagaatttgtattatgcttcaatcacattgcttgtggcttacgaaagtatccattgtaggtaatcatatagaatcagattgtaggttatagacaagttattatccattaggaataggttgtatcttatattttagaaagtgtgctagttcaaatttatcgttgaaatttcattcaaagatcacacatattttttcttcaaaactttaaaagggtgtattttttgtcttgttcaatgccttaggtcacagagtctactgattttaacgaggtagcaaa

SEQ ID NO: 110538 - DNA, 479 bp, Aquilegia coerulea
  Intron number 3 from transcript AcoGoldSmith_v1.005332m (l ocus AcoGoldSmith_v1.005332m.g) derived from phytozome v7. 0 (chr-ID scaffold_58; pos 712015 to 712493)
ttcctttatctggtgaagccgttgataaggtttgttgccactttggatttttccattttccttttcaagttgccattgcaatgtcgtcttctgccttatgttgttttaaggggggtgttaatgttaatttcatgttatttaggacccgttcgtcaaaactcccgaaatgcgtttccttacttttagaaagtaagaaagtaggaagcttgttcggtaattaaaaaataaaatctaggaagtaattgacaaaaagtcaaaaaaggaattattggagaagttttcatttactactttctccttatgtagaaaacttcttttcggaaaactcctcctcatgtttttctacttttctagttgccgaacgtccccttagtgcttgcacagttatgagttttttgtagatcttttcttaggcgaccgtattgactcttgtggattatccaggagtgcaagcaagttgaaaagggtggtaaatttta

SEQ ID NO: 110539 - DNA, 738 bp, Aquilegia coerulea
  Intron number 1 from transcript AcoGoldSmith_v1.017453m (l ocus AcoGoldSmith_v1.017453m.g) derived from phytozome v7. 0 (chr-ID scaffold_35; pos 1518128 to 1518865)
acgttctcaaaacgttcaaggagacttctttgtaggtaagtcttaagtttggattagtgtttatggttattattaatcatcaaacctgcaaagttcccttattgggtttgtaaggaagttgcttataagataaaatatactacaatttcaaatggggtgatagtggttttgatagttaagatggtaaagtttgtagtagttgaatgtatagaacatgattcaagattctgctgcatgtatctatgttgaattaatggttttgctaaatttaggctctggggtgtgtttgtgctttgttcaacaagctagggagtagaatgtatcgttgatttagaatatcttagaaatggatatctcatatcacttcctcttcccgcagactatactgacatgcgattagctttagactatgagaacatgacacctcgacatccatcgtgtcaaccatagtgggtttattttgtatgcacagtttagatttgagttttgaccctcatgaaattgaaaagtaacacaaactgaaattggatttatcaaaacttgtctgtcacatttgggtagtgagtatgattttgcacattgggttacttctaatttccatgtcttatgtttggctgctatatatgcatacaaaattgttggtcttgggtaactggagatctatatatgttaactgcttacatagcagatgtttaagactgacgattttattggctttatcatctttgtagatcacac

SEQ ID NO: 110540 - DNA, 877 bp, Aquilegia coerulea
  Intron number 3 from transcript AcoGoldSmith_v1.019260m (l ocus AcoGoldSmith_v1.019260m.g) derived from phytozome v7. 0 (chr-ID scaffold_58; pos 812405 to 813281)
gttccgcaaagggaaagtgagtattattatttattccttttttcttttattaatattgaggagacttgtgattgtgatattcacagtgtgatccccattacatcatacaggaacaggatatggaagataaattatgcccaataagttttagtttaaacagtagtgtagtctaactatttctgtacgttagatgttattctatgccgataacttgaacgactacagtagaagtctaaagaatttttaaggcttcaaattaccataaactgaaaattatgaaggaaaccctttggagggtgaaatatgcaatgccgatctcgtgcctccccttgtccccaaattgttggaattcaaatgagtccaatatttaattcaatcattgatattgtcaaatgttgtgtagagatgcttacatgcctccttacattagtagatatttttacgatctatgtctatcatcatggggagatcgtcttcgcaatttttcttgttcaaggagtcagagtggttataactaatagttgttagtcagaatgggatagatagaaaaaaaatcatgagaagtcccagtaaagctaaatataaaaagttagttcaaacataaaagttggaactcagggttaaaacatccaccttagttggtgactaacggcgaaatctgtttgaggtgtaacagaagttgcagtgcctttttgtttttctgaatctgttccttgtcttgactattgtttgatattaactacattgtatctaaccacttctgtcaaaggagaaaattggatccttgcttgacattgcatcttattgtctaaatagattttttttttcttaataatgcaaaggtgaaagcttatcctgtgggtggcactggtcagaa

SEQ ID NO: 110541 - DNA, 742 bp, Aquilegia coerulea
  Intron number 1 from transcript AcoGoldSmith_v1.000799m (l ocus AcoGoldSmith_v1.000799m.g) derived from phytozome v7. 0 (chr-ID scaffold_2; pos 9296818 to 9297559)
gacaaagttcattcttctcttcttctgaataggtgaacttcttacttcttctcttttcttacttaaaatgaacttctatttttttttttttttttaagtaatttggtgaaaaactctttgaacttcttcttgtgtttagtgtactttctttacatgcaacaacttgattcttactaaataattaggtttcttattgatttatgagttctgttaactgatcaaagtcttgatcgcatctctattaagtgatcaaaaccttgatcgtacgattgtgtactgtaaattgggattagttgaagcattattagtgtgcagagtgtagatcataagttaggatttgaaggcaacgtttggattgttggaaaatttcattgtctaactttaatgaagtttgtctttttcctgcattttcctgtaaatgtgagatttttaatgtttagtactttgtagctccttatttatggaataggtgtgagcaaagaaggatcattgattttttttttttttttttttttttggtttttgcgatttaatgtgatgttttaataggaacctgcgagctcaattttattttattttttttctgaggtgtttgcatttttcttgctaataatataatatgctatttttgttcttttatgctctttaaaatcagacattattgtcctagataaactgtaattggaatattttcactttcttggtagcttacaacaggacctgattaacttcttgaaagaca

SEQ ID NO: 110542 - DNA, 241 bp, Aquilegia coerulea
  Intron number 4 from transcript AcoGoldSmith_v1.025339m (l ocus AcoGoldSmith_v1.025339m.g) derived from phytozome v7. 0 (chr-ID scaffold_13; pos 3069639 to 3069879)
ctaatttctctgggtgtaataagtaaggttcggttcctttgtttttttaatcttttgtcatgagtgaaagaaatgaagaaatgaaaaagaaaaatagctcatagttcaaagactaatataggcaaaccttccgcatttctaatcatgaatcgtactgattatatataaattggactgatttattcaatttgtgaaaatctgtgcagcaaaattgttggggctagatatttcaggtttgaca

SEQ ID NO: 110543 - DNA, 788 bp, Aquilegia coerulea
  Intron number 1 from transcript AcoGoldSmith_v1.005355m (l ocus AcoGoldSmith_v1.005355m.g) derived from phytozome v7. 0 (chr-ID scaffold_8; pos 4339905 to 4340692 reverse stran d)
ttgctgtttgttattctctttcaattctcttacaggtaagtaagcttacggttatctatcttcatcactcttctatatgtttagtttgttcatttctgataattagtgaattgtgatttaagattacttaattgttgatagggtttttgttattagggttttgaactgaaatgtgatttttctgatctagggtttttggtttttggtagattttgtgttttgagttagtattggtagtttataattgaggttgaagaactaaactgaagactagactacgatttgaatgaattggtttagttaagtagttagtaacttgtactgaattagttaagtaagacaagattataggtaaagtaggtgaagtttttgcttggcggtaattgctgggaattatggtgtgagaggaatggaagagtcttcaaggataaggttaatatggtctcactagtcattaatttgatcaactcacgatgcgttgcgtaatttaagtgatagagtaattttttctattacttgtttctaataaaagtatggtatgccaaactttgtttttatacatttcttgtgaatatgttgtatttttcccacttagtagctttatgaatttttgatagtttgtgtcatttatgatttgttattttaacttatagattgtgggcacagttataagttataacctaattacatctactttctgagattgttctggccttttaaaactgacagctgacaagttaaattttgttttaggataaaaagctgcttaaacctgcccagcgattgat

SEQ ID NO: 110544 - DNA, 600 bp, Aquilegia coerulea
  Intron number 2 from transcript AcoGoldSmith_v1.011672m (l ocus AcoGoldSmith_v1.011672m.g) derived from phytozome v7. 0 (chr-ID scaffold_22; pos 1551332 to 1551931)
atcctcacattgaatcatccaccaaaactctactggtaagtactaagatatatgatttcacatttttattaatgttttcaaattccaataaaaaaaattaaaatgtatacccaattatgtaagtagagtagagtgccatgtaacaaggaaacttacaatattttccgttaatacaagttgcctaacatatggttctcttgaaaagctcaaacactttgatacatgtctattcatacatttgatattgtataattccccatttaattaaaagaggggaattcaaaataatgggagatattggaaaaatactttataatgtctgtaaagaaaatcatgcatacacctaaagaggaattcatatttcttcactatatacacttatataactctcatattgcatttggaaaactagaagttatgtcgtcactcgtcagagatgtatcacaagctcacaattaccgtctttcagttcattgttcattgtcatagaaaactatgtttgaaacactttcttcaatataaatatttgaaagttatgagttgatgtattcatgtttaccaacaggttccaaagggacacgtttgggttcaaggggataa

SEQ ID NO: 110545 - DNA, 1000 bp, Aquilegia coerulea
  Intron number 1 from transcript AcoGoldSmith_v1.011873m (l ocus AcoGoldSmith_v1.011873m.g) derived from phytozome v7. 0 (chr-ID scaffold_13; pos 1062351 to 1063350 reverse stra nd)
tctacagaaagatcctcctacctcttgcagcgcaggtataaacatcgatccatcgatcgatccagactttgttaaatatgttttattttttgtttgatttcatcgatctatgagtttgaatttaatttgagattcgatctagaaaattgtttgttgattgcttgtaaaggtttgagcttttgatgtcattagcgttttctcaagtttgtgagacgaattttatttgaaatccattgcttccagttttgaacatgtagaagaacctcaagacatattttgatttgagattcgttacttagtggttggtgtgatgtcaatgtgtaatgggaattttaagatgtggattataattagattgtttgattctttggtacttcattttgctgtaatcttttttttcaaaagttggggaaatttgggtgtttttggattgctatgttatttggtacaggtgtttctgccaaggactttatttgagctatctcttgtttggtcattttaattattgctttgtttaaattgatctaaacttatggataataatttcccttccttgtttataatcaaaattgaacaaattgtgtatagttgagctataatttctctgagcattatatataatgtgagagcaagttttctgccatgcctagacaagtagtaggatgtgtatgctcttaggaaatagggtacccaccacctgtgttagatatatgtttgtcagtggctctgaaacttcatcaatgaaaaatacacgcctgtgtcatttttacatagatgagaaggcattaaacttagtatctactgctaccttgggcttgtgattatcttattcttcttcttcattgttacatagctatgtacttgatacgttgtggatgttaatatgttattttgtattttccctctcaatcatgatgttgtcccatgtttaaattgattctttctaccatctactcatgttactgcgtactttgtattttcaggtcctgttgcagaggat

SEQ ID NO: 110546 - DNA, 921 bp, Aquilegia coerulea
  Intron number 2 from transcript AcoGoldSmith_v1.011041m (l ocus AcoGoldSmith_v1.011041m.g) derived from phytozome v7. 0 (chr-ID scaffold_8; pos 2891330 to 2892250 reverse stran d)
tggagtgtgccgttgagggaattatagagacacaggtactttttatttaaaccctcccaaaacccaaaccaattgttgcttatttttagcttttaatatcatgccaagtatatctacattctacaagaaataaccctctatatatgtatggaagaactgccactatgggtctgtctatttgattcagtagagagatgaaactggaaggcagtaaatattgaagtacactatgggtgaggagattgaaagaacctacccacccttaattgctttcttggaatatcatgaaacagacactgattgttttgaacatcacccttaaactgagtttcaattttaatcatgttgttgacatcagtcacattgctctgatgatgttgatgtttttactaatttaatttgatcagtgatttttccctgagcatcacatgttaatttaatgttatttgtcaaattgattttgagatgggatcttgttgacttcattatttgataagcctaatgacatgggcacactgcaatcaccaggggcttgagtcccttgggaataaagtgttcaaatcgggaaaacatagcaaatagaaagaccccgtgggtttcttcaagaggttgcacggtgaagaaatgaaaagatccaaacttgagaaggaaacagcccagatatctctaaaccgactcttatcagccgactttgcattttgtcttatatagtatataagtaaacatattacctttagatacttttgttatgatgatgatgtttatgttattgatgtcttatgattctatgaaagtgtagataaatatatccaaaatgttgcctatatctacgtcagtgtatccctttctaattcttccccctgacgcctatagagaacatgtagaattcccgactttaacaagtgagtttttccttgcagc

SEQ ID NO: 110547 - DNA, 711 bp, Aquilegia coerulea
  Intron number 1 from transcript AcoGoldSmith_v1.018965m (l ocus AcoGoldSmith_v1.018965m.g) derived from phytozome v7. 0 (chr-ID scaffold_86; pos 69281 to 69991)
tggtggtgcagtggtgatttattgcttctgtgtgggaaagtaatggacttgctttttgtttcgtctcttgcatgcttttgtgatcttctgcgttacagactcacacgcttgcagttccatatcttataaccatattatgaaatgcaatataattatctattgcatctagctagctatttgagtttcaagtgtcatggtctacttaatccattttgcatccattatgatttcagttttacgatgtttcttgtccatcacctggctgacagggtaacctttcaagcttttatatttttgcagtttgaagctgcaggcctgcttcaaaacaacttctgcttcttgtttatgtaaattcaactgccatttttctacgtccattcgtataaatcaaactaggcagccggctgtagtagtgtccaaacataataaagaagatagtgaggtgatatatatatatcgatttaaaaccaaatactgcaggtccacatggaaccaaagatcgtattccatacatggagtggagtcaatctgatttctaagtttctccgtcacccatttgtttgcattttggacttagtaataagctaactttgcttccaatgcttctgtcaatgataaaacttccttggtgccattgtgttatgtgagaagaattaaaatggaagaggttgtattaggtttggtaataattttttcaggtttggtacttac

SEQ ID NO: 110548 - DNA, 968 bp, Aquilegia coerulea
  Intron number 1 from transcript AcoGoldSmith_v1.014836m (l ocus AcoGoldSmith_v1.014836m.g) derived from phytozome v7. 0 (chr-ID scaffold_7; pos 6175451 to 6176418)
gaagcatccatctgcagacaggtattcccagcaattcctatttttcttgttgtagaactgttgtcacatttcaaaaactattgtagtgatttgcggataaaaaggaataaaacagtgagatatattattctggtaacttcagtacataacaatagcacttctattaaaccagcctaaaactgtagctacttagctgattacttagccgtgatgcatcgtgcatgggttagtgtcgatacttgctgaattgtgagtccattcatgtgactcctatttgatttcagatatgcattgttttcagtttgtgctttaagtcattattcaagaagaaacaataatctttcaacctttacttctttttggactttaaggttttaatacagaaggttgtggtgttagactcctcggagctattccacaacctacttattgtaaacttggccatttaaggaattcttttttttttctttcttattggttagtcatgtaaccatttggttctatttttatatcaatacttcagtaaatgaaaatggaaatggaatctgttggtcttattcctgaatcttgtttttcctactatggaaagcccagcagccatacccttgttgaactcgcacacacttaacaaaaaaaaaaaaatcctgaacatgaaaaccacgtatacacgacaccaaatttggccttgtactaaataaaaagaaaaaagttaaatgtgtgactattggccttgtacttgaatcttgtttttccaaatttgcaatgcgcaacacacaccataccttgtcaaacttgactgcacatactaatatctgtgcaatactcttaggtaaaaactctgtatactgcgtttttcatctgaaggaggaatatttttattttgagtcttagttctgctcaatatgacctcttccatgtttaacttgctgtatcacacagtttgcttgttgaggagatagatttaggag

SEQ ID NO: 110549 - DNA, 912 bp, Aquilegia coerulea
  Intron number 1 from transcript AcoGoldSmith_v1.001135m (l ocus AcoGoldSmith_v1.001135m.g) derived from phytozome v7. 0 (chr-ID scaffold_16; pos 3621450 to 3622361 reverse stra nd)
gaggtgttccacctaattcatctattaaggtttgttaaaaaccccaaatttttttttttttggatctagggttttcaatttcgttgtgatttttcttgagctagggtttataaagttttaatctttactagttttgtatgtgtttttggattggggtttgatgtgttattcagttttcatgaaaaatttcaatttttattgattcatgtgtgtctaatttgtgtttgtttgtcatatctataactcccctttgtttgattgaaacacgattgtttactcttgttcaatttcgaggggctgcttcgatcgatagacatctggttggattactattacttgtttgtgttttatgtatagagattggtgagattgtatgtggtgaaagaaagattgaaaaagcttgggtaatttaagataaacaagagctagtataggaaattcattgttttcctgtttatatctaaaactaagttgggaaagtatgaggtagctagattccaatacctttaaattgtgtatagaatatatatagaaggatgaatgtcctaattcttggtggatcacaagatatgtgtacctgctgtaaatatggacataaagtagtcattgtgtgggcattaggtgggtatgctgcaagcattgcgattcccataaagaactcacatacatgaaatgaagagatgccaactgactgcactttgcaccacacccaatacaaccacaatactgtgttgcaatgtaattttttttccctgtaatatggttgcttatctgttccttttgcagttttgcgtatgtttttgcatacatctttatcttgcttttggatggtttatgctgaaaacattgtggcttgtttttattgcttttctgtcagactggagatctctggcttgaaggtcgtgagcgagt

SEQ ID NO: 110550 - DNA, 826 bp, Aquilegia coerulea
  Intron number 2 from transcript AcoGoldSmith_v1.005078m (l ocus AcoGoldSmith_v1.005078m.g) derived from phytozome v7. 0 (chr-ID scaffold_31; pos 2156771 to 2157596)
gagagcctggaactggcaagacactactcgcaaaggtatattcttattctttattgtgatgctgtttatatatcaacgtgtcattgagtatgagagaatttgtaaacctctaaaacaaacctttaatgaatgaaatacaactgaaacatgcttactttattaaacaccactcaaatgataaactattggtatgttgttcccgtgtcagttagtgaatggtctatatggctaacttctttcaacactctacatcaatgcaactcaaatgttggaaatgaggcatataaatgactttgggacaatattggcatggatcctttactagataaactgttaagcaccccaaaatagaaaggaagctgaacgagtaacttcattatcttcgtaactaacctgcacagtctgctcattgattttggaatgagtatcgaatcgctgaagcgtcatacaagagatgtgatatgtagtatctcaggctgtccatactcattagactgttttccttgctaataaaaatgagacatcctatactttttatttcctttattttctcttggtagtctgttttaatgagccttggtgtatttgtagtcgttgtgttttaaccagggatatctcattcctcggtaaaatctgtattgaattttttattctcgtttacctcaaactttgagacatcgttatagtttttattctcgtttacctcaaactttgagacatcgttatagtttttattctcgtttacctcaaactttgtttatcaatcatgttatttttgttttgtttctcaggcagtggcaaactcaacatcggcaactttcttgcg

SEQ ID NO: 110551 - DNA, 710 bp, Aquilegia coerulea
  Intron number 2 from transcript AcoGoldSmith_v1.018274m (l ocus AcoGoldSmith_v1.018274m.g) derived from phytozome v7. 0 (chr-ID scaffold_55; pos 748680 to 749389 reverse strand )
agagacttgtctttcaagctgcagtccaggtgatcatccatttttgtgtgcatgcttttgctgctgattttctcttatgagccgcctggcttcttcttttgaagtctttgaaattttggtggtgggaggtctcttttgaattccttcttcacttggttctctttatccttcttacatttatcaccatcaaataaacctcacaaaatcttcacacttatttcctttgatgccttagctttttaggcaagctgttatacattgcttatccatggtgccattcctcactccatttggagttcccgaaaccagcatccttgggtcgagtctcccaaggttccatgagggactttttatgggtttgctcttcctgagccctgaggagtatcctgttttggctgccctatgtttctcgtacgattgtatacaagaatatgattggtgttttgggtgtaatcatgagcattagttatagggtccattttgagtgtcatgcttttgatgagacttgttcttttgttgaattgattcatgttcttttgtctactatttttcaaatagatcaccttgttttacattcaagttgctctcttcatttgtatgattgatagttattgtttgaagagaaaaggacatgaaatgaaacttatgtttatttatgtttttgtttttggatagaatctttctcaaccaaaagtagaagttgatttacc

SEQ ID NO: 110552 - DNA, 319 bp, Aquilegia coerulea
  Intron number 1 from transcript AcoGoldSmith_v1.000059m (l ocus AcoGoldSmith_v1.000059m.g) derived from phytozome v7. 0 (chr-ID scaffold_13; pos 6058496 to 6058814 reverse stra nd)
aacaggtatgcccatggtacattatgattttattcattttcaccatcgtcataataccatacatcaatgattgggtgtcagcaacatatctattttgcgttttcagaaaccagtaagcatgtttatatatacataaaattgctctagtctatgccttgaagatttgtatgtgttaagatccctggatccttgttctccgtagtagctcttaactcatattattagatgtcatgttatttgatgtgacagcgttacattagtatctaattgtattaacgctattcattttagtgtctgcatatttcttgtggcaggagtg

SEQ ID NO: 110553 - DNA, 518 bp, Aquilegia coerulea
  Intron number 1 from transcript AcoGoldSmith_v1.024301m (l ocus AcoGoldSmith_v1.024301m.g) derived from phytozome v7. 0 (chr-ID scaffold_34; pos 1143396 to 1143913 reverse stra nd)
ctcaggtatatcattgctaactttttatatctaaaaagttcataactgaaggtgttctcagttacctactacagctttgacaataaatatatagtctaatgtctcaaaacaatattactaacaaagaaaaaaaatgttcaatttcaattacattaactgctttgagtatttggcataatggcatccatagtcaagtgcttttgattttgaagatcattagcaaagtatatccatgtacatatctgcttccttgttgtttcagtattttggagcaatgttagggttgaagttataagtttctcctccattgtttatattatgatttattatgtaatgaagatgatggttggatacatatatacatggtacttggcatattttgtagtatatttccactgagtatgtaaggccttgttgttgtacaacaatatatatgagttaatttttcagtgaacactcacgggaaaggttttgcttctgcagatttttgaagggaaggaaatttgatattgaaaaaa

SEQ ID NO: 110554 - DNA, 701 bp, Aquilegia coerulea
  Intron number 2 from transcript AcoGoldSmith_v1.005970m (l ocus AcoGoldSmith_v1.005970m.g) derived from phytozome v7. 0 (chr-ID scaffold_58; pos 1126765 to 1127465)
tcaagattttccatcttcaaaaggaccagattagggtaatgtgttttcatgtcttactttgaattagggtttctttgattatgtcaaattcttaatgtgaatttaaaatcaatactaacttaatattcttactgtgaatcaatatgcactatcttaatgtgaatttaaaatcaatactaactctataattttatcaagaaaatcttataaacgaattcaaaatcatttggaacatgatcaatcgttattcctttatgtcaatggataccgagtttctgaaaaatggatgtatttgggaattttattttaaagatttcgatatttcaacaagtttgcattagaaggtattgattcaagacattttttctgagtttatgatgagttctggacttgtttgtaatgactcagtgagttgggtaacaattcatagtccttatgattttggtttttaagttaaggtggttttgctgtctttaattacaattttaaattcgttttttatgaaatttctatatcttactttgaataaatgttgaaagggtttccttgtaatttcaaattctgtaataattttgtttttgttttatatttttcggatttttcttttcttttcctttgatgccttttgaagaaagttcattagatttcttgtcctactttttgcaggaaacaaactgttggctgcactgccttggggagga

SEQ ID NO: 110555 - DNA, 494 bp, Aquilegia coerulea
  Intron number 1 from transcript AcoGoldSmith_v1.004612m (l ocus AcoGoldSmith_v1.004612m.g) derived from phytozome v7. 0 (chr-ID scaffold_83; pos 786121 to 786614 reverse strand )
cacctcaacaggtatatctatctatcttcttcttcttcttcttcttcttgctttacttcttcatcttgtttcttggattcttggttctttcaccaagagccaaataccctcttttctttaacatttttactcatttttaagtgatttttttaaagttttttgaagtcataggtttattataatgggatgatttgttttatatttatattacagtctgatgtatttgtttattttttaattagttagataataccccaccttcaacaaatgtctgaggttctctttttggtgtgaatcttttcttaaacttatatcatgactttaagctatttgatttgatgcctacaccaattattcttgtttgcaaactaccatatttttatttctgattaatttaagttgttttccactcacatatatgtatattgtttatatgatctattggtgttatgtgttaaggttcatataactcaaggggatcttgaaggaaaagg

SEQ ID NO: 110556 - DNA, 815 bp, Aquilegia coerulea
  Intron number 1 from transcript AcoGoldSmith_v1.023503m (l ocus AcoGoldSmith_v1.023503m.g) derived from phytozome v7. 0 (chr-ID scaffold_7; pos 4973408 to 4974222)
aattcacttgtttgtcattctgaatttcttaatttgtaagttcaatttttagctcaattcaactgattttttttcttcttgaattattgatgattttgtttgaattgattggttaaagtattgatttttgttgaaaactagtttgaattaccctatttgctttgaattaattggttcaagtttttgtttttatgtaaattagcttcatttctgatatatctgtttgattgctcgtcaacgtttctagttagctatacaaaatctgcaaaaattgagagtgtttacttgctttatggtcagattctttgaatttcatggaaacactaactaaatgatacttaatagattcgcttagctaccatagaatctttgagtgactttaattcatatactatcgttactagattaaggtttggagcttgccttatgcatatactgtggaattggaaatagagaagtttttgaattagtttttgtcttgatgtattatgaccaaactctatgtcgcaatggttttataagtgaaggctctgcaagaagaatattgttttgaaagaagggttgtgttaaaagaattagcttttccaaatactatccaaatctcaaagtattgttacaagtgtcactaactcactgttgagtttttagaacgacaaattagctggttttagttcctttgcattggtattctattgacagaaatattctattgacagaaattttattcaacatagagcactttatgtacttcatgagttctaaccttggtaagctgtgcagattttctcctgaccgtgccacatcattagcaattg

SEQ ID NO: 110557 - DNA, 804 bp, Aquilegia coerulea
  Intron number 1 from transcript AcoGoldSmith_v1.001450m (l ocus AcoGoldSmith_v1.001450m.g) derived from phytozome v7. 0 (chr-ID scaffold_93; pos 241375 to 242178 reverse strand )
aagctaacagatagaattctttctggggtttgaaggtaataccctttggcctttacatcatttgtctttatgttcttctgatatttttttgtaagaggtttgattgaatgattgattaactcaactaccatcatcttcctttcagttttttgattaattagaagggtgggtttttaattctgtattgattaatagcagtagctgtattagctcaacttttttttccattaatttacttgaaaattgattgatgaggtggggtggatttaatagataagtttcttactacttctatatgtatttcatcatttttattttcctgtgaaaaatatattatgtagggatggagggagggttttatagcaaaacttaccttgatataagtatgtgtatattttcacaattcccactaattaataccaatttttcgaaatgatggtggtggaaattctatcatgtagttgattttgtggtgatttttttttttgagtttttatgtcttttgtaaatttagactacagatccgtatgacaaatgaatatcgatgtctattcttgtatttattgtgggtaattccttttccaacttgtcttggttagtttaagttgaatagctcattgttttacacttttttttttttttttaaacttatggtgaattctaaaattgcatttttgtcgggtggttaggcatcaaatattagtttattataccttttttcttataaatgctcattaatttatgaatacgcgagtatttttttaattttcttgttctcggttttgaatgcactataggaaggaa

SEQ ID NO: 110558 - DNA, 1001 bp, Aquilegia coerulea
  Intron number 1 from transcript AcoGoldSmith_v1.003317m (l ocus AcoGoldSmith_v1.003317m.g) derived from phytozome v7. 0 (chr-ID scaffold_13; pos 5983518 to 5984518)
ctccttctgttactattgataatctcaatccaaaggtatatagattttttttttttgttaaatttttgattgattgtttgtttgatttgatgggtattgtttattttgtttatttggtaatgggtaggctttaatttttatttttatgtgttttttcttagatgggtagacttcattttgttaatctgcttctggggttttattatttttgttgatgtttggttagatgggtatggttaattttgtttactagtggatttaaataagttgggatcttgctttcttttgcaatttgatttgatttttttttttttttttttgatattttttgtttagtgatcaataatttattaagtgattagtcaaatgatcaaatgatttatctgactatttatcagatagtagctgtattattaagttgtgatttctatgttgccttattgtttctgtgagaaaattttctttcattactaaagttgatgggcggtttttattgtccttggtattgattggtgaatttttaggctaccatatatttttactaggtaaattaattttgattcatggttgattaatttgattctttgaaattttttacaacaatgaacttcaaattctttgtttttttgtagtctctagaccaatgataataattgttctttttcgcaataatgtgaaaagtcttttgattgagtatattcaacagaaagctgtgtatataatgaatagttgatcagctgcgtatatactaaatacacaacagaaaactgcgtatattaaaaagcttctgggttttagtatatgttcatattttgtgaggagtgggggcagcatgtttatagatggtactacttgaaattatattttgtataattatattaaaatagtattaggattttaaacgttattacaactcaagttttgtatttcttttcagttaaagaattgttgtccacattctcatatcctgaccatgattgctaataattttaggttcttaa

SEQ ID NO: 110559 - DNA, 612 bp, Aquilegia coerulea
  Intron number 2 from transcript AcoGoldSmith_v1.018775m (l ocus AcoGoldSmith_v1.018775m.g) derived from phytozome v7. 0 (chr-ID scaffold_3; pos 5775320 to 5775931)
tgtttgctctatattacagtggatttcttcccgaggtgatgctattattttcttctcacttgctcatcacttgtttgtttgtagatagatagtcatttgcttgaaactatgttgcttgtgcttattgtatagtagttctctgtccccatttgtttatcacttgtacatggatttcttattcgaaacactgtcatgtgatgttacccttatgaaacatgtgatttcttattcaaaacactgtaatatggaatgatataagatacttagtcaatactactaccactcattattttctctttgttttgtacttagttttttatttcaacattattactttaattaatttactacataaaattttgtgcttttaattgttgtattctatggaacacatcttgtctcgtacgtcattttaactgtaaatacaaggacatttactttgctgtatctttcatgaaattaacattaaaccctgtttcaagaagttgctgcatgggcacatgcagatctttagaaaaattcacccttattagttgctctaagttgaagaggaagctgtttttccttttagtttatattttctaaccctcagttgttcaatcctattgcagg

SEQ ID NO: 110560 - DNA, 707 bp, Aquilegia coerulea
  Intron number 2 from transcript AcoGoldSmith_v1.007502m (l ocus AcoGoldSmith_v1.007502m.g) derived from phytozome v7. 0 (chr-ID scaffold_3; pos 1066884 to 1067590 reverse stran d)
aaccccaacgcaagcggcatctctaactacaacatgtaagtactgtatttagtatgagctaaaacacaaaacccggttatatcatatgaattacacttcgattttcatgttttttaataagagagagatagttcaataggttcattgtaaatctatagattttattgcagtgttatgtttgatcttgtgttttgcgctaaatgtcaacaaaaattttctatttgaatttcctataatagtgataacatttgatgaaagggtgttgtcctaaaaacatttgatgacatgtttccccatatagctgcaaagtgtgtagctatgtacagggtttcttggctaccaagatgctaatgttcttattgcgtacttgtttgaagaaactctagagataccatatacctgtttttttagataggagtctatcatgagaatgctagagtcgtgaaacccatgtagtatcaattcttgtattgtaaaactgtaaaattcatacttcgtcatgtttgtttattgattattataataaaacctagttgtacagaatcaactcaagttgtttagacttgtgatagacctagtgaccataactaattatacaaatgaatatacaagtttttccagctaggctcaggttattagactcatcttcataagagctgcaatggttgtgataatcaacgtaatcttttttttctaatacagttgca

SEQ ID NO: 110561 - DNA, 319 bp, Aquilegia coerulea
  Intron number 2 from transcript AcoGoldSmith_v1.006171m (l ocus AcoGoldSmith_v1.006171m.g) derived from phytozome v7. 0 (chr-ID scaffold_7; pos 2629947 to 2630265 reverse stran d)
agcgccgtaagtatatgttctcttctctatgcactacatgtccatttgagaccaatctcttcatcattattattaaaatattaactgtcgcatttgcccttttcttttctttcttaatcatttttttcccatttttcatattcattatacttattataaatttataaccataagttttgtcgaacttgttcgagtttcttaacttgttgaactcttttgttcaaaaatgttttagccaatttgctggatgctacttttgatttcaaactgataatattgatgtttccagtgatagttaaagcaagcagtggcccaagat

SEQ ID NO: 110562 - DNA, 493 bp, Aquilegia coerulea
  Intron number 1 from transcript AcoGoldSmith_v1.024892m (l ocus AcoGoldSmith_v1.024892m.g) derived from phytozome v7. 0 (chr-ID scaffold_156; pos 60304 to 60796)
acagttcgaacttctagatttaggtctggtcttctagagtttaggattagctgtggtacagacctagggtttgccacaaagataaaattcaatttcactattaaattttgatgaaattgcaaaaatgggattctagaagtgaattttattaattagtttcaattgttattctttcgtatctgcaatcaatcatttctgttttttttatttttcttggtgctgtttgtccttgaatcctgggcatctggcacttgtgcaattttgttgtcattgtctcttgtaaatttcaaacataggttgtaactttttgttgcttttatcatttatgcttatggagttatgttatcatgaatcatggttcttcttgtgcatgaaaccctatataatttggctgtttaaataacgttattatgctccaaatatctgtcctttgttgtcaaataaacatattaccacttccatgctttcttacttgcaggcacggtttttgctt

SEQ ID NO: 110563 - DNA, 833 bp, Aquilegia coerulea
  Intron number 1 from transcript AcoGoldSmith_v1.022019m (l ocus AcoGoldSmith_v1.022019m.g) derived from phytozome v7. 0 (chr-ID scaffold_22; pos 3809274 to 3810106 reverse stra nd)
aacatcacccaggtatgaagtatcatcaatgttttcatggcttccccagttgttatttacttattatcaattgaaccagtcctttggattgaaagggcatgtcatcattcactagaattctgaatggtagacattattcaacatattgcagtttatacaaagcagcttgtttatttgaacaatttatatatgtttttcatccatgtatagtaaattcaggtaaagcaatatatcactattaaggagattgaagaatccgattactttttatgcttatcgacgctagctggagttaggtccctatcagattgattaataactcaaaatagacaactgttacaatctatatgctcatttgatatcataccatatttctcaacctaaaatctatatgactaatagtctaatatatgaagggtttattttgaatgtctttcctgtaacacaaaattctagtagttttagaggttaggttatacttcaaaagttgcggaaaggacttgtttcaaaattgcgcctccaaaaggggtgaaatttttaggggactggattgcagtcaagaaaacatgtaaaagaggtaaacatcatgtttaatgcctaaaaatttcactcctttacatgatgtgaaaacccctcaaaacttccatttacaatgtttgcctttaggcttaaaaaagtatctagatcaataattctaaccaaaaaagttatctgctcgatcttagattgtttgtctaaataaccttgctacactttcaacattgttgtatctcacaacgtcacatccattaattgcagtcgttcaagtggaaagcattgcagtgaagaataac

SEQ ID NO: 110564 - DNA, 432 bp, Aquilegia coerulea
  Intron number 3 from transcript AcoGoldSmith_v1.004646m (l ocus AcoGoldSmith_v1.004646m.g) derived from phytozome v7. 0 (chr-ID scaffold_34; pos 2128023 to 2128454 reverse stra nd)
ctcctgcaaggaggaagtaagttgttattagtgattttctttgttctctttcttatggaatttattttagaaggggaatagaagtgtgaggcattgtttgtgtaatggcatcattatgggtgtaaggggtcagggtggaggtgtatgccactagttctttactaaagtttagactctccatttctggtttgtaaattggacattgttggaatgaaatataactctttactaatagaaaattttagtcaagataggaagaagggatatggaggaattttcagttaaacacgttggtttggtaccttcaacagaaagaaaaattaagaaacagatgtcgtagtcaatttgtttgattagcaaaccacagtaactcatggttttattttattgtatgaagcgggaattccccacctaaagtggtttggtgtcgag

SEQ ID NO: 110565 - DNA, 190 bp, Aquilegia coerulea
  Intron number 1 from transcript AcoGoldSmith_v1.025253m (l ocus AcoGoldSmith_v1.025253m.g) derived from phytozome v7. 0 (chr-ID scaffold_2; pos 9842109 to 9842298)
ctttgtttagaaaaaatctcattttccaggtctttctctctaaattttcaaacaattaagattaaagatacatttttttttttataattttttgatgaagattgattttgatttggtgattttcttttaattctgtttgtttgtttttttcgcagaaacgaaatatcaaaacaaatataagacttgttat

SEQ ID NO: 110566 - DNA, 472 bp, Aquilegia coerulea
  Intron number 1 from transcript AcoGoldSmith_v1.022700m (l ocus AcoGoldSmith_v1.022700m.g) derived from phytozome v7. 0 (chr-ID scaffold_7; pos 7225264 to 7225735)
caagaaagcatttgaacaaggtaagtctgaattctatattttgaaatcataatctcattttgttatggtcaattatttattattctgcagttcatataaaaacagtttcgacgtttgctaattaattgtgtaatttaaccaaggttgtgaaaatggatggtcaatgagacaatgactcaatgtgcattcaatttttttctaatttgaagttgctcttactctgaccatcttcttctaactgaaaatgccattcctaccaagtacaatgggcctttcgcatgaattcaaaacaacgttgctcattggctgtttgtaatctataaatttgcaaaataaataagcttcttaaatttccataaatccctactgttagtgaaatagtatcttgagtcaatacttgcataaggatctgttgctttcaagtgtttgaaacaagtgacagatctttttactgttaaacaggtcgtatttt

SEQ ID NO: 110567 - DNA, 544 bp, Aquilegia coerulea
  Intron number 2 from transcript AcoGoldSmith_v1.017446m (l ocus AcoGoldSmith_v1.017446m.g) derived from phytozome v7. 0 (chr-ID scaffold_61; pos 431319 to 431862)
tcaatcctaataccacaacttctatcatacttcaggtgagataattgtactctgcgcctttttattgtagttatcagagctacgattttttcttcgtgtatcttgtttatcattatatttccttatcatggggtgagtacaataatatacgaagggatacctttgtattttattgccggaatagtcacttctctttttgtattaataagtgcattttacaacttgagatatttcgcatggaagaccatgttcagaaacgatgcaagttcttttaaactgctttcattgtctgatctcttttttctcctatttttccatttccaaacttttttcttaccctctattttattttctgcaaatcaattctttgaatccaaataatgaccatatccacaatccaaatcaggccaaagctgttgttttcttctaaatcttcttgttttaaaataggttcttcctattattgtttcgtagtagttgttctttctgtagtttgatatcccgttccagtgttgatcatgtatactctttgtgcaggttatca

SEQ ID NO: 110568 - DNA, 843 bp, Aquilegia coerulea
  Intron number 1 from transcript AcoGoldSmith_v1.012940m (l ocus AcoGoldSmith_v1.012940m.g) derived from phytozome v7. 0 (chr-ID scaffold_48; pos 1456303 to 1457145)
agactacacaacgaccagcgacctactattcacacgtgctcctattcaatgcacagaatattctcatcagttacagaattaattcacagggatgatcctcgcgcgttacacatttaatcatcattatgatggcggagaatctgcaagatccacgatccacgcccttccatcttctatataaacagaactacgatggcttgatctctaagttcaattcccccgagctagagtacgtaggcaatctcgatctcaacgaggtgcagccaccccaatctcaaatatccccatttggtcaagtctccataacgacctgaccctgttgatgcattaatctagaaataggttaatacagtgggcagaaaaaaaaaaaagattgtcgcgtagatctaatggtctagatttgtaagtcttttgttttttttttcaaagtgaaagtgttttagttatttaaaatttaaaagataattatacacggttgactaagtccaaaatctttgaccgtcaaacgtaatgtagtcaatctaacagttgggggataacacaatgttttcaaaacaaatggggtgttttgacaaattgacccaatactcacgtacttgtacccaatattaaaaatcggacaaatatcgactgggtttaggcgaggttcaggttcttcatgtctcacactctcaacttcaacttcaacttcaacttcatttatccgagtactctgtctctcgatcgaaaccctaaaattaaaaactggctttaacaccctgtttcactctttctcctcctcaacctcaaattcttttcaaatggaaaggaggaagaggaggaggaggaggaggaggaggagga

SEQ ID NO: 110569 - DNA, 722 bp, Aquilegia coerulea; identical to SEQ ID NO: 109540
  Intron number 3 from transcript AcoGoldSmith_v1.022053m (l ocus AcoGoldSmith_v1.022053m.g) derived from phytozome v7. 0 (chr-ID scaffold_93; pos 403076 to 403797 reverse strand )

SEQ ID NO: 110570 - DNA, 754 bp, Aquilegia coerulea
  Intron number 3 from transcript AcoGoldSmith_v1.000503m (l ocus AcoGoldSmith_v1.000503m.g) derived from phytozome v7. 0 (chr-ID scaffold_26; pos 1213998 to 1214751 reverse stra nd)
agaaagcagtatgttctttgatcccgaccacattcagttttgtgtaaaactattatgtgtagttttctgttctgtcatttagttttagtttagagatgagtgggggattcagttgtagatgttagtttatgctttccatattctacttttgtttaggacttggtaatccataataatgatagctttctaatagtttacgtgcaaagagaggttgactagatttcatttctgtaaagaatttgaattagaatcacaagtacaagtggagtattgatcagtgaatatgtgctcaacacttgtttcggcttagaatctgagaccgtgattaaaatcttaaaaaaagcaattacaacatttatttttgggcttttgaagaacttggcataattctgtataatgtatatttgatgcctttatatatatattcaaagttgaatccagatatggactacatatattcttaaatttgatgtgaaattgcaaactcataagatttgcatcatattattctacaaatttgtttctgtgcatgaggaatctatacaagtgtaactagtttcagtgatgttgaagggattatgagtttaatatgctctttctgggctgcattttaaatcatactcatccagtaggccctagaaactctatgccaaggcaaaaagcttaaataatacatctccacacttgtagtttacttgttgatcactttgttcgtacaattgtcgtaatctgtttatttttcttaaattaggaa

SEQ ID NO: 110571 - DNA, 522 bp, Aquilegia coerulea
  Intron number 3 from transcript AcoGoldSmith_v1.002723m (l ocus AcoGoldSmith_v1.002723m.g) derived from phytozome v7. 0 (chr-ID scaffold_34; pos 1435354 to 1435875)
ggaccaaaggtaattaattgctctttatttttcttttatcaatgttcttcatgtgaatggatttttattcttgtcaaatttttgctagttttcattttgattattgcatattcacttatattttaaggggtagattcatttgattgaaaataataggtttgatttgagttttcattcgaatgggtgtcaaaggttctctacttgagtacatttgaataggtatgggtgtcaaataaagtattgattttggaagatgttatgttatttcaatgatattgtatttgagtttgtgaaggcacttcagtacaagccattttcttaggaatacaaactttgcaatcactataaactctgcgatcccttttccccttgttaaaatttatttgtatcatctttagaatgatgagaggtgttgttggacaatttgatttcggttgtcaatttttccaaacctgtggatacgtacaaagtgcactatggtggatgactgctattctggtttttgcattttgtagggacgta

SEQ ID NO: 110572 - DNA, 640 bp, Aquilegia coerulea
  Intron number 1 from transcript AcoGoldSmith_v1.003743m (l ocus AcoGoldSmith_v1.003743m.g) derived from phytozome v7. 0 (chr-ID scaffold_25; pos 2634487 to 2635126 reverse stra nd)
gacctctgaaggtatttcctggtaggcaagcaggtgttgataacactggtgtttctcagttctcctcaccgtcttcaagatctatttctcctagaaggtatctcatataagctatgaatcacttcaagttgatgtcagcattgtataagtgataggaggttcaagtaaaataaagaactgtaaaagatgatatctatacaacttaatgtagttatagatttataagacacttgcaatcaattaataacactcgtgtaaacaaattcttgttagataccaaagagaaggagattatgatctcaagaacatatctgcccatggattgatgccaatttccgaggtaaatagccagaacagtctctggaagcaggtactatgattctttttcttaataatatcagtgcatcttttgcgtgatgtctatgagtctatccaaccatatgttatttcgcttcaggatcttttacttaaggttagggagcatgaagaagagattttacagttgcgaaaacatcttgctgattattctgttaaggcaagaatgatgatctagttttgagttctttctgatattgtttcttgcttggtcacatttcttttctaaaaaaaatcttgtctattgttgataggaggcacaaat

SEQ ID NO: 110573 - DNA, 625 bp, Aquilegia coerulea
  Intron number 1 from transcript AcoGoldSmith_v1.017674m (l ocus AcoGoldSmith_v1.017674m.g) derived from phytozome v7. 0 (chr-ID scaffold_3; pos 10392335 to 10392959)
gtcaggtaaatagtttaaatcctacgttatgttaacctccttgctggttggtaattagtatgcattagttatctctggtaaatgagcatctttgattgtggttccaaagtaaacatctgagattgtattctccattacattactcccctgtccttcaacaaatgaaataaaagcagaaatcacgagttatttattgccttcctttttacttgggaggtagttgaagagttggctaaaacttcatgttttcattgttataatccgatctttcccagagcttgttagccaaatttttcataacctctactatatattctaggtaaaattctcaaagataatgcactaactggcattagctctcatatgttttaaatgtcaactaagaaaactcatcaaaccgacatctgggaaactgtaaaattaaatcaaatggctctcatttgttcaatatacccagtatgttggcctatctgatcacttgcttcctctttccaccaaacgtctgcaggaagtaccttgtcgacgacactgatcaaatgacatatatgattaggtcactagccacaggttatatgcagttcaaaatccagctttatataatgtttgtgtttgttacaggtttgta

SEQ ID NO: 110574 - DNA, 765 bp, Aquilegia coerulea
  Intron number 1 from transcript AcoGoldSmith_v1.016857m (l ocus AcoGoldSmith_v1.016857m.g) derived from phytozome v7. 0 (chr-ID scaffold_2; pos 8725178 to 8725942)
aaggtaatcgtgattctgttatatatatatgctttttattgtgatcaggctcgactgttgtatagactttgtggtgtctcccattgttgacataagtaaatctggtttcttggtacccccatcatatcgatcttatcgtgcttttgaagggatcaatacgaagttataagtgtatgtagtttaatatcttgctgaattatacaatataaatgtttgaaatgagttgttgaaatggtatcaacttgtaaatgaagcgtcggtaatggaagcttaattgctggcttattaatctaaatttctgattactgtctgcttctacggctccgcttgtaagccctaaatcacctttaggccatcttggtataaagcctagattttgtagtacaaagttttcttcaatatattacaaactgtttgcataagaaaaaaaaattttttttttttttttttttttgatccaaggtaaaaatatttcattaataaaaaactcgagttgagcaaatatagagagtacactttctagatgttacatcaaccaagcaaccagatgacctgtaacaggcacctccctatcaataaaaatagaggcagactccacataacacagcagcagcagcaatattagcaatggtcctgagcatacctgcactaccagcaatcccttaccaaaacttcccacccagtcaccagtccagcaaaaaaatttatcatcagtaattaatttttcgcatttgatttgagcaggaaggtcaacaaacattgtgg

SEQ ID NO: 110575 - DNA, 711 bp, Aquilegia coerulea
  Intron number 1 from transcript AcoGoldSmith_v1.024362m (l ocus AcoGoldSmith_v1.024362m.g) derived from phytozome v7. 0 (chr-ID scaffold_86; pos 137722 to 138432)
tggtggtgcagtggtgatttattgcttctgtgtgggaaagtaatggacttgctttttgtttcgtctcttgcatgcttttgtgatcttctgcgttacagactcacacgcttgcagttccatatcttataaccatattatgaaatgcaatataattatctattgcatctagctagctatttgagtttcaagtgtcatggtctacttaatccattttgcatccattatgatttcagttttacgatgtttcttgtccatcacctggctgacagggtaacctttcaagcttttatatttttgcagtttgaagctgcaggcctgcttcaaaacaacttctgcttcttgtttatataaattcaactgccatttttctacgtccattcgtataaatcaaactaggcagccggctgtagtagtgtccaaacataataaagaagatagtgaggtgatatatatatatcgatttaaaaccaaatactgcaggtccacatggaaccaaagatcgtattccatacatggagtggagtcaatctgatttctaagtttctccgtcacccatttgtttgcattttggacttagtaataagctaactttgcttccaatgcttctgtcaatgataaaacttccttggtgccattgtgttatgtgagaagaattaaaatggaagaggttgtattaggtttggtaataattttttcaggtttggtacttac

SEQ ID NO: 110576 - DNA, 959 bp, Aquilegia coerulea
  Intron number 4 from transcript AcoGoldSmith_v1.004447m (l ocus AcoGoldSmith_v1.004447m.g) derived from phytozome v7. 0 (chr-ID scaffold_2; pos 9613347 to 9614305)
ggctgtactggtcccaagtaatgttttcttccaccttctgaggcattagtttgtatgacatttgatgcaattgacgtgttttcaatgtgatatggatgggatatcttgagttctgtgcatataaaaacgttgtatgtatttttaattacacaaatcgactgcatgccactaggaattgaaaatctttaatacattctattgtttgagaattatgttttgctcacaattactccctctctctctctctagaccttagcttgggtgtaacaaagggattttaaagtatcaacatgtgtcggatttcacttcaaccgagcatttttagagcttcatatcccaactaattttcaatcaattcccatgttctaaatgttctgacattctcatatcagttgagtattttcagtcatataatcaaatgctagatgacatttttctcaatttgagttctgatggattttcattgtgttagagaggtttgattgttatggtttatgaattttcttataagtaataaatgaactggagaaatatcaataaggtcatagtgttctttcaaaattcaaaattcttccattatggtagttatgctcttaggttttctcaacaaactaatatagtaaaatgtattggagctttcgtcatgccaattacagtagctttttccattcattctctagttaagggcatagacttacatgttttctctgtcaagtgctgttaagtaagtgttgatgagtactgatatatggctgcagtagatggcatcttttaaggattctcattcttctattccaatcaatgtgttatattcagtttcagtgactaatatgtatatatgttcactccagtctcccatgttcccttataaatttgtttattgcttgcctaattttttaggtgcatatttcttatattttccataatatgaaatcccaggtctgtcattgaagttcgca

SEQ ID NO: 110577 - DNA, 545 bp, Aquilegia coerulea
  Intron number 1 from transcript AcoGoldSmith_v1.015232m (l ocus AcoGoldSmith_v1.015232m.g) derived from phytozome v7. 0 (chr-ID scaffold_35; pos 1881218 to 1881762)
gtggtgtttgtcagtttcatctacgtcaataggaggattttgtaactcacgtgaaaaatgataataattttttttttttaatgttgatggttgatgtaaatagttattgcagcatatatcattggatagattgattacaatgattttagatatagaacagcaacaaaagatcttataatagtaccttgatcaatttgtgtgtgtcattagaaaatatccttctcttcatgggtttatagagcagtggtcaaagccaaatcctacaacttagctgcttatgtgttgagcattccttatgtgttgcttatgggtttgtatattctcctatctaaatttagcagtaaaaaattgcttaatcgacatttactttgatcggactttgatttggagtatccaagacatgttcctgcggctctcggtcacctgcatttttaggttcaaccactatgatcatatttattcctcctactacatcgtttccctgattcctctttctatacttatgtattactctcctttaattatctgtttgaagaacaaaagac

SEQ ID NO: 110578 - DNA, 800 bp, Aquilegia coerulea
  Intron number 2 from transcript AcoGoldSmith_v1.007369m (l ocus AcoGoldSmith_v1.007369m.g) derived from phytozome v7. 0 (chr-ID scaffold_2; pos 284807 to 285606 reverse strand)
gcacaggtgaactactaaaactcaaatttctgatataatatactagcattttgagagcaaaatatggaaaacttgcttatgacgatatctggtttgggctgtaaacttgctcaaaatctccacatcatgattaactgatctagggagataggcatgaagacagaattaaattacagaatcaagtgtttattgttccttgcctgatccaaattagttgcaataaggcagtgatgaccgctatcaatttgttgatttgaaatatggatagatgtaagttgtgattagttatagtggtatggaagatgatggcagcaactaggatttgctagacatttctaatttcaaaatgtgtttttattacgtgtatgatgccatttgctaaacatatcatgtaaattataaaatgtgttttattactatgctttcatttgatgttagtcaatagtcatactcagtatttatttagcttgccttcattaggaatcacagtgattggctaataaaagactttttttcttcatagcatgatgcttgacttggtttacttcaaatattcttattaatgatgggttgggtctattgacatattagttctaagttttaaccttttttgccgtattatagacataaatgccccaaagacctgatcttccgaagtctcaattgtataagaatttataaattgaccatgatattgtggttattggatagttttattttactatatgtgctggattgtagatggtataatatttattaatatcgttctctgtaaatagttggtccaggtggaagtcccg

SEQ ID NO: 110579 - DNA, 988 bp, Aquilegia coerulea
  Intron number 1 from transcript AcoGoldSmith_v1.013196m (l ocus AcoGoldSmith_v1.013196m.g) derived from phytozome v7. 0 (chr-ID scaffold_68; pos 1014661 to 1015648)
caccataaacttagctaccccaagaaaatattccagtgaaaattgaaaccggtcttcggttatttgacattaattttgtgacatgagtagtctcagttatctcgccttgaaatcattgttaggaaaatcaagatgtacgcatggtcggttcgtgtcctccgtgtccttgagttcttgtccaagaacagttattgggttctggacgtacgtacgcagttaggacgttcgtacgtccaagcaggcagcaaacttattctggttaggacgtacgtacgtagttaggacgttcgtacgccattacgggcagcgaacttctaccgtgtggggacgtacgaacgttgtttcgacgtacgtacgtccaatgtggatttcagcaattccggcccatttttcagtgtattccaaccctaggtataaataggttttcttctccaatgaacgagttagttctttggccgtacaagtaaggtgttcttgaaagtttgtgtgtttcattggttattgaactcaacctcccttcttctcaattcattatttcccatcttcctcatacagttgtgaattcggcttcgagtcttcttgtgtgttcatcaaggagtcgagtgtcttgtgcgtacatcaaggtgctccggtgaagtcaaggtgttagagataacctgaagtatcagctcgcagtgagtgcaggtagttgataggtttgtaaatctctttcgtctagtggattatttgttgtcaccaaggcaaccgtggacgtttcccaatttgggttttaccacgttaaaaattcctgcgtgttatttactttctgcatattatttgattttgcttaaatattgaactgcgagactagcactatctgtgttcttcaaaaatccttctttaatggcagtaaaatcatcatcacttgctcaatcatctatgctacaaagggaggaagatatactctctgatctaagcagtagtccatgaactcttcgatgtttaggcc

SEQ ID NO: 110580 - DNA, 482 bp, Aquilegia coerulea
  Intron number 2 from transcript AcoGoldSmith_v1.014852m (l ocus AcoGoldSmith_v1.014852m.g) derived from phytozome v7. 0 (chr-ID scaffold_68; pos 239331 to 239812)
taatcactgctgcttctgcaggttaatatttctatctgttcttcctacaaatctacaatgatctttgaattgagtctaccccgtataaatttcagttactttccaataaacacccattaacaatatatcagagtaatattaaattttaattttttgctttacatctgtaaattgaacaaaacattagtggagtaactaagttttgatattataataggttttctctatctatatcgatctgttcaatatattgtccacatatttccagtaaattcagagttcaaataggcgtggtaggagtaagtagtaattataacttattctctgaaatttagtatttaacatatattgttcgcggcatcatttgtgagactgaatttctataaagagaaaattatgaactcaacacacataaaaggtttactaactaaacttgatttattttcttcctctattgaactcagctgtgaacctgttgaaag

SEQ ID NO: 110581 - DNA, 231 bp, Aquilegia coerulea; identical to SEQ ID NO: 110443
  Intron number 1 from transcript AcoGoldSmith_v1.017708m (l ocus AcoGoldSmith_v1.017708m.g) derived from phytozome v7. 0 (chr-ID scaffold_58; pos 1209585 to 1209815)

SEQ ID NO: 110582 - DNA, 566 bp, Aquilegia coerulea
  Intron number 2 from transcript AcoGoldSmith_v1.014454m (l ocus AcoGoldSmith_v1.014454m.g) derived from phytozome v7. 0 (chr-ID scaffold_2; pos 9832909 to 9833474 reverse stran d)
gtgccactaaagaagccatttccatattatcaaaggtaaaagttatttatatttgaatcctcactcttttatttacttgattttacaaatataataaggaaaatataattagaatgaatgaaaaatggttttgattttttagttcatattggagtaattattaatggaatgtagaaatcttctttggttcattataagtacagtatttgttaggattcatgtcttcattttgtgttattgtgttcgcgtcgttaatacaatacaagtttaaaaacaagtaaacaatcgtgtgtgttttttgctaagtagcttactaaaatgtacaatatatgggtttggcccaaatccccaatactgtatgtaaatcccattctggcttttttgttcaaagtcttctctgcctaatttaaaacaattaagaagtctacattatcaagcttttatctaaattttcttacgtgcatgtctaaattttcaagcttatatgtgtctcgattttgatgcaatacaattcactaagcatgtgatgtttcttgcaactttgattgatttgaacctgttgcagt

SEQ ID NO: 110583 - DNA, 952 bp, Aquilegia coerulea
  Intron number 1 from transcript AcoGoldSmith_v1.002320m (l ocus AcoGoldSmith_v1.002320m.g) derived from phytozome v7. 0 (chr-ID scaffold_36; pos 2031180 to 2032131 reverse stra nd)
attttcaactttgggtctttttttttttaattcaggtaatttcagtgattcattataaataatttgggatctttgttttttgtcaaacattttttgagattggatctgtatatagaacatgctttgaatctgttgaacttgtgagtttattttttacaaaattattcagatttgatttataataattggattgatttttttaatgattgtttgatttgggtagagattattattgattgtttgatctgttttattctgaatttcatttatgatgaatttgggttgggagaggggggggggggttgaattattttttattctgtttgaatgttaaaatcaagtgtaggatttgaatgagaattgtggatttcttatttgtgatggattttgatagaaatgagatggtttccaatatgaagaaaaattcagatcttctaaacataagtttctgaaaacgagatttggcttattttagaaatgacttattatattgatctgaatttttttctggtaaagatatttttatatatgaatgttaatactcatcggctttaaatggtaattctgttggtttttatggttgatttgattattcttatagggaaatcggatacttttagcatgtgcttccgattagctgttttctgatagctttatagataaaatgatgtgtttttaatgcgttggtatcttttgggttaatttcctagaaaggctttatttgtgctgattgattcagctacctcaattttctcatgtcttccttaatagcatgtattcaatgattatttggagtttttgtccccaggtcaaatgaagtaagttgttgtttttatgtaataacatacatggattatataaagatgatcttttctgtgtttatgatatatagctttttttgttgtttttgtgttaagatcatagattttggctagtctgtgtgaaagctgat

SEQ ID NO: 110584 - DNA, 715 bp, Aquilegia coerulea
  Intron number 2 from transcript AcoGoldSmith_v1.007587m (l ocus AcoGoldSmith_v1.007587m.g) derived from phytozome v7. 0 (chr-ID scaffold_19; pos 3983100 to 3983814 reverse stra nd)
gcctcacaagcgcaaagttaatcttagaaagacaggtctattttctataccctatttttattcatcatcaatgcatactacaagtacatctataatttgaaaactcacacatttgtcactgttttctcaacaatttaaatttacataactcaaaccaattgttaaaagggtgtgaaattgcctatattgactgggtagtgtcgtaaaggaataagtgtttgtaatcaaggattgactcaagaaatttttagttttgtaaaggacacattgtactcacatatatatatccattaaattcacatgaatcaagcatttacatgattgttgttcaaacattatcctcttggtcaatgttccagtgagaatttggtaaagtagaaagcgaataattttttcatagatgtttatttggcttattctcctactatttagacctccttttcagtccccaaaatttcgatatctttacacgaatttattgcacacttttttacttgaaaaatctctagcaagagaattattgtcagaagtttactgcaatggaattttatgcatattttgatatctacatggaaccttccatggggtatcaatgagattagtattattactattttttaggtaaatttggtgtatttcataatcgattctttacctttttctttcttctccttgtacagttaagattggaagacctggataccgggtaactaag

SEQ ID NO: 110585 - DNA, 271 bp, Aquilegia coerulea
  Intron number 2 from transcript AcoGoldSmith_v1.004478m (l ocus AcoGoldSmith_v1.004478m.g) derived from phytozome v7. 0 (chr-ID scaffold_2; pos 1645571 to 1645841 reverse stran d)
ctattgttggatctaccggctccatcggaactcaggtacactgtctccggcacaaaacaacacgtagataatcattgtcttccagtttgagtgttcttctgttttcttgcatctgcctttgtgtttgttcctataaacttatttttctgttgcttaactggcttcaggctgtttgtgattcaagttcattttttctttatattatcatcgagtctcatgacgtggtatttttgcagactttggacatagttgctgagaacccagaaaagtt

SEQ ID NO: 110586 - DNA, 746 bp, Aquilegia coerulea
  Intron number 1 from transcript AcoGoldSmith_v1.004478m (l ocus AcoGoldSmith_v1.004478m.g) derived from phytozome v7. 0 (chr-ID scaffold_2; pos 1645983 to 1646728 reverse stran d)
ggattctgctaaaccagacctttttaagcttaaaggtgattctttctgctttttcttcattaaaaacttccttttcaggttttttttttttacatggtcctttactccttttcattttattaatgcattttatattgattttggttgtggggagataaatttaacaatttttgaattgtgaatgaagtaaatttaagtttttaatcttgtattcaattgtttttttttttgttgttgtgattttagttagtctgtgaattgaattagttgaaattttccaacttcaattgtttgattatattccaaaggaacattttgtgcaaaaatcataattgactatagtttgatttgttcttgtaattgattcttcattttaattcattagtcaaagtaagaactagtggcctagtgcgcatacattggatcgctgatgtaatccaagcagttgacttaatttgttctcttttttttttttttccttatttaatttgctattgtaattgtaatgatatcatgtcgacagaatttgcgatattcaaatgtaagtgataaatgattttcaattgtgaattattaatcgaaatatgattttgctctgctgctgattggtctatggtttttatgtatcattcacctaccttttttttttcttattgttgatcatacgtatttttgaacatgtgtttcagatttttgttataaacttgttttgaaatttgggttttgttgcttttgaatttcaggaa

SEQ ID NO: 110587 - DNA, 728 bp, Aquilegia coerulea
  Intron number 1 from transcript AcoGoldSmith_v1.016658m (l ocus AcoGoldSmith_v1.016658m.g) derived from phytozome v7. 0 (chr-ID scaffold_3; pos 4231484 to 4232211 reverse stran d)
atactcaggttggttcatctattcagatctcttagattgtataagtctaaataggagatacacagatacacttttgaattaagaaacttggattttgatcattgttagctagatcatatgaagactacgaatctgtttaacgatttaattaatactgcttatagaattatttttctaaactcaagtgaggagaattttatagatactgaaaattatttgaaaatgcatggattatgtctttgtgaatttttttttattgtatgttaaactagaagtgaacattttgcctaccaattttgtaaatatgcatgtttgcaagcttggggacatgcttgcatgtgtgtgtgtgtgtgcatgtgtgtggctgctagcaagggtgagattgaaaaccatccttgtagatttcacggagtgtaggctgatttttttagattcttttcaccaatcaactcctatttaaatcccttaaacttgagattccagcaatgaagaattagggacatttagttatttgcataattgaacacaagttgtaaggctagatatttcagacttagacaggtgagtacttgctcaaagtgatccttctatgttggggacttgtgacccttaaatttacatttttttctcttgcatcattaacttaagctattgaactttagtttgttatatatgtgttttgtcttcatttatctgcttacaggtcaagttggtttgggactataaca

SEQ ID NO: 110588 - DNA, 689 bp, Aquilegia coerulea
  Intron number 5 from transcript AcoGoldSmith_v1.010514m (l ocus AcoGoldSmith_v1.010514m.g) derived from phytozome v7. 0 (chr-ID scaffold_7; pos 7150503 to 7151191 reverse stran d)
aggacttttgctgccacacactactaccgatcaaggtacctttgcaactaaaataatacataatggatcacataataaaacgttattattattatttttcctgcattatttctttctgcttgaaatgtttgcgagtttattgttgtgcagtagatctactctctcatgtttccattttgttctttgataatgttttgaatgttatttcatttattccttattttgtgaggtttctcggagttaactgttctatcatttattgataaacaaagaggttttcggagtctaaaaattacatgaaagagagttggtttgtgcaaatatttttccatgctacttgcctttctaatgttactaagtttcaatgggtagtctgataattttcaggatcgtttctttgagtctcttcctcctaaatataaaaatgtcatttattttctcgcctgtaacatgcatacagtgcagctttaacgtaaataataagagaatgtaccttcaaggttttagattgtgtcctataagaatgctatatgttatagcataaattataagctctgttaattgcatctgttagacaaactctgttaattttccatgtttctaatatatgtgctgtttttatcttaatggattggttttgaattttgtgtgtattatagagcttcagcacttgagaaacagtttaccag

SEQ ID NO: 110589 - DNA, 524 bp, Aquilegia coerulea
  Intron number 2 from transcript AcoGoldSmith_v1.002750m (l ocus AcoGoldSmith_v1.002750m.g) derived from phytozome v7. 0 (chr-ID scaffold_16; pos 4766745 to 4767268 reverse stra nd)
tcgaggtggggaatactaatttctcccttcacaaggtacgtttgttataccatttatgataacattggtttcgtctagctaattactagacctcaagtgttcaaccatgtcgatctgtttcattttaatttctattgattatttcatacgtaaatgatcttcacaaccatgcaataggggtttattgattacacacggggatgagtgatgaatatcatgatattagtatcaaaccattgatcactatgctacttagcttttttttttttttttttttggaattatgcatgctaattataagcagtctctaatttaactagaaagttgatttaaaggcgctttgttgatcctcgcaaattaacgaccgcttggttcatcaggaagtataagtatcagctggaaattcttagatagttcgttggtctagattttgatcaaatgtttagaattaaattataaagatattgtatttaaagggtactcaaaaacaaatctttttcttcttcttcttcttgttacagttt

SEQ ID NO: 110590 - DNA, 811 bp, Aquilegia coerulea; identical to SEQ ID NO: 109520
  Intron number 1 from transcript AcoGoldSmith_v1.006407m (l ocus AcoGoldSmith_v1.006349m.g) derived from phytozome v7. 0 (chr-ID scaffold_22; pos 2075151 to 2075961 reverse stra nd)

SEQ ID NO: 110591 - DNA, 906 bp, Aquilegia coerulea
  Intron number 3 from transcript AcoGoldSmith_v1.024492m (l ocus AcoGoldSmith_v1.024492m.g) derived from phytozome v7. 0 (chr-ID scaffold_22; pos 2118504 to 2119409 reverse stra nd)
aggtaattcattgaacgagttttgaaaatttgcagaaagtacaagttttccttttataaatgattattgtttgtcgaaaatttatggctctagatattgtttgaacatacattacattccaactacaaaagaatgcatatattctggactgggttagaagctaaagtgtgcaaactatgtgaggatattttcaaattattaaagatcgaggaggttgtaaagaacaattatcctctgcctggcttattggaatacacttattgacttacagcataaattgagagattttgttcaacacgagtttttatcttgtcattttgatattatactgtatgtactgtataagttatctctttgttttattaaacataattatacataatatgtataaagttatgcttctgctccatttccttcgaaagttgaaacttaattctcatagaagccaactagtagtctcaagcaaacatttcttcttgtattattatattatttgattttatctgtttagtttgtattttgtaatctattaatgtgtgaattgtttttactttgagagcttgaggcatattaacctgacccatcaccctttatcggcacactggctcagtatcttttgaatgggcatgcatgaattttttttttgactgatcaagttttatcctgcatcaatctacaacttgggtaactgagaaaaataaggataacaaaccgaggtagaaaagatttcggaaggagttggttacggcagttgattggtctattttgtagagtctagggtctacagttttctggtgttaaaagttgaactttttgtaatgactagctaaagactgcacaattgactaaaataatattttggctttttcagcttaagtctagccttcaagaaatccagagcaacag

SEQ ID NO: 110592 - DNA, 382 bp, Aquilegia coerulea
  Intron number 2 from transcript AcoGoldSmith_v1.015271m (l ocus AcoGoldSmith_v1.015271m.g) derived from phytozome v7. 0 (chr-ID scaffold_26; pos 1863010 to 1863391 reverse stra nd)
attacattccttggttaaaagcacttgacattcaggtaagtgaaaacttctattttcatcaactcaaaattggtcaaaatgaggtcctaatgtcagtaaaacaacaaattaataaaaaattagtatataagtttattcatctgatagtatattcttctgatggtatattcatctgtggacaagaagaggcaaaatgtagtaatggtaaattcatctgatgaagactatgtatagtgactgcaattccagatcaaaaattacacagtttatataacaattctaaagcaaagtggaactatcattcaaaagtctttatctttttagtaaaaaattgatcttcgttactattaaaaaaattcctttccaggggctagttcgtcga

SEQ ID NO: 110593 - DNA, 789 bp, Aquilegia coerulea
  Intron number 1 from transcript AcoGoldSmith_v1.000969m (l ocus AcoGoldSmith_v1.000969m.g) derived from phytozome v7. 0 (chr-ID scaffold_26; pos 2413113 to 2413901 reverse stra nd)
ggtcctcaaagcagtggtaaaaacatttttttctttttttatttatcattattgtcttttctgttaatctgaagtgaaagtttgaatttttagggttttaatagtgtaattcaagaataaaatacatttctgaaggaggtttatattgcatttttctctttttctcccctgttttcttgtagcttcattaaatttgatgttctgtgtctggttcgactttggggatgcaattaaaattctatgtttattgtttatatagattaaaaaacaaggcaaaatatatgattaaagtaaacagaagattgcttgaatacaaaatatgtcagaggaattcccatctcgcaaatatcttatgtatattattgagtctgttacacattaaaacatctgtgcatgttgtcacagatgttcatgatatatttaccctatatcactggcacttctattggattttaatagaaatgcttatagaggtgagaagcttatcacttgctccaaacaaattatttatttttttaaaatagtaatccatacgaattattatggactataaattttatcgtaatatgtatttttgaggaatcttgtgttggctaattgtaatagttgtatcatgagtttttagtcgatttgtcttatgtgtttctttgaaaatatctttatattttgttggattgatagttatatgcttgtgttaatgtttcaatctcttaatttatttcactaaatagtatgaccatttgcttcttaatagggaagagtacgttattgaaccatcttttctatacc

SEQ ID NO: 110594 - DNA, 786 bp, Aquilegia coerulea
  Intron number 1 from transcript AcoGoldSmith_v1.019180m (l ocus AcoGoldSmith_v1.019180m.g) derived from phytozome v7. 0 (chr-ID scaffold_35; pos 2072379 to 2073164)
agtatacctatattctttttgcattaaactctctctctctctttgatactatgtacctgttcttatttagttatacttatactaacacactttcttttcttttcttgatttttttgatggtgactttctatttcagatcctaatggtatgttcatttcacatctttttctctacctttcttttttctttttttttccttttctggtgaatattaagattatcttaaacctggagcatcatatcaagcaattcatatcaaacataggaccattgaagttggtacttctttgtctaagagtattgatcatgtccctatgttatggatggttagtcctcgagattaacaccagccgatttctttgaagtggataaaatgtctattttgatttttgagattcattggttaggtttattaaaagtgaaacctttaggaggaacataatggattagatggtcccacaaaataagtagagaactggtccaaccatcactattttctggattatgtttgaaaaccttttacttattttaatggttaatgttattatgattaattcttaattattgattatgattaattattgttgatatcatgttctcttactatgtcaagatgtcacctactcggctacggctacggctacccccatctgatattctgatgtggctgctaatcaaattttgtttaatttcttttactccgtatttgttaatactaaaaataatagaattgtacatgaaattgatgcaggtcctttgttttacaagggttggtatcacttcttc

SEQ ID NO: 110595 - DNA, 706 bp, Aquilegia coerulea
  Intron number 1 from transcript AcoGoldSmith_v1.007907m (l ocus AcoGoldSmith_v1.007907m.g) derived from phytozome v7. 0 (chr-ID scaffold_26; pos 2194282 to 2194987)
agaaagaaatcatcacagtgcttagaatttcacaggtatgaattattatttacgatttacaaacactttctctctctctctctctgggtttgttaaattagggtctgtttggattgttacgcatcttcatcttttaaacagaataaacaaataaatatgtcgttgatccaagcagggcctaatctcttattgcactatcatatcatatacctttaattcaacacctgctttgatcgtttcttcattttctgtctgtaatttgcttcttacatacatgtatatcataaagaaattgatttatagttgtttgttaaacttataatttgccaaaaaaaaaaaaaagtttctaaaattgcaatacatttgttgaatttctaccactgactttttgcagattagtgcagcccaatctcctccataattattcttgttttgcatttgtttctgcgatatgaaaaaaaacacacacaagtgtatgtcatttatttaaacgttcacaatttgttgatattattacgtctacatgttcaattactacgcagaatcctttcaatttctatgtcagaattgatgtagttgcgatttttatcattccttctttgttcattttttttgggaatagggatgctcatatatttatgtctgttgttatgccatatctaaatatctgattatgttattatttcttacaagaacagggtgaaag

SEQ ID NO: 110596 - DNA, 792 bp, Aquilegia coerulea
  Intron number 2 from transcript AcoGoldSmith_v1.009474m (l ocus AcoGoldSmith_v1.009474m.g) derived from phytozome v7. 0 (chr-ID scaffold_13; pos 3437029 to 3437820)
gacatttgccggagaagcaagccgcaacggtaaatgaagatgaacaactttaattttttgagtttagcctttttttctagagttaattagcgattgcccccagatttttttttgttgagtgatgcccctagatttgcttcatttttcttttaataccaaaactacccctccgttttgtttaacctaaactatctttattgtcaagtatgcaagaaattgatggttttattttcaactatagatctaaaatccatctctaggttaatctaacaacaaacaacataaagtaaaacactttatagacttatcatttttttgctattggaatggggtgaagaagatgttaaattagtagagatttgtgggtttaatttggtaaactaaaacacattacatgtggcatcatgttattggttgtttttgttttattatcgtaggataaacctcgagatgtgtgcgattatttttatttagatctactgttggaaacaaaaaccaccaatttctttcatacatggtagttaaagtggttttatggagttgggggtaaaggctaaacaaaatgaaagggtagttttggtattaaaagaataaggaagcaaatctagggggcatcgctaaacaaaaaaaaaatctgggggcatttgcaactttggctctcaaatctgggggcaatcgctaattaactcttttttctatattctagggttttataagtttactttggaatttatatgtgtttatttgataattgcagtatatagcaagtcttacggaagctttggcttactg

SEQ ID NO: 110597 - DNA, 573 bp, Aquilegia coerulea
  Intron number 2 from transcript AcoGoldSmith_v1.026385m (l ocus AcoGoldSmith_v1.026385m.g) derived from phytozome v7. 0 (chr-ID scaffold_22; pos 1971845 to 1972417 reverse stra nd)
gtgtatactacggtaagtgctcatttgatctgttcgaggaagaactgttgtaactttaaacaaagttggcaaaatttagatatctcgtagtgctatagaactaaagatattggtactggatcatgaatatgaattttcaatttctcaaataaaacacaagagtatgcctaccatatcaaatatgtctatgttaagattaagctcagttataagctaaaatgtactttgtttaaaatgaagagagtatgttaaaacttctaagtaatactaataaatcgtttttgctctgtttatttttatttttattttatgttaaatatgttaaaatattgcatttatgggataaatcggacaaaaaaaaaaattgatgtaaggaatcaaggaaatatggcatgttacttactaacagtataggcaaagggaaaataagcatccatttttagctttcattccaggttaacaactataatgaacatttgacggtttgtaagtgtattattattttataacaacatcacatccacatgatttgatattttcttgcatctgcaggtttctctggttgccatcgtt

SEQ ID NO: 110598 - DNA, 774 bp, Aquilegia coerulea
  Intron number 1 from transcript AcoGoldSmith_v1.000238m (l ocus AcoGoldSmith_v1.000238m.g) derived from phytozome v7. 0 (chr-ID scaffold_13; pos 1661923 to 1662696)
tttctatcgatccccaaatcgaaaaaatcaatcaggtttgttttctcttcttctaattttatctaattcgtatcaaatttcactcttttcataactttttttcttctcaaacattaaaaaaactcaattttgattaaatttaatcattcaacttgaatttcaattcgaaatcactgaaagtaaggtttttgggcttattcgacttgtagattgtcagacatttagttgtaaatgtgttcaattttgttgtctgggttttagtgtgtgaatttgaataaaaaagactgcatttttcttgattattactattgttatcaatacaattgtattctttcttacttctattagtttcagtaagattgtttgttatatagggtttaaaattttgattttgaagagaacccttgtctttttttcccaattgaattgcaaattctttgggtttgatatattgttcttatgaaatttgtttgctttcttcttttatttttcattagggtattattgcatacaggtttaagcttgaattgtgaagaaagtttactcttttttgcaattttcgtagttgtgagactttgttttttgtattctttcttaaacccattttactgtttgacaactcatcccaaattataaacgaatggaatgatcgttgatggttaggttttttttgttattgtaaatgcaattgattctgtgttttggagtattgaaaccaactttctttcatctatcttaggtaaggtttggatatcgactaagatcttggaaagt

SEQ ID NO: 110599 - DNA, 134 bp, Aquilegia coerulea
  Intron number 2 from transcript AcoGoldSmith_v1.002251m (l ocus AcoGoldSmith_v1.002251m.g) derived from phytozome v7. 0 (chr-ID scaffold_31; pos 1478277 to 1478410)
ggactggtaaattttttcttcatataatttttctcagaaatgttttgcacaatgtgtttgttcaataatttgattagttttttttgataaatgttacagggacaatttccttattcttcaagctttcatagctt

SEQ ID NO: 110600 - DNA, 887 bp, Aquilegia coerulea
  Intron number 1 from transcript AcoGoldSmith_v1.021273m (l ocus AcoGoldSmith_v1.021273m.g) derived from phytozome v7. 0 (chr-ID scaffold_48; pos 1024912 to 1025798 reverse stra nd)
ggggtatattccagagggaatttggtgagtgtgggaattgccaagattaattatcttatcaaatacctacattgacttgaaagccgcaaaatgctaataaacatccagctaaaattttggtgctttaaaagttcttggatttagggaatctctaatggttcaccaaatttgatggaccacctcagcagatttggtacctatttgatggatcatttgatgaaaaaaacttcagtttctaatggttcactaaattgaggcgggtaatgaagtgccacttgagttgggcgggctttgaagagccacttaaacgaaattttttgttgaggcggacatccaagtgccacttaacccaacagttagttgaggcgggcaatgaagtgccgctttaagaaaaagctaaataagaattcagttgaggcggacatccaagtgccacttaattgaagtgggctttggagtgccactttaagcggcacttcatgagccgctttaagtgaagcggtcttctcttgcccgcctcaccccagtatcaaaccttaagcttttcatcaaaatttcatcaaatttgatgaacttttgatgatttttggcaaaatatcaaatttgaaaaacttttgatggtccattagatggagtttttttcactttttcatcaaatttgaatttgatgatagatttgatgaaccattagagatgcccttagatatcattaaattttgctgagacccggtttattcgtatgaatgtaataaggtactcgatatatcagattaattctaaatatagagtgagaatggattgcattatgatattttgaatttgattctgattgtattcttctggtcttgataggaacttgttagttggtgatagtatttccggtagtt

SEQ ID NO: 110601 - DNA, 908 bp, Aquilegia coerulea
  Intron number 2 from transcript AcoGoldSmith_v1.008632m (l ocus AcoGoldSmith_v1.008632m.g) derived from phytozome v7. 0 (chr-ID scaffold_34; pos 655682 to 656589 reverse strand )
acttgatatagagtggagaccctcattcaggcgaggttagtttaatctcgccagaaaattagtttttgtcctattgctcggattttagttttgccttttcttgctttggcttaaacttctgactgagttgtttgtggatattatgatcttcttactatgtttttgttctttggttacttacacatatctctaaatgatacattttaacatctcttgactgcactacatatcatctacggcattgtagaactggtagtttgttgttcaagtttcagaaataaaaatcaagtcaaattttaaagatcgagtatattgacacaactttttgtcagcgacgttcgaaaaatcccagtaaaaatcaaggcagattatatggttatgccgaaatcactttgcagatctccaataatacgtcacattaaaaagttccttttataccaactttctttaggtgggaggtagatttaggataatatctcaaatcttttattaccgaagcgcttatcattgttccaactttgccaagctaaaaatacatcacttttcaacctagtttttgttcaaatttattgtaggggaggtatttatgggggaattttaacctatgacagcttaagaatgggaaatcccttgtcaaagctctctaatgaaattttgaaactggacaataaacatgacattgatatcattccctgaacacagtggtactccattatatgacgcatgtgtttccttctttaaccttagcaacgtcacacttatagtgtgtctcagatgtaagatattagatatcgaacagaaaattggataggttggactagactctagagcacaagacattgattgcaacagtgtttactgaaacaaactcggaatctgtaggagaagtgcctaggaaggctgcagtg

SEQ ID NO: 110602 - DNA, 965 bp, Aquilegia coerulea
  Intron number 1 from transcript AcoGoldSmith_v1.021261m (l ocus AcoGoldSmith_v1.021261m.g) derived from phytozome v7. 0 (chr-ID scaffold_36; pos 1116784 to 1117748 reverse stra nd)
gactgtaattttccattcttgtatattttatagtttgtatgaacatctcgagagctttctatttcagcttttggtctttcttattgctacacaaaatctttttgtcaaaacaaccctacatgtttccctaatccataatgttatagctcttcaaaacttaggaactcctaatcagtatcagtttttagtcagtttcggcatggattgccagaactgcctttaccaagtatttgtgatgatctagtcagtataatcctatgagaaactgtctttctgatgatctattgtttcatagaatttctgctctcttaatatatcagttcttaataagcttctttcataattgcttgggcagttgaagcaaaagagtgtgaggcatgcctttatatcagattgttgaaatttggccttttgcatgcttttgatacctactagaagaatgtcagacattatgatgacatggagtttggtcttttgaatgcttttgagttttgatacatacctgcatgttgttatgaggatgtgtcttgagggaaatcaaagatgtgtttcaggacatatctacgaaaattctgaaaaataccttgaagaaagaaaagaataaaatagaagcacaatgaataactaacaccttagtttgcctaaaacaaggtcatttcatacttctttttagttaactgattagttatctacttatctgttaaattgtgtaaaccaaaatcattgttatacgcttatttaatgttgttttcagctgtttagtatctatattggaggaacccagtgatttttttctcttagaattgtcgtactatattgtttgatcctacaaggattcacctgatgccaatgaatgaacttatgtcatattatattcatggtatctctcatcatttgtggattaaaacacctttgatcctgcattttcagtggccttgacaatcaaggactaaggggtttcttgc

SEQ ID NO: 110603 - DNA, 716 bp, Aquilegia coerulea
  Intron number 1 from transcript AcoGoldSmith_v1.025486m (l ocus AcoGoldSmith_v1.025486m.g) derived from phytozome v7. 0 (chr-ID scaffold_16; pos 2578588 to 2579303)
tgttggatctacaggtaactggcttattacagtaaatacagaactagaaataaatattttcaatccatttagtagaactcagtttcaccttccttcgcaatccacactcccagatcagtatctgtttgagttttctgatggagaagatgatgaatttacccaagaagattatacaggtcgttttttaacgaaagtagtcttatcctctccctcagcatacataaactcaaaattagatgatgttgttgccatagcatgttatggtactaagaagagattagcaatagctagacctggagatgaatcatggacaactataaaatctgcagatatattagttgacgatgtaattttttttaaggatagattctattttgttaatcgcgtgggaagagttgcctactatgacattagttgcaatcctattgtggccacacatgtgtctggagaatttaggacagatcgttattatgttgataagtattacttggtggaatggatgggtgagttgcttatggtttgtaaatatttcacagaagatgaattatactacaacacacgagaattccgagttttcaagttcaatttcgacattaaggagtgggaggagataaagagtttagggcaatattcattgttcttaggatttaatacatcggtttctttgttggcatctgattcgtcgacttttcggtgtgattgtatttattttacag

SEQ ID NO: 110604 - DNA, 430 bp, Aquilegia coerulea
  Intron number 1 from transcript AcoGoldSmith_v1.010578m (l ocus AcoGoldSmith_v1.010578m.g) derived from phytozome v7. 0 (chr-ID scaffold_39; pos 1546340 to 1546769)
acttccacttcatcttcttatcctacgcacaccaggtatgttagttaaccccacttcttcttccctcttcttcttcttcacataacccttatactatattgaattctcacttttttcttcatttttatgttgtaaatctattcaatttcattacccaaacattaaatttcatttcttgttgatattggattgaaaatttgaagaaattgagagttttttggggttaaaatgattaaaaatgcgattttttggttcaattaggtagttttgcacttttgctatgtttatgattaaattctatgaaatgggtattttgttttagattaattagtttgaaaattttcaagtaatttgatttattaacttcatgtagttataaaaatgctaactttagtgtttactcacatttgaaggggttgcggcaattaca

SEQ ID NO: 110605 - DNA, 582 bp, Aquilegia coerulea
  Intron number 2 from transcript AcoGoldSmith_v1.006998m (l ocus AcoGoldSmith_v1.006998m.g) derived from phytozome v7. 0 (chr-ID scaffold_7; pos 2916944 to 2917525)
ttagtgagcagcaactagtggattgtgatcatgtatgaatttcaattatttttctttttatatttagattcatattgatttggtaattagatttttgaaattctataataggattgttcatatatttgtgcagttttagtattttgaagaatgaaactgttcaccttcttagaggactgttaaacttggatatatatatatatatatatatatatatatgattttgggttattttttaaggtttctaatttcattgtgtaaagttttaatttatatacttactggtaatagaatcttgtgtttgttatgtgtatgtgtagcaatagaattaacaactgtttcttattagatcgttaaattctgtaaaacggaacttagagttgtctgtaatgaaatcaaattattctttaagcttggccgcttgcatacttttgtcagagaagtagtgacggctttaattcttgtccgtaactaactgtatggtgtataaaacagtattgaccaattacacagtgaaaagcatgatagtaatctgttttgtgtttggtatgtagtgtgatccagctgataaacgatcgtgtg

SEQ ID NO: 110606 - DNA, 397 bp, Aquilegia coerulea
  Intron number 1 from transcript AcoGoldSmith_v1.022714m (l ocus AcoGoldSmith_v1.022714m.g) derived from phytozome v7. 0 (chr-ID scaffold_8; pos 4276270 to 4276666)
aaggtaatggagaagaaaaaaacatgagtatatgatctcgaggaaaaatttcttattgcgatgtaagttaagttttgaaatttcttattttgatgtaaatttcttacttaataacttattttttacaatttcatgtttattaacttcacaacttctgatttttcatgtaaatgtgttggtaacaaacttctacacacttcagttttagttgattagtacagtaatcaacagtttattaccgttgatatatcgaaccatgttttgatattttgcgtttttttagattaacaatatgcgttagattaagataacttaggctcaaatagactccaaatatgcaatataaattttaatatattgagaccatattagtgaaacaatcagaccaagaacagat

SEQ ID NO: 110607 - DNA, 1017 bp, Aquilegia coerulea
  Intron number 1 from transcript AcoGoldSmith_v1.002025m (l ocus AcoGoldSmith_v1.002025m.g) derived from phytozome v7. 0 (chr-ID scaffold_3; pos 4831321 to 4832337 reverse stran d)
ttcctgctggtatatatattcttcaaacttatttttgaatttaattgatttagatctgattttgattatataattgttattgatggatttactttaggagtttgattttagtggtgttgacttaaatttatgagtttcttttagtgtgaattttttaatttttgtttggttttaattggatacgaatttctactaattctagggtttttttttttattgggattgattttgtttagaggttaagtacaattgagatttttgaaatgatgatttagtaattgggaactttttgttgaagaaagtaaaagtgttttttctacaaaaattaaatgtttcagttgaaattccgtcaattcttatgtgtgaattttgtttcatttgagttggataagaagttcttctaattctagggttttttatttgaattgatttgctgtaaagggttaaggatttgctgctgaagataaaattttgtctgaattgagatttttttgaatgatgatttagttgtaatcctaattggcaactctttgtcgaagaaagtaagcatttttcttacaaaaaaaaagcgtttcaattggaattcctgattacttgcggtatttttatcccgagagttagaattttagtgttgtctttattattgttgttgattaatttcttagatgttttagtagggaagcatcaattcttgttctattattatatataaatgctcttacacccttgagaacatgaatgagggcctctgcataagcatttcatgggtgaacgttaatggaagcaagtaaaaaagtaaaaagaagttggttatgatttctagaatggtccgacaaaggttttggtaactaaacatattgtgctgttgttggagtctttctttcttgccttcaaaagaaaaaaaaaataatcatatttgtcattttgttttccggaggattgaatttgattctgtttcttttctcgttgaatttctgatatgatttgacgatgttaccgcttgtacaggtgcaaaag

SEQ ID NO: 110608 - DNA, 598 bp, Aquilegia coerulea
  Intron number 1 from transcript AcoGoldSmith_v1.004402m (l ocus AcoGoldSmith_v1.004402m.g) derived from phytozome v7. 0 (chr-ID scaffold_3; pos 9829020 to 9829617)
ggtaagtaatacgtagttagttactagttacgactcttctttctcatctgttgttaaaattgaattcatttttcttataaattatgttcgattgagctcaatggttatcttaattagactactgataaagctcatttaactgaattttgtatctttttacgcatttgagatctttgaatgctttgacgaatttcttattagctcatggtagttgtattgttaaaaagttgtattataagggtacttgttagatatcaaattaaaactgtgggaagctgtgaataagaaatgttggttggtagtaaaacaaagaaacaaaagggttacacaccttttgtttagggctcctcaatggttgattaatgtcttaaacggattctcaaagccattatatacaatggcagatgttccgtcgagatcaactgagctgtttgtttttatcagttattggtgttctaattttatgccaccactgtcattccaatttgcatttctgtcttaatagtgttaaaagcattttcagaatttttaaatcgattaatatgtattcttgtcacctgcagaactcgaaaccaagagaattttacttgatattttt

SEQ ID NO: 110609 - DNA, 436 bp, Aquilegia coerulea
  Intron number 1 from transcript AcoGoldSmith_v1.011541m (l ocus AcoGoldSmith_v1.011541m.g) derived from phytozome v7. 0 (chr-ID scaffold_26; pos 1955443 to 1955878 reverse stra nd)
ttcaatcctccaacccgcagggaggatatttccaggtacgctctctcttccctccttctccttcttctcaactctaaaattctcgagattttcattaaaattagaatcattttttcacgaattttgaaaatttctccttatttccgtttgttttgtcacaaagatctggattgtttcttctgaattgattttttttaattaaaattgagtttttttttaaggttttcttcatagatctgaaagattctgttaattgcactaaaagatctcaaaggatgttttgttttaacgaatctaaacactaagatctattaagaagtttgaataattttgactttttgtattcagatctgaatcaattttgtctgaaagttgtttggttttttgtttttttttaataggcgttcttctgaagatctatagagagaaagaatta

SEQ ID NO: 110610 - DNA, 520 bp, Aquilegia coerulea
  Intron number 1 from transcript AcoGoldSmith_v1.002873m (l ocus AcoGoldSmith_v1.002873m.g) derived from phytozome v7. 0 (chr-ID scaffold_2; pos 8747935 to 8748454 reverse stran d)
gacaaagagttcttaataccggttctcccatcactgtaagctctttgatttccttataatccatcatttcttcatctgattttattggctgatttcgtttattgtttgaatcggcctttttcctgtatcaaattgaattgtttgaccaaaaagatctgatattttgattcattatttttggtgcatagatggttgactatcctgattggtttttatagttaacaatgtttcgattttattgtatgatgatgtgcatttcaatgtgaatgaagatttatgacggtttcaacatttacatggatccacattctatttcatgctgttcgaaaatcaattgattattattttggatttgtttaattagtcattgatgagattgtgtgtttatggtgcttaaaatcaaatttgcatacattcctgtttcagttgtgaatatttttctgattctccctttttatatttggatttttttttgttgtgattaggtacctgtaggtaggtctacccttggccgtatcat

SEQ ID NO: 110611 - DNA, 884 bp, Aquilegia coerulea
  Intron number 2 from transcript AcoGoldSmith_v1.017319m (l ocus AcoGoldSmith_v1.017319m.g) derived from phytozome v7. 0 (chr-ID scaffold_55; pos 553728 to 554611 reverse strand )
gctctgccgaggaacaaacatcttctggagctagtgtaagttttatttgtcaaaataaataatccctgtcataaacagatttataaacaaaaatcaaacaactgatttaagcttaatgaacaaaaatataaaggaagtcttagttttcttggtagtagatagtcctatacaaattcaattaaaatggttgtgactttagttggaaaacactgagggtttctttagggatgtgcattttcttgccaacagaacaagattaagctaagttagtaacagttgcttaacgaaacagaacaggttttaaaattgtgaatttcgtgtgtttcaatttcagatggccggacacgactttgtttatttctactttgtaaaaaaagaaaagaaaaaaagaaagcctaatctagatggcttttataaacagacaatggaatagtctatggaaaagtgaaactatgaaaagaacagttagaatacagacaaattgtatacttatattccgccgaacaatgtactagtcaaatggtattttactttgttttcaagcatacggagtgtaacttcgtcctcgctcatcccagtgcgtcaagcaccatactgctcgctaatgttaatattgtccccctttagtcactgcggatatccagcagtagagggttttggatcagggcccacccatgtggttcaccccaaaagaccttgacattagttagagtatggttaagctctatatactaccaacacaaccacttccttggcaatgtgggactaacaccaactcattgtgttacacggagatttgaatcttattcaaaacaaatgatatgttacaagatgatgaaactctcccctcatgttacaggttgctaaagaggcttcaacaataa

SEQ ID NO: 110612 - DNA, 340 bp, Aquilegia coerulea
  Intron number 2 from transcript AcoGoldSmith_v1.025469m (l ocus AcoGoldSmith_v1.025469m.g) derived from phytozome v7. 0 (chr-ID scaffold_25; pos 608077 to 608416 reverse strand )
agaagccaaaacctctgtataatcattgtaagtaatattttcgacaagtatgttttctgcaaagagcctaatgacttgagtgtatttaagtagttcaaatttcaaagttcaaacttgagtatataactatatatgagagccagacaattttttttttgctaaagtttataatgtccaacaatttaagaacaaaagtttataatgtccaacacttaataagagcgtgacatggaaaaactgaaacacatgaatcacaatagttgtctaaggttatagtgttagaaatgatcagtccaaattgctatatcaattatgaatgctttgtgaattcttcttttag

SEQ ID NO: 110613 - DNA, 517 bp, Aquilegia coerulea
  Intron number 1 from transcript AcoGoldSmith_v1.005647m (l ocus AcoGoldSmith_v1.005647m.g) derived from phytozome v7. 0 (chr-ID scaffold_7; pos 5007745 to 5008261)
gtgcttctaccttctccgtttttggggtatgtctttctttctttcctcatttcttattcaatctattgtgttttttcaatataatgtttcaaggtttccaccagatcttcataccctttgtataattggatcatgtgattgataaactttataccaaaatcttcacctccctaccccttttgaaaggatttttaattgttcaattcttacttgaatctgttaattatattcaagatgattatcttattaggttctcgaaacaataattagttgattgtatagctcagaatgacaacacctgtacagcgagactgtgcgagtattcattatgtgttgaaccttgcctcctgaatttatctgagggatatttacattttttgattatattttttatggtaatgtttggaaacttatcagaatgtatcaactatcaagtaaattatgttgcatagttcaaaaaagtcctgcatcatgttactagattgatttattttaagacgtgttgtacagctttttg

SEQ ID NO: 110614 - DNA, 843 bp, Aquilegia coerulea
  Intron number 1 from transcript AcoGoldSmith_v1.022915m (l ocus AcoGoldSmith_v1.022915m.g) derived from phytozome v7. 0 (chr-ID scaffold_93; pos 541472 to 542314 reverse strand )
gctttatcactcacaaggtaaggctaatggagagttagaaaaattggatcccattggtgtaatttatttgttgattggattttttttttttcttgattttcatgaaaatggtaagttgcttggtagctaccttccttatttcttcttcttctctaatctctaatccaagccacaccacaccacaccacaccacaccacacacccatctagtatgtggtcatgaagtccatgcttaatttcccctgagcaaaatggtttctactgaggggaatctgctagtaagtttggtatatatggccagtgcaaaagtagtatactttttgagcagattttccataattttgtttttggatttgtggtagaagctagagaaatggggaggaatcaacacactgcaaaccattactttggtctgattattgatttccaacttttcttatataggttttaaaaggaaaggagaaaaaagtcagaaaggagatatgcatcaacattgatgaagataagaggtaaaaatgcagcacctttttaatctatatatatgatttatatatagatatctaaaagttattgatgtatgttgtatgatgtttagatgttacagtggcaaaactatttcttttcaagaggcagtttctttgctttcatctcctccatattcctctaattatggtaagattgacgcgctttgaataaaaatgtacaaaatgcagaagaagttttttgattggaaatcccaaagtacatctaatacttttattttttgttttgtttcaatttatttgcgaaaattaggtgagggtgggcgtgttatacttgtgaaggtaagcaagtcatacttga

SEQ ID NO: 110615 - DNA, 756 bp, Aquilegia coerulea
  Intron number 2 from transcript AcoGoldSmith_v1.007610m (l ocus AcoGoldSmith_v1.007610m.g) derived from phytozome v7. 0 (chr-ID scaffold_35; pos 2423187 to 2423942 reverse stra nd)
aaggaggatcttgagaagcttttctctgaaacaacgtatgttcttttctaatttcttgcttgtgtatatatttatatggttaaatctgttgtagctgatgaatctgattttacgcgtaacttaaaatgtgtcaaattttagaatattgagattgacaatgtcagaatttgggggtaattatgtcttagtccaataattttggagataaagattgttcttgatctgcagatattatgtgatttagaaattacaattagtattggtaggacctgactttgttttggcattctattttttttttttttttttttttctggttaggtagtttatattgggattcctgtttaattataattgtaatggatgattttcttgagctcgattgttgcttaagcaagttaatgtctgtaggactcctagagatcctgacattgtcatcatatccaagttcatcatgttaatggattggccaaaaaagttgtaattctctttccattccatctaagttgaatagtataaaaaactaaaaacagatttgagtcgtcattattaatgttggaacagcaagatgctctagtttttagtgatgtgcattaaaattttcctaaaagattgcatgatgatttattttatttttgaaagatttcatggtatattttgttttgtattgtatatttgtatgtaacattggcatattttccttttgaatttacaagtaatattgcttcttatcttgtcaactgttgggaagctttg

SEQ ID NO: 110616 - DNA, 618 bp, Aquilegia coerulea
  Intron number 1 from transcript AcoGoldSmith_v1.005106m (l ocus AcoGoldSmith_v1.005106m.g) derived from phytozome v7. 0 (chr-ID scaffold_8; pos 4077008 to 4077625 reverse stran d)
gtttcaaggtttgtttttctttttttcatttgatttggtttggtttttgtcatgttgtcttcttggtttagaattgattgaaagtaacatataacagttggaccaatggataatgaatgacaccattgttttcaatattgcctatgaatagctaaagagctacaaataagttgtaatcaaggtgaattatcttggctttatggcgacacaaaacaaggttgggaatactggaaaatattggacttatagtatgccatgtatagaaagttaagatttcataagtctggataaggtttgcttgtcaaataaaaagaggaaatgatttttagggctttggctgtcttggttggtgaccatacgaccaatatcattgccaaagaagattcattatcattcataactttcgtttgtcacttctaacgtagacaattttgattgaattttggcatctatgtgcatgagtatggatagactttatcagcaggaaatgacgacataagaagccctcaaaacacatttttgtttgttcattattaatgatgttttcagtacattttatctttgatgtttatgttgttgtcaggactattgttgctccgctcgagagacttaagttgg

SEQ ID NO: 110617 - DNA, 714 bp, Aquilegia coerulea
  Intron number 2 from transcript AcoGoldSmith_v1.027712m (l ocus AcoGoldSmith_v1.027712m.g) derived from phytozome v7. 0 (chr-ID scaffold_2; pos 5645551 to 5646264)
tacaagggagtacactgaatatttcaaaactaagggtaggggtgttattcgagccgagcgagccgagctttgaatgttcatactcggctcgttttaatacgagtcgagcccgagccgagcccaatttatgaatcgagctttgttttatgttcaaactcggctcgcgagctatttatcaagctcgagctcgagcttgttaggctcgtttagctcgagttaagctcgagccgagctcgagccctccaattaaatgtaaaatcaatcaactctctcataagaactgctctttattattagccaaaccaaagcaaggaatatggcgacggagtatcctacagggagtcaagtctaaaccactgcagtggcagataggttctggctcagagattaggatctggcaagacccttggtgatttggttctctactaaatctttgcaaactagttacccaaacaaaaattcaaatcttaccaaaaaaatctcaatcaataaaatcaattaaactaaaaattaaaaccaaaattcaaaattcaaactttaaaaacaaaatcaataaagggtttaagaaaacgaatgtcgttataaaaagatctataagaattaaacaaaaagaagtgaaattgatttgtagatcgaacaacgatcgaagacgatgttgttgttaattacagtgttctcttaagctccattgataagagagagacgagaagctcg

SEQ ID NO: 110618 - DNA, 565 bp, Aquilegia coerulea
  Intron number 1 from transcript AcoGoldSmith_v1.007739m (l ocus AcoGoldSmith_v1.007739m.g) derived from phytozome v7. 0 (chr-ID scaffold_58; pos 592217 to 592781 reverse strand )
aattcttcaaattgacagattatttgattgattcagtaagtttgtttatttcttaatatttttcttttaatttcttgatttgggaattttatttgagaaaaatcttgtttgggttttgtttagttagatatcttatgtcttaattgtaagtttattttgatttttttgtgtagaagatatttttagatgatctaaagatgcccaatactttagcctgtttatctgaattgaaattggggaaatggggtttctttaagattgtgaaagtttcagtctttcggatttttattgaagatccaagcttgtttagcaaaaaatttaaagattaacttgggtttctgtgggtaaagcttttgtgaaattaaaatctttaagtttgaataagtttcttcttttgcatataaaatagtagctggggttcaaagagggctcagtctgtttgttgtttatgatttatatgtactatttgtagcgggttatttgagtttttgtttgtcatatagcctgaacttgtatatgtgatcatgcagatttgatattgaggttaagtttcaagccagcagat

SEQ ID NO: 110619 - DNA, 539 bp, Aquilegia coerulea
  Intron number 1 from transcript AcoGoldSmith_v1.025118m (l ocus AcoGoldSmith_v1.025118m.g) derived from phytozome v7. 0 (chr-ID scaffold_35; pos 2369934 to 2370472)
gaccattctgggttgttccaaatcgtaaaccacaggtgatgattactatctttctcaatatcttatattcctctatatttggctgtgttatattagtaataatttcatttgatagtgtacctattgatttatgtactactttgtttatctgttatataagttcattgagttaatttcagtaaactcttaacaacaggatacttgcatacagactcagctgtaacacaaagaagagcataaaagtaataaataatacacaaaataaaagattacttgtatctttatttcatgctaatatcattgcaaagacaaactataaatgaagttatactctgatagtctgatcaaacttcagcgtgactgtataagaaagcttttcttagttaaagtagctaggaaactggattcttctaccttttcaaatgtaaaatttttagagtctgcttataattttcctgcaaactttttactaagttgtcaactgaaatgaatcttcttctaatggaggctgttgcatgtattttcgattgcagaaagag

SEQ ID NO: 110620 - DNA, 843 bp, Aquilegia coerulea
  Intron number 1 from transcript AcoGoldSmith_v1.014094m (l ocus AcoGoldSmith_v1.014094m.g) derived from phytozome v7. 0 (chr-ID scaffold_19; pos 4350293 to 4351135 reverse stra nd)
aagttgtgtccctcagaggctccaatatcattgaggtaatttattctcttttcttttaaactaatttattaattattttcttatccccctctattggttaagtttagtaatatggttttaagttttttttttccctctgtaatctgtagtgaggttaaagtagtatacttactgtattttaaagaatgggtagacagtacactctttcttgactccgttgcagttcctataatgcaacacttgctcgtaaaccctctcaacaccaccatgtacttgtacacttattgtgcatgatctcccttattttatgtttgaatttacacactatcggcttttttattttctaatgggtggttagaattgcacaacattttgacaaactccttctccatgcattgagtatgggagacatacagatagtcccctcaagacaatgtgttcttatgaaaaaaagaaatgtcaccaacgactatacttgcactaattttgttaaaattagcaaagttgtagctatatgttcatacttcatacttgtaaaaataatttaaaaaaaggccaatttatacgtctattttttttcatgtgcataagtgcattgtacagggaattaaagctatgcttattcgattcatctagacaatggaactaaatttgtgaatgcgattaagtcaaattttcattattcaactaattttctatttaagatgcactttaaaatacttgtttgtgcaccatttttataaccatgcttcttacaattgctttatcactcattttctctccctcttatcatattgagtttgcttccgatacccacccccttgtcatattgcatcttaggtg

SEQ ID NO: 110621 - DNA, 504 bp, Aquilegia coerulea
  Intron number 1 from transcript AcoGoldSmith_v1.006397m (l ocus AcoGoldSmith_v1.006397m.g) derived from phytozome v7. 0 (chr-ID scaffold_2; pos 3443185 to 3443688)
ttttctcgtcatcttcttaacactctattacaaaggtttgcaaaacatctcaatttgttgttcaaattttactttttttctttctttctggttatagtgcattcaaaccattgatggtgaaatgggtttttgctaaattgtttttgtttcaaagtatttcaatccattgtaaaacacctttttttttcttgcttaatgcattcaaaccatcttgtataatgtaatggggattctgtattgctaaaggtgttgttaagattatagttaaagatttgaactttgtttgttctgctatcttctatactaaaaaataaaaacaaaattgaattgggtttttatctcagtatatatatgagttctgttccgattgaagcaaagggattaaggatgatttgctatattattttttttaatgtagataaaggtattagaagttggttattttagttaactgtatgtttgttttcagatataaagaagttgcttatttggatactgattgtg

SEQ ID NO: 110622 - DNA, 996 bp, Aquilegia coerulea
  Intron number 2 from transcript AcoGoldSmith_v1.013354m (l ocus AcoGoldSmith_v1.013354m.g) derived from phytozome v7. 0 (chr-ID scaffold_16; pos 3173527 to 3174522)
ggcatatttacaaagcggaagacataagagttcttgtgagtacatcaattttatcttcttattcctttagttaaatatgtgtagataagaacaagaaatccaaattgtcacgcttataatgttgttggcaattttgtatatgttttgtggaagagaaagtttcttaaagatttcctgaggcatggcattcataaattcaaacagttagcaatgaacaacttgtgcaccacttgtctggaagtccacgattccttgtatgatatgactgtgtgtagaaatgtatctaagtgttgaaaagttgatcaaataagtttctttcaaaagcttatatttgattgtgttctagtgagcgccatttagtggattggctcaacttttgctgtttgggttctttcatttgtttctattttgtaatatttcttcacgcaatggatattttactagttttccctctcccatcctgctttcccaacccctctggcctatcaaaccggaaaaaagaagaagtaaaaaacaaataaaagatgtgcacgcacgcacgtccccccccccccccccccccccccccacacacacacacacacacacgcgcgcacgcatggatgatgttgaatcctagagacctttactgccatctcaaagcagcaaaaaattgagctgtacttggcctccgtacgatcaagtttgtgtgttagagatgccttaattttaactctaatacaaatgatataagatttacaactacttttcaccaaactggcctaattatcataagtcacgtgtacatgataacattgtgtaattttgcataaaaagtttttcacttactggataagatgttttgtgcatcctcctctctagcataccaagatacgtataccagatatgcttaatatttgttaggttgcttattgtcatttgcagttcaattttgatgtattttttgtaatgatttgtttaggtcacatctctggattttgtgcactgtgtgccatt

SEQ ID NO: 110623 - DNA, 460 bp, Aquilegia coerulea
  Intron number 5 from transcript AcoGoldSmith_v1.016782m (l ocus AcoGoldSmith_v1.016782m.g) derived from phytozome v7. 0 (chr-ID scaffold_8; pos 3547602 to 3548061 reverse stran d)
ttcaggttaggcttcttttatgttaagtactaaatgacacttctaaaagaaagttcacatttgaattttggctacgtttatgcacacattcgtctggacaatttatctatgggtggtcattgcagcggaatcatattacattgtgttcactcctaaaatagcccacttgtatttcctacatatgtgtatgcttagcttaaatccctgagcagttgaatgtactctctcgtataaaatcctttcaataagttttgtctccacaatgaatctcagcttgattaggtagtccattatatgaagtttagcatgaatgttatggcagtatgccatccagattgctttgctttgcttttttttttccctttttcttttcaagtaagaatttggagtataaaactaagaatcattcggcaatgatgttacaggaaaggggttgcagtagatcgagtggttgggtttc

SEQ ID NO: 110624 - DNA, 537 bp, Aquilegia coerulea
  Intron number 1 from transcript AcoGoldSmith_v1.011400m (l ocus AcoGoldSmith_v1.011400m.g) derived from phytozome v7. 0 (chr-ID scaffold_3; pos 8562018 to 8562554)
accgaaccggaccaaatacaatcggtccggtttcggtccgaaactcggtcctgggcttttttattgggcctttagtccactacaatttagatgatttttcttaagttttgagctttaaacaaaataagacatacaccaaatcaagtactaaataggaaaaaggtccaaaaccaatgaaccaaccatggatccaccataagtccacaaccaattactaattcctatgtctagtttagtaatttactaataaaaaaaatgtttttttatttatttcggttcggttcggttctctcggttctataaaaacaagaaccgagaccggaccaatagctatatagttcggttcggtttcggtccgatcttgacctgtttttagtcaactcggttttgactcggtgttttcggttcggttttcggtttttttgcccacccctagttaatgttcttatctatttattgcagtgatactgaactatctcaaattgcgtttgttactttcaaggactcgcaaggggcagacaccgcacttcttctttt

SEQ ID NO: 110625 - DNA, 1019 bp, Aquilegia coerulea
  Intron number 1 from transcript AcoGoldSmith_v1.004901m (l ocus AcoGoldSmith_v1.004901m.g) derived from phytozome v7. 0 (chr-ID scaffold_2; pos 6464351 to 6465369 reverse stran d)
gcttttcagcttcagtttcactacaacaggtttgcacacctacacctcaaaccaacttttcttcctttctcttgtaatttttcttcttcatttttttccatatttagctcaaatattagcttttgaggttgtgatgttttaatattaggaaaaatataatgtttcttatccttgtttggaaattggtgaaaaatgaagaaatggggttcttttacttctttattaagctcaagttggaaattttattctctctttgttggtaatgttaatgggttttcttcaaattttggtaaattttagcttctatattgtagaattatatatttcaagaaatggggatgaaaatttattcactggaatttataatttgtatcaatttttagaaataaggactaaagtttggacatttatatcttccttgatcacattgtaatcaattgttctgtcttattttgtgatcttggtgaatacccttgagaaaaagagactaattagttcttaacataaagatatgaggaaggaagtcgaatatttctctaaagtctaaactatgcttaaattcctttatggtcatgagtcatgaattttcaataatatacttccacagttccattgatcttctcttctgtagctaatgggaaagtttcacttctcttctttctaatatatgtggaagtgtttttgtgaagtttgatcagttgataacttgatattgatgttttttgcaaagcaggaatttggtataatgaaaatgttgtaatttttttttttttttttttttttttttaattttaagtagcaaatgaagaaaaggttgcttttgtttttcggctaaatatcagtcaattgatcattttgtaattttagtaatgacatttaatcataaactattggtacattttcgtggcactttcaacaagttaagtatttattgtccttaatctcttatcatcactttgtgattgtgcttttgacgactgatggctaaactatgtttgtttgttggttttcagaagctt

SEQ ID NO: 110626 - DNA, 954 bp, Aquilegia coerulea
  Intron number 1 from transcript AcoGoldSmith_v1.015112m (l ocus AcoGoldSmith_v1.015112m.g) derived from phytozome v7. 0 (chr-ID scaffold_3; pos 6657557 to 6658510)
agaggtaattttcaaactgtttttgcatattagctacagaaaacttttgttgaagaagacgaccaaatatggaaagtatgaaacgtatggctagctaatatttaattttgttgtatttatacttttatggaggcccacatactaaattttacggtagtccaacatttgggcttgcaggccttgggccgtgggctttatatagctgattgtaatggattttttaatcaaattttatggtgtggcccgatttatatatgtaggcttgagaggccaataagataataacacgtgtttataaatctgttggacaactaatgaaaaatttgggctatgaaaatgtggccatgaggaggtaatcaaaacatgacacatgtcacttgagttatcgattcaaatctattagggttcactgcaccaggccatatgtaggttatatttttaacgacacatggtgttttgtgattggaccctaatactcgcatataaaatatggcaaaaaaaaaaaaaagagatgtttggacatacccccatttgaaagtcgaaatttgagatacccctatttgaaaaaatttttgagatacccctcaattcaagacagaagagctttacagccgtaggtgagttttatgatggattatgatggacggctaagataacaccacatcttgaattgggggatatctcaattttttttttcaaatgggagatatgtccaaaaatctcaaaaaaaaaaaatgtttttgaaaagcacaaagaaattgcatattgttatgtatacgtacaaattttgtttatacatacaaatgtgaatcctgtgtattttattgtacaggacgtcaacacttcttgaaggtggttgaagtttttgttgtgtgtgttaccttgtcagttttatgtgaaccaaccttgtgtacactagtccattaccaagagcaattgccacattcaattgat

SEQ ID NO: 110627 - DNA, 766 bp, Aquilegia coerulea
  Intron number 1 from transcript AcoGoldSmith_v1.000189m (l ocus AcoGoldSmith_v1.000189m.g) derived from phytozome v7. 0 (chr-ID scaffold_3; pos 7647601 to 7648366)
aatatgtattttgtaggattagttttgctattcaaaaaggacttgcagcacagtttgtagcacgcttgtcctttaactttgtataattcctcaaatttttatcaataaaatttgttttggttttaaaaaaaaaaaaaaaaaaaatgcttaaagtagtaagaaacgtttgtaaatcactgaatccgatttgtacgcgaattttaaatagtagcaccaatgcagtcatgcactgatgcaccatgctctgctcctgctttacttacttcgaccgtttaatgacgacaatgcccttactaatgttttattcaggttatctgttaatccgataaaccttgcttcttccttaccagtctcaactctcaagtcccactgaagaagaccaaaacctctctctctctctctctctctctctctctcgtttaacaaatgtagacttcctttaaaccctaattcttctgaattttcaattctccatggttttcgtcatggaatcacttatctccatttcttcttcttcttcctccattgatagattcacttcgttatctcatcactcaaagctcaatctcttctctacttcttcttcttcttgttctcgtttttcttcaaattctcgttcaattcgaagaaaacgattaaatattcaaaaatttagtatttactgttgcaataaatcactaaattccattgaaattagtaaatttaagcttttagattctctcaatagttcaaattctgtaaaacttgataaatcactttctttcag

SEQ ID NO: 110628 - DNA, 921 bp, Aquilegia coerulea
  Intron number 2 from transcript AcoGoldSmith_v1.027117m (l ocus AcoGoldSmith_v1.027117m.g) derived from phytozome v7. 0 (chr-ID scaffold_19; pos 4277413 to 4278333 reverse stra nd)
atatagtaagcaactatagattcaaattctgatgatataatgatttttatcttcatcagtatgtgttgatcaataatttaattcacatactagtttttttttttttttttttttgacaaaagccagtagttcggttgataagccaacatgcagtatacaaagtagttcatcagcaccacacatgtacagatcagtgcttatttctagttacatagaagtatatagagagattggtaatgataagggtttcagactcctcttggatactcagtagtgagactatccatgaacaaaacatactagctagttttcttgtgttaattttattggttgtactgtggtcttcatagttgtaatgatcttgggcattcaactcagaattatgagtccatgttgcttgaaattgctatagttttgatgattcactcaccctttagccctagggcttatgatgcaacatattacatgatattgcattagctaacataagggtgcagtgtcttctactcttcttagtaattccagaaggtatcatattggttgaaaccttggtgtataaaattgatgatagttgagtagattgcatgatctgaaaatttttatcacaaagttgacattttgaattgaatcaaatattataaaatatatatcatcgtcttataatttacggcctgccatgttatgcaccatcatataattctgtttaattctataagcaagaagaatgcaaagtagatgttgtggacattctagctgatctagctgttcattttagaattagggttttggtgtgacgtgcatcgcacatctgcattatctttcctgtaatcaaatttaatcggttggtgaacaaacaattaccaaacttgttgttttatagttaactcttttgtttgttgatctagctccagtggaaaggtg

SEQ ID NO: 110629 - DNA, 219 bp, Aquilegia coerulea
  Intron number 1 from transcript AcoGoldSmith_v1.004161m (l ocus AcoGoldSmith_v1.004161m.g) derived from phytozome v7. 0 (chr-ID scaffold_52; pos 131548 to 131766 reverse strand )
ccttcagctaccgattttgttaaatctatcaaaaggtgttttcttctttcttcgggtttcactttgtatttatttttgcttactttaattatttgatttcaaattgatttattctattatgtatgcgatccattacttagaatacaaaatgttaaacaaacaacttttgcttctatttttacagctttattgtgtctctttcaaacaatcctcctgatc

SEQ ID NO: 110630 - DNA, 958 bp, Aquilegia coerulea
  Intron number 1 from transcript AcoGoldSmith_v1.001562m (l ocus AcoGoldSmith_v1.001562m.g) derived from phytozome v7. 0 (chr-ID scaffold_87; pos 298710 to 299667)
aaacaaggaggtgctcttcagaaggagctaataaggtattaattaataattgtttctgaattaattaaattttctttatatttagtactagtactaagaaaatggacagacaaactataatatttggagtttagagagtgccagagtggtaggtggttttaatattaaaacctaccattttttgttctactaattaatgccatgattttattttattttttccaaatccttcagctaaattagattatgattgtggttttcttttcaaaattagaatcttagttatacctatgaatattgattaggattcatgggaccccaagtgtgcaaaactcatacagtatattacatgatgaagagcatactaacatataaattactataatcttacgctctgtgtcttgtgtgcatttccaacattgattttccatctgaaagggagtggactttattccttccatggcctcatctaaattcatcatctgtggactcacattcgtctacatggtccaaacccagaatgaatgacacatggtcatatgacatatgagcatgtatcatctatttggatacaaatgttacactaatcctccacatgcattgttttgcagctcctctgttatgttggatcgggttaacttagggaatttggtcatgttgtcttcactccatcaaatattgcattcaaatttgggttaacaagttttcatttatattatataattaagtttgaccaaaactttaaatattctgaattactcaaattagttactgcatataggacatttgtgcataatttttctgtaaaaacaaacattggttattcttgatgcttatacaagataggtgactatagtgagcagtgttactttgatagattgtttggtgtgatccttgttaatacttttgtcacgaaagtttcatgtaattaattaatcttaatggaacagatttttga

SEQ ID NO: 110631 - DNA, 717 bp, Aquilegia coerulea
  Intron number 3 from transcript AcoGoldSmith_v1.025871m (l ocus AcoGoldSmith_v1.025871m.g) derived from phytozome v7. 0 (chr-ID scaffold_3; pos 8278972 to 8279688)
ctaaggctgaagttgcattcaaacttgtatcagaggtgggatttttttttttttttttgaagaattgcatgattagaaagttcattactccaattgaatcacaaattccgattcaaacctacacaccacgtcataggcaatttttttgatttgtttgtgacattactagtattgtagaaattgattactaggctactagcatcagtctgctattagctttcacgagttctattaccatttcaactctatctggattgagtcattttttcgacgaaggcagggctctttatgtatcatcttttgtacatgtcaccatttacaaatttcctttttctcagacttcataatgaaccgaacaattagatccgactacacatatacaacatataaaactcgattaaacaaattgtcttccatcacatttcatcataaaaatatgattgcagacctatgcatgcccgtctgacaatgtgaattatagaaatgcaaattaactactagtattggtctgctgctagattacatgagttcaactctatcttgtgtcatttcttgaacaaaggcagggctctttatgcattgttttcatcaaacagcttagtgaatcgaacaattagacttgatcacacatttagagtacatataaagttagtaaacagattgccattcatttccttcatcgttctcaatttagcaaaaacacataattgcaggcct

SEQ ID NO: 110632 - DNA, 909 bp, Aquilegia coerulea
  Intron number 4 from transcript AcoGoldSmith_v1.006206m (l ocus AcoGoldSmith_v1.006206m.g) derived from phytozome v7. 0 (chr-ID scaffold_61; pos 95796 to 96704)
aagcattgggtgtagccattgatttggaacctgaggttagtacatcaaattaggttttggtttgtatgatttaatgctcacatgttccttatctagtgggtagaacatgttgcaaatgcctttaataacagatgatatagcacagtagcaggttccaccaatgaagagaacctgcaacataaaattttattttagtactaactactaagagtaggatagggttgtccactctattcattcaatagaactggaacttcatctttacttggaagagtatgggcaaatgataggataagtggccaactatgtaatatcttgaatcacagatctggacttaatgttattcctcatccactaaattagttgtctattcattgaaaatctagattatttatatgaaaagaagtgggtttgttgagttttgccaaatccatatttctgtcatggtcatatttcaggaaaataatttcctctttacttgtttttatctcaaagctactcttaatatctgatgataattcgtttttagatcaatctgaaatgacatcaaaatataaataagactaatgtctcttgagtctttgctaactattcttgtaaagtctttagtctctttgataaattttgtggtggtcttttggtgatcatttattcatggtgatttttcagctaagactgtgggatctaacagtattcaatcaaatgacttataaaatgatctgaaaaaaaaaaagctttcttagatgagcatgtatgttttattgggtggacaggccaagtggttggactttaaaatctgtggcattcactaaactctatgatatggagcaataactttgtcctggcccttaaccttatatttgatcctaattttataaattgtatttctgttatttagggggtaaagag

SEQ ID NO: 110633 - DNA, 437 bp, Aquilegia coerulea
  Intron number 2 from transcript AcoGoldSmith_v1.003454m (l ocus AcoGoldSmith_v1.003454m.g) derived from phytozome v7. 0 (chr-ID scaffold_2; pos 9032579 to 9033015 reverse stran d)
ttgcggtggatcagtatcatctttataaagtatgaaatttctattcttatgatcatcttcatgtcttttacatccaattattttccgcaatatttttatgtctagcttaccaaacaacattttaattaatattaaaaagaagtctcaaaatattcaaaatcaatccttaaaaccttctcaatattcccaaatgagtggacaacaatatgcttcacagtttttaatgattttaaagaaaagagtacacagtgtgcaacttgttgatagtggagtgttgtagacttgtagtacaaaaattatggttcaatggttggttgatgtcttgatggagacttttatttgtaagtttgtaactagacgtctagacctattgttaactttttttttttttttttttctgtttttaatttgaaataaaattttgtcttgattgcagc

SEQ ID NO: 110634 - DNA, 1003 bp, Aquilegia coerulea
  Intron number 1 from transcript AcoGoldSmith_v1.027742m (l ocus AcoGoldSmith_v1.027742m.g) derived from phytozome v7. 0 (chr-ID scaffold_2; pos 9355885 to 9356887)
gttttatgtcaatctcagatcatgacattaaagtttaccattcaagccaccaccaaataattgagcaaagggttggttatacattgtgggatctacaggatgccacatgggattgccatgatattagtttagtgtgtgttcaaaaatcaaaaccattatagtcaggccaattccgtatcaatcaagtgccaagtcttacaagacctataatttgcccctttcacattggtacacacacccgcacacttattctaggcttccaacttctgaagtatatccgtatcaaaagggttttggtcctgtatgttatttcaactttttgttttgttgttcttttgtttcttatgattcattctcaaaatgatggatacatatacatacccaagagcttttaattagttaattcaatcttaattcttaaaagtcccaataaggagcacttaggtatgcttcatttcaattggatatctatgcaatctggttgccatgactaaagaagtaaaccaagccaagcagctgctgtttcaatctcaggacttcatgaggaattagtcattaattacgatcatataagtcattacaatcataaaagcaaaataataatcttataagtcataatcatatggtgtgaaacaaaatagaagaaaccaagccaaaaaagtacaagtcaaggtataattatattatgtacgcaagagacaaatgaaagaaccttatattcaaaacctagtttatgcaatatgaactcaaaaatactcggttttgacattcactcagctatataatatatcaatatatatgttaacgtttctcctgactgaacgaaatattatcttgtcctttggtatatatatatagtcaataagaaattagctagtgtttgtgtgggaagagatatcagttttagagaaacctataagctatttgtggaaaaggttaccaacatgagtgatataattgtggagaaggctttaagctgtttagggaaagggtttgatattac

SEQ ID NO: 110635 - DNA, 699 bp, Aquilegia coerulea
  Intron number 4 from transcript AcoGoldSmith_v1.010486m (l ocus AcoGoldSmith_v1.010486m.g) derived from phytozome v7. 0 (chr-ID scaffold_26; pos 1066183 to 1066881 reverse stra nd)
acaggtttgttttgcttttatcaaatagtcattataaccacgaagatctagtgatgggaagcggagagaatgctacattataaagcatgatgattatataactctgcactaggtacatgtatgacttggctaattcaacgctgtaagttgggtattgaaataatggtttagatagaacgtctggctgatttttgaagagcttggtgctttgattgtgattactgaaatgatggccctaatctgtcttagtatcactgtgacacctcaaaatttgacttttaggcaatatttaggtgcctcaatttcagcgagtcagacccgctgtttgataattatgatccgtgtaatttccgggaatcatgtaatgatgaattgatgtgaatcccatgttctaaatttttttttgtccttacaaatgacgaagttaaagcttctgtgacaggaattttgttaaggttatgaactaaaaaccgagtctactcttgtattttccttttctctaaaccattttgaatttgaatccgaatctttttttttttatcgaaccatttacttgtgtcaactttttttttttccttttcctttttcttttataatcttggttgtctctggtttatactcaattttgattataatatttcctttaaatatttgtttccatttatttaacatctatgttgtgtttttcatcaatagctg

SEQ ID NO: 110636 - DNA, 958 bp, Aquilegia coerulea
  Intron number 1 from transcript AcoGoldSmith_v1.001066m (l ocus AcoGoldSmith_v1.001066m.g) derived from phytozome v7. 0 (chr-ID scaffold_32; pos 327831 to 328788 reverse strand )
tttccttacccaaggtgatggaatgaaactacccttttcttctttttttgtttatattttgtttcatttgtacattcaatacaacatcaactctaatgaattgggttctcttaggaattttgtcaaacagtttgtttcagtgttcaattcactttccttgattcaactatatatactgtattacttttaatcgtatataatatgcacacagttaaactttaatgaatttgatttgcctgataagttcatttctgtgctcaaaacaaaacaaaaataaaaatcggtgttaggtctactttttgttgcctatatacattaccgactttaggaggtccattatacttcagtgggaaaaaacagtgtccgtccgtccacttcataaaaaaaaagtaaactcttcttcaattctctctctctctctctctctatatatatatatcaattctccctcttctttcttctatctcttcattcttcttcttctctttgtccctctccgatttttcttctaaagtcggccccccaccgtttcacggttctatattggaatggtagaaccgtgagacagtgaggaccgactttagaagggaaatcggagagaagaagatagaagaaagaagaaggagaagtaggagaattgagagtgagagagatcacaaagagaggagatgagaagaagagaaagacgaagaaggagaattggagaagagagttttttttttttcttgaaagtggatggactgacactattttcccccccacccgaagtataatggacctcctaaagtcggtcgattaaagaagagttaccagataaatggacataagttcaaaaacttggatgaaatagaataaaattaaggattgtgaatattggaccgatttatcatgattggctccttgggtgataattctgtatattttaatttgatatatttgtgcagtggagctgggttgc

SEQ ID NO: 110637 - DNA, 724 bp, Aquilegia coerulea; identical to SEQ ID NO: 109735
  Intron number 1 from transcript AcoGoldSmith_v1.010561m (l ocus AcoGoldSmith_v1.010561m.g) derived from phytozome v7. 0 (chr-ID scaffold_34; pos 1728552 to 1729275 reverse stra nd)

SEQ ID NO: 110638 - DNA, 897 bp, Aquilegia coerulea
  Intron number 3 from transcript AcoGoldSmith_v1.012159m (l ocus AcoGoldSmith_v1.012159m.g) derived from phytozome v7. 0 (chr-ID scaffold_3; pos 1631224 to 1632120 reverse stran d)
catcatccggatttggttcttcttcagacatattggtaaccattcagtcatacttaaaaaagttttaggctatatatattttattgctttcgtgacttactgacttgtgaacagattgatactataatatcttcatattatttttttgcatttccttgtattccctgttaagcataatacacgttctaattcagtgttcgctcaaattcgttgtcttatattcatctccgcaattgtttaagagatgaacattgttcaatttatgaaattggattttctacaaagtaattgtacttttttattgaacacaaaattcgttgggaaatcacttgactgtatgttgattgggacttcgttagggctgagctcctgtaaaattttcaccttttcacatcgtacttttctgaaatttgggttttcccaaaaattggacgttttgacttggaaattagtagctttgttgaaaatcaggttcttcttagacccagtcataaataatcaaacggacccttacataagttacaattaagttattgagttgatgcattgtggatcccaggtcaattttttcgcaacttggcgttgctaaaatatgtagttttcaggttaaagcataaagtatggtgttgtggaggtattattccaattataacatattttaaggaaatatctcagaacttttaaaggtttgtatttgaaccacttcctgaactgcactacatactaacttacttttatggcacacagggccaactgtataatgcaatccattaaacacatactgtactgctcagcttcagtttgttactctttatcttttttaacctttgacgttatgattaattttcgtaatgtatttcaggatcctgagggtctcttcccgtgtattcttggtca

SEQ ID NO: 110639 - DNA, 661 bp, Aquilegia coerulea
  Intron number 2 from transcript AcoGoldSmith_v1.011157m (l ocus AcoGoldSmith_v1.011157m.g) derived from phytozome v7. 0 (chr-ID scaffold_34; pos 2111440 to 2112100)
ccacaagaggtttttttccccattttaatcagactttttttttttttgttagatttcaattgactaaagttaatatgattttgaactgataacaagcgcactcaacttgaaattataatgaaatttagggattataatttgctaaaaaaaaaaaaaaaaaaacgcgtcacctgatacaatttcctggaatatgaatttaggggggaaatgtgtatataccctataaatttagaagagtattgcagaagtttattgcagtttgatttgacaaacgactgagtagattttagagggttggtttatgtcactattattggatggatggggaatctggactagtgggaacttgttcatgtctggctctgcttttattaagtcaagacaaataggttatatttggctttgctaagttttagtgttttactcataacatggagatattattggtgaaatggtatgtacgtgtgatgctggatttgtttcgttgtaatgtgtaaaaagattgtgagaagctgggaccaaatagaaactctattaagcaaagtctttctattaaactatatatcaattatgaagtggaatatggcatttacattgtacttttttacttttcattgttgtttcaggcattgagaaggaaattggagcattacaattggaa

SEQ ID NO: 110640 - DNA, 871 bp, Aquilegia coerulea
  Intron number 1 from transcript AcoGoldSmith_v1.009450m (l ocus AcoGoldSmith_v1.009450m.g) derived from phytozome v7. 0 (chr-ID scaffold_22; pos 2356076 to 2356946 reverse stra nd)
attccactttagaaggtaatcaaacttcctcttgttttctgttttccctccatgaaactgttcaagaattgggtatttgaaacaatgctttatttaccaatatggagtgaaccatatggcaagttctttaagctttgaggaacatggagtaattttttgttttaaaatttttgcagtcttgacatgttttcttgagctagacatcagatgatacaaaagatggatcatcagattttattttatttttttactaaatcatttgtccatgtacttcgtaattggatgcacaattgttggtatttggatgccttaccctgattagtactgatgtgatcttgacatatgtatgaatatatctcatgaacaatccacactacacattttcatactcacaggaatttattacatggaggcagtatttctgtaaaatttaatctgctttccttgtggcataaatcttgatatcaaagcgagttatatatgcaactgttgcgatttgcgaagaactaatgtatagaaaggatagttgggtggattataaaaggtagtaggttcacttggtatgcttaatatgaaaaataacaggacatttagcacctaggtatttcttgcctttgttaagagttgagaaatttgatcaataggttttagaggaggattctgcattctcctcttccaagtctgttcatgtagtactacattaattaaaacgtaaaatcataatgcttcttttacatttagaccaattgttgaacagagtgccatttccgtgtctacttcattatttgatttaatgagcattctcctgttttttattttttttatcttttgtataggtgtatcaaccaacattaagctgttattgaaaata

SEQ ID NO: 110641 - DNA, 607 bp, Aquilegia coerulea
  Intron number 1 from transcript AcoGoldSmith_v1.011290m (l ocus AcoGoldSmith_v1.011290m.g) derived from phytozome v7. 0 (chr-ID scaffold_16; pos 3051536 to 3052142 reverse stra nd)
ctctgctgctgctgctgtaagttctaaattctaatcttcttctaagtttcttctaatctttctaaatcaaatccaaatctaatcttcttcttcttctttaaatttttttaatttttcaaattaaattcaaatctttttcttttttcaatttaacttcaattgaagttaaagtttattacgttgtttattgtgcaggaaatattaagagaaagaaatactgttaagacagagtagtgtaaactgtaaactgtaggtctgagcggtggaggcagttctcagaaatctgagcgcctggcgctccgctccgctcctctccgcctttgatagcatatagctaactcacaatttgaacttgaggtgtttgatgttattcctgaaagaataattgtacaacccacagcaaagtttgcttacatttaattacctcagtttcgttctattgattgaatctctcattattaaaacaagcttgatggtcttatttttatacattctagttagtatgtatgctttattgtgctagaatggtggcagttttttttgttttaactaatgctggaatgtggttacaggctcaaagtagcggcggctaaaagagtggagtcgt

SEQ ID NO: 110642 - DNA, 949 bp, Aquilegia coerulea
  Intron number 1 from transcript AcoGoldSmith_v1.014086m (l ocus AcoGoldSmith_v1.014086m.g) derived from phytozome v7. 0 (chr-ID scaffold_19; pos 153509 to 154457 reverse strand )
cttcaatcaaatcagattacattgctcgccaacaggtatcactttcacaacattaaacatctgccgttaattacttgatctcactgttttgcttcaaaattggatgatgtgaaaattgcgatttccttatttgacgacaaatttttcactttattcgatttgatgtcgttttggtatgagtgcataggcagtcatgaagttgcatatgaatgtcttatatataaaatttcacataagagtaggaaatgatagggtaaaacttgtcctaagagtattcagagtttctatattgattttttttttttttaaagattttgagcctcaatcatttttgcacgtatcttacctagtgtcgtttttgacaaatttttgttcattttgcaactctgcaagttatcaaacatggaaatagctattgtctgatctgaacaaattaatcttacggattttagtcaaacagaccctgtcatattgaggttttaaattaggatagtgtattaaagagtaaaagtcaagctacaagagtataagtatatcagtataaacatattgttactataaggccagatagaatgtgtttatccatagttggctggcagcatgaatgtgaggcctgaggagcttggcatcataatcgttttttcatatgaacaagagatagggtgcttctgatttaattatagcgtggtgttgcctgttggtagcaatattctcctcaacataaatgtcctcctctttcgagttttgatttgttctataccgaatctttgttgtagccttgagggtcattgctgatcatgtacaatgtatgcccattatattcgtattccctccaaactttttctttagcttgatcaaggcaattttttcttgtcattagtattccttctcagtctctatgttctgcgttgggtattgaatggtgccttgttgcttaattgtcaggcaa

SEQ ID NO: 110643 - DNA, 574 bp, Aquilegia coerulea
  Intron number 1 from transcript AcoGoldSmith_v1.025168m (l ocus AcoGoldSmith_v1.025168m.g) derived from phytozome v7. 0 (chr-ID scaffold_36; pos 2249256 to 2249829)
gaagagtaaggctattcgctactgttttcatttgcttgctttttaatatcattttctcgaagaagatatcgcctttttgggttgcatactagagctttgaggggttatggtgtgacattttcctggtattgatctcactcctaagccatgacatggacagcaaattcaatccaacaattttcataattttggaatggcagcaaagttttgattgattttgcctagtcgttgattgcgacataccaacaaaaagttgaagtcctcaaaacataagatggtattgttttttgaagacaagacttgaacttgtgtagttagaaagtggtctttggaaattactagagtaaggcatggacaaataaataaatctggtttccaacttttcataatatattctgcttttgaagaaaaagaaaatattctacttgagttttcatgatgaggtaatggatattattgatggtttcttttaccgtagtattgatattgagcttatgatttacgactttaaattttgatgagagtatttacatttgatcacctaggaacccgcctgtgacattcccacgtacga

SEQ ID NO: 110644 - DNA, 916 bp, Aquilegia coerulea
  Intron number 1 from transcript AcoGoldSmith_v1.016730m (l ocus AcoGoldSmith_v1.016730m.g) derived from phytozome v7. 0 (chr-ID scaffold_7; pos 136268 to 137183)
gatctactggtattgaatctaccaccaacacctgtgcttattatggatgttgttttatagttttattgaaatttattgtttgtcaactccttaaatcacaatcaattaccttgagacatattattggttaaggatttaaaaatgattttgttttacttactacatggctttatatatgtgtttgatttcacgatagtatcttcagagatcccaaattagtcttttatttttaattggctactaaaagccttgaaaaggtgcccacagcatctacgtgagttcttacccaagtaatgataccataatttgggcaaattctgtacaccataccaaattgtaaggaatggcatttgctggtgctgagccctacctgtcaaaggtgtcatgcaaaatgctggtgaaaagatggcattgcttgacttcactgattccgtttaaataataatggcatctcaaatcagtcccaattttgtttgtggtacttcatgcatataactagggtatgtgaatgttctgattatttccttttcctctgatgtatatttttttcaacgattaatgtgtaatattgacgttgaagtacaaaaggtggaccgttttataatgagaaaatggtgagctggcatcggcatgaccaatatagtgatttctacaatttctataaataaataaacaaatagaaaagttgtttctttactcttaaatacatgattttttgtagtatgtatttagtaatatgtacatgaagccagggtaatgtatgaatattctgcctttattgtttttgcaaagcattaatggacccctatattttgggcatagttcaactattactgtgcgtgaaggtctttctttcattgttgttcattaatacttttttgttatttcaaggttaaaatcctttgtcacttgcacc

SEQ ID NO: 110645 - DNA, 672 bp, Aquilegia coerulea
  Intron number 1 from transcript AcoGoldSmith_v1.025789m (l ocus AcoGoldSmith_v1.025789m.g) derived from phytozome v7. 0 (chr-ID scaffold_93; pos 197289 to 197960 reverse strand )
gtggtagctataaacaggtaattacttacattacaccctttttttattgcgagaaaatttgtcaagaacaagtatagtactacatttcccacattttgttatttattggtctagtgtttgttttagtgttttagtcttcactattaattatcggcattttagatcaaattttgactcatgccatttttatttttacaattttttttttttttttttttgttcaacaaattggggcacctgagataatgactggggattgaataatatttcttcatgtttgacatttaaaatgggaatgtatcttgttaggtacctacattacaataatttcaaagctctcacttacatttgctgatccaagttaaacaaattagcaagcaaagcgatggagaaaagcttgaaatctattttgttacaaaaattagtatataaataaaatagatgcacatgtcacattaaaattaaaacattacactgattttttagaaactttttttgcttagtttaataaatgaaagatcatgaatgaaattatatttatctttgccattctgtgaatgggtatgtgaacattaataaccctttgaattctgtacacgtgatgatagtgttattctggtttgattcatccctccaggtacgttccttagcagctgaatctgaaagggcatt

SEQ ID NO: 110646 - DNA, 873 bp, Aquilegia coerulea
  Intron number 1 from transcript AcoGoldSmith_v1.008596m (l ocus AcoGoldSmith_v1.008596m.g) derived from phytozome v7. 0 (chr-ID scaffold_22; pos 1021661 to 1022533 reverse stra nd)
tcagattctattcaacttcagtctataaattggaggtttttctcttaatccctttttttcaataaaaatttcttcattaccaactgggtcatttgcttaaagtttgcaactttagaagtgggttttaagttttaaattttgggtatttttcttttgccttaaatttattactcttttttagtgaaagttttcatgtttagctcttctatattctctctgtctaatttccttcactccatctttcttgtatgttttgtaatttgttctactaaatggaggttttggttttcttttctgcttataaaccactgcaaaaagttgtattttttttagtttttttttccgatagaaagataaattttcaattttgataaatatttgtagaagattgcattttggattgaaaagctgggtagtgatattaacatatctgcaagaaactatcagatatttagtgcagatgatacatgattctacttggataaacctagcggggaaggggtaggtctagtctctagtggcattgttattttgaagagggcgtaatttgtgtggcttatgtttatttagaaagttttgttgtcgtgttgaactgctgaagtcccgaactatgaaaatatagaatgatatgtctctgttgtagaattccattgtcaaccacatggcggatgtgattttgctttaacatataatgtaattgaatgaatgtctttgttgacatatggggaatctgtattgttctggtaagaatatttaagattgcagtaggaaagtgtaatgtgtagctaatggagacaaaggttacttttcagtcacattgatattgtatgttgaatgtgatgcatacctttgcaaatttcaggagctttgctg

SEQ ID NO: 110647 - DNA, 874 bp, Aquilegia coerulea
  Intron number 4 from transcript AcoGoldSmith_v1.003200m (l ocus AcoGoldSmith_v1.003200m.g) derived from phytozome v7. 0 (chr-ID scaffold_13; pos 3971366 to 3972239 reverse stra nd)
ttctcagcttcacctagaccaaagagtggaggtatttgaatttacagtttctgatgttattaatttaagtgggaactaaccacaaaagttagtccaaccctctcccttgttaattttgtactatggttaccatgacatctttgtgttatcttgttaaatggcatatcagcatatgcatatccaacccttgttatcaaaaaattatgaactgttgatatggtaaagtggattgtggtactaatccattggaatgtgtttattaattttcctagagggagttccatgcatatatataatttatgactcgaagatcttatcaactcctagttatgatctcccaaagtccaaagatatctataaatttaaaaaacataaaaatattgttgaaacttgaaactttcacttctatcgatggagtttcatgattaacgtctaacgtcttgattctgaggttaattagtacacttttcgactattttattttgctaatgtggacaaatgtcatcaatacttttatcttgttatttacatatccaaccctcaagaagtgatttgcctcttctctgatatctttagaacttcttgttattgcgagggatcaaatttatccacacatctacctcttgaaagaaaaataatatatcttttattttattaaatgcgacctgatgtagaagcttgaatattataatttttattttatctattcagattgataaggctgtttgttaagaagactccttagttgttggtattattcattgtctttttttttgttaaaggtatatattttttgatttagaagtgtgtctgaatgctgaatatcttatacctttcttgttttttgttgtagttgtaattgaggagatactag

SEQ ID NO: 110648 - DNA, 414 bp, Aquilegia coerulea
  Intron number 1 from transcript AcoGoldSmith_v1.006437m (l ocus AcoGoldSmith_v1.006437m.g) derived from phytozome v7. 0 (chr-ID scaffold_3; pos 5300003 to 5300416 reverse stran d)
ttactaaagcagctcttaattatctctcttctaaggtactttttttcttcattcttagcatttgattttctcttagcatttgtttttaaagtttatagatctaagtgttattttgtagatttattgattgattttgttgatttttagtttattttttcatagatcttgatgaattgatagtttaggagtaaagggtatctttcaaaatgatttaaaatgataaagttttgatctttaaaaatattggatttgatgataattgataagtagtgaagaagaatataaacttttgggattctttgtgaattattattaataatagtgataaagggtattaagaatttatcatttttggggaatataagatggcttataacaaatctggttaattttttgttctgcagtttgaaagaa

SEQ ID NO: 110649 - DNA, 915 bp, Aquilegia coerulea
  Intron number 1 from transcript AcoGoldSmith_v1.025737m (l ocus AcoGoldSmith_v1.025737m.g) derived from phytozome v7. 0 (chr-ID scaffold_34; pos 1102003 to 1102917)
ttaatttgttcagattgtcgtgttgactacttagggtgagccttaaggttcaaactgcagctagtgatatgatggtggtcatcgtacgagtacgtactactcactcttttcgttctctggggctagttctttgaaggtgctatattttctgaaagctcattttggattcagcttgttagcaatttaatcaaccaaagcagaaatgcttgaacaaaaattctcaagtaaaaaggtcggacgaatgagtttaaatatcaaatctgtatagagggaaaaagtgcacgagttctcttgcttaagaaagcttaaattttatcttatttatgtacaaaaatgtggaatgcactaacggtcaaaggatgcctttgagctacacaaattatgtatgtacttaccaaaaaaaactattttcagactcagagtttattgatgatatcaatgttgagattttgttatgtgatcagtatatttgtattggccctgatttaggtagttttgctttctctgcattacaagtttacaactgcttagcatgtagaactccttgctatgtcagttttgcagaattagagctacttgctatgcttagattgaagttagtatccctcggtccaaagctaactactcctctcaactctaatccaattgccaatattttccctccaaattccctctcttcagaagcaaaccaagaacaatttctttcagttttacttaaaaaccctgtaagaaacatagctcttcaaatccattctaacttactaacaactgggtttactcaaagttattatctgctccaacaaggggtatacccactagggtaaagaggaaaatgtactttgctccaacaaggggtatacccactagggtaaagaggaaaatgtacttttcttagttgtgcttcattcggtctcc

SEQ ID NO: 110650 - DNA, 220 bp, Aquilegia coerulea
  Intron number 1 from transcript AcoGoldSmith_v1.002119m (l ocus AcoGoldSmith_v1.002119m.g) derived from phytozome v7. 0 (chr-ID scaffold_35; pos 2165937 to 2166156)
actggtgtgtagtttttttttcttcttatcttattattactgtctactgtgtcttcacttgtattttttccactcaagcatttctctttgatactgtacatatattttacttttcttaaactaactcaactttttgttcatgttttgattgctgtgttggtgatgatgatttcgttttggtttccatatctcagatcctagtggtaagttcattaattcc

SEQ ID NO: 110651 - DNA, 960 bp, Aquilegia coerulea
  Intron number 3 from transcript AcoGoldSmith_v1.007979m (l ocus AcoGoldSmith_v1.007979m.g) derived from phytozome v7. 0 (chr-ID scaffold_2; pos 7226192 to 7227151 reverse stran d)
acaggcaagttctttgactgctatgtacaatttgggtcgtaattttgtatctatttttaagtggcacgtcttctgacagtctcactactagtaattttggaggttgttgtcacatttttagtattttttgttcttaattttactaggttgagataaatgtatgtgttcacctttgcttaagttgccaccagtttcacttatgagtcctgcttctcaaaatcactttaatttgatctcttctatttgagcatgaaaatcacctataaaaacagtgttggaagtgttaaggaaaaagtacattttgtaatgtttttagtttaataaggataaataagtggggtatggcacaaattgttagttcttgagattcttttcatagaagattcagcatctgatgttaaagtctgttacttcttttgtttgtgtcatgatatccatccttgttggactcagagcagttgataaaaaaacatttttaactgttgacattacttttgaatcgggattatttatgtaagctgatccaactgataatcagacttcatgttcctgattatgatttttgtatcttaattcagtatgaaagtccattacgatagataggatgatttaaaaacattttgggctttgtttagacttgctcttcctcctagagaagctatgttgccagtctataacattagtcccatggccataacgcgtgtgtggtggttaggggttggaatactcatgattcgtgtgtatttagaaactatagcttgccttgcttctaaccatatgcatatttgaagggtggtagtaaatgcttcgagaagatgggtgtttgatgcatatttttgaattttatgatgctgttttcaaaggttcaataactccagggaaattcttcttcttccttggcttgatgatctataaattttgcatgcagatttcaaatattgagagatctcataccccaaa

SEQ ID NO: 110652 - DNA, 456 bp, Aquilegia coerulea
  Intron number 1 from transcript AcoGoldSmith_v1.025370m (l ocus AcoGoldSmith_v1.025370m.g) derived from phytozome v7. 0 (chr-ID scaffold_80; pos 911935 to 912390)
ttcttggaaactatcagtggaatcaaatcttgttggtttttaaggttatatctaaaaattcctgaatattgacatggtttggagtttggcttggtggtggtgagtttgggttccccacatgaggtgtggggttcaaaccaatgccaatacataaataatatatgttctttgatttatctatgaccgggccgggccttaaggctcttggaaaaaaaacttttttactttttcttttttcaaatttcgaatttgttccctagcatttaaattgattaaaacgtgtttatttcaaacctagcttttttttaccgttatggcttgatttggggagagatttcctccaccattaacggctctttttgagttataaaaagagtggtggagaagagagaaatatataacaaaaatggttttctcttagttttcttgagcaagaaagagtgttgaaagtgagat

SEQ ID NO: 110653 - DNA, 563 bp, Aquilegia coerulea
  Intron number 2 from transcript AcoGoldSmith_v1.025370m (l ocus AcoGoldSmith_v1.025370m.g) derived from phytozome v7. 0 (chr-ID scaffold_80; pos 912460 to 913022)
ctactgcttgcacaacagaggcagagctgcgaaacgtcttaaagagagcgacctagtccacgactcagccactgatttaatattgtttgttcattttgattgcagctacctgaggtaatattattttaagggaagggttccagccttccagggactcagaaaatgtttgactcaattttgactcaatcctatttaaggtacttcaatatgttggataggaatgattttttgtaggatgaatgttctcattttgtacgacatcttcaccaaattttatcataatctgaattttctaaccctagaaaaatcatattacaagttaatgtattgtggaacgttcatttttaccgttgaatttaatattacattttatgggtctaaatatattcaaatgaggtgattttttatgtagtagatctttatagtaaggacatcatatctacataaaatcatgccaatccaacatgtacaagtaccctaaataggattgagtcaaacatttcccgagtccctggaacccctcccttattttaattttattctgtaataaatctaaaatagag

SEQ ID NO: 110654 - DNA, 977 bp, Aquilegia coerulea
  Intron number 1 from transcript AcoGoldSmith_v1.001116m (l ocus AcoGoldSmith_v1.001116m.g) derived from phytozome v7. 0 (chr-ID scaffold_13; pos 5248493 to 5249469)
tcgtgatcggtttgattgagaacagagcgaaagaggtatttctctctctaatttcgattttgttcttcatgaagttgaattaggtttgtttcaatcttcaatttctctggtgtttgatggcaaatatcttggaacacattaggtttagggttagggttactgatttaatttacttagatctttgaaatttctttgatttaactgaattactgaagtgatctaacttaatctagataaactttctctagattacatgttgaaatatgtgttctgagagtaaatcaaacatcgatttcgaataaattagattaaactgaaacaaaatcagttgatttgcagataatttagatgaactaatttgaatctgcacgctgagagtgaagaaacactagctaaaatcgaactactagatagggataatgcaagcggcaagccgtatgtacagtcgtcatgatgatgtggattagattgttatcttaattaatagtggatttgtctagatattaatgacttgatgtgacctaatatatgagatatactctttctagcttccaggtagcaattctttctgaaattgggttgtgagcgtaaaggaagcatcattttgtttgatagtacactaaattaatttcaaattggttgataagctgaggaaaagctgaaaactgaaatactgaactgtagtcatacattattctgattttaatacgatgttactcaaaatgtgttatattttatataggagattacattgttaaaatcttttattgttcttgttatcgttggttcttactaagaatagttggatttaatctggacatgcttttcgcctcctgattttttatcgaataatcatattatctccttagttcatgaccatcacactgttataagatcaaaagtatatgcatcttcataatgttttcgtaagtgagtatcacaatcaacctttacaggtgggtgtggctgctttcgac

SEQ ID NO: 110655 - DNA, 942 bp, Aquilegia coerulea
  Intron number 6 from transcript AcoGoldSmith_v1.020975m (l ocus AcoGoldSmith_v1.020975m.g) derived from phytozome v7. 0 (chr-ID scaffold_3; pos 2784752 to 2785693)
agaattttctaatagttaattacttaattacagaggtttggattcagtataagatgttgaatcaacattttaagtcagacttttagttagtcacaaagaagcgttggatttagttaagtcaaaattttaagtcaaacatttagttagtaatatatatgatgatagatctatggatttagttttgatgatccaaagcaactttctctcgatctgttaagggttgcactatgaatgttctttcagtacttttctagggataccaaaagttacatggcctgcctttgtttcgtagggataaaattatgtgtttttttaaggataagcaatgaaagtatattttgtgaaagcatttttcagtaaaatgctaaaaattcagtcttcacgcaagaaaatgaaaaaaatagtgatgtttacgtcttcaaattgttctttaacgaactttaacctgggaaggtcttgtgtttactagtaacctgtacaaaacataacttcaactttgaagcaagatttgtgcaacaaatgtattcttttcattgtttagagaaatttcatgcaattctaaagatagttatggtaatgcgagcttcaggaccatattcttcagatgagatttggggatgtttggctgataagtatttgcaatttcggcaactctgattctttagtttccaaaaggaattaaaatggtacttaatgactaaaggcaactattaagaggttgcctttaagtaatcatttaattttcattgttgattacctctctcggttatcaactaagttatgcaaaaggtgttgaagtttactagtaatatggttagaaaattttttctgcaattatatcattgagacttttacatgagtttgttttgtaacatttatagcttttattcttcgattagtaagcaataagttgtattgtccttaggtacattcaagtgagaa

SEQ ID NO: 110656 - DNA, 802 bp, Aquilegia coerulea
  Intron number 3 from transcript AcoGoldSmith_v1.000984m (l ocus AcoGoldSmith_v1.000984m.g) derived from phytozome v7. 0 (chr-ID scaffold_3; pos 1346758 to 1347559)
aggtacagtactacattattcatttgtggctgatgtccaatcacgaagatgatgtctttattttgagaattttcaaaaggatgttaattagattctgggcatttgttttctatctcgtgttatttgtagtgctaaatctttatgaaccaaaatttggcagttattaatgatcattattgtaattttaacctacaaaactattttttcttctttctttgaatgactaaaaactttaaagtctaaactactaaaactagttaaaaagaccattaatgacaaaataattcgattagttattcagcgagttcgaaggacttggttttcaaatgattattgatactagggtcttattgcaccgcttcttattaggaaagtattggaggactatgaagaaatgtgcatacaggcagctgttattcagataaagtatattctttgggtttgccgtgccaatagggtagtttaatgacaattgaaagtctgcataggtttggtctgtaatcagaaagtttgttggttcagaacacaacttaagctaaatgggttagaatttgtctggtatggccatacggtgttaatctcttgttatgctggcatactctctcacatctttcattgaacatgtatctcagtgtcgagttttctttgtgacagtagttagagagaatttcacactagcttttgatgttgcaattctgccttctgtttctttatgtcttcttgaattgaagtgcatgttgacaattgagtgtgcggaagtgttgcaggtagatctagctaagcgccattgctttcctgttta

SEQ ID NO: 110657 - DNA, 624 bp, Aquilegia coerulea
  Intron number 1 from transcript AcoGoldSmith_v1.010071m (l ocus AcoGoldSmith_v1.010071m.g) derived from phytozome v7. 0 (chr-ID scaffold_2; pos 432108 to 432731)
gcagtccagagggagcagggagtggtaagaaaggattaaaaatagtgggagagtcttgtgataatactccttttccatgctacgttgtttaatgagcgttctcgtaataatatctctagctatacctcacaagatggtcatcatctatacatatgaacttataaacacagtataagtttgctaatatatgggccatctgtgtggtaaaagaaatgtttctcttgctgacaaattatcagttaaattgaaatcaaactgaaagttgaatcggaacaaaaatccaagaaccttttgtactgcgtctgcgtcacaggaatatatttactatattctatatatttacaagaacctaaattttgtttgtttaactttatatatttagattaattaatggtgatctcatcttctaaatcatggacctgaggtgctattctctccccatgtacttcaaaatactcggacttaatatgcgtacataagctcctaaataaatttgatgggcgtattatatgggaaaaaaaattaatacaagtgctacatattaaaatcttcagatgtttattcaagtatattgattactttatactaactcatttcacatttgtgcaggtggagcgtgtggat

SEQ ID NO: 110658 - DNA, 896 bp, Aquilegia coerulea
  Intron number 1 from transcript AcoGoldSmith_v1.007722m (l ocus AcoGoldSmith_v1.007722m.g) derived from phytozome v7. 0 (chr-ID scaffold_25; pos 1694490 to 1695385)
actgtgaagaagtctcttcgaaggtacatatatactagtctcgcatttcttagagttatgagttcattaatgattaattaaatatttccaattttagttggtattccttaagtactcatacagctatatgctcggtaatttatgtgcaattgaaatgtggagttcgtggtatacatgaatgagataggaaaatgatcttttgcagtaatttgagtatgctcaattatcacgttctgtgtcattggttgtatacttgtattagttgccagaatgatgttagtttggttcttgggatagtacattgaagtattaagctagcatgaatgtggtgagtgtgtcactctatgtgcgttttcctactttttttatgaaattccagtcatacgtaaatgaaacttttatctttatgcaaaaaggacactgtgcattttcttttgattattttatatggttacttagttttgggggtttatcgtaacgccagttttgttttatatttatcgcttgctcttcctctgacacatggtgcctccttattctgagatgtaccttatgaacgtctttacaaatacagtggtgtctgggaatggcatatgagagcgttgctagcatatgcaaactagagttgagtgttagccatatttgtaaatccttctttcagagaatgcctaggttgatatttgactccaaagttattgtgcttataagttataataaacagtagctcaggccatgacttaatagaatcataatggtcgacgttgatacttaatagcttgggccataaccatagtcttgttttcagaagctcttgatgttttaattgtataagcaaatgagactcaattttgggtggatcctttcaggaggggcattggttggcatcttctcaaggc

SEQ ID NO: 110659 - DNA, 631 bp, Aquilegia coerulea
  Intron number 1 from transcript AcoGoldSmith_v1.010503m (l ocus AcoGoldSmith_v1.010402m.g) derived from phytozome v7. 0 (chr-ID scaffold_25; pos 277572 to 278202 reverse strand )
gcgtcgaattgaaggtataaagaaacaatcttcgagtaggtttgttttttcgtttcatttttatttgattttgcgtggttattgagtatttagggtttgttagatctaaggtttctggttggctaagagatttcagtgtttgagttatcttcttttcagtcataagagatgttgtattgttgttttacacttttacattgtaattgaatttatttgctatgaaccatgaatcaagtaggttctctacatctcatattaggatcttttcattgatttagtaacaaactgacaggaatagccatcgtcaggtggatacattttttgacacaatacgcttttagttgttagcttgagatggttccactcatggtcagatggttatgaatattggatagagtaggcaaaatacttactagtaattaatttatttgaatacaaaggtttggaaattttattagctttcaatttcagttctcaataaaaaaaaaaaaaaaacaagagagactagcatactttgtaagtgaagccagctctggccaaagctaatttgttcctcatttgtgtcactttctctattatataacgctcacttagtactagataatatttcactactatgactggttcagat

SEQ ID NO: 110660 - DNA, 381 bp, Aquilegia coerulea
  Intron number 1 from transcript AcoGoldSmith_v1.002423m (l ocus AcoGoldSmith_v1.002423m.g) derived from phytozome v7. 0 (chr-ID scaffold_25; pos 2445286 to 2445666 reverse stra nd)
aagaacttaagccaaagctctcttgagaatttcaggtaaagttttttttttccttgttgataaataaagtatctagaggtgttttggattcgaaattgttaatggggtttatcttattttgatgtttttttttttttttttttcaatttagaattgattccttgcttatttttctgaatttctaagagtatctttaattggaaactttcttaagactcagaacaatagaatctgcaagatttttagtgcaatatgttgatggattgtctttgatctttaatggggggttttcttcagtttagctgcttcttggtataaggttttgtcttttgatctatgttttttggtttctgttcagttcttcatcattgattgagagta

SEQ ID NO: 110661 - DNA, 795 bp, Aquilegia coerulea
  Intron number 1 from transcript AcoGoldSmith_v1.007451m (l ocus AcoGoldSmith_v1.007451m.g) derived from phytozome v7. 0 (chr-ID scaffold_25; pos 1381440 to 1382234 reverse stra nd)
ttcttcaaggtatgtatgatttcttttgattattcaagttatatatgttttaagttgtttattagaagtttgggtgtgatgggtattttgattttgatattagtttgatgatctttatatagtaatttgattttctgtgttcctcttatctaaaggaatctttgtatatatttatgcataagtacttctgttttttttttctttggcattggggattctgttcttgtaataataatacttttgatttctttaattaattaataattagcacttgcaatttttttttcatgtgtgtgttgattctttgattcataatggtcttgaaatattttaatatgaaccatatgatatggtttagtgttagttgtggtttgattcgatatggattgctatttgctagtactgagtaattaagatcattgagtttatagcctacatcatgcctattttgtgttttgagttcttatctgaaatctcaacacatgttttcacatgtcgatttctatcttttatttatttattttcttttcccaagatcctaagctcaatctaaattttcatgaaatactaattgatgcaaatgcaatatgctattatttttgctatcaataaaaaggactaagtaccgctttgttttgttttttccttcaatgtgccatatctacatacttacccagatgcttttgctttgaattggtgttgtttaaagatcaatggtagagtctgtatatgctaacgggtaaactgttcgatttctcaggcagtggaacagctggtgttgtcctccccgaagct

SEQ ID NO: 110662 - DNA, 611 bp, Aquilegia coerulea
  Intron number 5 from transcript AcoGoldSmith_v1.010943m (l ocus AcoGoldSmith_v1.009234m.g) derived from phytozome v7. 0 (chr-ID scaffold_100; pos 412137 to 412747 reverse stran d)
gcaggaattgtttggaaccctccaacttcttgcgcgtaagcttacttcctttgcacttctttgcatatcaaaatgaagcgaaccaaaaaatgtatgctttgttcattcaactgttattgattcatagtatcagtacgtatttgtgacttacgtgttataaaatcctacaatacattcaaatttgtcaagaggacaggactttgctagttcaggtaaaattgtagtgccttgtgcttggctatgtttatctggagtttttgtaactaacaatccctgttaaaagtttcatgaacaaggtttaaaagtttcagccataatgtaccatgattctttgagaaaacttaatactgttgcgatttgtggaagttatgttccacaaggtacgtcgataccaagctgatctagttagatacagtaatttacattttactaaatagcatttgctattgaactcggtcacaaacacagcagatcgatctgtttgcacatttagtccctatgtgactcagttcgccaggccataatatcatttatcaaacatcttacatattgaagtacttaaataatataccttctgatggtattagttctttacttctttttgccaacag

SEQ ID NO: 110663 - DNA, 650 bp, Aquilegia coerulea
  Intron number 1 from transcript AcoGoldSmith_v1.010943m (l ocus AcoGoldSmith_v1.009234m.g) derived from phytozome v7. 0 (chr-ID scaffold_100; pos 413626 to 414275 reverse stran d)
gagtacttctaacttctaagtaagcattcttgattgttataaatattttcttttctttggttctgatctgcaattgttattttttgttacatttgttttaatgaatactttattctagctgtagatcaatgttagaacatacgaccatattactctaagaaatggtgtcataaactgattttgagtctcttctattgattaaattaatgtttatctatctgtgagtatctaactggtaatacgagggaaatagctgaatgtggtagtacaactctttgcattcttgacttaacttgatttgaactaattaatggtttcgatcaaattaccaagaaacacatttcagaatggcataattattgttcgcacaattttgacaagaagagttgcatttcgctacaacttgttactctcacaatctgatcatagttatggtgagtaatccaagaaaacataaaaaaaaaccattagtttgagttacttcaccccgttagctagttgaacatcacagtattactcaatctgcttctaatgccaattcaaactgatttgcaagtttgaattgcaagttttggtctttagaacttcaaactgaggaaaggaaaaaacaaatctgcttacttttatttcctttctctaggcataaccag

SEQ ID NO: 110664 - DNA, 821 bp, Aquilegia coerulea
  Intron number 1 from transcript AcoGoldSmith_v1.010744m (l ocus AcoGoldSmith_v1.010744m.g) derived from phytozome v7. 0 (chr-ID scaffold_25; pos 1271865 to 1272685 reverse stra nd)
aatcactttgcttgcacgctttggagcttatcctggtaaagttttgagctttgtttacactcttgatgagattctttttgtatgaaacgttggtctaatgctagaaagtacaaatgctggattgctgcttcttttagtaatttgttgttggttgaatgaaagttggtaaactatatgaagactttatcttctatgcatgtcacttgtttttacggaagaaaaccaagcaactatgaactggcaagcagaggtatttcttccgtgggtttgattggacctcgactatttgtgttcaactaaagattttatatatttaaagcttttgcaatgccacaggttctgataatataccaaattgttgagataattagaagttttaattttttttgttatttttattatataggagctaggctgttatctccttaaataagtaaattcgttattcattcatcagtgaaatctctttccccatagagctaaggttttcaactgaacaggaataaattaaattgcgacctgaatatgacttccaagtattccttttctaatcaataaactcttaaattcaacaataaacaaacgatacaccgagacaagataatgttggatactgacactagccacagtcagcagttctaacaggagtaactctgttacagattgcagccatgtgtagttttgtcctgtgacttatatttagtgtgttatagtttattcaaggacttttagtgttggagtcatatcatctcaggacttatagtttattcaaggacttttagtacggatctaatggtgatgattctaatttgcagaaaaga

SEQ ID NO: 110665 - DNA, 443 bp, Aquilegia coerulea
  Intron number 1 from transcript AcoGoldSmith_v1.011597m (l ocus AcoGoldSmith_v1.011597m.g) derived from phytozome v7. 0 (chr-ID scaffold_25; pos 3325085 to 3325527 reverse stra nd)
cttctgctcggccaactagagctccttctcctgcggtaatttctcaatttctttacctttgtttgatttagttagttcaaatttgtttagagcggatcggatctaaatgtagttataatcttgtttacaatcttctagttgagagatctaatgtgagtttgtattgattttcataaaaaaaaaagaaaaaaagagtttattgtatacagtgtttcttcttcaattctaacttgacaatgaataactctatctagaatttctgagattgtaagaaaagtgaaagttatgatttgaattagagttctctattgtttaagattttgataattaaaagattgcacgtttatattcaatatagatatcaatttcagcatgctgactaactggatcatgtcatgatttaactagttaggtcggaactttgtagagataactccatcagt

SEQ ID NO: 110666 - DNA, 586 bp, Aquilegia coerulea
  Intron number 1 from transcript AcoGoldSmith_v1.026145m (l ocus AcoGoldSmith_v1.026145m.g) derived from phytozome v7. 0 (chr-ID scaffold_74; pos 362044 to 362629)
ttctgcctgaacttcgccatagaagctcagacaaggtagcttgaaagttcatttcattattgaattattatgtggtctatgtttactttggtagataatttggcctcatttttgtgtggactatctatccatatagtttaaggtataagagtccacatgttccccctacaaccaccttttatgtggtaccccatataacatgctacctatcgtcacttgatttattcttagtaacttttcaaccttcgccgaagatgcatggtagggacaaaattaggcctgaattgtacaatgtgttggttaaaatcatcggttgtttgttcgtcccaaactactttttttgcctaataactgcttaagcacaaatgcacaatgtttaggttatagtcgggcgaaaccatattcgtacgtaagtacatttattcttctttagtaacatagatgaattaccctggctcgaggttatattgctattccatttgttcttatatatgatatatcatctgcatttgattgatacaaaatttaatgcttagttgatgatttatgttatgtagatatcagctgcaaaggtgctacaagatac

SEQ ID NO: 110667 - DNA, 891 bp, Aquilegia coerulea
  Intron number 3 from transcript AcoGoldSmith_v1.008552m (l ocus AcoGoldSmith_v1.008552m.g) derived from phytozome v7. 0 (chr-ID scaffold_25; pos 1059089 to 1059979)
cctttggcatcgactgtgagtattattagtacttgtttgtttgttttctttcactactatatattggcaataatgatgattggagacttaacattgaacctaaaacatatgcctttggcctcaatgtcaattgctttacctagtggcaacactgccaaattttagtcccatataagtttctttagcacgctccaactcagaatgtcatatgttgtaaacgcctgcggcagaaggggaacccgcgcctcacctgccccagacaatatatgtgccatctagttattgttatcatggcaatagctcaatcttcttgaaaaacacccggtttaccactttatgtaacccaggcttttaatatttgagatatttttggtgcacacaaccaatcaagctaatggtttcaaagtcgccaacatccaacgcattctccaccgtagcaaccaaggcactgaaagtgttattaagggcatggataaagaactagagttgcttaatcctttatcatcctcatgaaatctagcctagtaatttctcaaatctcaacacttcctatagaattcttaaaggaatctgctattattggggaactaacaatgcccgggttacatatccactcttacatctcatcagtgggtctcttcatcactgttgttggtgtggggctgctcatgattaagtggctaagatgatggtgtctgtctgtctcttgctttaaattgctgtttctatctttattaactttttgggtaattcaagtttgagaagtttctaatattcacgtagcatggttgaatttttttataacctgtcagaatgaattaatcttttttttgatgatatttgaataagaataaaactcttgtcaacttgtgaaactgttgtaggtattgc

SEQ ID NO: 110668 - DNA, 941 bp, Aquilegia coerulea
  Intron number 1 from transcript AcoGoldSmith_v1.021936m (l ocus AcoGoldSmith_v1.021936m.g) derived from phytozome v7. 0 (chr-ID scaffold_74; pos 658260 to 659200)
cttcttttgcaactgtgactggtttcagcttgttggtaatctttctttctctttctttcttttccctttgtttgatttttatgtacatgatataatttgtaatgtttgtatgtttgttaattgtggctttgaggcaataacataattctttgccttgcttagataatttttttcttcaaattaaagtgttcccattagctcatgatggggaactggggcacttggaaagtactaaataaaacccattaaacagaaccatagtatgtgttctagtaactgggaaaattttgttaatactgtattgataaactattcattttgctgaaagtaattttcatgtgttgaaaacatttcatcgacagggttgtgaaaattgttctggaatcagaaaactgctttgattggttagattgttggtattttgcgatggagcagctctacagttcttaattccttggttttgtgagttgtttgagcaaccacagagactaatgtcgcttcaaactatctaagccacaatacccttggccttcaaaactccctaggatagaactacaggaggagggaacagagagggcgctatagataagagtaggaagtaatgaattcatgactagaactttgagtctagatatatgtgaaattgaggatttctatgatgtgcgattctggtttcacatgggaaggaaaattccgccctatctctttgaagtttagttctggaattagattacgtctccatagtctttttccatgaatgcttattttttagctgttttttctttcaactttcagcactattattcattcgcactatttattgatttgtacatgtcgcctttgtttgtgttccctttttcatacttgttttagttatactttactgtgttgattgacaaagtagtagatttttctgaaatttatattttggccttgagcag

SEQ ID NO: 110669 - DNA, 390 bp, Aquilegia coerulea
  Intron number 1 from transcript AcoGoldSmith_v1.015689m (l ocus AcoGoldSmith_v1.015689m.g) derived from phytozome v7. 0 (chr-ID scaffold_25; pos 2944546 to 2944935)
ttcaaattcctgatcaagacggtatggtttttttttcatttcttcttttgatttaaacacaaattaggtcgaatttcagtttatttgctccaattttgcttgttagagttagtctgtgattgaattctagttcatcttcaaattttcgattaatctttctgctttttcatcactgatactgctttagtttgagtacttcttcacttcttgtgtagttcatcttgaaattaggtcgaatttcagttgattttgagaattagtttgtgatcaaatgcttgttgaccttgacatttctttgtaatattgttgttttgttcagtttgagtagttcttgacttctagtgtagttgttttcttatttctttctctttcatgttagattttgatcaa

SEQ ID NO: 110670 - DNA, 833 bp, Aquilegia coerulea
  Intron number 1 from transcript AcoGoldSmith_v1.015766m (l ocus AcoGoldSmith_v1.015766m.g) derived from phytozome v7. 0 (chr-ID scaffold_100; pos 321093 to 321925)
ctgcagatttaaaagaaagcattgctgagcgcaaggtaatatatgtttttgattcatattaacttgcataaatagagctattcattgcttccttgcttatatagatgatattggagtcttaacattaaacaacactgctgcactgtaatgcaaaaagatgctaattatagctagaagtagccctttaatatgaaacattttgctactcttctaaatcatccaattttccccttaccagtactagaaaggccattgtttagtgcgtcacttgactcgttcatgctttctttgaaggatagctcctggacacttcttaaccaaaaatgagtaccatggtttgaaattattcatacacaatacacagagtaaaaccgattcttcacacaacgacatgaattgaatgatgtatgattactatatcattcggagtataagcatatatttaattgttacagaggttacatgcgcaagtggtagaatatctcattcaagttgttgtggtgcatcgcctgatcttgactattgactaagtctccaacaacttgagtgagatattctatcaataagcagcttgcttgctacaaaaaattgttttcaatcaattagaagaggaataaataagctaactgtattagttatatattgtataattaggtagaataagaaatacaaaagtatggcagaacctagaggtgccactccttcaaataagtacatgcaatatatatagcttgatgccttgaccgttctctgtataatttcgtctacatattaatattgatatctggttgctaataggatcaacaagaagcaagaaggattttgaaacctgg

SEQ ID NO: 110671 - DNA, 634 bp, Aquilegia coerulea
  Intron number 1 from transcript AcoGoldSmith_v1.004814m (l ocus AcoGoldSmith_v1.004814m.g) derived from phytozome v7. 0 (chr-ID scaffold_47; pos 65924 to 66557)
agaactctctttcaagctttcttttctcttttaaggtatgaacaatatttcttttcctcttttttcaatttgtagttagatctgtgtattcatgttcttgatttttatgaaattcaatttgttttgttttgtttggttttcttttgatttctagatctgtgtaattctatagatttggatcgtttttttttttaatcgttttagttttgcgtagttaggttcctgatgatctgatctgcatagttattttcgatcgatttgaaagtctccatatcatctgtgtaattctatagattttgatgatttgaaggtctgtattgttttgattatatgggtttaaaagcgatctacctttatgaaattgtttggtttatcgatttttttttcttcattttagatgatctgtgtaatcatttttgagttaagagttctttatgtttttgttgatgaatattttttttttttttttttaatttaatttttgttgaagctatataatttgccaaaaaatttacaagtttttgatcgaaaatgagaacctgttgaaaatatgttttgtttgattgatattttacttcttgtttggaagttattgtttcagatcactaatcttgtttaaaattctattcaacag

SEQ ID NO: 110672 - DNA, 683 bp, Aquilegia coerulea
  Intron number 1 from transcript AcoGoldSmith_v1.009828m (l ocus AcoGoldSmith_v1.009829m.g) derived from phytozome v7. 0 (chr-ID scaffold_74; pos 505298 to 505980)
tgttgatttgcaagaagaagaagaagattattgaggtaatctttggtgatgtgaattgaaaaacctttagaaccccatttttgttattgttgcttggtggtgtaatttgcaaaatctgaagaaaaaaaaacccagtttggaatcttgtttttgcttggaagaagaagaagaacacatacattaatatggtttttcatgatatgggttacacagaattggaatgaaagagtagtaataatgggtaacaatgattttgcaaaatctgtaagtaaaacccccattttgtgtttttgttgtttggtgattgtgaattgcaaaatcccctgataagtgataatagaaaaaacccagcttgggatcttgtttttgtttgaaacaagacatgaatgcactttttcatgttattgggttacactgctattcatgtgaatgaatcacaaatatacaaaaagggggatgaagagtaataatggataatagcaggtaaaacgtcttttttaaatcaaagatgctgccaagagattttgattcaaagacgtattacagtactgttcaacaacaaaattctcacaccccagattatataacttattacaaacatcgaagccactctttgatctacagaaaagtgagacttattctaagttttcaactaatcatgttcttttgtcgttgcagcactg

SEQ ID NO: 110673 - DNA, 852 bp, Aquilegia coerulea
  Intron number 1 from transcript AcoGoldSmith_v1.002193m (l ocus AcoGoldSmith_v1.002193m.g) derived from phytozome v7. 0 (chr-ID scaffold_25; pos 1419383 to 1420234 reverse stra nd)
tgaaatcagtatcactgttgggttctgagtttgaggtaagttttcaaatgaattgatgtagttactattactaatacaacaaccattaattattgccatatgaagaattgaatagctagataaattcattctattaacactttagtgtgactagtattactatttatatgcatgcaagcttttggttaatggtaggagtaggatatatattaagttcacaatgctctgtcactcacatatcacataccactgctggtataaaaaaaaaaatacattttataaaagacatacatatttaagaggttagtaggcatagtttaaaattccgaacccgggcgaaatttcgaatttgaaaagaaaaatggtatgttccgacactctaaacaaaaaagtcatctgaaatattgggaatattctcgattattctcggattttaaaatgccgattctctaaaaaccggcatattccgaagaaatttcaccaaatatgtcggcatttttaactatggtataaggtaattctttgttgtaatgtaatcttacattcttactctaaagtcctgccatggaggccacacccaatcaaaagctaaatgtatgtacatttggcacttgtttctaatttctatgtcaacattaccaatgaactcatcattcattgagctttaacttaaccttaaccttaccttgattcactattataccaagatcaccattataactgggcttatcttatctttttttttttttttttttaatgtagcagtatgtgtgagtaaataaattttctcactttttttttttcttatttatgaaacttgggtggttatagaattgcactgaacattatagt

SEQ ID NO: 110674 - DNA, 984 bp, Aquilegia coerulea
  Intron number 1 from transcript AcoGoldSmith_v1.024548m (l ocus AcoGoldSmith_v1.024548m.g) derived from phytozome v7. 0 (chr-ID scaffold_47; pos 1452787 to 1453770)
caattgaaggttaaaaatttagtatggtggtcgatgatccctttgcgccctaaatgtttagctaatagctacttgacttgctatgttgattgcacaatacatacatggtacctgattatacttgtaattttttttttttttctagtttggcaaacagtgataattacaaatcacacaagcaacagtattagttgtactatcaggctatcagctaagttggcaaacagtgataataatcagttaatcacaccagagcaaagacatcatcaaactacgaaagaagaaaacaaatgcttttaagttgaagcccaatataagaacttgggttaaaggcttgcttaggcttaatatctaagcacctgacctaactaagtccgattcgaaaccctatataaaaccaaacaataaataaattaacaaaccctcactcataactcataactcattcctaatcttcatcaagaaaaaagaaaaagtagaaaactgaaaggtgtttcatcagtaacactaactggtatgtttgttgtcatcgatctcaaccttctttttaatgtttgtggggaatatataaatttgtttcttttcgtttaatttaattacatatgtgattaaaatcattataatctttttttttcatgattcctttaatcactcaagacaaatcattgtgcaagatcctaataaaagtttgatttaacatgtttattcttcttctgaacatgtatattatattataaccttcggatgtatttttttattttatttttggtagaagatgtttgatttagttgaatagtgcatgttaatttcctttcataagatattggtggcttttaatattgcagaggtcaatttaagaggaaagatacagttatggatgcaagtgtttcgatgtcagattctaagaagcaaaaattgtttcaaggagaaataataattccgagtgaagataagatcagttctttaccggacgatattcttgtt

SEQ ID NO: 110675 - DNA, 528 bp, Aquilegia coerulea
  Intron number 2 from transcript AcoGoldSmith_v1.009747m (l ocus AcoGoldSmith_v1.009747m.g) derived from phytozome v7. 0 (chr-ID scaffold_74; pos 406640 to 407167)
cccttcaagctcaaaataagaaacttcaagctgaggtaattcttcatctttttaactagctagatcttattaattgtttcctattatgtattttgtttggaaaacacgtagaatcatgttggtaactgatgagaaacttcatctcagattgtcggagatgtagataaagtagaattcgggtatggtttagtttgctttgttgggggaaagaattagcttcttaaattcatatctatagagagaaacttatgagttttgcatgaccatatatgttgaaatgatttttgagtgttgatagaagcatcttgggttgttgacttctaattcaaaatcatttttcccaagaaccaatcatgtgttttatcctattgtttttcttttctccaccctccttaccttttgacagattaaactataatatctttgtgcactgaaaaaacttaattgtggtatttataatatattcgaagtcattgatgttgtgtcctcaatttctctggcatcttcattggtgaatatttccagatc

SEQ ID NO: 110676 - DNA, 434 bp, Aquilegia coerulea
  Intron number 2 from transcript AcoGoldSmith_v1.024753m (l ocus AcoGoldSmith_v1.024753m.g) derived from phytozome v7. 0 (chr-ID scaffold_47; pos 935285 to 935718 reverse strand )
actgctttgtgagggttagtatatgtttctctttatactgggtatttgagacatggaattaccgaccagataatatattgttttcttctcttttctcttttacgagcttttcgtaaaatcttaggttatatattttcttttatttgtttaaaagaagagaattatatcttgtgttttgaatatataagactagcctttataactgaaaattatgcgattgcatcattgttgtgttattagttatgattaagaagcatatacatataacttgatctcaacttatgggtaaaaaaaacatctttttggatttaccggtcttgtaatggattgtgtctatttgggtaatatatttgctcttcatttatgctttgttttcattctataaatgtatgatatttcgtaaaaaacaaattcttgttaaatgtagggttgcg

SEQ ID NO: 110677 - DNA, 552 bp, Aquilegia coerulea
  Intron number 1 from transcript AcoGoldSmith_v1.024753m (l ocus AcoGoldSmith_v1.024753m.g) derived from phytozome v7. 0 (chr-ID scaffold_47; pos 935871 to 936422 reverse strand )
gccctggtacacatttagtttgtttgtccaactaagcaattaataatttaatcttaacttaatgtgttaattgagatttttaaaggctttttttttttagcatagtcaagggataaggatttaatatgaaccaaaagccatgtagattcattacattaccatgaatccatataataaactgaaaatgtgtggttgcaaataggcacatagctattgttgtaaaaaaacaacattcaaatactatttttcagatcttccattacttgttttgtctaggactctaagggtgaagccaaactgattagcaacctaggaacaaattaaaaaataaatagataattagtagtacatcagcacatatgttgattatattggtatgtttaatgattttgatcacaagttttcttctcaaaacttctatataaagcaaacttactttaagctaagtaccaacaaactaagtatacattaaggaagttcacaagtcttaacatatcgtatcataatgggaaagaagagttgttttgtgaaaataattttgtgtgttctggg

SEQ ID NO: 110678 - DNA, 851 bp, Aquilegia coerulea
  Intron number 2 from transcript AcoGoldSmith_v1.009784m (l ocus AcoGoldSmith_v1.009784m.g) derived from phytozome v7. 0 (chr-ID scaffold_74; pos 897800 to 898650)
agtttactctaactacttacagcgatactggagttgtaagttttctctacttatttgtctagatttagcttagtttgttgtttgataagcatttcgttgaacatttcatgattatttaatcgatttgttgttgattcatgttcggtttgtgtttgatgaaatgtttcttctgtttctaggttatttatgttacttttactcttttttagagtttgtaaccatgtttgtttagcttagttcgttgcattttgtagaacattacatctattcgatttattgttagattcttgtccgacatgtgtttgatgaaatgtttgttctgtttctaggtcatttatgttcattttactgttgttttagagtttataagcagtttgatttattttatcattgtgactagcaattgattagcttctttggtctttgattgaaacttagtggtaatagggtacatatttgtccttgtaagtgttagataaatggtgtgatggatcgatgtgatgtgctatgaagtttaccatctacagttagttttgtgttgattgtaatctataactagatagttttttatcaaatcattgccatgagaaatcgttcagtgtttcagtgtgaagttaatgtgtctattgtaaagcatgttttgatatgttcaaggacaaagcgcttttgatatctgtaggaaaatcacactgagtctttagaacaaacctccttagtaattcacattgtttagtgtttgtaagattattttggcaggtcattatattcttgttatttgcttttttcttcctctgacatttctggtgaatcctgcaggctatcacttcatctgctaccaagaaaggtgatct

SEQ ID NO: 110679 - DNA, 916 bp, Aquilegia coerulea
  Intron number 1 from transcript AcoGoldSmith_v1.007239m (l ocus AcoGoldSmith_v1.007239m.g) derived from phytozome v7. 0 (chr-ID scaffold_25; pos 2423757 to 2424672 reverse stra nd)
ttgctggtaattatttcaatttcaatttgcattgctttcttcttcttttctcttctttttcaattttcattccccatatatatatatatatatatatatatatatatatcaatgcacttcatttttacttaattcatacccatttaagcattatgtcaaaacccaattggagctaatttggatttgctaaggctgctgatttagtgactgatctgattgaatagatccataagtttaagttgatatgtactgtagtatgttatcagctgtgacattgatggatttgtttgatttatattcggattggtggtagctgatctgcgaagaagttgaactcattgttttaggccttttcttggttccttaggagttaggatattgaatacttctacttgaatgggctacttttatatgccattgtgaaccttgtgaatttacctaggtgattcaaaaaagttgataataagtgggaacttttgcaattacgtaaattagattttaattttcagaaggttttgatgtaccccagctttataatttgtaatgtattctgagatttgacgttctgatctccagacagaaactgtattgtaaagtattaaaaaagaacaactggcaaaaacagtctagaaagcaataatttgattgtgatttatattgaactctacaggcacttttcttttttgaaattcattcccactgtgtttggtattatcaagtgatatcaagtgaaaagcttaatgactgccgactagagtttcattttgcattatcttctttgctcatatagacttaacatactgcacagtttcatgctataaagaaatatccttacttcagactctgctattaattaattttccctttctactcgccttcagttaaattgcttgactggggagaggaaggccataga

SEQ ID NO: 110680 - DNA, 460 bp, Aquilegia coerulea
  Intron number 1 from transcript AcoGoldSmith_v1.005167m (l ocus AcoGoldSmith_v1.005144m.g) derived from phytozome v7. 0 (chr-ID scaffold_25; pos 1147652 to 1148111)
ttcaccaactattactaattcccctgtttcaacaggtaatttatttaatctcttacgacaagttttgtatgtatgtatctttggttgttattgattgtagaattatatatccttatatgtttttttttgttaataatgttgaaaagcaaagtgtttgctgaaatgtttaagaaagaaaaaactatgaaaagtttattttatatataaggccatgaagacaaaggatgtgtttaattgaatgacatgaagagaggaagagaggagattgttgtgccggatttgtcgatttatatataggttatcacagattactgatatggacgattttttattaatcaaacaaagtaacgacccttgttagttaattaatgtgtatctttgtaacgggtactttcatagccacatcgaaatttgaaaatgataaactcgtcacttttctcagattcttcaagtgcaagca

SEQ ID NO: 110681 - DNA, 432 bp, Aquilegia coerulea
  Intron number 1 from transcript AcoGoldSmith_v1.021934m (l ocus AcoGoldSmith_v1.021934m.g) derived from phytozome v7. 0 (chr-ID scaffold_47; pos 1317077 to 1317508)
gagaagagtaataagaatataaagattaaaaggttttattttaatttgatttttttagtattgtttcatattcaatttcttggttttttttttttgctacatttctacttcatttcttattaattttgaagttagggttttttatttgaggaaatcagatgatcaagttgataccatttttgttcatttctgattattttgacctaactttgtcttcttttcacataattgttaatcaaagttgttattttggctttgaaaaccatttacttgttcattaaatcatttttcccaaattttatttttattttcttatgacatttagctgagtggagatttgtgaattgagggatgtatgattatcacatacatagatttttttttttgttttttgattgttttggatgaaattagggtatctgagatcaagac

SEQ ID NO: 110682 - DNA, 557 bp, Aquilegia coerulea
  Intron number 1 from transcript AcoGoldSmith_v1.025947m (l ocus AcoGoldSmith_v1.025947m.g) derived from phytozome v7. 0 (chr-ID scaffold_25; pos 206810 to 207366 reverse strand )
caattttagggtaagttaacaacatttttgcattctgtttatttaactaattataagtactcgtcgaaaaaacattcatctaattaaccagtaatgcttgatcgcatttgtcgtttaaaatcttttttcatggccaaagcttggcgtatttgtggtctgtcactctgtctacacaatatcatgcagtatgcaaccaccttggccagatagttaaaaagtatatatggtgaacaaaataggtttgcaaaaaaaaaaaaaaaaaaattatactgaaaatcatttgaagaagacaaatatgtcattttaggaattattatctatgaacgagcttaatatatcaaaattactgatgtttttgacaacggagttcaagcacaccattacaccaaatgcaaatgtttatacaaatctctttcaaatagcatttatccaagcttgggcatgctgagtgcccacacaaaaagtttgagctgcggactttgtattgtgcctgtatggctgtatagctctctgaagtctgaacttcttgttgcatcgacttttatataattgaacag

SEQ ID NO: 110683 - DNA, 989 bp, Aquilegia coerulea
  Intron number 1 from transcript AcoGoldSmith_v1.007893m (l ocus AcoGoldSmith_v1.007893m.g) derived from phytozome v7. 0 (chr-ID scaffold_25; pos 1975792 to 1976780 reverse stra nd)
tggccaggtgggttttctctttcaaatctttgcttttctttaataataataattactaggattctgatttatgtttttttgttacccatgattgaattttatattaatttttgctttacaatttataattattagggattttttttaatcatggagtaattagtcttctgtgaagctgaaattgttttttcactttacccatgatatagtttaattatttattttcattgttatatttgtgggatttttgaagttttgtttgaatcagacctttttgcgcaacatttctatttagttctttaatcagattttatttttgttctcatagttgtgttttctatgctgcaattatggtatattttcattattttgtatttgcagacaaccttattcatttagataggtattattgcccattcacttttcatgaaattgttataattaaatacctatctgattcatttttgttgatcatttcgtgtggaaaatcgaagataaaaaaaagaaaaacaacacatcatcttagaatgtaattcacttggagcaaccctaccaaattcatgtatctcaggcctcgaaatactttcaacttctattcatttcaattttatactgacaaggtagcaaaatgtactgatttctaaattttgaaaggacctccagcattttagttttctgcgaattcgaggggtttcacaaacaaaaaaaaaaaaccccaaacttgcttcagatgatgatggccataacccaaataagtgttcacctttcattacgcttgcatctgatattgctaaatctttttgattatgtgtagacatctcaactttgaacttgttagttgttagctcagctctatttgatactagacctttatgtttcatcaatgtgattgtgatgatgtaataaaagaaatcgtagtttcttgaaatgataaaaagtgtaatctttttgcaggagaggcacattctttgaaggttgaaaagatcttg

SEQ ID NO: 110684 - DNA, 566 bp, Aquilegia coerulea
  Intron number 1 from transcript AcoGoldSmith_v1.004287m (l ocus AcoGoldSmith_v1.004287m.g) derived from phytozome v7. 0 (chr-ID scaffold_74; pos 932103 to 932668 reverse strand )
ttagtgttctctcgtatcatcaatcaaaaatcaaggttagatttaaaagaattgaagaaagaaactcagatctacaagtttgagataatgtttttttcttttttttaatattatcttgtctattttatttttcggattcatgtgtggcttatactattatagggttttttttgttaatattatcttgtcaattttgtttttaaaatttagaaatttttggacataccccgtttgaaagtcggaatttgagatatcccatttgatttttttttttaactaacctacgcctgtaaaactcttctagggttttttctagggtttttgtttaattattgtagaaattttggttgaatttcagcaatttcacatgttatgtatctatattaattaatgatgtgtgtcatgttattctaaatgatgattttagactcttatatattgtcatactatatctgacatttttttttttctgtttgcagcatggcagattttgctttaggagaatcaatgttgccgaaaagtgatcctttgatactaggggaaaggaatctggaacatttggtgct

SEQ ID NO: 110685 - DNA, 656 bp, Aquilegia coerulea
  Intron number 1 from transcript AcoGoldSmith_v1.002508m (l ocus AcoGoldSmith_v1.002508m.g) derived from phytozome v7. 0 (chr-ID scaffold_25; pos 408273 to 408928 reverse strand )
catcagtgcggtggcaacgttggtgattcttgcaggtgcgtattttagcatttccccctcccttttcattacgaaataatttggaatattcttttttattatagagattggttgctgtttgtaattattttctatagaatgtggattgtggaccatatgaatttggttttttttttttcaaacgattttctaaaaagtgaacgtacacgtattttttttcttagcaaataattaatttcaccatgatcagctgatcacgggagtatagcttttaattgaagtcatgtatgaagaaacacaccaaggaaactttcttgtacaaagtcaactggctgtggctggaaagttgttaattgaattaggaatcacgccaatctcatgtttctgaataataaagttcaacatgtgtaagttagcgggaaacttgaatcatagtatcttacatttataaattatttttcttttaagaaatagtaaaggattttaaattttggtgattgaagtttaaaatctcagacaattaagtagactcctagttaatctaaggctctaagccaagataaattaatttctttgatattttttttttttgatttcattgtgttgcatgttgatttattaaaggcgatcttgtattacagtattcctctacccaa

SEQ ID NO: 110686 - DNA, 861 bp, Aquilegia coerulea
  Intron number 1 from transcript AcoGoldSmith_v1.007787m (l ocus AcoGoldSmith_v1.007787m.g) derived from phytozome v7. 0 (chr-ID scaffold_25; pos 512537 to 513397)
aagggtcctacattcctccatttgtccctggtttggtaagatttaaaccctgacttcttgtctgtaatctttttttttttttccattatattataattttattagctttgtaaaattataagtttgcaaaattatttggcattttgcatttgctttaattttagctgatttaagtcatggaaccacattgccaaaattagggtgtgtttgattggtgggaataactacttgtgggaatttttatagttgaaaatatttccacataaaataattcccactaatgggtcgtttgattggacataaaaacacaagaaaaattttatgtgggaaagattttagttatttgattagacataaaaacatgaggaaaattttatgtgggaaagattttagttgtttgattagataaaaaaatattcccctacaagtttgggaattttttttaggggtgggtcaaggaaagattcatgagaaatatttttatcatggaatttttacatgacccaactttaccaatcaaacatacatctgggaatttctggggtaatgttggatgtgggaatttttcccacgaccaatcaaacagacccttagtactttcaagtttcaactaagcagttttgaaattttgcttgttggaaatcacttcattttaatttttaaggcaaatcacaaagtataattcaagtatgattcacatttcacaatgttttgcaagtccaattgtggcatacatgggattagcagtagataaaggtaaatgtgtaaattgctcatgaatccatcagacatcctaagaaattttatctacatttacatattgaaggtgatccaagggtttggcatctctaaagtagtgga

SEQ ID NO: 110687 - DNA, 562 bp, Aquilegia coerulea
  Intron number 1 from transcript AcoGoldSmith_v1.019028m (l ocus AcoGoldSmith_v1.019028m.g) derived from phytozome v7. 0 (chr-ID scaffold_47; pos 1954658 to 1955219)
tctgggtaagtataattgtttttgtttgtgttctttgcaaattagataaagaatttcatgatagaaggtgtattttagtgttgcgttgctatttataccattggagatgccctaacaagcagttaaaaattaacactaaattaacgggtcgacccgaagtctattttaaaaaaaaaacctaaacccaagatttacattttgaaagcccacaaacaaaacccttttctctcacacacactgagacacttcttttcttctctttctctctctctctctctctctgtgtatgttttgaaatcatctcgtcaatctcttcgtttcactttcttgtaatcaattcatcattgttatttgttcaatcgtctgcttctttttatctctctcccctaaaaccacaaggtaactacagtttcattcaagtttgtttatttatttgttgtaaatttttaattctcagttggggtttttttcattttaaaagttcaattttttggtatttttttttctacttatttgattgcatttagcaatatagaagtgggcatctatactaatcttgaca

SEQ ID NO: 110688 - DNA, 905 bp, Aquilegia coerulea
  Intron number 1 from transcript AcoGoldSmith_v1.008461m (l ocus AcoGoldSmith_v1.008461m.g) derived from phytozome v7. 0 (chr-ID scaffold_74; pos 239457 to 240361 reverse strand )
atattgaaagattgcttgatagttgttctgagtatgttatttttctctttttattcatattttgcaaaaaaaaaaaaatctgatttttggaactgagcaggttttaattttgatttgctttctcgttaacttgtatttagggtgaatatagaatccaaacactgcatttagaattctaggtaatggttttggatgaagggtttaaggttttagtgatgttttcggtttaattgtgctttggatggatttattcttggtgtaataccgtatgtagtttggtggtagattgaccatgaatgttgatactggaaatgtcagcttatacgggggagggctagatatccatattttaaatacattctaattattaataaatcattctttggttcgtaatcaacttctaagatgaaatctggcacctttgtatctagtccatgttatcaaaactacgacatagtgttttttatccttgatcgatcagttactcagttgtcaccgagtatactctaatagggttggaactcgatatctacatataccatatatttctgatactgggtttaatccttgatcctatgattggtggtaccttttgaaaggaaatacctgatgccgaatagtttcattggaaaatcggctcagttattcgaagatatgattgattaatttcttgaacaaattgttcatcgaagtgctgcacaagcaaaaaatcccttccagatcgtttgatatgtggtattgaaatctacactttgatattcagctagtctagttttgaacttgataactggggggctcgagatactttcttatcttcttcaagtagatggtttgaagacaacatgcctgttgagcttgctaatatgtgtggtatatgcaggatttttgaaacaaccaacaacgaa

SEQ ID NO: 110689 - DNA, 921 bp, Aquilegia coerulea
  Intron number 2 from transcript AcoGoldSmith_v1.009953m (l ocus AcoGoldSmith_v1.009953m.g) derived from phytozome v7. 0 (chr-ID scaffold_47; pos 1529753 to 1530673)
ttccttcttcttcagtttttttttcaaacctcaaggtcttgcatcttttttttattcaagtttctggtgatcaagcaattcaaaatgtctctctcaatttcccaatgcttgatgaggttgtgttatattattgtgaatggttgaatctcaaggttgtcaatatctttgctcctgcactgaacagattgacaatagctcatgatcatcatcattcaagtgatgattattatgatgattgtaagattaagatttatgcagaaaatctcgtaaccttggatttcagaaccactctagcgtatgacatatctctgcacaacctgtcctcgctatataaggcatgcatttatatctggagtgaggatcaccttccccaccgtatgatcaagtttcttaaagggatctatcatgtaacagatcttacattatttgatggtaccatatgtgtaagttatctcttttcttttcactacaaatttgtccaatctcatttagaaaaattttaagcatatatgagagatgagctcagtttgctttaaaattctatttgtgttgtttgagatttagcttattcctgagtactgatgaattctactttgatatttttcaagtctctctattcaaagcatctcatcttgtatccaatgttctgcaacttgaaaatcttgagaattgacgtggaagaagttgactccttagatggtggaagattattatatttgtttagtaacttgcctaatatcgaatctcttttctttccaaatgtaagtactcatatgtgttgtacaatttctctggattttattatttatctaccaattacttacttcttgctctggattttattatttatctaccaattacttacttcttgcgagtaccatattctaaagtttgacttcttatttttatcaagggccttaa

SEQ ID NO: 110690 - DNA, 711 bp, Aquilegia coerulea
  Intron number 2 from transcript AcoGoldSmith_v1.009654m (l ocus AcoGoldSmith_v1.007095m.g) derived from phytozome v7. 0 (chr-ID scaffold_25; pos 1320159 to 1320869 reverse stra nd)
gaaaccaacagaaatcaaagcggtaatcaaaccttttttttttaaagttgcataaatgaaatgtgaatgatatgaaaagataaagtttaggttgcaatatggggtttgtggaaaaatttattataatatggggaaaatatataatcatgtatataacgtagttttgttaataagtttgcagaattgcagttaatagggttgttagtttatcaatcaagtaaagaaaaaggtgctataatctgatatatagttttcttttggtaaaaatattatgggggaactcaataattctgcgcttatgaatgtatatagagtatttttttttaatattggttggttagtttatcaatcaagtaaagaaaaagaagcttgcgttttgttattattctgttggtttgttttgacacaatatacataccgacatacagttacatccccttgctactatgctaacttattactagtcctgccaaaagtttatttttgactatctgtgcttctgtgtcgcgagaaatttatggtgctaatatgctattcaaggaactagaattcagttatttagaagatacaaataactgctatggttgattgcttgattcttcattgtgagtatttatagatgttgttcaaacttcaaagcaattttgactaattatttatgtacctttttgctgtgcagccaaagaagagacaataataggagtttgggcg

SEQ ID NO: 110691 - DNA, 189 bp, Aquilegia coerulea
  Intron number 1 from transcript AcoGoldSmith_v1.009654m (l ocus AcoGoldSmith_v1.007095m.g) derived from phytozome v7. 0 (chr-ID scaffold_25; pos 1320944 to 1321132 reverse stra nd)
ccaaggtcacgatcaccttggggcgaactggtcaggtatctctatcttcatcttctttctctctttgaagttaaaatctagggtttagagtttttttatcgattttgtttttttcatttttgattaataaagtgtttatattgaatgtttgtaggttgtgaaaagagcagaaagttctaattctgaata

SEQ ID NO: 110692 - DNA, 919 bp, Aquilegia coerulea
  Intron number 2 from transcript AcoGoldSmith_v1.023290m (l ocus AcoGoldSmith_v1.023290m.g) derived from phytozome v7. 0 (chr-ID scaffold_25; pos 2105357 to 2106275 reverse stra nd)
cgctggtaaaattgagctttattttgattctgccttgtttgttatagatgtgatcaattttcaacattcataatttcaatctagtttctataccatctttaagttagccatgttctgctgttctcttcgtttattcccagtaacctatcccttgactagtgtctattggatgcgtgagttatctatgcactccttggcattacactgggaaaatatgctggccttcagtaatatcgtatatgcctttttaatgaaataaaattagttagtgctatggttttattaactgaagctaagtccaaaagaatgttggataagaattagtgtgtatctaaatcgtaattacatgaccatgcatctgaagaagcatgctaccatttaaagagatcccacaatcatcattattttgtattccctacaagttttctccttttctttttcctgttgtattttcttatctgcagtagacaaattctcttcattaagtcttgcatagcttagaaattccatttgaaagtgtcctattgtaagaagattattacagtactagacttttgctgaaatataaaaaggaagatttaaataatcaaatagaaaaaccacaagtcattacacctgtttgacactgcttttagtagaaggttcatatgcaattatacatctccattttactcgaagagacctaatgtttttacgtatttccatcattttttattgtctttatttgcatgtttttaagccttatactatcaaaacatcactaagtcacaattgtttttaatggtgaagaagggcgacagatgtataaataaattttcttgctgatgcttatgtaattatgtttaatttggaatgtaatgtccattaaacagttttaggtcgattatagatgatatctgactactattcttccagattc

SEQ ID NO: 110693 - DNA, 901 bp, Aquilegia coerulea
  Intron number 2 from transcript AcoGoldSmith_v1.008665m (l ocus AcoGoldSmith_v1.008665m.g) derived from phytozome v7. 0 (chr-ID scaffold_25; pos 510068 to 510968 reverse strand )
gtctaggtaagagctatgtttttcacttgaaatgtttttgagtcagatgttccgtataaaaatgttgcaacacttgcattttctagtattcaaacatttagacaatgtttttgtataaaacaacaggtttccgagttagttttgattgataaatttaaatactagctttgaagggatgtagtttgtcttgttaaaaatcaatcatcgaagtcatgctggcattgggggataaaccccacctaggccttggcttgaatctcattccaaagtaaaatatttgacataatctttgttgcttggtacttttatactaatttcaacttaagtctgcatcatctatcatatcgaaattgtgcaaatacttttgcttttactttatcaagtgcatgcaactacatgccacactttaatgttcaaactatgtatgtatataaaagatactagaatactagatactttgacgtcccttcaaagctagtatttaaatttagacaatacactagatttaaatttagtatgtagaagatactagaatactagatactttgacgtcccttcaaagctagtatttaaatttagacaaaacactagatttaaatttagtatatagaagatacgagaatactagatactttgacgtcccttcaaagctagtattatatcaaatgctcatttagacaatgttcaaactatgtcacgtgtccatgtgctaactgagcatttgatataatagccttaaggagaatgacttcaacttcctgctgcaactacatgcagaaaaagaaataaatggcttcattaaacagtgattcagaacatggaacttgtatgggctaatgatttgatttgatttctttggagcctttttaagttgatatctcatttacttgcaggtggctgg

SEQ ID NO: 110694 - DNA, 582 bp, Aquilegia coerulea
  Intron number 1 from transcript AcoGoldSmith_v1.016387m (l ocus AcoGoldSmith_v1.016387m.g) derived from phytozome v7. 0 (chr-ID scaffold_25; pos 1248287 to 1248868)
caaagaccacacagattccgtcggtacactcacccaaatgattaaatttcgtattatatatacctgaaattaccaaacactcctccacttataaggttggtcagggggtaatcacagtcatttaacatctcaagcgcgcctagattctaaattcaaaaatttgcgccgcgtgttccgaagctaaactagcttcggttaccaaacctaatttcaaaatttcaaacccgccaattaaatctaaatcgagaatctccttctttccttccttctttccttccctctctttaattaccaatagtactatcgtcatcgtcatcactttcactctttaaatcttcaaatctcttaactttgtttctccaaatcgaataagcttttcgaagatggaagaagagaacaaagctttgatgttttcttcattacatcaagaaacaagtttcacgcgggatagtttaagtttaaaacaatattcagcaagaaaagatgaagaagaagaagaagaagatcaagaagatattattcatttgaaaaatgataataatggaagaagacattattcttatagtagaaaacagaaatctc

SEQ ID NO: 110695 - DNA, 497 bp, Aquilegia coerulea
  Intron number 3 from transcript AcoGoldSmith_v1.018443m (l ocus AcoGoldSmith_v1.018443m.g) derived from phytozome v7. 0 (chr-ID scaffold_25; pos 1755082 to 1755578 reverse stra nd)
cctgcgtttactttcctacttgcaatcattttcaggtatttcgaaaaatgattagaatttagaagattcctttgtttaaaatgcggtagtttatatataccactcattggatttttggaccatgacaatatcaatatgtaggttgtttaatgttagtgggtgaagccagtggtgacaaggtgatcacccactttttttatttttattcggaaaagcaatgaagtagagtataaggttaatttgaattagcacatacatgtcttcgtgatacaatgtttattcaaaaatgtcaacaaaaaattctcaaaaaaaaaaaaaactatgtataaaaaacacaggaaagcttgatatatggaagactaaatgatcgtacgtaagatgatgaataagaatgcaggtcctttattctctctgtttccatatattgttctcgttgttgacatctgttgttaatcaatgtttgatgtatcatgacatataggctggaaattttagat

SEQ ID NO: 110696 - DNA, 562 bp, Aquilegia coerulea
  Intron number 2 from transcript AcoGoldSmith_v1.011443m (l ocus AcoGoldSmith_v1.011443m.g) derived from phytozome v7. 0 (chr-ID scaffold_25; pos 1964279 to 1964840)
gtgtgattcgaaggtaaacaatttttattgttgttgttgttgttaaatctgatcttgttgctttgtatcgatttacttgtttcattgatcttgaagatttgttttgacacgatttgtaaattcgatttgatcttttgagctgttttaacagtacattagaaacctccgaaagattaactgtgaaaaagttggttgaatcttgagtcttggcaacttttataatttaactgttctataattaattttacattatttttatcaaaattcagaaataaattattctttgtaaaaggtgatttcttctttcacagtaacacattcctcttttttggaaatttttatgttggtagttaaactacaaagcatcaaatattgttagtgagtatagttaatgaatgagtttgtcatgacaaaatgtcatgttggatatccaagccgaccatatcttcaacttgtcatttctagtaaagaggtttgatgtttttttagtcttttagttttgatgtaggcttgtctggtgattaaagttggaactcacattacaatgaattgattgcagtgt

SEQ ID NO: 110697 - DNA, 609 bp, Aquilegia coerulea
  Intron number 1 from transcript AcoGoldSmith_v1.025805m (l ocus AcoGoldSmith_v1.025805m.g) derived from phytozome v7. 0 (chr-ID scaffold_25; pos 582768 to 583376)
ccaagttcaacaactcattaacaacgactcaacaggtctggcactctctcatctcttgttgtgataatgtgaatacaaaatcataccagtgagaatttgagtatcgaaaatgtaattgaaatgcaaatttgatttttcaacaatttcgccaattttatcaatggcttcttattgatagttctaatggtaatttgagataacttagaattaaagaccatttatgaagactttcaacactttgacattgtaaagttatatgtagaatggttgaaaatctgcttcaaagaagcataatccttaatggatttctaaatgaatatatgactaggaaactcaaaggaagatgactatgacaacttgcattttgttttctaagtcgttctgtgtgttacaaactgttatcattactattaaatacctgttgacagttattttctgaaatttaagtttgaatgactagatgattaggaaaactcgcgttttccaagtcgttttgtccgttacaactgttatcattagttcattactatcgaatacctgttgagacttgagagtaggctttaatttctgaattttgtttaagtttgagtgactaggtggctgggacaa

SEQ ID NO: 110698 - DNA, 672 bp, Aquilegia coerulea
  Intron number 1 from transcript AcoGoldSmith_v1.026471m (l ocus AcoGoldSmith_v1.026471m.g) derived from phytozome v7. 0 (chr-ID scaffold_25; pos 1494474 to 1495145)
gttttcgttgtcatcattgcaagggtactcttaaggtacttatttctgatattcttttctctatattttgttcataagattagtttgattatgatcaaaagattggtttattcataagattagtttgattataatcaaaacatgttttttattggaaggacttgtgttttgtgtttggatcttcatcaaagatgatgatgatgatgatgattttccttttgatggataaatacatactcacttgatcttgggcttgtctaaaatatgggataaataaatcttctgatgattaaagaagttcttttggtttatacattatcatatgcttttcactttatattatcaaatttggaatttgattcaaatggtttatttatgaattatgatgattgtgaacatatgatgatacacattatttgcacctactgtactttgaaagttattggttcaaatgaaaccaagaaataattagggtcatcactcatcagtcatcaggatgtatattttggcttttggtttgggactgatggatatctagtgagatccatgggctagagcccgagtttgatagtgtttttaatccatatgatataagtttgttcttcttgattaatcaatgtttgatgctttttatcagctaggtaacttcaactcctttgagggtattctgta

SEQ ID NO: 110699 - DNA, 392 bp, Aquilegia coerulea
  Intron number 2 from transcript AcoGoldSmith_v1.009542m (l ocus AcoGoldSmith_v1.009542m.g) derived from phytozome v7. 0 (chr-ID scaffold_74; pos 908080 to 908471 reverse strand )
tgaagtgtgagactaagacaaaggtttgtcttatattacattgttacctcaacatatgccatttgatatatcatgctactgaaaagaataattcgatataataaaattttgaatgcaccacctaacaaaaactatcagatgtagagtaagtataaagatggttatgttacgagaatgaacttagtaagtctgacagaagttttaggaatttttaggaacctgtagtctttatgttgtgaataacaactgtttctcttattccttcattcagtatgatacttttttactctaaaatttgatgcatcatgtgattgttagttcaaatgatggatatacagggtaggttgatctgtacatctagttgatcatttctttttttgtgttgcaggaca

SEQ ID NO: 110700 - DNA, 822 bp, Aquilegia coerulea
  Intron number 1 from transcript AcoGoldSmith_v1.000085m (l ocus AcoGoldSmith_v1.000085m.g) derived from phytozome v7. 0 (chr-ID scaffold_25; pos 1635061 to 1635882)
cgtatgattataaagtttttttttgttttcttttggtaaatgcaatcaaaatattattacaaaatcagtattctaaaaataaaataaaattaccaaaaaaaaaaagaaagagacctgcccgggctaccctaactacccgagctgtgtctaactaaagtaccaagtacaccctttcactttgccgtctgtcgtggtctcgaagaaccaatttcatttcttcatttctctctctctctctctctctctttctttctctctctcttcgttcttttttttttctttttttctctttttctttagatagatagatcgcaaaattctcgctaaaaagtgcggctttgaagaatcaaatcgaagtttctacaattatcatcaatttgtaattcaaaatcagttttatcaatagctggatctgaattggcaagattataaccgtcaatttgatgttcaaattgtgaaatataaagccctaattttaaggtaattgttaatttttaattttgatttttgattttattgaattgtttggtaaaccgcaaattagggtttttggttttaagattgaaaggttaaagatggcttgtgaatggatctagggtttaattaattggattttgtttgttttgaaaaaggtaaaagaaagaaagaaagaagaaacagttttttggggaaagaaaagattactgctgtattgatggttttcaattgggaaggtgtttggatcgaagaagaaattaataataaaattggtgaagatgcaagaaggctatgcatgggcggtgggaaggtagtgaagagacaagaagaaggaaaagacggcat

SEQ ID NO: 110701 - DNA, 810 bp, Aquilegia coerulea
  Intron number 1 from transcript AcoGoldSmith_v1.012745m (l ocus AcoGoldSmith_v1.012745m.g) derived from phytozome v7. 0 (chr-ID scaffold_25; pos 453005 to 453814)
ctggttttgcttttgaagcttattggagtccacctgtaagttctgttcaattgaaatttcaatctagtttgataatttgatgaaattgatttactggttatttcacgttttccacgtttttgtttgcctatttattcaggaaaaggtgggaacgcgtgaagttgattcggcaaattgccaaacagtctttctatccgagtatgtaattgcacagtggagttttttttaagtaatttatttatattcaattcatcaatcatcaattgtggtttttttttgcgacagttagacctaaaattactacatttttatagttgtaaagatgagatatacttgtgattatctatgcttagtagtctgaaatgattttcttttcatcatcttgtgtcattttacttatgactgcgtatgatggaagttcagaagttctatttatgaaagagtggagttctaattgtaaatttgtttaggttagaaggttgtgcttgatttgtgcaagtcttcttatttaacagtctttggaatatctctttgccgaaagcattttctcattgaagattaatgcttggatatgtgtctgtagggaatttctgaggcaggtgtatgatggacacttgttcataaagttgaagaaaggggttaacttccctgccatggatccttgggtatgctatctttctgcatcactattctttattttgcacaccttgggactgtacaagcaagttgaatgttaagttttgatcagttgttggtctgaggattaagttctaagctaaagctgtgctttccagggaacaagtgatccat

SEQ ID NO: 110702 - DNA, 378 bp, Aquilegia coerulea
  Intron number 1 from transcript AcoGoldSmith_v1.008525m (l ocus AcoGoldSmith_v1.008525m.g) derived from phytozome v7. 0 (chr-ID scaffold_25; pos 386828 to 387205 reverse strand )
tggaagaagttattgatcgtgtttggctcttcaaggtactgtaacataacatcttcttaaaaccagttcatattttgttttagaatttagttatactttagtgataattacgataaacatactctcgagggaactcaaatttagtttacacatcatggagacaaacacttttgtgctcagtggcatactgtacactggatatatcctacagagaaatcattttagttttgaacatttttcacttctattccttatcggacaattctgattgggatattgtaaatacatgattgacaatgttaatttgtataaagtgttgaaatcatggtgtttgtcaatgtaggtactcagatcctttggttggttacttccggccat

SEQ ID NO: 110703 - DNA, 881 bp, Aquilegia coerulea
  Intron number 2 from transcript AcoGoldSmith_v1.010650m (l ocus AcoGoldSmith_v1.010650m.g) derived from phytozome v7. 0 (chr-ID scaffold_25; pos 2792398 to 2793278)
atcaaactattaagctaggagaaggtcttcgtcaggtgagtttaattacagtttttattttaaatattattttcttatcaacaacaattacaagtttgtgatataattacattgggtttgttttagaaaagaagattgaatctttggaatccaatattatctttatttcaaatgaatttattttcaaatataagaacagataacttcacgagtttgactatagtccaaataacctacagagtaacttcctaagttaatttgacatggttaggtttgaaccatttgacgtagtaggtggtgttaaatgttaatgttgttatttcactagcggattgatatgcattgtcaatcacaatctgcattttgccttgtctgttttttctctatataccatcaaacacacattggttgggtaataggtatgatgactcccttgctacgaaagtatgcgagactttttttgtggaaagctccaaactgtttcaaaagaagagtactaataaggatctgcttgagacttataaattaatgaaatatattttaagatttggttacactggaagctctcatctatgagctgatctttaacattgttatgcctcctattacttgttctatcgcagcttaaatgtgatgatagaatgtcaagatacctggtagatgttcagactacacggtgttaaatctgtgctcatatgatgaacaagaaaagagaatttgcctattctcttgctactgcaattagtttagggtttgaactgtttgtatctatttcagattacgtgtcttgtttatccattgtttttccctagacattgtaatttgtgcagtcatattttgggactaaaatgtgttgtatactaatgcctaactttggtagg

SEQ ID NO: 110704 - DNA, 1009 bp, Aquilegia coerulea
  Intron number 3 from transcript AcoGoldSmith_v1.021392m (l ocus AcoGoldSmith_v1.021392m.g) derived from phytozome v7. 0 (chr-ID scaffold_25; pos 1047336 to 1048344 reverse stra nd)
cggaggctagcaaggataaaccttccattggaactgtaagatatcttttatcacaactctgcaacatcagtagttaaatgacttaaatcacacatggacacttaaaatgatttgacactaatggatgtgttgtctccactccccaatgtgagagtctggtatttagttgccacttggtgctactttggcatcatcatatattggtatctgttaagaaaattcaaaaccttactcttgtaaattttgtctaggggtaatagttattgaatgctaatactacaccattaatttaatttagataacctttcccatattcgggacgctctggttgattgttttcatactcgtgggatggaatttgaaaaacaaaatgaagtctgcccaggtgtatttttaataaatattcactttagaggtgaggcatatgccaatttaagcagcacaaatgcaaagaaagctaagatttccctaggtgatcattttgagctttagctggtatactacaggtaagacttaagagcaggttgcaagattgatggggtgggagattcagattttgggaatctaggaccaattttgctagtaaggctattagtacataagagttatagagacataagcttacagttgcattgatgctatttctgaggtgcaacctttcatgcaattctttttaaacgatgatggttcgtttattgtagtacacaaattactgaattagatactgtataagaaaaaaccaaaagtgagaaaacaagtgtagtgcaggatgagggatgcataactcacttttcctatttcaaagagtgcaatctctcccccatttcttcttccccttttgtggataactggtccatttcttcaacgttaaacccactgtgaggagaactgaatgtaatagtaattattattgtacctattattagccaactgggatgatgttcgtaatgtgttcatttcatgtattggattaggtaattgctgtggagcctggtacattggacaagga

SEQ ID NO: 110705 - DNA, 929 bp, Aquilegia coerulea
  Intron number 2 from transcript AcoGoldSmith_v1.012269m (l ocus AcoGoldSmith_v1.012269m.g) derived from phytozome v7. 0 (chr-ID scaffold_25; pos 1242742 to 1243670)
ttggtccgcaacatctgcatcaaccctgaagtcaggtacataaatacccccttttgactcatgttctcatttatttagatcttattgcaaccataaattagaaaaaaaattacacactgaagtttttcatctgatctataagatccacatcagaattttgaggattattactgaaaataaaacataaatactaggtaagatttgttgaagatatatgttctgaccaatatttttggttcataacatgattattgaccatactgaaaatgatttgcatctatttttaaagcataagttggatcgaaaattttgattggggttgagtatggtatgggagcttgacggcgttatgtatgtggaattgtggatctaaatcatatgatccagatttgatgattctgatcaagatttaaatatggccaccctttaaataattatgcccatttcatgtagcactggtgcacttatcttagattcttactccacctcaaccaagaaattttgcattacttatttgttttaagtatatttatctttattttttgagtgaactgttgaactctacattgagaactctctaacatataaaccaaaaaagcaaaaataaaaattcttttgggatggtttgctgaagcctaatttttagtgcttatagttgatacttatctagaaaaaaagttgtataatgtgatgaatggcaagacctttatcagctgtacctgtaagttaacaattatattgtttttttggggttgcattgatcaaaacattttcgtagaatctctggatcaggatgtggacagtacactgatctgttctgatctaacccttttcaattctttacatgtatgtatatgtgattgtgatgggagtcattttatcttgaaaatatagggtgttaaaagaaaacagggcagcaggaatattgg

SEQ ID NO: 110706 - DNA, 609 bp, Aquilegia coerulea
  Intron number 2 from transcript AcoGoldSmith_v1.009189m (l ocus AcoGoldSmith_v1.009189m.g) derived from phytozome v7. 0 (chr-ID scaffold_25; pos 690764 to 691372)
caagaagatctgaagcggcagctatttggtaagaaaccattctttttaatataatatatttgttcctacttcttactttcttagtgctcttttaagagaacggtggcctaataaatcgtgaatatagtcatgggtgtttccttatgtcggtggaattatttatcattctttgctgactgagtctttatcaaatcaatttgaatggctggaatagtccaactcatgctgcttgtgtcttgttagcctttgttggttgggaattgggaatggtgtgtttgttggtgaccttagaagttagaatataaccatgggaggagagaaaacttgattgtggatgggttaaatttgggttaggagttagaacataaagtaacagagataacatagtaaagttatattggatatgagttttgatattttctatagacttgtctgggttgacagctttggaattgaggcccttaggctgattttaccggttttacctgtattacaacatgatggagttgtcgtttcatagttttatgatgctttgatgattggtggattaattatattaattttaccttggcaggtttaccaccaaggtacagagattctgttcgggcc

SEQ ID NO: 110707 - DNA, 685 bp, Aquilegia coerulea
  Intron number 2 from transcript AcoGoldSmith_v1.012671m (l ocus AcoGoldSmith_v1.012671m.g) derived from phytozome v7. 0 (chr-ID scaffold_25; pos 648559 to 649243 reverse strand )
gggtatgttttctttgcagttttaattgattgcttgtttatttgattcatttgtttattgaaattttcttgtatggtttatgtagattagggtttcagttcagtattgcattaactgttattctgttagtgtagtattgaacaaatgtttgtgttttaagaatacttacagcattccgcgaagctagaaaattataccgaaaacctggactctagtttcttttaggtcattgcgaagaagatgcttgaattaatcgttatctcattatgtctttattcaccattggcaattgttgtattgtgcgcatctagataaggtgtatgcatatgtattgtggatgaagttatgttctttatataggtattaaatggtgcaaatcaagttagctcagaaaatgttatttcccatgatgggaagtacccagtagtttggacagggcaagaggagaatggagagagagggggggggggggggaggggtatcgcggtaaaggtgagtattgctgaggaggattacactagatatattagtatataaaacaaaatgtaaataaatgaaaagagaactgtgattatcaaaatagcttttaaattgtaaccctggtaactagtaaggaaggggtcgcagtagtttcgttgtacctatcatagaggacttgatcatcccagatactcgtttttggtgg

SEQ ID NO: 110708 - DNA, 429 bp, Aquilegia coerulea
  Intron number 1 from transcript AcoGoldSmith_v1.007244m (l ocus AcoGoldSmith_v1.007244m.g) derived from phytozome v7. 0 (chr-ID scaffold_25; pos 353532 to 353960)
ccgccattaaagaatccgctgctcaggaactcaaggtcgatattcttttttccttgtttttcaatatttctagccttttcattactctaaattcgaattttttttattgcaagattataaaatttgcattattactgtacttaaaataaaaatttaggagacactaattggaaactacttcaattggaattgttatatacagtgtatattttgtactgaatttagaagagttcattagtttattgtactttggacaagaagtggtatcactgctatgattgaatttgatttatcttgatagtacatttggttatgacaccacctttaaaagtaaaaacccattgtaatctttataagaatttcaggcataaactctgccgattttttattatgttattactatcctgatgcaggaaaaaggaaaccaat

SEQ ID NO: 110709 - DNA, 553 bp, Aquilegia coerulea
  Intron number 1 from transcript AcoGoldSmith_v1.022647m (l ocus AcoGoldSmith_v1.022647m.g) derived from phytozome v7. 0 (chr-ID scaffold_47; pos 79110 to 79662 reverse strand)
aaatatcactggcacagattccccaccaaacactggtaagtgtatcattaatgttttttaccataacaaactgtccactccttcgatgtcttcttgtcagaagttgtaaagacaaaatcaaactgggatatagagttagatgggaggtcttgttagttgacttactcaggtggattcccctttgtcagtcgatgctcatagtatccactttagaaggagctactgatttcaatcattatttgaaatagcacacatgctcaattgctcatggtaagggcaattggagactttggccacacaagcttgaaaatgacaattttggaagagattgcaattgttcaaacatgagtttgtgatttagcatatgtttatatgaagtgtatagcattagcacagttcaagcaaaaccactcgaaatctttacggaattaactattaccggccatcataattttagttgaaaggacttctatttactagtttatgctattgctaaatgaattttcagacaattttaagtttatatctttttcacaggtcaggagaagaattc

SEQ ID NO: 110710 - DNA, 1043 bp, Aquilegia coerulea
  Intron number 1 from transcript AcoGoldSmith_v1.003203m (l ocus AcoGoldSmith_v1.003203m.g) derived from phytozome v7. 0 (chr-ID scaffold_25; pos 1285891 to 1286933)
agaagagtttgggaggtggtgtaatttatcttgaggtttgtttttcttttcttttctttttaaccttttttattatgagtttaaattttagtgtaattaagttcaggtttttttattacatttgtccaaaatagtgtaactttgccgaaagattgtgttggagaattagtagtttataagaatctgtatagtggtgtgtgaatttagttggtcacggattggtaaaatatgcacacacaaaaaaaaggtttgactgtttttgttgaaattctagttagagtgaaaattttggagagtttattggaactagagtgaattagagatattacaattgtgttagctattaaagtttagtttcagatcattgaaatagccaagctcacgctaaatataagataaccaaaggaatgagaagagaatttatgatctgactgcaattttatattgcccacaatgctcagaagcattagtgtgcagtttgtttaagataatcaaagaatcaataaattccattcaatataataatccatccccaacaaaatatgacaaaatccatcaatctgtatacatagtaatagaaagataagatatcatatccctctgcttctaccaacatgacacacaaatttcaattaaaagttttatatggttgatgtctgaggttgcacagcaatcaagaaccaaccgctcacgactatcttgtgagcaggttggggaaactgtcgtgtattcgtgccctttgctttcttatttgggtttaaagccaactactgttttgcagaatattaaaaatgcagtttatctactatatcatatcaagaattgtagaggttacctaagtggtaaaaacaaacctacttgtgcaaaaagaaaaagaattgtagaggatgttccagttttttgtgtagtaggttttgaatataagatgatagcagtcggtgttatttctttattagttgctctacatttgaaattgtatagtttattgcctttatttatttcccctctttctctagaccagtgctgctcacagctggacctgt

SEQ ID NO: 110711 - DNA, 829 bp, Aquilegia coerulea
  Intron number 1 from transcript AcoGoldSmith_v1.002199m (l ocus AcoGoldSmith_v1.002199m.g) derived from phytozome v7. 0 (chr-ID scaffold_142; pos 33700 to 34528)
tttcttcaattcaaacaatcaatctctcgatcaaggtatactttctttcttcgatttgattacattcgatttctctaaacgttagtttcttacttgttttccaaatcatttgcttcgttttaagtgttttcatgaattttttttttacggttttgtactggatttctaaaactcatttaactttgaatttgcgatttaggtttacttgattttttttttttttaagataaaactattatttgaatcgttattatgttggttagactctttgattctgtaatttgtttaattaatcttcttagttcgatgggttttatgaattagggctctgtgttttttttttgaggtttattattgttctcaatgagctaaaaacaaatttagggaattcgagttataggtttatgcaatgtgagttgaaagcggagaacaaagtttaatgaaatattgaatatatcacacttctagttatattatttttttatgatttaagtactatagaaatgcaacgttaggttgaattattgggcatcagttgtgagtggatgtagtagtaactaagatttatgatatgaaatacactggtattataactagtttgatcaatggggacatttaagcgcaacagaagcatatttaccttctaaaatacactagtactattaagtttttctgctcatgtaattatctaaacaagtagactactgataggatcttgttatttgtcttggaactcttttgttttcatatatatatatatattttttttttttttttttttttccccttttcaggattggagaaggggtggactaaaccaaaagcataa

SEQ ID NO: 110712 - DNA, 696 bp, Aquilegia coerulea
  Intron number 2 from transcript AcoGoldSmith_v1.002199m (l ocus AcoGoldSmith_v1.002199m.g) derived from phytozome v7. 0 (chr-ID scaffold_142; pos 34614 to 35309)
tcggggttactcaatgtacttcttctttctcagataatctcttttagcattctatgatttttgaatatctcaaatataagttccggtaatgttgttcacgattgactctaaataggcatatctttgaagaagttggcttttcttgcaaagggcaatttttgttaggttgttgttgaatggatattgaaatatgcccaaacctagctcccaaaaacataaagcatttatatttgacaattttgggagagatacacatgtttgattagggcatacacattagaagaattattttgattagcataatcgtcaaacataaaacctatatcctttttatcgcgcaaaattgtcaaattatatggaatgtgattagcatcaacataaaacataatgcattgtcagctctactaatgttgactggaagaatgtttttgttatgttttcttaaatatcaaaatgattataaaatatgttctgttgtacatggctactttggttccacctccactgtctaatatttcttttgggaatacaattctctttgaagcaacttaaatttaactcccccccccacccccatttttatttatacatatgtgtgtcaatgctgaagctcatgtctttggttcatttttgaataaattcttggaaacttcgtttgcagtcagcgctcaacgaatcaaatacaaatcttccgga

SEQ ID NO: 110713 - DNA, 518 bp, Aquilegia coerulea
  Intron number 4 from transcript AcoGoldSmith_v1.001506m (l ocus AcoGoldSmith_v1.001506m.g) derived from phytozome v7. 0 (chr-ID scaffold_25; pos 3032811 to 3033328)
cagcaggctattaaggtgagaactaaattgcatgctagctaattttggtaaatcgtacttcatggtcatatcgaacgcaaccccctgtcataacactgaagttccagtttagttaccaatttaaaagtccatgcagtttgtttctataattttccttaaattatttatgtgcgtctttgggaggtaagtattcctagcaaaagatgctgtaagcctgtaaatgtaatagcctaataggataaggatttaccgaaacaatgcacatgacataaaattttgtaaaagggggacgggaggttggctgagtggagttagatttgcgaatatctttttgtgggaagacaccccaataagtaaaaggtttaactacttgttcttgaattgaatgacaatcatcatccggttgacttgtttgaagcttatgtattgcatcgcctacttgttcttgaattgaatgacaatcatcatccggttcacttgtttgaatcttatgtattgcatcctttagggagttgtgg

SEQ ID NO: 110714 - DNA, 592 bp, Aquilegia coerulea
  Intron number 2 from transcript AcoGoldSmith_v1.009618m (l ocus AcoGoldSmith_v1.009618m.g) derived from phytozome v7. 0 (chr-ID scaffold_47; pos 146184 to 146775 reverse strand )
agttctttttggttcaatacttaatatatttggaggtaatgtaatgtgtaacattattttaacggtaacacaagcgtgtcgtcgtagtatagtttataacagcaatgcatagtattcacatgctatgtgtttgttgggagaatgaaatctaactattttgtttttgaatgatagaatatattggacaaatttttttacaatcgcaatgtgtttgaataaatgccacaaagaagaatgttaatgcctacttggctatttgctgcccagatatgctaagtttagtgtgtttgtttgtgtgcatgtttaacaatcagcacatgagctatccacttacttagtagaacgagcacaacaccataagtccataaccacatacgaagtatatggtttcagtggttcagcctaggctttcttatttttttctgtaataaagaaaatttgtgcttgttgctttgaacttgtgctagggctcaggttctctaatttttgtttgtactttttatttcttatttgtaatgcatatatttaatgtctctgtatgtacctctctaaggtgttactttttattgtcatatttcaggtagtactagta

SEQ ID NO: 110715 - DNA, 785 bp, Aquilegia coerulea
  Intron number 1 from transcript AcoGoldSmith_v1.018383m (l ocus AcoGoldSmith_v1.018383m.g) derived from phytozome v7. 0 (chr-ID scaffold_25; pos 1184643 to 1185427)
ctcaaacggcctgttctctctactcgagcggaaccgtgagtttcttcacctgtctctttaaaatttaaatgtgtttatcttttatcgactttttgttgattttcactaggataatgaaatttgttatacctcgtcagtactgcatgtgatgattttactgatatttatgttgttgctaaatttgtcttggtgcggattgcttgtataatcaggtgtttatgtcatattagctacctttgatttttaatttgtattgtgactttggttagtcaatgtttaaataggagtagatttggaggtgacaaagggttatatttcattatcagtagcgagaataaaaacttgaggatagctgtgattgttgtttctgcattgtcgaagttcctttctgcaattaaagtgtgtctattcagaaaatcggtactctaattgtgtttccctttcgcaaagtttgtaacttgcttttgtaattttagttgttgattatatgcttaattatttggagcatagtattatgcctgaagatatttagtacaaaatgtattgcatttagggaggaggatccatccacatcctttttcttccatggaaaatacatgtttgtttcctagtgttcttgtgttcagagccagagtttttgttttgtttttgtgtatgtattttactgttgtttctatgcaattggacttggctttatcctttatcagttgtgctgaactttgcattgtttatattttgctggtaatgaagctccgggcaaccccaaattctaggaggtggagggg

SEQ ID NO: 110716 - DNA, 636 bp, Aquilegia coerulea
  Intron number 2 from transcript AcoGoldSmith_v1.008933m (l ocus AcoGoldSmith_v1.008933m.g) derived from phytozome v7. 0 (chr-ID scaffold_47; pos 470548 to 471183 reverse strand )
attggtaagcgagatggttcttttcatataaatagttagaagtttaatagtcatatgatagttttgatgttgatagtgtaatggtattgtttctaaattaatttaacaaaaatacagagttgagaaactaaattgtatgtcgttttgttctaattggttcaccccaattgcctttgtcgatatgattatatctatgagtgaagagctgatccgcttgttggaaatattatctgaagcttgaaaagataaaaactagaaattgaattgaggttgagtcacgtcactctctttgaggcgattttgtggctcttccctctttgtgcaagcaatactggttgagtttgtctcaattttaacacttgcacaaatgaaaggcgtttttaaatatacaataaaccaccaacactccattataatcaaggtgatagacattcttggattgtggattaatccaatctaatcctaccattatatctggaagttagattgtaccactcctagcaatgtccaccaccttgttcctagaaagcaactcatgctatagtcagtgtaaaccataactatagagattgcatattaaatccaagtaagatttcttattttttgctcttgtctctgttaggtttcagtggagct

SEQ ID NO: 110717 - DNA, 686 bp, Aquilegia coerulea
  Intron number 2 from transcript AcoGoldSmith_v1.006265m (l ocus AcoGoldSmith_v1.006265m.g) derived from phytozome v7. 0 (chr-ID scaffold_47; pos 1799784 to 1800469)
actggtaagcaagatggttcctttcatatatatacttagaagtttaataatcttatgattagttttgatgttgatagtggaatggtattctttctaaattaactgaactaaaatacggagttggagaaactaaattgtatgtcgttttgttctaagtggttcaccccaattgcctttgtcgatactcgatatgactatatctatgagtgaagagctgatcccttgttggaaatattacctgaagctggaaaagataaaaactagaaactggattgaggttgagtcacgtagctctctttgaagcgatttcacggctctgccctttttgtgcaagcagtactggtcaagttcgtatccacaataaaaatatcccgcgaatcacttctgtctcgattagcacttccacaaatgagaggcgtttttaatatacattaaaccaccaaccctcctttataatcaaggtgataggacattgttgaattgtggataaatccaatctaatcctaccattatagctggaagttggcctgtatcacgcccaactctgtccaccaccttgttcctagaaagcaactcatgctatagtcagtttaaaccataactttagagattgcatattaagtctaactttgtgaaggtggtttagattttcttattttgtttgctcttgtctctgttaggtttca

SEQ ID NO: 110718 - DNA, 752 bp, Aquilegia coerulea
  Intron number 1 from transcript AcoGoldSmith_v1.003170m (l ocus AcoGoldSmith_v1.003170m.g) derived from phytozome v7. 0 (chr-ID scaffold_25; pos 477398 to 478149)
gcggtcgcgatcaggttcctacagagactctgcaggttggtagttatttttttcgttactttcatggaaaactttattaaagttatagattttatcattattagtgtgatagcgatttacttgataagatagtatttcgattactttactctgttaggaataatgattctttgtatccatgcttaataactacaaaatcttctttctattttctgttaagtgtcatgttgtgacaaaatattgttgtctttgaattgaggagtaagaaacggaagcggtcaaatgcttaattatacttacattattgaaaatgaaaaaagtgaaatgtgacatatcatcttcattgatgatccaaggtactgaaggaacttaggtttgaaagaacatttcatttgtggcttgacgggttggtggctctggaccattgtaacgactaactaccattaaactactctgatattttataaggtatcattgtccatagatgaacggtatgcagtagatgatttcttaaagtgcaacgaaatattctcatcttgccaggtgttactgttctaacaacggtttatttatttatcttgcaagataaccactttgctgtcgtttatattgcatataaatgccatgcctatattgtatatatatgcatgattttgcattttcgaatatgtttccttctattttatcaacataaccgtatgcagtgcagtacttgacctttttggcattgcagattttggacagccacgaga

SEQ ID NO: 110719 - DNA, 720 bp, Aquilegia coerulea
  Intron number 2 from transcript AcoGoldSmith_v1.024069m (l ocus AcoGoldSmith_v1.024069m.g) derived from phytozome v7. 0 (chr-ID scaffold_100; pos 272772 to 273491)
tgatcgtgtgcctgtaatgtgttgacctttcaacgcaggggatgcttatatttttaccaaaatcatcataactatttagtagtagaaaatgctgaactttgtggcggcgggtgactgccactcctagatccaccttatccaaaaggcaacaacaccaatccaatgttaaagaaaatttggcatttttgttcaaatggaatataatttcacgcaattaattatcaaagattgagcagtacattttatagtagttttctcatgattttgaacaagaaagtgccgatctatttttcttttgccattaagaaatgagcatgtaacgtaagtagcattttcgagatcaactcagcataggaaaggtggccagtgaatcagtgatcctaccaaaaataagtttcttcttctagcacagcattctccagtccaacggtttgcttcccatgctaagccaaatcagcttagttatttattaccaaaattgaagccatgacattcgtgcggtagaaattgtttattggatcgatttaggaagataatatttgttctcttgattgtattaaaaagagaaagctatctagagcctgcagtctattgcgtgaagattactgaaatatttgcggttatatcaacaattttggcgcacttatttatactaatattctgtttcaggtttatctacttcttaacttcataatgttttgattcatgtgcaggactttg

SEQ ID NO: 110720 - DNA, 480 bp, Aquilegia coerulea
  Intron number 1 from transcript AcoGoldSmith_v1.006559m (l ocus AcoGoldSmith_v1.004287m.g) derived from phytozome v7. 0 (chr-ID scaffold_74; pos 932189 to 932668 reverse strand )
ttagtgttctctcgtatcatcaatcaaaaatcaaggttagatttaaaagaattgaagaaagaaactcagatctacaagtttgagataatgtttttttcttttttttaatattatcttgtctattttatttttcggattcatgtgtggcttatactattatagggttttttttgttaatattatcttgtcaattttgtttttaaaatttagaaatttttggacataccccgtttgaaagtcggaatttgagatatcccatttgatttttttttttaactaacctacgcctgtaaaactcttctagggttttttctagggtttttgtttaattattgtagaaattttggttgaatttcagcaatttcacatgttatgtatctatattaattaatgatgtgtgtcatgttattctaaatgatgattttagactcttatatattgtcatactatatctgacatttttttttttctgtttgcagc

SEQ ID NO: 110721 - DNA, 734 bp, Aquilegia coerulea
  Intron number 1 from transcript AcoGoldSmith_v1.023205m (l ocus AcoGoldSmith_v1.023205m.g) derived from phytozome v7. 0 (chr-ID scaffold_25; pos 1009800 to 1010533)
agagttcctcgtggtcctgatcctattcataacaggtgcatatatagatatcatattggtctctagtttatacctttcttcatatctgctacatctatggaaaatatatataattttttctgtattcttctaaatctttatgatgcttattttgctagatcaaagatgcaatgcaaatagttgtcgtaatagtaaaaatgaaagaggaaatagggtcaggttagaagctgaccatgcagttctaaaacaaaaacacatgcatatcaatagacgcatttcgtgaatatttttatattttgacgatgatatttttttggcaattttatcgatatgtttatttaattgctaaattgttagcttcctaaaatcatgctcctttgaataaatttctgtgttcattgtcatatattcattcattcacaagttaaaagaaaaatagaaatataattaatgatccaaaatatttgtcctgttttttcatttgctttatggttctatcaagatggtattcattctaaagagaagtagtgagatcatttttgcctttaagctttcattctcagtttcagttcttagcttttccttaagggaactaatcattaaaagagaagggaaattaaagcaataaagtaaaagatagtatgtagttgtacatttcactttgattatgatgtccaatccctatgtcgttttctgtttcaggaaagctggagactctagaagaccacctggcc

SEQ ID NO: 110722 - DNA, 356 bp, Aquilegia coerulea
  Intron number 3 from transcript AcoGoldSmith_v1.008365m (l ocus AcoGoldSmith_v1.005325m.g) derived from phytozome v7. 0 (chr-ID scaffold_25; pos 450257 to 450612)
gggacagcagacccagattgttcacttactggacagtaagatattttctctttgctaaaattttgtagtttatattgaagaccatatatgcaccatggtttaattgctagataagtagataacacatacactatcttgtaatcaaaccatgtctgagaattgtgtaccatatactgtatgacccagtatctccagactccagtctggtttatcataattgttttcttcacttaataggcctagtagtaatttatatataaactgattagaattttatcacagaataattagaatcaaattacatcaattcaaaaaactatatagatgataagattaatttgttatatgacagagtg

SEQ ID NO: 110723 - DNA, 769 bp, Aquilegia coerulea
  Intron number 2 from transcript AcoGoldSmith_v1.003288m (l ocus AcoGoldSmith_v1.003288m.g) derived from phytozome v7. 0 (chr-ID scaffold_25; pos 1620305 to 1621073 reverse stra nd)
gcgtgagttcgcaaatctttaactcagtagtagtagtagtagtagttgttgattatctgtttctggtttaagatacttcttttatttggtgtgaattttctgtgtttcaattgcaaatattttggttctgtgtaactagtatagtgtattctctgtgttaatagatgcattgtttgttgtgactgttttcatggcttgaattggaaattatctgggtctctgtaagtagcatagtgtgtaatcttttcaagcttaatagcaccaaatttggggtgaacttatcggattcatgattggaatcatctggttgtgtaggtcgtgtatcataattggtgtcatactttggaagaaaacattgggttttcctcttttgcggctgataccgactctaatttcttccatatattttgctaaccaaaagttttctcttactcttttcaccttttctatattcttatttggctctaatggccctttttttgtgttcaagaattagacctgttttcgctttcgagatttgctcaatttgggtagaatttaactttgttatcatatactttttttcttacagtaacatctttaattattgattatttgagttgtgcgtgcttctgattttctgaatttggccttctgattttacatatttgcttttggtacttatctagtacttttgttgtatccattttgtatgacaaaacttttgacaatctcttgggtatattctattgcagcggaggcaatacttcttggttttcagcattaccta

SEQ ID NO: 110724 - DNA, 943 bp, Aquilegia coerulea
  Intron number 1 from transcript AcoGoldSmith_v1.010990m (l ocus AcoGoldSmith_v1.010990m.g) derived from phytozome v7. 0 (chr-ID scaffold_25; pos 615536 to 616478)
gtttcagtaagtttacattatcaaattgcgataatcacaaatttaatcatctttttatcatatgatctctggttcagtcttttggttggttagattcagatatctggatttgtttatgctactatgtaggttataatagagaggagataaggcatcaaaactcttttattccattgatttagatctttaatcaagattacaggtttgaaagaaaattgaaaagacgaagaaaaagaagaatttaaaggaggatctgagatttttttattttctatatatagagagagcaagagcattaacaccatgtatcagaattgaacatccatttccatataaatttttgaatagctgagtaaaaactagaaagattgaagccggcctgttacaggaaaatgatccagtgtcattgtcactttatttcaattggcaatatgtcacgtttaatttcatatgaaacaggttacagagctgaatgtgattgctttaaatgagtatgtgagggatcacaaactcacaatgtaactattctttatcagcaattattttgtttgtgaaatctagtctggagtttatactcaaatacttaacataaatgggaatcatgacagtgcatcaaatcattgaaacaaacatcccccaaaagaacttttcaaggaagctgaagtaaacagaaagatgagaatattgaaagtgaaaatgaacttgaatttaagttgtagggtgtatactagtaatactactatactactgatactactattcttatgttagatgcagcaatctactataattggttaaattttctcctaagatacttgatctctgattttcgtttttctcttatacttggtctctgatcatttcttcaacatggatgtaagctcaaatttctgccttgcatgttgcagcatattgtgtagtggcagttgagtctgctggaaga

SEQ ID NO: 110725 - DNA, 334 bp, Aquilegia coerulea
  Intron number 2 from transcript AcoGoldSmith_v1.002235m (l ocus AcoGoldSmith_v1.002235m.g) derived from phytozome v7. 0 (chr-ID scaffold_25; pos 706606 to 706939 reverse strand )
ttgtgtcacttggagaaagatctctgcctggaagggtaagacgattcatcaatcttttccaaatcatattgtaaatatgaatgaacaaaacatgttctatagattaaattcaaaagttctctggagaagtcaaaagctaacagggatgcttgtgtaaagtctaacagggatacatacgcctacttataaccaaatgtagcacagaaaaatcgtatataaacatgcatttgaagaaacatgaatgatttagggccttccatcttcatatctgtgatattgacaaatgaccgattcattatgaattgtatatatttatttgtaacagccagaaaaa

SEQ ID NO: 110726 - DNA, 796 bp, Aquilegia coerulea
  Intron number 2 from transcript AcoGoldSmith_v1.012661m (l ocus AcoGoldSmith_v1.012661m.g) derived from phytozome v7. 0 (chr-ID scaffold_25; pos 2548068 to 2548863 reverse stra nd)
aactcaatcttgacgtctcaacgccatcaaaaccagtatacactttcaactctcacccaacagtttttctttatcatttattcagttgaagattcatgagatttacacaaattctataatgcaagtggataatgtaatgcataggtcttgggaatgatttgcagtgtttgttaatgttttgtcaataatttaaccacgcacacgctaagtcattatgtcatgtatgtttactaataagtctggcttaaagaaattcaattctcacatgcattgataccatttacacccaaagtgcccataatttttattaacaaaaactcaataattaatgtgtgttttgggtttttttgggtgtctgtttgagtgtggtcagtcctggtatataatcttaaggtgattcaaattgttaggatagggaaatggctgcatagtatggccagagagcctagatgcatgtaacctgcaagagcaagagttaaccaacaagaaaattactttatgggtgcaaatcttaacttctagcttcgttcactgtaatcatagcaacttaagattttgctccaagatcaaacattgacttgatgagtgatatatgtttgatcaattctcagttgaatccatttgatcctattaccgcttgctggctcaagttcaacttataagtcgaacttacatccttgccaatatcaggttgatatgtttttgcaggactttgtaactatgcctattacatgcatatacatgtaataattcaccaaacgtttatttattcagtgttccctcaactccaattgag

SEQ ID NO: 110727 - DNA, 386 bp, Aquilegia coerulea
  Intron number 1 from transcript AcoGoldSmith_v1.021921m (l ocus AcoGoldSmith_v1.021921m.g) derived from phytozome v7. 0 (chr-ID scaffold_100; pos 368554 to 368939)
ccatcgattctaccagcaccactaacattcttcaagtaaatcatctctccttagttctatatatatacgatctctgcgaatcttgattattttaatttctgatttgtttcaatgtcgatgatgaatttggtttgcaggagaaaaaagaagacgacaaggaacatagtattgttactcccgatgaatctggacattctaatccatcacctgtagttagttctcgtgtaagaatatattccttctttcttcttttcaatcaatttgattcttgtacattgctttatattattctgttagatctggtcaaattttcaattttcttcttgttgttgttgtttgttgttttttcaggtgttgtatttgttaggagatataacttctggtcc

SEQ ID NO: 110728 - DNA, 658 bp, Aquilegia coerulea
  Intron number 2 from transcript AcoGoldSmith_v1.016960m (l ocus AcoGoldSmith_v1.016960m.g) derived from phytozome v7. 0 (chr-ID scaffold_25; pos 2507315 to 2507972)
caaagtatgtatctttatcttctatttattctgtttttgtccattattttgataatttagtagtaattaaagtaattaaacaaagattttaataataaagtatggaataataatcaatgaagttgaacttctacagttctacttttagtagttattcactttcaatatcagtgatattgttaatttgacatcatttgtgaatatacattaacaccacaattatattcaaaataatgctccttttattatctattattgaattttgttgtaaggagatatgtacgactgagaaatgtgaaatacatgttctttaaaaccaaccaaagaagaaataatttttatgcttgtatttcctccttatgttttcttttatgtgcttgatgtgttattgtccatgttcttctctcttgaaaaaggtaagatcattatcctgcatagggaaatttatacagataaacaataatttatcttaattttctggaagcattgtcaattgatgtttatgtccttttacacgtcacatgtgtctatgattattaagagttactggttttgcttgtaaattgtttatgctcaacaataaactgatattttgtattttcttttgcaaaatttggatctagtcgcccctggctttgttattggattcttcattcca

SEQ ID NO: 110729 - DNA, 446 bp, Aquilegia coerulea
  Intron number 1 from transcript AcoGoldSmith_v1.023796m (l ocus AcoGoldSmith_v1.023796m.g) derived from phytozome v7. 0 (chr-ID scaffold_74; pos 1158255 to 1158700 reverse stra nd)
ggcgacaaggttattcttgaggatcctatcgagaggtacaactttatctcactagaataagcctatacacgatgagatataatgtcaatgctactttttttgtatgagaatgttgtttgagagcaggggaacatcttcattgtcgaattacttttttcctttcaaaatgatgtaattatttagaaaatggtggaactgcttgatgaaactttgagcagtacatcttagtatccatgctctggaaagaggagtttgtgatttgtttttagcccacttataagttgcaattgctgttgacttttttagttacccataatcttcactgatttatttactgattctttatatgactgatttcatgtgtcggctcctaccttgatcttaatattaacattatatttcttcctgcagttggccgatttgtgattgcttaattgctttccatt

SEQ ID NO: 110730 - DNA, 426 bp, Aquilegia coerulea
  Intron number 2 from transcript AcoGoldSmith_v1.023431m (l ocus AcoGoldSmith_v1.023431m.g) derived from phytozome v7. 0 (chr-ID scaffold_25; pos 1748323 to 1748748 reverse stra nd)
ttctggaaggtaacatttcacattttatttttatttactattcttttccccatttgttagggaaaaaaaaacatgttatccattcaaaatttcaaatcccaatttcaaatatgggccaaaatatttctgttgggttcgggttgacccacccaagttatttatagaagaatgaacattgtcagtctaacactgtgacacacttgagagctattcaacttccatggctaagatgattagcagtttccaaagggtttcttcttgttgttgttgttgttctaatggtaaactctctcctctgtgttcttctttcctttttatgtttcgttccaaaactactacaaccaacatcataaataatccctcttcttctactagtggtgacaaaaataataatccagttgattttgagtattttgtaagagatag

SEQ ID NO: 110731 - DNA, 564 bp, Aquilegia coerulea
  Intron number 1 from transcript AcoGoldSmith_v1.026151m (l ocus AcoGoldSmith_v1.026151m.g) derived from phytozome v7. 0 (chr-ID scaffold_25; pos 2838968 to 2839531)
ggtaaaacgcgtcctcttcaactatttttttgttttcatttaattaatttctgttgcagctggattttataaatgtttctacacatttgaattcattcttttctcttccataatgttggaatagctccacttcaagatctaattgttgtgagttcttctttatttttttgttttttttttaaaatttaattttgcgtattaatcaatgcagtagtatttgatcaatagtaaaaaaaaaaaaaaaaaaattattattaaaaatttaaaatagttgttgcttgttctgttacatgcattcaaggttgtgattgcaaataggatggttaaaccatggaagctgaatagatgattaagagattaggtatataatatctgattattaatacacaatgtgttgcaacttctttcagattgaaatgatgatcatttgagtgatgactcaacaaatgcgcaacttattcatatgtttttcggaaaatgttaatgaggttttgtgattgtgaacaataattctggttatggagtatttatctgagaaaagctttccactgaattccaaagatt

SEQ ID NO: 110732 - DNA, 272 bp, Aquilegia coerulea
  Intron number 3 from transcript AcoGoldSmith_v1.003350m (l ocus AcoGoldSmith_v1.003350m.g) derived from phytozome v7. 0 (chr-ID scaffold_74; pos 263450 to 263721 reverse strand )
ttggattttgggtctggtactggttcagttctttggtgagaagctgtttccatatattttgatttcataataatcaattttagtgagaaaagaagcccaaaggatggggtgtgttactgcttattcggcatttcgagtggaagtggttgcgggcaaaacacagaattcttgtcatttgattgttttttatgttatttgtctattgtttattatgttttccatgatataatgttgcagggcagttagagaagtctggcctcattctttggaga

SEQ ID NO: 110733 - DNA, 800 bp, Aquilegia coerulea
  Intron number 1 from transcript AcoGoldSmith_v1.010448m (l ocus AcoGoldSmith_v1.010448m.g) derived from phytozome v7. 0 (chr-ID scaffold_47; pos 959153 to 959952)
agaagagtactggttagtggttgctcaaccatagttgaaaatggcaattccaataatattttgattttataaaaaacgagaaaatattccaagatttcaacactgattcatcattaaatatcaagaatattctgagtggagtggacagtaaaatttccgtgacatttgatgattttttgaactatgttctcaaagtctcaacagaccagacctagcttgtttttgcctttggggtcaggtcgcggtcgtggtcttggtctacataaaaatcagccatttcataggggggaaaatgtgttggtttttaaaaaatttgatattgttgaatcaggttcaaattggaccaccaagttggtaggccacatatgaatcttatttattattataggacagaactactccataaaatcccaatttctcatcaagaaaagaaacaaacaaagcacgtttgcttcttctctcactcactcaatatatataaaaaccgacttcgacttaaacttaactgatcctttttacacagttttttgtcactttcttttttctctttctttcctaagaaattcttgtttcttctccttctactacttcttgttcttcttctctttcaattcaaacaataaaataaatattttttttaataaaaagacaacataaacacaagtacttcagttatacatagaaaaaaaaagttaacagttaacaggttagtttttaagattttatttgtttataaataccattatattcattcattcatcaaagtatcataagaaagttttcttcttcttcttcttctt

SEQ ID NO: 110734 - DNA, 880 bp, Aquilegia coerulea
  Intron number 2 from transcript AcoGoldSmith_v1.023999m (l ocus AcoGoldSmith_v1.023999m.g) derived from phytozome v7. 0 (chr-ID scaffold_74; pos 933511 to 934390)
acttgagaaaagtatcaagttcaatcagctacaaggtattacttctgaaaaccgaaaagaaaaatgttctcttttgttgtttgtaagtcaatttagtgaagatgcttgttataattacagtttctaaacaaagcaaaggttgcagcttaacaggttttatttcttcttatgttgatgttagagcattcccaatggtaaaacacttttagttgtgcctcataggatggttttaagaaattttggtgtttccaatggttttggcaaaaaaaaggttttagtgtctccaatagtggattattaaaaccgcactcattgtgaggtatggatccataccgcattcattgtggcggatggatccacaccgcgcgtactaattgtggcggatggattcctacgtggcacttttaactccttggcaaatttgccaaggagttaaaagtgttttgcttgaaaagtgtgttaaaaactaccattgacaagtgtttacactaaaagtttactaaaagtgtgctaaaacctaccattgagaatgctcttaagttttgccttaattaccttattggaaagtaagaatcttactcttgagaattgaaacagtgaaaatgtattgtctcgaggagtcgggacatctgtaaaaaccttgtatcttagggtggttatagtacaaccctttaaaaggggtaatgtttgatttcatattcattatagggagattacccctttacctcttcagatgattctcttcattttctatctgatttcatttttggagcaatagatcagcttatatgacatttaggaaacaatatgattgtttaggagttaaaactatacattttttggtacttatcaggtaggagggcatatttgcagtacttgg

SEQ ID NO: 110735 - DNA, 488 bp, Aquilegia coerulea
  Intron number 1 from transcript AcoGoldSmith_v1.014675m (l ocus AcoGoldSmith_v1.014675m.g) derived from phytozome v7. 0 (chr-ID scaffold_47; pos 1321202 to 1321689)
aagtagggtaagtaggaaaacctaaactttgttgggttttgtctacaaatgaatctacatccatcggttagatggaactaaaatcaaacggtcacaactaatcacaggtgttcaattctctctccaacgtgttaatccgacgtggcttaaggagggtattcttggaatttttaataaatgaccgagtcaatggtggtttgaccacctgaaagttgaaagtagtgggcaatcttaaattttgttcaaaccagtgggcaatctcaaattggcaattaaaaccagtgggcaatctcaaatgcgcccttatttttaccttaaagtttgtgtttttttatttacatcattttcccatatatttcttatgacaattagttgaatggagatttgtgaaataagggatatataattgtcacatacgtaaatttttgtatattttttgtgttttttcttctgtttttttatttaccattgtttgatcaaattagggt

SEQ ID NO: 110736 - DNA, 652 bp, Aquilegia coerulea
  Intron number 1 from transcript AcoGoldSmith_v1.010507m (l ocus AcoGoldSmith_v1.010402m.g) derived from phytozome v7. 0 (chr-ID scaffold_25; pos 277572 to 278223 reverse strand )
ttactactcagcaaaaccttcgcgtcgaattgaaggtataaagaaacaatcttcgagtaggtttgttttttcgtttcatttttatttgattttgcgtggttattgagtatttagggtttgttagatctaaggtttctggttggctaagagatttcagtgtttgagttatcttcttttcagtcataagagatgttgtattgttgttttacacttttacattgtaattgaatttatttgctatgaaccatgaatcaagtaggttctctacatctcatattaggatcttttcattgatttagtaacaaactgacaggaatagccatcgtcaggtggatacattttttgacacaatacgcttttagttgttagcttgagatggttccactcatggtcagatggttatgaatattggatagagtaggcaaaatacttactagtaattaatttatttgaatacaaaggtttggaaattttattagctttcaatttcagttctcaataaaaaaaaaaaaaaaacaagagagactagcatactttgtaagtgaagccagctctggccaaagctaatttgttcctcatttgtgtcactttctctattatataacgctcacttagtactagataatatttcactactatgactggttcagat

SEQ ID NO: 110737 - DNA, 563 bp, Aquilegia coerulea
  Intron number 1 from transcript AcoGoldSmith_v1.010587m (l ocus AcoGoldSmith_v1.010587m.g) derived from phytozome v7. 0 (chr-ID scaffold_74; pos 383486 to 384048)
tggagcttgtcaggtataattttagttcatgtcgatttttgttaacatattaaaactcactcatttcattacaatatcattatatgttatcatgttagtttttgtttgattgcaaatagtttctgtcaaatattgcaagggagggtttatgttattagaagatgaatacaagttagggggtctgccatatgaaaacctaaaaaacaatatagataacaatcacaattgatttcttttctctttctctcgacacaaatacttaacattgtaaaagtgcggtctactttcacaattttggatactatggaatttagagaatcaaaaggaagttagttctcaagctgaaataacttgtcagatatctggtagtgcactttaggagtttaggacttagttcgattatatatgagttataaattttgatactatgagctgtgccattgaattcctgtacagtttatccacaattatatactgtaacttgtgaagttgtggctgatgtatttttgatttctacctaattggatggagagattgcattttgttcaacagatcgggaggat

SEQ ID NO: 110738 - DNA, 970 bp, Aquilegia coerulea
  Intron number 3 from transcript AcoGoldSmith_v1.008856m (l ocus AcoGoldSmith_v1.008856m.g) derived from phytozome v7. 0 (chr-ID scaffold_25; pos 1507846 to 1508815)
tttgactttcacgagcaaagagctgcctcagctaggtaaggtatcaagacactaacgtgttaaagtttttgtggtagttgttagattaattcattggcattaagctgtctttctttccttttattttgttctatctaaatccattagcgctttattaaaagaattataggttatgttacttctttcatgattaatgatttttgcgattgacactacgatgtagttcatatattttaagcttctaaatctcaccaaaaggttgaagctctatgtgtatatatatatatttctgaggcatgttttctaactggagagcacataatacttatcaagcatttcatatgtttgagtgatgacgctgggggattctgtgattccataagaacatattttgatgaagactttcttttataatgtacgccatgtcaacccactatcctttttaatttgatttatacatgtttaccttttaccaataaataaaagctaagaagaaaaatatttgaagcttcgcatgactttccgcattagaagagtaaccactttcactgtgttcgatcctaggccatcttcgtatcaaacaaaatattcgattgtttattttgggttgaatgtttattgaaaattgaaaataatctttgttaatttggaaatatactccacaaccacaaacacggaaaggttgtgtaaaattctacaaaacaataccatattaaacattttgaggacttctttagcaatggtctattattaagattagcgacataaagtttttaacttcatgtatgtgtatttcctagtaatgcatttttattacacgggtcctttggttgcaaccaaattttactagtgttcgtacactaaacagcacagtttttgtgcacatctacatgtgtcctggtctcatagtacttctcaatgttatgtcatcacagggacgattttgagaagacaggtttgagcaacttag

SEQ ID NO: 110739 - DNA, 819 bp, Aquilegia coerulea
  Intron number 1 from transcript AcoGoldSmith_v1.003611m (l ocus AcoGoldSmith_v1.003611m.g) derived from phytozome v7. 0 (chr-ID scaffold_25; pos 3010147 to 3010965 reverse stra nd)
ttgacgacaccaaggtgatgtcctattctcttccttaaacactcttaagtcactgtacaatatcagtgataagctattgcaaaaactgtcaatacttattcttcttcccagtttctaaagcttcttacacaattatttttctatcgtaatttatccataagtttattatttatggaagaattgctatcacatacatgagaattctaccaatgaaggtgtgtggaggggattgaattcaatcaaaggtagtagaacagggtgcttcaaagttcaaccaaccattgtcaaaactattctcagcgtctctcaaacctcataggttaacaatactgttttcatactgaaatgagaagggaaaggaggccgtttggtcacgctttccttactctgtcagaatggtcagttcagagttttcgagagatgcacctcataatcaggaaaagagaaaagtaaaaaactgaatgtaattgtccttaatgctgtctctagtgttgagttatcagagaactgaaattgatcataatatacactgaaaattatatgttaagcaaataacaatttacaagaaatagaacaacagaaaaaccacaagaaagaaacttggagttcagagaaactatagaacgacaaagacatagcaatagggcccacaaaaaagctataatagttgcagacagttatgtcaagattccagcaataagtgtaagcagttttctacaaacctaccaacagaaactgtaccatagttaccactgatattaactctgttaagctcagattagtttgtttaattgcaacatttcaggctttccaagctgc

SEQ ID NO: 110740 - DNA, 600 bp, Aquilegia coerulea
  Intron number 1 from transcript AcoGoldSmith_v1.013292m (l ocus AcoGoldSmith_v1.013292m.g) derived from phytozome v7. 0 (chr-ID scaffold_47; pos 864900 to 865499)
actgtatcattagagtaagtgtttaagcttttcccacttggttttctgatcttgagattcatttttgaattggtccatagtatcatagtgatatgtcagtatgtcacattaccaattttttatcattcacttgaacttataagtcctttttgtgtgccattttgatcttacgtttgtgagtgactgagtgtgtgtatgtgtgtcttatgttttggaaatgtgtatctgacatctagtggtatgcagttatgcacggccgaagcaaaaatgatttaggcaaaaaagcatgaaactattgacgacaaaatgattcatacataagagaatctgtgatgcccaatagcccataaatgatatctatttccatttctacttgctgttgaactggaaatatgaagagggtaaaacacactcagaatttgataatgaatgaaacaatcctgcatataatagagaaacttataaacttttatcaagaaatgatatctatttccaattttctgatctattgcctaaaaacttatattgatttgagtctgcctacaacaatctgattttcttacaggggtgtgacgcctcggttcttcttgatagtagagg

SEQ ID NO: 110741 - DNA, 433 bp, Aquilegia coerulea
  Intron number 1 from transcript AcoGoldSmith_v1.009829m (l ocus AcoGoldSmith_v1.009829m.g) derived from phytozome v7. 0 (chr-ID scaffold_74; pos 505548 to 505980)
attttgcaaaatctgtaagtaaaacccccattttgtgtttttgttgtttggtgattgtgaattgcaaaatcccctgataagtgataatagaaaaaacccagcttgggatcttgtttttgtttgaaacaagacatgaatgcactttttcatgttattgggttacactgctattcatgtgaatgaatcacaaatatacaaaaagggggatgaagagtaataatggataatagcaggtaaaacgtcttttttaaatcaaagatgctgccaagagattttgattcaaagacgtattacagtactgttcaacaacaaaattctcacaccccagattatataacttattacaaacatcgaagccactctttgatctacagaaaagtgagacttattctaagttttcaactaatcatgttcttttgtcgttgcagcactg

SEQ ID NO: 110742 - DNA, 912 bp, Aquilegia coerulea
  Intron number 2 from transcript AcoGoldSmith_v1.011119m (l ocus AcoGoldSmith_v1.011119m.g) derived from phytozome v7. 0 (chr-ID scaffold_25; pos 158024 to 158935 reverse strand )
agaaggagttcgagaaggaacacgttgcacacaaggtaaaacaaccaaaattttcattgtagggtttgttcgttgaaatctgatttctttatttaggttatctggggtaaattatagttatttgatcagattaagcagttaatgatcttgttgatcattattgaaacttctaattagtatttcttgtttgtatgtttgattgagttgtattgttgttcatttaggttattatatctagtcagtgtagtgtttttcatagtaaatctaatttgttgttttaattacgttgttgattatttttgaatgatctacttagcagttcatgtttgtttaagttgtgttgttgttgatttaggttactgtttctaattgttgtagtgtttttatatttttagaatatagtttgtagttattttaatcttttttatgtatatgcagagtgctcttggtgttgaggataaagagatttttcctcaagaatccagtagtgataactttaaggtgctttgttatttgaagttctctagattgatatgtgataaacctttaaatggattatttgcttttactatcagtgagttatttattaaaagttgaagattgaatgaataatatggtattacttaatggtaatatacccagtatttttaaaaaatgtaaaaatttcggaaactacaaaacaatgcatgattggaatgattggatcataaacttttttttttcttttttttccacaattgtttgtccaaaaggcagattttgtcttttagagcttattagtatagttatcggtgattggaatgattgattactatacatctttgattttaacaattgtatcattatcttatcttattgtgattgtgtctgtatgcagcttacaggtggagttgagaaggaaaatcgtatccc

SEQ ID NO: 110743 - DNA, 814 bp, Aquilegia coerulea
  Intron number 3 from transcript AcoGoldSmith_v1.020727m (l ocus AcoGoldSmith_v1.020727m.g) derived from phytozome v7. 0 (chr-ID scaffold_47; pos 1697804 to 1698617)
aagcattgggtgtagccattgatttggaacctgaggttagtacatcaaattcggttttggtttgtctgatttaatgctcacatgttccttatctagtgggtagaacatgttgcaaatgcctttaataacagatgatatagcacagtagcaggttccaccaatgaagattgaacagaacctgcaacacaaaaatttatttaaggactaagagtaggatagggttctccactctattcattcaatagaactggaacttcatctttacttggaagagtatgggcaaatgataggataagtggccaactatgtaatatcttgtgttttttcaaatcttaatcacagatctggacttaatgttattcctcatccactaaattagttgtctgttcattgaaaatctagattatttatatgaaaagaagtgggtttgttgagttttgccaaatccatatgtctgtcatggtcatatttcaggaaaagaatttcctctttacttgtttttatctcaaagctactcttaattcatctgatgataattcatctttagatcaatctgaattgacatcaaaatataaataagactaatgtctcttgagtctttgctaactattcttgtaaagtctttagtctctttgataaattttgtggatgagcatgtatgttttattgggtggacagaccaagtggttggactttaaaatctgtggcattcactaaactctatgatatggagcaataactttgtcctggcccttaaccttatatttgatcctaattttataaattgtatttctgttatttagggggtaaagag

SEQ ID NO: 110744 - DNA, 713 bp, Aquilegia coerulea
  Intron number 4 from transcript AcoGoldSmith_v1.016445m (l ocus AcoGoldSmith_v1.016445m.g) derived from phytozome v7. 0 (chr-ID scaffold_25; pos 3320880 to 3321592 reverse stra nd)
tctgcagaaaggaagccgcattacgtcaaagagaggtaagttggatgccatttacatttgcttagacacattaagggtagatctgcaagcactcccactctcctctatgtactgatactcacatggacatcatgttgcatgggtgaattacacaaaaaaatcagtttgttttatatttgtcatgggaataataccttttgcatctgacagtcatatgataaccaatgctggcataatcagattgcaattgtttatgatcaaaatggagttgagaacatagtggattgatttgttctgatattggcaattggcttgcaggcgaaaaaattggttttaatgttttgtgttgttgtatccccgtaactttgagctttttcctgtagtacttttgctgatagagattcctggtacccgtttgattaatttttattgacattagaaatatatacgcacaagaagaaacactggcatgaaaagacttttacctaatgcatgcttaaatagctgatggttccgattctcaaaccataaaaatgcatgtgagatctcaggttagagttccaggtctttagtatcctaaaactccagtaacttggtatcatgcaaatgttatggattattttgtcttctgtcactaagagtaagcccctttttaaccttccaaacatacttcctgactcaggctgctcttaaatctgcaaaacaaactagtg

SEQ ID NO: 110745 - DNA, 764 bp, Aquilegia coerulea
  Intron number 1 from transcript AcoGoldSmith_v1.001136m (l ocus AcoGoldSmith_v1.001136m.g) derived from phytozome v7. 0 (chr-ID scaffold_25; pos 540473 to 541236)
aaagtttgattcattttgtctgtaaagcttccaaggtagaactgttcaattttttattttttattttttaataaattagtttgactattctataagttgttgtttgaaatctagcttgaatttgattgaattatactgtttgaacttaaattagggttttgtctttgctttgaaatttggatcggtaatgtagatgttatttcatttttttttttaagaatcagatgtttgtttttttgttggaaaagaaagtttaattagatagtgtctcttcaacattaatataattggtttgaattctaatttggaaaattgaatcaattgcagaagtgaattgtgatttcgagcagtttttagttaaagaaagtttagttagatagattctcttaaacagtacctatcatttggtttgaattggaatgaattctgatttggaaaattgaatcaattgcaggagtgaattgtgattttgagctgtttttagtttgttttcttggaaaaataaagtttagttagattctcttcaacattactatataaatttgtttgaattggaatcaattctaatttggaaaattgaatcaattgcaggagtgaattgtgattttgagcagtttttagtttgttttattggaaaagaaagtttagttagatagattctcttcaacattactataaattggtttgaattggaatgaattctaatttggaaaattgaatcaattgcaggagtgaattgtgatttcgagctgtttttcagtttg

SEQ ID NO: 110746 - DNA, 855 bp, Aquilegia coerulea
  Intron number 2 from transcript AcoGoldSmith_v1.006874m (l ocus AcoGoldSmith_v1.006874m.g) derived from phytozome v7. 0 (chr-ID scaffold_117; pos 6011 to 6865 reverse strand)
gattaggaggtatggattatcaaatcatctttctctatttcaatttctctgagaaaaagactacttagctctcaaaccttctacttattaatttattatggtttagattttttattagaaagtatgctggatgcacaatctcaatgtctgatgacatatcttttgcctttggtgatatgtgattttgcctcactagaatgtcctttaagctttcgttataaaaggatgagctgttttccatttttgaatcgttaacataagattttgttgcttcactttagtaattgataatgttttcatttaataaacaagaaaatgttggacctatctgctatttggaattatggatagggatcgatatggctcaaatttgctcaaattggttgctactgaccccttaaattgtatgggcactatacatagaattgagccaagcgctagaggtttcagtctgactgaatatatgtgagatattgattgttctagcataatggttttagattatgttttcatcaatctccctcttatagtaagaaataatatttcaattttaaagtgttcttagctgccctcagttagtgaggagactgataatacctttcatgttacgatgttgaatattcaaaagtaacaaacatccatttccttggctacatccaaactttcatttaggaatgcattgtgctgatgataaacttctagttaccttgactttggtttgttgtcttgaacaatttgttggttggaaactgaagttggatcggcaaataaatggtgactaacttcctttcaattaattgaagatgttttaggactgattttatttcatacataactgcgcagaactacacagat

SEQ ID NO: 110747 - DNA, 976 bp, Aquilegia coerulea
  Intron number 1 from transcript AcoGoldSmith_v1.025918m (l ocus AcoGoldSmith_v1.025918m.g) derived from phytozome v7. 0 (chr-ID scaffold_74; pos 519966 to 520941)
gataggaccaggtgaggttgttttattctattgatttgtcagtattatattacgtctatattgatctgtcaatattatttgtatttgatgtggttaatatgttaattttttttttttgttatttattgtttgattttctcttaatcaataatgaattaggaaaaataaaaacaatatttgtttagaggatattttgcattatatatataaatttatatgtaatgtaaggaccttttttaatatgaatttatatgtaaggtcctggttcagtatgaattgttggttaattttgaatgccccgtcgttgaactccttgtgagggtactacaattgttcttgtgaaggcattcctccttgtggctgatattttccaggtcactgaggatgtactcctacagcatcactctaaggatgtactctgccactaccaaaaaatccctggggagatacaattggtactacaattgtatccaccgcaacctaaggatgttcttgtgagggtactacaattggtccaccgcagcctccctattgttgttgaggtctccatccacctcttccaacttgtggtactcgtcctctctgtcgaagggttggaaattgctgctgcattaggggtcaatattctttttgttatttatttaatattgtatagctttgaaaaatatctgaattggtactttgttgttgttattttgtttatatattttttttataaaataaatgattcaatgggtccaaacaggtctaaacatttacaagtttagataatttgtttcatatcatgtagttcagatttagatatggtttatttatttggattgcatgtttggttagtaggtagacatattggaatgatgtagttcatttcatctgtaatttattttttatttatgaataaatttctaaatttggtttcattatggaaaatgtctttgcagattattgactcgggatagatttagttttttgccag

SEQ ID NO: 110748 - DNA, 574 bp, Aquilegia coerulea
  Intron number 2 from transcript AcoGoldSmith_v1.013915m (l ocus AcoGoldSmith_v1.013915m.g) derived from phytozome v7. 0 (chr-ID scaffold_25; pos 825534 to 826107)
actcaagattgctgctgcacggttcagtctgacgagtattaactgatcaagacagaacatatgcaaagagtaggagagttcctgagttcaacaatgagtcttcattttcctttatttcttaaataatttttcagactagcattttgagtttttttggttttttttgttaccagttaccacggctttttctaatttagtatatgatatgttcatttatagttctaaatttcattgaaccattcatacaaaattataatgcaataagagtcttaaaggcttcattttgtttgctttcacttaccagtttagtttatcgatctttttaagctctctggacagtacaccaaatacattcataaaaaaacaatttgctctgtttagagaaaggataaaaacttaatagttgctataaaataaagtttttcataaacctttagtcatttatagtttgtatttattacattcacttcttgcaatacgtgtcctcttatattgatgagatgattatatagacaatgacgacgctgtgataatctatccaagcactagctgattccagttgtagcccaagtca

SEQ ID NO: 110749 - DNA, 253 bp, Aquilegia coerulea
  Intron number 1 from transcript AcoGoldSmith_v1.010255m (l ocus AcoGoldSmith_v1.010255m.g) derived from phytozome v7. 0 (chr-ID scaffold_25; pos 1097642 to 1097894)
catacaggtttcttccttctatattgatctttctatttttgtaccactaataagcttcttcaatccatttttttcatgtaatgatcttcatgaatttgcgttttttctttcaaattttactagcccagtcatttaatagcaattatctttaatggggttcttttgatcatgtttattccaatctgtaagcagtaagcacatttgtcattttcaattgtagtaatgatttaatgtgaggcattttaatctgtag

SEQ ID NO: 110750 - DNA, 667 bp, Aquilegia coerulea
  Intron number 3 from transcript AcoGoldSmith_v1.010255m (l ocus AcoGoldSmith_v1.010255m.g) derived from phytozome v7. 0 (chr-ID scaffold_25; pos 1098300 to 1098966)
gcctgagaagcttcgttaccaggtctgtctatcatctcttcttttgttatgttttccccctttcttgtaaattgataaagtctaactgatgcgaatgagcctgtggctcaatggtagcacccctctcacaaagtggagaggtcgtgggttcgaaacacgtcaacagctgattgttgatataagtttccacacgtaatttaatggggtaagggtccccacaaccctgcttaccaatcaaaaaaaaagataaagtctaactgattaagatttgctatatctgttatactaattactttttcgaatgaagtttggtcttcctgaatccactgttccatcctttatcttttttatgactgctttaattcagaacctgaggctatcatttcagtaagatctatttcgaccctaatttttttaataaagcagcagaatggtccggagatatcaaatttacgtgaaacatattatgtttatagcattatgggccagatgatgaaatttatttttattctagaaaatgaagtttcgtttaatttggaatgaaccatttgaggaggtgtacatactacatacaattaaaattagcatttggctttcagccatgctgtccttaatctttgtgtcctttgcagggcgacgggcgaccattttggagacttgttgtttc

SEQ ID NO: 110751 - DNA, 881 bp, Aquilegia coerulea
  Intron number 5 from transcript AcoGoldSmith_v1.011780m (l ocus AcoGoldSmith_v1.011780m.g) derived from phytozome v7. 0 (chr-ID scaffold_47; pos 1113826 to 1114706)
gtcttctagaggtatatgccaatttttcttcttctttttagctaaacaaaaaatggtactccagtaaaattaaactcagctaaacataacatatgcaatactgtatagtgcattcagattgctttgcaaatctgtttctgttttcaatgaaattagtaacttggtaatgctgggctgctggcaaagatagaccttgcatcaccaaaaaaacataacatatgcaatattcatggtacctttgtcaatcacaaaagtctgagaagtgagaactaagataccttcccttccatttgtgttaggtttgtttttatcaaacagatgcgtttctcactttaatctttaggataatatatgtgttgtgtggcactttaacacagaaaaagggtggggaatgatcaagtgtccatcttttttctcacaaatgggcaatgatatgttggtgtccctaccacactttaatgtctcaaagaaatgaaatcttcctaaggcttggcaataaattatccaattgacttgtagatttgagcagctgttcacataagtcaaaggaatcggaatatttggtaaggttaatttgttggtgtctgtagacaacaaaactagagtaccatactaccatttggtagcttctgtcacgagtgtgcctaattcagtgtgttacttatacacactgccatgttgttttggtgatggaaattatggaatgcaccagcatgtgacattaattgttgaagtgtgtttctaatgggattagtagtgttttgcttgaatctcatgttattatgtgatcaaacatgtacagtacttgtatagttgtatagttgtatgaataactagagtattttgcctgtttttttttcccagcagatttggaagaatcc

SEQ ID NO: 110752 - DNA, 425 bp, Aquilegia coerulea
  Intron number 1 from transcript AcoGoldSmith_v1.003270m (l ocus AcoGoldSmith_v1.003270m.g) derived from phytozome v7. 0 (chr-ID scaffold_25; pos 853817 to 854241)
atcgtaaagagcttcgcaagaaagaattaaaacgggtatgaatttttttttcttttttctagggtttttttttttatcagaattcaatttcatcttgttctataataaatggattcaaaatcaatcaagcatttgaaatttcttcattagatagatagatagttgttttgaggggaaaaagctatgttttttaaggttttcgttgcaatttaaaaatcataattgaacctagaatgatgattttagttcaaatttttagaattttgaaaaaaaggagagtgattaacactaatacaacattgtttgtttagtttcaactttgaactacaaatgttgatacaaacaagatgttagtggacttatggcattggtttgttatatgtttaacagaataaaaaggaaagaaagaaggttagggaagttgg

SEQ ID NO: 110753 - DNA, 1011 bp, Aquilegia coerulea
  Intron number 1 from transcript AcoGoldSmith_v1.005691m (l ocus AcoGoldSmith_v1.005691m.g) derived from phytozome v7. 0 (chr-ID scaffold_25; pos 1465619 to 1466629 reverse stra nd)
ccaatattggacttcagaaaccttctttgattcaagtaagtgaaaaacccaatttgctattctgtgttttgagttcaattgactgttgccaatatgttttgaagaggtttagatgtttaaagtttgaaactttagttaacatcaagggaatttgtgtgggaatgagcgctgacaagaattatagatgcttatagtttgaaattttagctactaaacaaatgccctataatctgtggatattaagatatcagttcaaatccctactcatttctagtgtagaaatttaaattgtgccggcattttcaccattaagccatttaaaaacttattgcatgtttggatttgtaggatttatgtctcatagaccataataatagatatgattaacctagaaattgaattgattaggggcacaatccccacgaggtctaaatgtgctatgtaaaaattgagttcatttgtttgctttatgttggcagaaagtccagaaaccggatatggattctagatatgcttacttaagaaattgagttcaagttgcttgcttttaaaggggagctatggtatgtggggaatgggttactttatgagtttggggtctatttttgatgtaattctttgttggaagcttatacaaataaaaaaaaaaaaacttttatcaaccaaaaaaaaaagttgcttgcttttaagaatgctagcgagcaactcacaaatgtattcatttgtcaaaaaaaggcaaagatgaattcatgaggtggtatgtgtaaaactcagtccataaccatcacgtacactttgtggatccctaagagaaaaactgtcctgatgtgggtggtacatataatattcagtcatgagttggtttttagcaagcttaactaactccaaatgttcgttttttcccgtgtgagtgtttcagtttgtttgttttctgtaggtatgaaacctaatggattctagatgtttaaatatcagaaattgattctagtttgtttgttttgtgtaggcgtc

SEQ ID NO: 110754 - DNA, 771 bp, Aquilegia coerulea
  Intron number 1 from transcript AcoGoldSmith_v1.002174m (l ocus AcoGoldSmith_v1.002174m.g) derived from phytozome v7. 0 (chr-ID scaffold_47; pos 435583 to 436353)
cccaaaaggtagctgtaatattatatcctatctacttgaagttatacctactattccacagagaaaaatgtcatcattagcaatattgacattagttttaattgctctctcatatggttatagaattcttggaacatcatttttgtaacaaccaaagtgtttgtcatggtttttgcaaatttgactctcgtcgaaaaaaatgttgatattgcctctttgcatgattatgatcatacttgatcatactccagcatttaccagcctcaatcctgaggatcattggtcaacatgctgattgctgaaagaaatacgtgcatcttatggtacaacgttgattgttaatgccttttatgttctttgtatcttctgtcagcaaaatggcaagaaagtattttgatacaagaaaaataaacagaaacaataatgaacatggttacagaaaagcaactcaaatccttaaccagaatatgatacagtcccacctaaagtgaataaacttttaacgaaacacaacctggaccaataaaccttcatggactgaagtctcatgaccatggagccataactctttcatcaaccctagacacattgaagacactgctgaagaataccaagaagagtagaaaaatgtttctcatgtggccgtcacagatattttagatcatctagataagttaagagttggttttttaatttttctattgtcatgactcatgactactgttcatttgttcgtttgttcatttcttctgaataacaggggaggtaacc

SEQ ID NO: 110755 - DNA, 1054 bp, Aquilegia coerulea
  Intron number 2 from transcript AcoGoldSmith_v1.002174m (l ocus AcoGoldSmith_v1.002174m.g) derived from phytozome v7. 0 (chr-ID scaffold_47; pos 436417 to 437470)
ttcgtattcaggaagagtttttcgcttttgtcaaggtatactattttaattacttcgtttttactattagagattagatcaaaataatctatctcacaaattctacattgcttattttaaagattttttttttttgcttattataatttgaaaaaaaaaagagagaaaaagatgaggctgaggaggggattggtggtgttagttctttttagatttgacactgaaattttggctctgttcttatgcaatatgaatttttttgagggtatgggtcaggtgatagatagattgatgttttattttttaatgtggtgtgaaaccatgctaaaatgtatggaaaaaataggatcatcatcggggtatgcgtgcctccctaaactttgcgttgtgtagagatgaacaaaatacagtatgattggagaagaaaaagtcgtatgttggaaaatgatcttcccttagcgtactctttacaatttgtattttttgttcatgctgataataatatttttgaaatttacaaagagattattttgcacgaagaaaaaagagaatcactctccttgaatggaaagacttctacctacctagtaaagtaaaactcactacaatggaaagacacttctactcaagactcataaactaacatagccccactatctgtcactactactatgtcaattccaatgcgtgtcgttgttgaaatgctgtatttttcattcctctttttctcctttattttccgattcaaatgtatttagttattgtatggtacatccttttctcattgagtttgtaaatggtatatccacacccctttctctctctctctctctcacacacacacacacatacacacccgcctacgggcaggcccctcaagtatgttcatgccatctctgctatgtttgcaagcaacaaaacaaaaaaaattcttagatctcatgtaggaaaggaatttatcttgagttccaacttccatatggtgtttcattgaaccaatgctttttattgttctgaagggtgcaccagagacgattcgagaaaggctgattga

SEQ ID NO: 110756 - DNA, 901 bp, Aquilegia coerulea
  Intron number 1 from transcript AcoGoldSmith_v1.000218m (l ocus AcoGoldSmith_v1.000218m.g) derived from phytozome v7. 0 (chr-ID scaffold_25; pos 833694 to 834594 reverse strand )
aggttagttcaatttcttcaatttgttttacattgtgtatgaaaactgacaaaaatttgggaattttgattaatcttaatactcaaacattggttatatcttgtgaaaatgtaattataataaacaaaagttttggaagcttgcataaacgacacattagcgactctaattagtttacaaaggaaaatgcggaataaaccatatcatgttcactagcaaaaaaggtactttatgctcttgttcattttggcgttgtagagtgaaggtgaagactataatctgaatcttaaaatcaatttttggaatccaagtgaataacaacataaccatagttcagcgcaccgaagtttctgccaacgacagacacatgatttatgttgaagggtttaagatttaataaattcagattcaagcttcagtttgattgacgaaaaataagtcattagtattggtttgttggtgtttgtagccgttattgtctcgttcatataaatgataaacccttcagatagctgaaagcctgacatactaatcaagttattcacaacgtagattgccccaacctaccgttttcttaatggtattctacttgtactgagcataaacgataaacatttagttaatctttttctcctcatgcgacaccatgaaataatacatttacaatacactccataaaagcccagaacgagctacattagagtcaatacaaaataagtaactgaacaagtcattgacagtatataattgagtacaggtcatcttcttttgattgttggcaagtttcagttttgcactatatgattttttagttaattactttaccctatatgtctttgcagtttatcatgattgcatttataatattatctgtgtctgcagattatcttccaagcactgg

SEQ ID NO: 110757 - DNA, 877 bp, Aquilegia coerulea
  Intron number 1 from transcript AcoGoldSmith_v1.017815m (l ocus AcoGoldSmith_v1.017815m.g) derived from phytozome v7. 0 (chr-ID scaffold_74; pos 1192870 to 1193746 reverse stra nd)
ggtttaaagttgggcttgagttctattgtcaagttgctaagaacacgccacgtggcacttgctaggctccactattatatagtatatagaatatagattaccttgtgagtgttcttaaagagtgcctaagagacctcatgagtttaggtaaaaccatattcttttatctggatagcatgatttggcaaagagtctgacctatcagttgcaatgattagaatgatgtttgttagtgcatgatcagttttggaatagcttatgttggttttctacaggaagcaatcaagactgggcattcagtgccttccacttacgctgttcatttgaatatgttagatcggattagttcttatatgttagatatgattagttcacatagctagtgaatctttcagtagctgcatacaaataatgtaggataggataggaattgtggcaatgggcaacataggataggatacattataaacacatattcggatcatccgcacttccgcagtaataagtatgctactgtagttgcatacttgcagtgttgcatctgaacccgaacttccgactgggtaactttatataaacccgggcccactaattttcgggttttggattcgggtaaaattaattccaatctctgcccttcaaattatactgagctatgggctcaacaaaagataactcaaaacagtctactagggcactaggctactagctatcaatctctatctactgtatttgagccaacgaggaattcccaagttcgcatcaaaccataaaaagaagaaagaagaagactttgttggatcgatcgaagaaaatataacaatgagtgcaggttttaaattaccgagttattcttttggtttaacatcttatcaag

SEQ ID NO: 110758 - DNA, 363 bp, Aquilegia coerulea
  Intron number 1 from transcript AcoGoldSmith_v1.004727m (l ocus AcoGoldSmith_v1.004727m.g) derived from phytozome v7. 0 (chr-ID scaffold_47; pos 1883146 to 1883508 reverse stra nd)
aagcttttcaggtttgtttaattgtttctagtctttttttttttttttttttgaaattaatttttgatagattgatgattaaattagctatgaaatggttatgtttatcggagaaagtctgttactttaaggcaatcaaactggaatttttttcttgaatttgaaaaaagagaaagtgttgctaaatgttttttcagaaattatggaaaaatggataattttgattgatgaatgattcattcatttacctcattatgattcgacatttatgtgagaaagaatattttttggctaagaatattagtgttaattttgggaaactaatagttttgcatttttctttgcatttgtagaaagaattga

SEQ ID NO: 110759 - DNA, 775 bp, Aquilegia coerulea
  Intron number 2 from transcript AcoGoldSmith_v1.017187m (l ocus AcoGoldSmith_v1.017187m.g) derived from phytozome v7. 0 (chr-ID scaffold_47; pos 986066 to 986840)
tagttgtggtatgtgtttcttctaagttttatcattttgtataagaatttgtttatgatgggaatttaaaacatgtcgaattaaactcatctgcatttgtaaaggcaaacttttgttatgattggttaagacttaatatactcagaaacttgatggatcataccattggcaaagtgcttgtcgccccccacatgcccacattcgacaccgatgtaatggaattcctccgtgcacacctattaattttatgttacgtgctactgtgcccttacataataaaccaattagcatgcatttataatctactctataggtatcctctcccaaggttgcctataacaaattttaatactttggcggttctccctgaatttttgagttgtcaagatttggaaacctgtgggattctaatatccataatctgcatggtattgttgaaatttacttcaagtcggattgataaggggatagctttataaattactccaaatgtgtaaaatcttcacattttgttttagataggtaattaaccacagacacttaacttctgatgtgggttggctttattagatgttaaaagcctatcaataccctcgacaattccaatttgcataatgttgttaatatttttccttttggtttatcaaagtgataaaattaatattttttttatatgaaatataagttatctcattgctataccatattcttttttattcaagaatatattggacatgcaggagagctcaaacccggttgttattcgttctaggga

SEQ ID NO: 110760 - DNA, 901 bp, Aquilegia coerulea
  Intron number 2 from transcript AcoGoldSmith_v1.006580m (l ocus AcoGoldSmith_v1.006580m.g) derived from phytozome v7. 0 (chr-ID scaffold_25; pos 930780 to 931680)
ctgctataggtagcaggtgagtttagctttgaattttaacagtatttcaacatctatccatgatactgctaatcaacttctctgtttagcatgtttcaagataccaaatatttacctgtatgtcatcatttgccttttgtgcatttggcaatttcatcagcaaacatcaaatacatatgaccctatcattcacacattatcagccataggtaaccttttatgtttagaatcttcaacttgctctagttcttttttgcaagtattagcacattcttgtgcgacgaaaaggtgtactttgtactccatatattcctgataagtctgtaatcattttgtacataactgcatcttagtactaatactaccaacaatttatgatataatcaactagccaaaaataaggtccgttaatcgcctaattagtgtccacagttttatttacatgaaaaaccttatattgttaattttcccatgataaaaatgatttttgctaatttttccgtgtatctgctattcaaactatagtacttccatacagttctttttgttctgggattttaactatctaaatactttgatttaaaggttaatagattagataattaacgactaatcaacaatttaatgcggcaggggggatctacggtcttagtgactgatgttactaaacttatacagtgacatttaccacatatatctattttgttatgtaatgtgaactaagaatcaggggaaagttgtgcatgtaggccatgtaattaagagtagatcataataaacttaattaccaacgacgtaaggagaagtacacacaactgtaatgcaaggaaaatgattccttctctctcatgacctctgtgttgcaggtggtccttaatagcacaacaacttcctggaagaa

SEQ ID NO: 110761 - DNA, 530 bp, Aquilegia coerulea
  Intron number 5 from transcript AcoGoldSmith_v1.011666m (l ocus AcoGoldSmith_v1.011666m.g) derived from phytozome v7. 0 (chr-ID scaffold_74; pos 1195566 to 1196095 reverse stra nd)
tcacgtgtatcccccaaagctaaggtagtacatctgatttgtgtattcatctttctgtttagttgtagtttgtgtattctctctaagtttgttgtgagttaattatggtcatttttggtgtggggtttacatacctttgattcatgtgagtgatgatggtgatgagtttaagttgtatgaaacttttgatatttcttcttaatgatgggtaagcaaatggttccagagaattacaagtagatattgagtgctggcttatagtttgatatcgtccctggtatgcatttaagaattggtatttcaatttttctgttttgagttgttggtgggagatccaatgctaagcttacgttagctaagggttagccttaattggtcaatgataacttttcaaaacggcatgtacatacttcatggattaaatttggtggtggttttaagtttatctttactttttaataactagttgtacttcatgatgcttgtgttattcaaaattaatttattaaagaaaaactaggtactgcgag

SEQ ID NO: 110762 - DNA, 271 bp, Aquilegia coerulea
  Intron number 1 from transcript AcoGoldSmith_v1.008403m (l ocus AcoGoldSmith_v1.008403m.g) derived from phytozome v7. 0 (chr-ID scaffold_47; pos 867658 to 867928 reverse strand )
actgttttgtgagggtaagtatgcaaggataaaggttcttcatccttagaataagcacttccattatagtttatatgcaaggataatggtttttgtttcttgtcaatgctcccatgatgtccttagtttcatttatgattacatatctagtcagtatatgcctaataacttcgtgttacactttgttttctctgtttcgtattttgcattaatttaattacactctaaattttatcattcataactcaaactatcatttcttagggttgtg

SEQ ID NO: 110763 - DNA, 529 bp, Aquilegia coerulea
  Intron number 4 from transcript AcoGoldSmith_v1.000640m (l ocus AcoGoldSmith_v1.000640m.g) derived from phytozome v7. 0 (chr-ID scaffold_74; pos 1113656 to 1114184 reverse stra nd)
gcacggttagccccaaaagccaaggtagtatatctgatttgtgttttcatctttctgtttagttgtagtttgtgtatttctctctaggtttgttgtgagttaattgtggtcattttcggtgtggggtttatattacctttgattcatgtgattgatgatagtgatgagtttaagttttatgaaacttttgatatttcttcttaatgatgggtaaacaaagggttccagagaattacaagtagatattgagtgatggcttttagtttgatgatgggtccctgttatgtattaacgaatttgatatttcggtttctcttttttgagttgttggtgggagatccaatgctaagcttaccttaggtaagtgttagccttaattggtcaatgataatgtttcaaaattagttgtaattggttttaagtttatgttttcttttcgataactagttgtccttcatgatgcttttgagtcttcctgtgttattcaaaattaatttcagtttatgaaataaaaactaggtactgcgag

SEQ ID NO: 110764 - DNA, 599 bp, Aquilegia coerulea
  Intron number 1 from transcript AcoGoldSmith_v1.001666m (l ocus AcoGoldSmith_v1.001666m.g) derived from phytozome v7. 0 (chr-ID scaffold_47; pos 563344 to 563942)
gctttcaagttcaaaccgaagaagatcatcaaaaggtatctctctacgaactttgatttcttccttagaaatttcaattttttattaactcatagggtataataataggtttatttctagtttaatttcattattagggttttgcaccattaatcataaattgttaacttaaaaaaaaaaaaatccaagtgtttatcttgctttagtagtaaaatgaagatacttattttaaatattataatggttgaatttgtttgatttttttagcccttttattgctctttgagtttggaaaatatatctgtatcgtaatttttgtatatgcacaccccccgacgtctttggttaagacctgtattatcatttatcagttgtgtcacaatttgtttttcgagaatatttcatgtacatagataatttagtattcttttctccatattatgacgaaatcttgaattgttaaacctactctttgatcaaatagaacttgtaatttttgtttactgagaataagattgaagtacatggattggattgtactaagcattatcgttttgattccaggatataacgattgttttggattttaaggtgaactt

SEQ ID NO: 110765 - DNA, 839 bp, Aquilegia coerulea
  Intron number 2 from transcript AcoGoldSmith_v1.001666m (l ocus AcoGoldSmith_v1.001666m.g) derived from phytozome v7. 0 (chr-ID scaffold_47; pos 564912 to 565750)
ataatattcctggccaacgacattctatttgacaggtatcccataatacttatatcctgtaattatttgctgactataagatatcaagtacaaacttttttttgcatcacaatacaaaaccaagatggctttatagatatcaagtacacagttttgagttttcatctataaagccacagtactcagtttgtatgtatttgaagttaaaacttttgtcggagagatggctttttgtgaatctgctgctatttcatgggattatcgtgttccaaattcaacacaatattgtaaattggatcttgttccacaataacatacttttggagagtaatgccctgaatgccaactagtgaaaaaatccatcattttacttatgtctatatagaatccaagacgctgagaatccaacacgccgcggttgaccgactcacgactccaacgcacaaaggaaatttttgcaaatcatacaaacttttcttctgtccattaacattgctaattatttctgtttttcataattataaaaattacagtgcattgtgtagtaagtatgaggaattatatgtgactctggccttctatattgctactagctagtgtacatgattttccatctattctgaagtctgaactaacaaataattaaaaattgaataaatttccttataaaatattatctagtttgcaattgtaccatgttccacccaaaaaagaaaaaagaaaaaacagaagaagggtactttgattcttattatcctatatgtatactttatatccttgtccttttccgttgtaaatgtgcagcttgcagcacagagtcagtcctcgtgacctcgaca

SEQ ID NO: 110766 - DNA, 369 bp, Aquilegia coerulea
  Intron number 1 from transcript AcoGoldSmith_v1.005517m (l ocus AcoGoldSmith_v1.005517m.g) derived from phytozome v7. 0 (chr-ID scaffold_100; pos 398466 to 398834 reverse stran d)
tctttgctttgattcgaattatctccaagatataggtacgttattcattaatttcttgttaagaatttcaatttatatttgtttttcatgatttggagtgttttaaatcttcaagatttgatttttatgattttttttttcttactttagatctaattaaagttcaattaacttaaagtttatgaaagaagcttcatttatttgttatgaagattcatcattttactctagcagtctagttacattgattgcatttactgttttctattgatttaataggtttggggatgtgtaaaaactgatttttttattgattttttgttaataaaactagggaagaagattaaattctgcaaccccagattggga

SEQ ID NO: 110767 - DNA, 308 bp, Aquilegia coerulea
  Intron number 1 from transcript AcoGoldSmith_v1.013093m (l ocus AcoGoldSmith_v1.013093m.g) derived from phytozome v7. 0 (chr-ID scaffold_25; pos 61447 to 61754)
actattacgaatcttctgattagtcaacaaaggtctggtagtcaaactggtcttttctgcaatgcaaatgacgcatttagatcacatcatcatctatatatatatattctttctttgtgtttgagttgagacaaagttaggccaaccagacagatagaagaaactagttataatgatttctccaactgatctttttatgttcttgttaaccatcacacttgtgttttttccatcttattacataattaccactactgcttcagatgattatagtagtttagtttacagagattgtgcaaagcaatcat

SEQ ID NO: 110768 - DNA, 356 bp, Aquilegia coerulea
  Intron number 1 from transcript AcoGoldSmith_v1.002791m (l ocus AcoGoldSmith_v1.002791m.g) derived from phytozome v7. 0 (chr-ID scaffold_100; pos 211209 to 211564 reverse stran d)
gattagctgctattgctgctaattgcaggtaattaattatagtctttttattttattttatttcaatttatgtgtaattgttaattgcaaattctagtttcaaagtagctgaatatttgcttagaattctagtagtgttataattttgttgatgttttttctgttttgaagtagaaattgtaatatttgaatatgctaattagtaattacatagtctgttgagcatactatgtagtcaggttttcttgtgtaatcatgatttggtatttattaaaaaggaagaagattatgtatgtagtaagtaatcatttggtttgtttttattgtatttagggttctgagagagctggtattgt

SEQ ID NO: 110769 - DNA, 851 bp, Aquilegia coerulea
  Intron number 2 from transcript AcoGoldSmith_v1.006744m (l ocus AcoGoldSmith_v1.006744m.g) derived from phytozome v7. 0 (chr-ID scaffold_25; pos 1253479 to 1254329)
gaatctactatccaggtgaatggtttattttcttaagataatcttgcactttttagtttttttttcagatacattttgatattttattgattttttctcgataatttcaatagtattatctggacttatatgcattcaacaaaaaataatactgtagactcaataaacagagtgcaggctcgtcctgacacacagctaagctgaaggttaatcatctcacatgtggacacaagtctagataatgaagaaaatgaataaattagcaaccaaaaccctgtttattcttaatctacatcattctcagactctcagtacataatggagtttactcctaaagatgaaatgttcagaaatagttacagtgaactctcacgtggataacaactcttgtgatgatgagtctaagcaatggtcaccagtttccatgattctctactcttctagaaactacaggaaatagtaaggcgtagattccatacaggatgcacatgagtgccttttatttaattagggatacacttctttggagaattgccttaagacctttctgatggctctcacgttaagacactctttcaaagcttatatatccttgaaatttaataaacatctttcaaaattcggtaattcaatgatcttaaccatccatatgtgattcattcttctgcattcatgttgtttataaacaatcaccctgatctgggatgaacggatatgaaatatgatgctgtttctagatcaatatttccccactaaaagcatatttgtcaataaattacatctcggtgtgctttactgcagtattgatttgattaatctgtttctttctatagtagatttgtgaaaagaaa

SEQ ID NO: 110770 - DNA, 418 bp, Aquilegia coerulea
  Intron number 3 from transcript AcoGoldSmith_v1.022476m (l ocus AcoGoldSmith_v1.022476m.g) derived from phytozome v7. 0 (chr-ID scaffold_117; pos 146882 to 147299 reverse stran d)
gctggagtgacgttaatttctgcagaaaattcaaggtagtttgtctatattacccctttataattgctttttcactgcccacttcaatgggtattcttgtcaataacaacaacactttccatagtttggtattatgaaatatgaattactaggtgttgcttgcaaattcaaagtaatttaatttagaactaatggtcaaattaataacccctcttaattgtttggtatgaaattggttgcgaaaagttctttcttgattttggttgaaatagaaaaaaaatattgcatgaaaaaaaggacaacactagaacatattgtcggcaagttatgcatgaaacaattttttttttttttttatcttttgcatgaaaatgacaaaatgttgatcaagtggtatattttgtttatgatgacagct

SEQ ID NO: 110771 - DNA, 427 bp, Aquilegia coerulea
  Intron number 1 from transcript AcoGoldSmith_v1.017799m (l ocus AcoGoldSmith_v1.017799m.g) derived from phytozome v7. 0 (chr-ID scaffold_25; pos 1994084 to 1994510 reverse stra nd)
cgtgcatctcattcgccaagtatttggcattataggtatgttttctcttcttcatcagaatagcctagctagctggttttcttgaagttgattatatatatattatatatacttctgcatgagttctgctggttttaatccatcatgcattcatgcatgatttgattgtttagttcagatttactaaaacccttttcttgtttttcattaaaacaaacttgatttctcgaatttcagtactgtatagggtttttcttttttcttattgtacgtacgccattgtagttcttcatgttctttaatcaagaaactaatttttatgaattgggtatatcttgttattggtaatttaatttagttttactaatgtactttaatattttccattgcaggccaatttacctctgccgctttgtttttggcacca

SEQ ID NO: 110772 - DNA, 917 bp, Aquilegia coerulea
  Intron number 4 from transcript AcoGoldSmith_v1.014699m (l ocus AcoGoldSmith_v1.014699m.g) derived from phytozome v7. 0 (chr-ID scaffold_74; pos 220502 to 221418)
cttgtcttggctcctaaggtatgaatgtgtttcctcacttcatgatcttgaatcaattaagctaatttcatgctactggataactgatgctgagttgctaacacatgacattttaagttctgcttatttgatattttttcgtactccccaaaacacgatttatctccaatgtgatggcatttcatattagagtataaccttaatggatgatcaactaagggaaaattggtagagttacttcaatattttgctgacagaagaatctgctgccgaagtttctaagtgtgagttaaacgccaagcaagtacatgattagaggtgccaagagaagattaatatagtattttctatgaacaacagttgttgtataggaaagcttcatcttcaagactttgtctaggagccatttggcaaaacaacattgggtcaaagtaacttcttgacaagtagctgaaaacaaaatttggtggtcattgacttagaaactcaacaagtcagaaattagtttcgataaaaataatctatagtctcatagttgaacaagaagttaactttttaacccatacggcacctttctggatttggcttttttgttaatgataatatgtttaacttgcttacaatattataaaagactattgaaattcaaggaattgtattcaatattatatgttgacattgaggcattgagcataccttccttgtggctgtgcatattattctataccttcaactttttttatctgtgattgtcttgtggccgtttgttttgtctggcgatgaaattaattttcttgcatttgtgttatatattaagttgtggatcttggaatttgaaaagtatattctaaaaagtttcttttgtttgatttgggagtgcagttgtctcaacgtactatttcaggttctttgctgaa

SEQ ID NO: 110773 - DNA, 950 bp, Aquilegia coerulea
  Intron number 1 from transcript AcoGoldSmith_v1.019039m (l ocus AcoGoldSmith_v1.019039m.g) derived from phytozome v7. 0 (chr-ID scaffold_25; pos 1685075 to 1686024)
gaatcactactttgcgtcctgtctcaagtaagcattcttgaaagtttttattctgttttaatgtgttcacagttgtggtacattattacattaattagcaatgtaaataatgtgtaagaactaagattgaagtttatgatcaacatttttcgattgatatgtaagatttgtatatgttactttaattttatggatgattatccctactttcaggtcctaacccttattattattattattttttttaccgcaaaaaagccttattttgatttggtataataatgattgctaattaaaaataaaaaacacacacactatatgtatataatatcggcctggaatatcgcaagaacaatcgaagcaatatttttgaatatctccaaaaaaaaatttctattttatatgctatttcaaagtacagaattttagatactactagctaatccaagtttatttgaaaacaagtgacaaagcctgaaatagtggaagaagattgatgagatgttctaaacatggcaagcaccaggccagcaccactgcatcaccaagtcaagtgttttttgtaatatatataaaatatatcatgtgttacattacattctacctaatgaagaagtgtatatatatatatataaagcttgttaatcaattctgtaattcaaatgatcttactacgaataattatacaagaatcaaaatccattttaagaagctgactttcttttaattgatatctacatattactgtacatcctgcattgctatgtgggagacttttttttttactagggcatatggggttgaacatgttagtgtgagtcctaagatgtgcttttacatcctgttgtataatttcttctctaaaatgcttttgcaagcatgctatttttctcacagatatgataatatatgaaccgatttatatgttgcaggaacaaactcccgtagac

SEQ ID NO: 110774 - DNA, 683 bp, Aquilegia coerulea
  Intron number 1 from transcript AcoGoldSmith_v1.023862m (l ocus AcoGoldSmith_v1.023862m.g) derived from phytozome v7. 0 (chr-ID scaffold_47; pos 425351 to 426033)
ttttgttcaatatagtaaggtatgagacaaactcatctaattggcattggcaaaactttgtatatatgtagacaatggtgagggaaatatccatccacaggaaaaaggagagaatttgcagaggggtgcataagtggtgcttcataagtattttctattgaatttttatcttagtcatacatatgatacaggattcctggatataaggtggtggttgtagtatttttttttttttattttattttagatttttttgtttgttttcacaactcctattttgccttaatttagtctctaacgaggttttaatgtaacatagagaataaaaccatctattgttgacaaagaagaccgtagaagaagaaaacttaggcaatcatgagttatgtcatgaataatgctgaaaagctaaagccccttctataggatgtcggaaataggaattagttaggaaactgttatgtcagacttccaatgtgattaaggactcttgtattgacttgaatataacctacttaaagattaagattcaaaatttttcttataaaaacttaaccgaacctgttataaataggcatcattctttttatcatatctgaactgtttatgattagggtcgtgcaaacatatacattcttgaaacttcattgtccctttacttttgtaggtgaaggatattcacc

SEQ ID NO: 110775 - DNA, 258 bp, Aquilegia coerulea
  Intron number 1 from transcript AcoGoldSmith_v1.022875m (l ocus AcoGoldSmith_v1.022875m.g) derived from phytozome v7. 0 (chr-ID scaffold_25; pos 2000580 to 2000837 reverse stra nd)
ctatcaccactaacggtattggccttgttcttgaggttttatatgtttgactttcttctactattgcaaatcaaagaagcaaagggtatgttttttaatcttgatagtagtagtactgctacattgttggttgctagcatgttttcaagtttgattctctgcttctgaaaacagactttggtgtttgtttttttttataaaaaaaaatgatgtatatgttgtgctgactatgatggtaggtgtgaaatctgtaggtga

SEQ ID NO: 110776 - DNA, 721 bp, Aquilegia coerulea
  Intron number 2 from transcript AcoGoldSmith_v1.018314m (l ocus AcoGoldSmith_v1.018314m.g) derived from phytozome v7. 0 (chr-ID scaffold_25; pos 802135 to 802855)
gattgggagcttctaaggtcagacacattaagaatccaattaccagtttttccctactgtaaacataataatagtgtctatttcttcaaatactaattcagcctgatttaaaagcgtaaacaattgggtagactaggtaaatatctatatgatctatatcatagatcatttaaatttggccctattatattttatacgataccccttgcataattagagtataagactgagaattttgagaatgtgcatatactgtttccggcactatgaactccttattgttgtctgtttgtagttgagcaatactggaccaatggaagcacacaacatcagtccatgcctccatagtatacaaacccagtgagccaccagttttattactttaagcttgttaattagaattaacatgctcaactacgggattggggaatcagagttagtacctcaggagtcaggattcctcttcctatataatcatgcaaatactggttacgagttacgacaacacttggtcttaaactctcaatcagtggaaccttattcattattcagaacagtattatactcagtaatcaaagccaattaaattttaactagaagaagaatagaacgagaagtagagagtccttacacacactattactaccagaaactttatatgtatgcttttctcaacttggcgactgattgatgaatatctcatactcaggaagacactact

SEQ ID NO: 110777 - DNA, 804 bp, Aquilegia coerulea
  Intron number 1 from transcript AcoGoldSmith_v1.026692m (l ocus AcoGoldSmith_v1.026692m.g) derived from phytozome v7. 0 (chr-ID scaffold_191; pos 4097 to 4900)
cgttacagtttagcttattaatggaacttttaattttaaccaaacatgtttctctgtctttgtagtttgtacagttgtacaatctttaatcttcccatacatatccaaccaacaaaaccaatttcagaatgatttacgttcgttcattagggaaccattttcagagtgatttacgtttgttcattagggcagtcgttgattgttttaaacataaattatgtagtaatgtagggttatgaccaaacattcataccaatcagtcaaaaactcaaaaccaacataagcatatatacagttaacctaacttgtttatccccaaagaaaagttatgatcagagacaaccccaacagttttcggtttatgtcccgttcaaagtagttaacaatagttaaggtacactggtacagagtttgacagtttaaggcaagcaaatatatattcccccaccacaagttgcttaacacatgacatccccaaattccttttttgtgttggaagctgcaggcctaaatacatgcacctctctcttggggggtactcttattcaagtttgctttgtttaattaaaaaagataaggaggtgcttttagagcatattttcagccagctcagtatttgcttaactcacaagccttgcttggtcactctatgatctcttccatgaccctaactcttctctgatcattatatatgcagctcctcttgaactttcatacaagaatcaaattttttttttcctgtctctcctcgatctctctcttttaagctttttgagaacacaatgagttctgtaaagagatcat

SEQ ID NO: 110778 - DNA, 632 bp, Aquilegia coerulea
  Intron number 1 from transcript AcoGoldSmith_v1.001956m (l ocus AcoGoldSmith_v1.001956m.g) derived from phytozome v7. 0 (chr-ID scaffold_74; pos 298821 to 299452 reverse strand )
tccttgttcttcttcttcaaattcttatataatctgtaagttcaatcagatctcaatttcactatttcacttcggaattcaacaagtttggttaattaagctgaatttgttgtattgatttatgcaaattgatctttctttttgaatgatttgtggattttttgggtagtttttttttttttggagaatttctagttgtatttggttcaaatgaagagatctagttctgaattgttttttttttgttaacttgttttgtttgttttggggggaatttttggaaattgggttgttctccattttgatcaattcctttagtgtttgaagtaacatatgatcttgtttaattgtaaagttttcatttttagattatatatttgtaaatggactttgcatttagatcggtgatagtttgaggaacttgaagattgtatcttattgtatttttttttttctcttgaatttgttcattctctgtaatcattgatgcatagtttgggcttttgtaatctctctttgcttttaatcttattgaatggttctgattttttttttttttttgataagttatatgttgattttgttttgatgaagaagaaaggaggccttggcttggttgggtttgtgaattc

SEQ ID NO: 110779 - DNA, 695 bp, Aquilegia coerulea
  Intron number 1 from transcript AcoGoldSmith_v1.010279m (l ocus AcoGoldSmith_v1.010279m.g) derived from phytozome v7. 0 (chr-ID scaffold_25; pos 694305 to 694999)
agaataatcagatcatcatcgcaccttctcaagaggtttagaaactatgttttaaaaactcttaattgtttgtgttcattttgaattggtgaattttgtttcgattacttgtgaattcttttgtttggcttcatttagtgtagtaaagtacggatttttaacgaattcaaacaagtttttagtaaatatattttaatgtgttaataataatggaatgcttaccattcattacttgttgacaaatttgcaaataccatgttacgatcccatgtgtccattactcatgtaaatggagttgttttagctgttagtcaagtaaaatagtctctagtgtgttaaggatttgaatacgcattggttttttttaactattagaagttggagtctttgttatatcaacagcgtgggtaggtgggtaatagttatatctatcaagttatatcagcgaacaatgtcaaattcgaatgcattaattgatattcatactccattttcagtttcgatcaaatagagacagcgtgttgaaataagataacaaaatctgaatgattctttcttctctacatttactacaccataatctgtagctttgagttttttatgacccctcttcatctacatatttatgtacaattatatttggcacacttcttgtttcaggagaaggcatctgcacaccatccagctcgatttca

SEQ ID NO: 110780 - DNA, 693 bp, Aquilegia coerulea
  Intron number 1 from transcript AcoGoldSmith_v1.002904m (l ocus AcoGoldSmith_v1.002904m.g) derived from phytozome v7. 0 (chr-ID scaffold_47; pos 1037765 to 1038457)
gattccctcaagcaggtataaagtataaaccacagctaccctttcagtctttcttatgatacatttcaattcgatttattcaatattttttagttttttttatgtgtattattgagttgaatgacttcagttttcacttaaatttgataaaaatctattgtgggtgtttcttcaaatgaaatattaatttaaatgtataagaataatagtcggtagataccatgttgtatgaatatacgagtattgtttgatttaatcccaaatttatatggaatttgtccatatttgtgtttgtagttattgctgtttattttgtgtactaaaagtaaaggcgagtaagttttgctcataattcattggcggcatttgatgcaatgaaattgttgatatcaattataatcagtcacttgaatagtttatataacttacaattgttgcaagcaaaagagcacaattttgatattaaggtcaatagctgttaattgaacttgagatgcatgcaattaatgagttcatcttatggttgacacaaaattgtttcagttgttatgtttctaaattttttataaacatgtaaaaattaattcatgatactcatgtctatgcttgcttattccatggttttatatacgtatatgtattctcttattgacgtgtactttctttatttacactaaagggtgcaccagagaa

SEQ ID NO: 110781 - DNA, 450 bp, Aquilegia coerulea
  Intron number 2 from transcript AcoGoldSmith_v1.002904m (l ocus AcoGoldSmith_v1.002904m.g) derived from phytozome v7. 0 (chr-ID scaffold_47; pos 1038565 to 1039014)
cccaagggtaatttttgttttctttgcataataatgtggttagaaacatgtacttgattcacgaagtgctaattttatctctaattataaaaatagacctttatttgataatgaaaggatcggtaactataccctgattagcaatcagtctaatatgattttgcggcagcttaggaccatcgtccttccattgcctaagcaagtttaaaagagcattttccaaattcattcatgaaacatgccctaatgtaggattataatttttactttgtgttggcataagaaaataaactaccactagacaaccaatccaaacttctagaattatctttgtgcttctttggacttttgggttgtagacttgtagtgctgagttagctgtatttggtttgatacaactttattgtcaatgcagtgccaagcttgtggatcttgcacttgcctcgggaa

SEQ ID NO: 110782 - DNA, 743 bp, Aquilegia coerulea
  Intron number 1 from transcript AcoGoldSmith_v1.020027m (l ocus AcoGoldSmith_v1.020027m.g) derived from phytozome v7. 0 (chr-ID scaffold_25; pos 50578 to 51320 reverse strand)
caacaggtatgtatcaacttcttttgtactaccttttaggtttcattactttaagctttcgaatataactatggtgtttgaaatgattttgtacatgaatttactatctagattttaaggatttaaaacttttttcccaagatgctttgattaaaacttttttcccaagatgctttgaagtattttagcggggtttaaaaaaataaaattgtaatggaaattctgcactagcttcttacaaaccaagaacattcaacaaacttacaaacctgcgcttagcttctttgcggtaaaaatttatgttatggtaaaagttttcgatcagctataaaggccaacaagtaaatagaccaaaacagtgttttaatctagaaatctttagcatgatgaccacgtacgggataaggtattaggctaattattccattgcaaggatagatacaacataaagtttaaggaatcaaatgcttcctaggaagtactgtagttcagttctcaaagaagttgtataaaggtaattacgtcttccctaaaagcgttatacgataagggagcatatttgattctccaccaacttgccaatgtggaccttagacctgtacttaaaactggtaaatggataatattagattattaggtacatgatttagagttaaatagaaattagatttttcaagttttgatcacaaatgttaaataatttttttttttttcgctttattaaattttgaaggccctcagta

SEQ ID NO: 110783 - DNA, 840 bp, Aquilegia coerulea
  Intron number 2 from transcript AcoGoldSmith_v1.016357m (l ocus AcoGoldSmith_v1.016357m.g) derived from phytozome v7. 0 (chr-ID scaffold_47; pos 1051244 to 1052083)
tggatcttcaaggtcgaaaggtgagccttacaaaattgttgaaaattaacagaaactcgccttaaggtagaaggtcattaagcatcttgggtattttcaaaaagagcttttcatacagacttattctctatacatacgaatcgcatgccttgcgggtttgcacgactctttggcctctggattgtgatttagttctaattttatgttatcccttcttataacaatttattcccaaattccaagcaaattgtaaattatgaatcatttctttttgtcagtaatctccatgcgctctgtaatttgctatctccccttagttattccttggatgacagtttggaccatgtgcaatttgtatttgtttcagcctcttgtatccttatggtcttcttttttaagtctatttctggccaagaagaaattgttgaatttcagtgcccatagaattttgcttgaaatttagttaagtgagtctaaatggacgaacaagacaattatgccaccatcgtagacatcaaataatcattctattcttctgtgcaatggtgtatgacggtatacttatttgagtcattaggcagttggcgcttatcacattacactattatagcgtgtttctggtgggtattgttgtatgtagattttgcagtaatgtttcttccccatctcgttcagccctacagtgcacactatacatataaacaaaaattgatagtttgccaataaggatatatttctgtcatttaatgaagtctctgaaatctacatcaagatgtctttaagtacttacttagggatttacagtaaagccttttaactgtatgtttgttcttattcagg

SEQ ID NO: 110784 - DNA, 977 bp, Aquilegia coerulea
  Intron number 1 from transcript AcoGoldSmith_v1.020731m (l ocus AcoGoldSmith_v1.020731m.g) derived from phytozome v7. 0 (chr-ID scaffold_47; pos 1097057 to 1098033)
gctgcatcatactcagtaccttcagtgagtagtgttacagacttttctactgtttcccccttttatagagattatctagattattgagttgctagtagactagtagtgttgtgaaaacatgatcttgggtgcataatgcagggtgtacgtcttactatcattttagctatgaatctaagctaattgcccaaatcctgaaatccatatatcttcttcaaaacgagtttataatatttgataaccatagcatgtagcactattttctgatttccagcaagtttttagagttgggttcttcatgtttattatggttcaatagccttgggttgtaggcattaggaactacgaatgttgatgcatgtcaatataaaagttccaagttcatatccaacactacagtgctggcacacttttccaaaccttgtttttgttctttcttggggacattatcatggcatcactgtcctagagctccattacatttccatgcctgaaggtgactaggtgagggtgcacactgcacaccaacaagacacagttaggtacttaggtgtggtgtgtcacctctatggctgtgctaattgggcttttgctggtttaattcatctcatttagcctggaggaaaaaaaataaagataaaaagtgtatttctaattattaagtggagatgcaggggatcgaaccctgtacctctcgcatgcaaagcgagcgctctaccatttgagctacatccccattttttgttaattaaatagaatattacgtctttaatcaaaacaatattaattttgcatgagatacagtagaatttgcactccggttcttggaaagtcattattactaatgggagttgtacttactgcccccatttagccattaggcacaacagttacaggttttatatgtaccaataaagttactttatttcatttttatatttctaatttctaatgagatgtaattctgttgacagatt

SEQ ID NO: 110785 - DNA, 614 bp, Aquilegia coerulea
  Intron number 2 from transcript AcoGoldSmith_v1.010932m (l ocus AcoGoldSmith_v1.010932m.g) derived from phytozome v7. 0 (chr-ID scaffold_25; pos 12862 to 13475 reverse strand)
ttggtaagtagattcaatcgagaaatgattgtcttaatttgtaggcacttgtgtaaaagttagaaagttccagttccttttaataaaaatgcatatgtaattttctgttagataacacatttatatacaaagaaatactttatactattaagcttgcgtgtgtatagtgtcttacaatttccaacttacaattaagttagcaacactggtatgatactacaaccaaaaaaaaaaaaaacactggtatgtactatgatgcacaaaatatactgaagtacttgtacacttatcatactagttcaacataatttttggattcacttccaattccgataagccatcgaacatatagctttgctttgttatccaccaatcattcataggactataatttctggtaagggcagtagcattgctcccccttcctgatatcttacaaggatcttagatagtaagaccagcacctgaatgtgtctttcgacgatcaaatttgaagtgacttaaatttgagtatttgaccaacagtttttcttcaatttccatgtctaaatacgaaggttactgatgcataacatgcaacaggaaatacttctattaggttgtgtttcaaggag

SEQ ID NO: 110786 - DNA, 876 bp, Aquilegia coerulea
  Intron number 4 from transcript AcoGoldSmith_v1.004846m (l ocus AcoGoldSmith_v1.004846m.g) derived from phytozome v7. 0 (chr-ID scaffold_25; pos 2409285 to 2410160)
ttggaaggtaaaacattaaatgtttgaacattttcttctatatgtatacctgtttcatcaattcttttgttgttgttgtcgcacattgtttattgcatgcttgcttgaatttgtcgctcttcccaatggttgttacttattagtatcactgtctatgattcatagcttaggaaacacgaaaattccatacatatagattctttattgtgtgtgttaggatatctgcgtacataatctcaaacagaaagaaaaggcaactagataagtaataaaatattgggaagacaaagttggttcgatcatataatgagagttccacgaatgtgcagtctcccttctccccctctcgacatatataatcagattatatattcttaagaatcctgaaacatagcatgggtccttgttatgtttttgttatagagaaaccagagtcctcttcttggggttaggacatacgatcttatttgtctatcctgttacttcagggttttcagtcataatgcccacactaaggaaaacatacatcctcttatgtaactctgtgaatgcattcgtttaacaaataattaggtattatcttcacaattcaggttcttttttgtgttctaacctttaatctatgccatctatttgcgtctataaaaaatgccacgagttgtatacttagcatattaaaacattgcatcatcccagctaaatatagcaggcttcctgtgcgactcttggagtgaaagttagggaaacctgattttgatttcttaagtttagggggtggaaatccttagaagaggaactattctcatatatatccttgttattgactgcagctgagatcttcctggggcattggatttctgcagtgttgaagaagat

SEQ ID NO: 110787 - DNA, 880 bp, Aquilegia coerulea
  Intron number 1 from transcript AcoGoldSmith_v1.005206m (l ocus AcoGoldSmith_v1.005206m.g) derived from phytozome v7. 0 (chr-ID scaffold_25; pos 380757 to 381636)
agattcccaaatccttcagcacttcttccccaaaggtatatctctcttaactttacctttacttccctgttctatctttcttaacatcaatttgcctcaaattattaaggttggtctgaagtaagaataaacctattctgcatcaataattcaaactttgtactctgtaagggagttggaaggttgaggacttgaggcctatgaactcattgtaattatatttactcattttgttattaatagaaaactcagctaaaataattataattcaaatattgagttttgtttgcacttttgataatgagctgttgaggttggtacttcatcttgatgaaaattcaaattttttatataactttttataattgggtgagcggaatgttacttatattgtatagactttcgagcagaagtcgaagaagttgggattaaactttatttgaggttgaattatatctgatgcgtacattaaagggatctctcccacaccccactcctctagaatggtacattagatgttaagcctcacggttttccttgtactgtatattgaaaggtatcccttattctgacatgaagatggatatatcaaatctatactgcttacagtgaaaaccggtttatgtttataatttatatcagtaaggactaaggagactggtgtgttcgatcaaatacatttcatttcatcctatacactcccttctcaaaaacacatgccaatctatattaagttttattgtcgaaactaatttccgttttgatgtctcgaatgtatgaacatgatccatccgtaggttttacttcatttactataaatttgggaatcagatttatataagaatactttttttttctctctctctctacagattttacg

SEQ ID NO: 110788 - DNA, 473 bp, Aquilegia coerulea
  Intron number 1 from transcript AcoGoldSmith_v1.018307m (l ocus AcoGoldSmith_v1.018307m.g) derived from phytozome v7. 0 (chr-ID scaffold_25; pos 3126823 to 3127295 reverse stra nd)
cattcccgccaagtcgtcaacacaaacaccatcatgtctctttctctctctctctagccagaaaaccaagaataagatcacaaaacaaaaacccatcaacctcaaccttcaactaaggaagaaatctgttttttatccattttctttctaactcttttctgtcatagttaaaccctctctgcatttcttgaagatcaacaacagcaagaaatctaagaacaagatcacaaaatcaaaacccatcatcttcatgccttagcacttcaacataaagaaacattactttcttctgacatcacactctgccttttcacattaatgaagatatttgtcctttgatccattttcttccatctttctcttcataaaaacaattacttttttccaagtgcttaattcctgcagaaatcaagaaatccacccttctgtaatggagtatatagaccagagcaagaaagtagcgaatcctagcg

SEQ ID NO: 110789 - DNA, 1033 bp, Aquilegia coerulea
  Intron number 2 from transcript AcoGoldSmith_v1.007483m (l ocus AcoGoldSmith_v1.007483m.g) derived from phytozome v7. 0 (chr-ID scaffold_25; pos 1705575 to 1706607 reverse stra nd)
tatccttgaccccaatcgacacaaaggccaagcaggtgagccttgggtttcttggttaccatcatttataatattcatactgtgaaattgaatatgcatttatctaatgtatttttgaaattggaatcactgagcaaagtttacaaattcaataactttgaagcataaacccaagtttcttgtataaaacctgtggagcatcaacacaccatatggttagattttattactattaaacataatggattgtgaataattttagtgaaaggatatttcaacaggatatatcattatttcatgaagtatacaacaatatcactcttgttatcacagctcaagaagacttctctttctccaacacagcttatttgttagtattgtatatactaaggatattaaatagtagagctcaaatatacaacagaatgattttggatctttttactgtcctacgagataccagtcaacaagtacatattcgttcagaaaaacttcaatttttccgcaaagcggttgacttgtacccccaaaaccaggatatatgtagttaagctttctgaagtgatatgttcgctaatattgcttcaatattattagctttcgacctattctatgcaaataatgtcaggtgctatacattggacatgcatgtggattcagcttctactgtatatacttgcctcacttatctgaaatttcaagtcagcatgatgttagctagtatatttttaagcttacatactctaatgacttttcacattaacaccagaaactatgacgtacttagtctatatgattttatgaatgaactgagaaagtacttagtctatctgaagtatttatgtaaaaagtgaaatctagttataggtgtgttgtaaacttcagattctttatttactttgtgcccttctgatcattattttgctccaagtttcatctgttgcagaaccccttaacaacaaatatattaatcacctatttgattgtttgttcgtcagggaaagtagctgttgttggtgggtgccgtgaatac

SEQ ID NO: 110790 - DNA, 652 bp, Setaria italica
  Intron number 4 from transcript Si002896m (locus Si002658m .g) derived from phytozome v7.0 (chr-ID scaffold_5; pos 42 4152 to 424803)
agctactaagttcctcgacgagctggctaagatcggtaataacaagcatcgatcgcaacttgaaataatctgttactctctggtctggtccatagtagctagcacatgccattctaagggtttttcatcacgtacgtctagcttaatctcacataaaacaccatattaccctcgctctaaactgtatttatttccttgtatttttttacagtgaaaactgagtacagattttcaaatactattttcttgcttatcgatcaccaacaaccgcctccttttttagttacttttctgcaatcctgtggttaatttgaagaggtcattttcttggggtttatttcctgagtaatctttgtgtctttttggacaaactagattttattctccttttgtgttcaaacaaactttattctcctttctacacaagcaaactgcataggaatcttctcaactactacgtatttctttttctgccaacagaatctcaacacaaaacaacaaaaaccaaaagtcctcgattgttcgttcatctctttcatggcaggctgtccatactctgtacacatggttcttgttgaacaaaaatataaactcgtgccgaatgaattcatctgcagagttccctggagccaagctggtgagcgacgcggtg

SEQ ID NO: 110791 - DNA, 1040 bp, Setaria italica
  Intron number 2 from transcript Si002835m (locus Si002644m .g) derived from phytozome v7.0 (chr-ID scaffold_5; pos 30 701043 to 30702082)
cttcaagctcgtcatcgttggcgacggtggaactggtgattttctccgtcctttcctccgccttacatgatttttgattattcgttccgggacattgggaggtgtggcctctgatccgtgcggctcggtttccgcgagatccggcgaaccgggtaacgatttttctccggctggaggcgcatgtgaatgggtgggtcgtaaggtgatttggggttcaagcgtctttaggttttagatggtggggaatcgttagatttcagcacatgcggagatctattttattgtcgtcaggcattgatgctaagaagttctcccttggcagttagtatttcactaatactaatcttatgccaactattatcttctatgttaatcaaggacctgcttaacaccgctgaactctctgtacaaagaactgttaggttgctctgtttctaacattttttttagtgtcctaaataaaaacttgccaattggtatttgagtacttactatgtagtataaaaaaggcatgaggttccggaataaaaatggaaagttctggttgatggtgggcaaagtgtttgtgttttgatccagagtgtatgaaaacggaaagttgtagtggattgtgcatcttatcaaaaactagtaataaactagatttttttcaatctgaaagaagttttcctttgtgaacttacactagtgttgtggtggatgacattttcctgctggtataaggtatggacgtatgcctatgtgatcagaaatctatggtcaatcttgagtgctcaggtgcactggatgctgactgctgacacgctactaaggttttcgatcctagtgtgatggccctcctctcaatggttgcaattttcaaatgtttcttacattccttgacttgttgtattccacttctgtatttatctataaaatgttgccaaacatgtgcctttgttttaatttatttaagtgcctttccgccattgttgttaatgtctcattgctttatgtttcctgcagggaaaaccacatttgtgaaaaggcatcttactggg

SEQ ID NO: 110792 - DNA, 622 bp, Setaria italica
  Intron number 6 from transcript Si002535m (locus Si001935m .g) derived from phytozome v7.0 (chr-ID scaffold_5; pos 43 096670 to 43097291)
aactatctgaacaaggtaatagtgattttctttttttatggatacttatgttgtgcatagtgagcagtatacttttttcatggatagttcagatgtgcacagcgagcagtattgagttacctttgtgccacatattttttcatgttcagcatggaagtggcattgtgttagtaagatatgtctatatgtgttgaatgttccacttggatttgggggctggtgggctagtttccatcttctttttgcatgaaccataatggacttgtggatttgaaacatacacctaccggctatgctacatgattattatcatactagtctcattgaatggtttggtactttggtaccttgttcatctacttctaattgttttttttttgagttttagatcaaaaaattgtggtgttttgtccagataattttattatatattgtgctcatttggtcttagtgcgtacatattgtacctagtgttgtgactctagaacatgcacaattaatatgtctcggcaattaatcctgcattctttattagtgtgtggagaaacatgaatcgtaataaacttacgaagtttaattttttgcaggctcttgatactttcaatacagcagttgtgtcacc

SEQ ID NO: 110793 - DNA, 931 bp, Setaria italica
  Intron number 1 from transcript Si000969m (locus Si000710m .g) derived from phytozome v7.0 (chr-ID scaffold_5; pos 25 343160 to 25344090 reverse strand)
cctaccactgccagctgtacgctacgatggcccgaaaattttacatgtaccaccatgcacacccttagagctaaggtcgttttttgcttttctatgtgcatatttactatgcacctaaatacagtgtatatctagatgcgtataaatatttatgaacctagaaaagtcaaaacgactacaatttgaaacagagggaatattttggattcaaattataataaaggtgtagaaccatattagcaacaaatcttaacttgatataaaattgcaatatgctgattaatgtgtttatatggattattgtataagtagcacacactctaatgtacacataatattcctaaaataaacccatattgtgagatttagtagtatgaaatttaattcaagcatgacataaatgtactgaaaatttgaaatgggatagcctaggtataactatttggatgaaattgattgcataggaccatgggacatgcaattggaaagttttctgtagtgaaaccttcttcctttttgacatttactctaacaaaactagtataccaatcagaggttcagataaaaagttcctcttgcccctagagaggtaataggagcactataaaagaactcaaccagaaaacaatcgccacttagttcaaattccagttcacgaatcacaagtacagtagctacattttccataagattgtgcaagaatatggggcaatcatttgatggctgcattgtgcagttaagaattttgccatctcttatgtgtttagtgtgattgagcagccttaattattcttccataaatattagtttctgttgacccctgaacagttcacaagttgaaatgaaatgctgaaacagctcattactagatttccactcaaggcttcttcattctaaatctaacaattttggtattatgcaggaacacaac

SEQ ID NO: 110794 - DNA, 274 bp, Setaria italica
  Intron number 4 from transcript Si005060m (locus Si005060m .g) derived from phytozome v7.0 (chr-ID scaffold_5; pos 30 21754 to 3022027)
agattgttaaaaagggttgtcttgagatgatgaagtctgcaatttgacaacatcggtaccatctgaagcaagaatattttgatccttttccactacatttggttaggaaaagttctcctatcaaatcgactagtaatgaatagtggatggaccttgtggaattatagaagactcctagaaagatggtatgttttttccctaaaaacaaaactcttgccttgtacattcaactattgctggtgtcttaaatgcaatctgtctttgagtaggaggc

SEQ ID NO: 110795 - DNA, 828 bp, Setaria italica
  Intron number 1 from transcript Si000120m (locus Si000120m .g) derived from phytozome v7.0 (chr-ID scaffold_5; pos 41 957963 to 41958790 reverse strand)
gtcgagcggcttgcctcctcaataacgttcctcaggtgaaaacctctctcctggcttcctctgttcccagcctccgacactcaatcagtgcgatggaattgaaaagtttcagttattggcgtgacggcagcggagttgcctggacagaattttatagtatcgtagtcctgatgctctgcatagataggcttggacagaattttatagtattgtagtgctgatgctgtatgaagatgtctatttgtaactgttctaatccactgtggtcttcttgtaaaattcgcaaaaaaagatgcgcactcattattggagtttgggcactggagtgtatgataaagcatacatccgctttattttggttaattgatacatatgcgagaaaattttgttgagcgtatgacgatattgcatacatccctgagagcacctagttgtgaaactgcgataagacatgttttggtgtcactctattatcgccaagtgcagctagtcagtacttcattttgggtcaagccaaagtggtgtagtgatatttggccctccgttaattaggagatgatgaaaacatcttagttctgctgattgtttcttcgtcgttcaattatcataataaaaacatgattatatgtttagtcagaggtctgtatgttacttactccaattagatttcctctgcagccacaagttctttgaaatgtaaaaggatgcaggggttgcatctgttttctcctttcttttttaaacgacctatttggtagatctctggtttggtaacattatatttgcaaatttaagttgccactcatttgatctctttgtcttcagaga

SEQ ID NO: 110796 - DNA, 699 bp, Setaria italica
  Intron number 1 from transcript Si039634m (locus Si039634m .g) derived from phytozome v7.0 (chr-ID scaffold_9; pos 14 796715 to 14797413)
ggcgggtgagtatgtttcatttgcattcacttgaccatatcagtgtgtccattttgctgtcatttcttaaagtaactgtaatattgatttagtattgtttatgggatatagagcatcgaatctgtaacttgccattatctttgactgctaaacttgctcttgagatgctatcttgcttttgtgattcttgttagcatcatgcttcctttttcttcttgttctcttgcacaagtggatgcgggagtttatggtcaggttgggtgcattgagctgcactttttagcatcatggcctctggaaaaaagactactttgtatagttaagatatatattcatcgtttcgaccgttcaaagtaaatgatattgatcttgtccttgttcttgtctatttttctgttctttcaaaggtaatacactgaactgaaactatgccatatttgatatggattacacattgagtgagaaaaatatagtttttgaagcatttgtttgttgtgccccatggatttactgcacaaatgtgtgccttttctctttgagcatactgtattgccaaatgaaattatcgagtttgattgaaatacggactagttgtaccctgtcctcctgtctgctcaaaatctagctttgtgatgaacttgtccctatgttagtgaaataattctgatacacttttgacattctgtttaggtacttcat

SEQ ID NO: 110797 - DNA, 1020 bp, Setaria italica
  Intron number 1 from transcript Si003744m (locus Si003744m .g) derived from phytozome v7.0 (chr-ID scaffold_5; pos 38 677390 to 38678409)
cgctggcagaagggtctcgtcgtcttcgccgtcgggtgcgtccagcgtcttcatctcccctatgcgttcccttttttttctttttcgtcccgctgctagtcgattgatccgtgcatgtgcctcgccgtcgtcgtggtgcattctgccaaccctttgcagttcgaggcagggggcaacagaattaaggagagtttattgtttattgcggccggtcgatagaattttgaattgcttcgatatgggacgttttactccgaaactctgttacggcatcgtagatctcttcgtttgttaaaaccacactgcgttgatgcatactgtctgaccttgctagatgtgttttacggcctgataaattagtagatgtatctaaccatcgtgctgcgtgttatattcgggtgttgcaaaataattttgtgatttttaataggcaaattacttgaatagccccgtacttggtgagtgtcaatcttagaggagtatacttactagaccaggcagtaagtgttctaggtatttaagttgatcacagtgtctaccttatgctgatgacaatgtgactgccgtatttgcactgcaatgctatgtgtatgtgctttggtcatctagatatgagatggtagaagatgaaattattcttacttttttagttcatatacccggaatgtggttctaattatgcagctgtagttctgtacaatatgcttgttcattatgctatttgatcagtaaagtagctaagatttttcagcagttcacaattgctgtcttgtgctgcatgatgtccttcagaaaataatatttagtcattgtgtattaaaatacttttatgaatcccagaagtggctatttgtaaatatatccagaaatagtgtaagaaacttcactttagatgttactgcaaccatacaagggtcattcactcttttacttcagcttacgtgctattctttcacttatactctttcaggactgacacacttctgtcgttaaccttttgtagagctggcaccttaactt

SEQ ID NO: 110798 - DNA, 756 bp, Setaria italica
  Intron number 2 from transcript Si001134m (locus Si001134m .g) derived from phytozome v7.0 (chr-ID scaffold_5; pos 33 397224 to 33397979)
aaaggctcaaagaggtaaatatcctaatgtagcggcttgcctgattgtgacaaagtcaaataggtgccagtactcggcaccaaagcacataatgttatgtatcaatagaaaaacatggtattgtttttgaatggtggtgccttttaactagatgactcgcatgaatatccaaaaaactatacaactgtaaaatacaatgatttgcagcaagctatatttcctgcatgcatctgattaataaaatataatatttgggggcaggcagcctttttttgtctgtcccatagtcacaggaaacagggtcaaaggcagagtttcttgacccaagattgctgaccccgtcccgggaacatggggtcatttttatccctgccttgtaaaaacctgttgcaagtagcataccatgtacctcgacccccatcaacctggcaactttgtgactatatgctgtcctgaaatcgaactgatcgcttgttgctcggagtccctgttattgtgagatttgcactgttttggtgctttacttgcatgtttttggttccactggccctctggtagacatgccatgcacagaaaaaaaagttattgttgaagaagctgtgctaagtctgttagtaaacatattattcattatcaataaatatgtagtatttgttagctctatagtatttattaagttttggtgaattttctctgaagcatatttattgcttgcttgcagatccgcgactatcataggcggaacccttcagcccg

SEQ ID NO: 110799 - DNA, 1063 bp, Setaria italica
  Intron number 1 from transcript Si035103m (locus Si035079m .g) derived from phytozome v7.0 (chr-ID scaffold_9; pos 36 130925 to 36131987 reverse strand)
gtccgtctcgacgctgcgtcgggctgcttctgcaggtattacgcctctcttctcttcaggtgttatgtttttgtagcatttgattacgaaatcgttttccccgagcggccgagctgagtctaatttcctctcgagaataataaaattatgtttttttcgaaaggtaatatgttaattgctagtctgttcttagaaaaactcagactacgagttgacttagctgtaggatgccatcatactggtagttcagttataataaccacactttctttacagtagttcggccctgtttgtttgcaatagattatataatcttgtcgtccaaggacaatatggtaaaagactaccttgcaccaccaaaataatatgaagtaagctgcccgggagtagcatgggcattattaggcatgggcctgtcaactgtcatggaatgtcgcacccgaaccacatagctcattcattcacagcctgtcactaaattaatttcctccatttctatttgtttgcaaaggatctattcataattcataggatccttctcagtagctcaacaatagtggtagtaattggaatatggggcagggactgcaatttgtgataattctgggtgttagctcttatttttgtgatgataattacttctaaggaacttgcttagttttgatagataggggatgttgcgatttatcttaccaagatatgaatgttgaacagttttcaactgagtttattcattgacttttgaggtactttctagtgtaaggctttaagcctatacatttttttttctttataccttttgtctgctgcctttagtaaatctgatggtttcagtttactaattggagtagatgtagataggagatgggtacaaatgatgaacaattagacacgttgttttgaagtgtatttttagtaggctagccatgcttaggcgagaccatctttttgtacagtaccattaaaaaattcagtgttcatatcctcctaaagttcaacatctcaattttttgcaggtaatgacacagaaaagctgggccttatccaagtggcaagccttata

SEQ ID NO: 110800 - DNA, 553 bp, Setaria italica
  Intron number 2 from transcript Si001649m (locus Si001649m .g) derived from phytozome v7.0 (chr-ID scaffold_5; pos 30 364496 to 30365048 reverse strand)
caacgtttgggctcattgccacgacgagctaactggtaaattgcttcttcttcctgatagttagcttcgagtattttgactgtatctagtggaattcatctgttcagtactagtgtgctagtagttgacaagaataatattatagaaatatagttcgttcaaaaaaaggataatattttagaaatatatgaaatcgagttgtgcatcaatttcagggccatgtttggtattagttaatgattgcaggatgccatatttccagtttgtctcatccacaacaccgtcgttatactagcaactatcaagtagaatctgttttctgataaacaaactaactttaatggtacctctacattcgtaagttttagttgtgtggcatcattctcttactaaattgacatcattttacattgtccaatggggtcaaatctgcttacgattcttctctttattgaagatatgtgtcatttgatgtgttgtctggattttagttgagtggatgtgaccaatttacctctgaaatcattcaggtttaaacaaggacttcaggaag

SEQ ID NO: 110801 - DNA, 966 bp, Setaria italica
  Intron number 1 from transcript Si003086m (locus Si003086m .g) derived from phytozome v7.0 (chr-ID scaffold_5; pos 17 85375 to 1786340 reverse strand)
ctccgatccttcaccgccaagatcgacccgaccacgtacgatacgacctgcttctcactcttcttctagtcctccccttttcatccacgctgatgaaatcgtgcattcgtgtgatagtgagctaattttcaaatcctgcagttgaaaatggttttgcatcgactgcagttgaatcccgcgtaagggctaatgaatgattcttttttctgttaataatgagtattagttcgatcatcagtggcaccgcctgcttgtcaagataatttctgtagttggttcccacctcagggccgttgatcctttttagaagtgagtaagggactaagagttcaatcatcagtccagcagagatcatggcagcatctgtgtgtcaacagtggtcagtagaatttaggtgcctagaagttacctctgtcccatatacgattccaggtgtttaacacaagcacagcaacaaaggcaagcctatgatttctccctttttctcaactatggatgtgtagagcttctgggctcctggccaatttatacaagattgcaattcaaagtctgtgttttcatgggttttactcaagtacgtagcaaggtataaaattctgtttatgcaactccaacataagatgacaaaaggataaaaattaagaaactgatgaggtgcctaaatctttacccatttagaattcgttcaggatcccaatttgcttgtgtaattttctattttcattccagttgcattcatcctgtgttatatatttaccaaattgtacaccagccagctgacagcaggtttatcgtgaacagtaaagcaattaaatactaaaacattatccagagaacctgaaagtgctgttaccaagtgaagcatctttattgtgtttaatatgcctaattcacatatttgcctcatgatgtttttgcatatcaaatgcagggctgaaaagggtaatcttggggtgccactactgc

SEQ ID NO: 110802 - DNA, 986 bp, Setaria italica
  Intron number 1 from transcript Si036627m (locus Si036627m .g) derived from phytozome v7.0 (chr-ID scaffold_9; pos 49 436192 to 49437177 reverse strand)
tgcccgtcgtcaccggggtcatcatcgccagcggcgtaagttactgcctgctcagcctcatctctcgtttcggtagatctgttgaagttggggttggatctgggggaattctggtttgcctggctcggagcttggcaacagtggggtcgagctggcgatgagaggtggatctcatcgaactgtaattggagtgaaatggcaggcatctagcctcagttcattggatggtgttcccttcgttgggaatatgattttgggattatcagatgaaaccattcaggggctggctatttagggccaagtgatcaactttcataacagctgttcaccatctacgtgatcagccggagagtaatcctgttgactgagctttatcagagggaaatcatttttaaaaatttgtttcctcaggaagtacaataggaatagcttgtttttccgcataaatcttgcatggaaactgtggatgtgctagcctaattttcaaagctcacatctcttcttcctagtaggttcaatttgatgcacgggaaagttcttcatattttgaaattggattgcgaaatattcatgctttacacattattaagttgaaactcttgcgttatatgtaatatgtactgcattgtgttataggcttatcgctttagtttgtacaatacaacatactagattagaaaagtgtctgatgactactggaggcatttacctaataacagtattgtgcggaatcttgttttcatgtgcagcatctcagtatagcaagttgttgctatacatggttgctgtgagaaagctttttaggaggtatatgtttctcactagtatggatatctcaaattgtgagtcgagaacctagaactttgcatgcacgctactatgtattaagtatagttgtttcttgaagtttttaacactaactaatatggagcatgcaaaacaaatttccagggcgagcctagctttcatctgtttggattcatcat

SEQ ID NO: 110803 - DNA, 978 bp, Setaria italica
  Intron number 4 from transcript Si000402m (locus Si000402m .g) derived from phytozome v7.0 (chr-ID scaffold_5; pos 36 651664 to 36652641)
gtggtatgcaaatgttgccctgagaatgcatgctattagaggaagaggcaattccttatttgacactagaagatgagttaattcctttcttaaccctgaaaaaattttccttcctaatatgacaccgacttctaactttcattccttatttgatatttccgtcacttgtgttagttaagtcaggtgaaacgatttccaaatcgccttcaaaaatcatgaaactttttgtagtgatacaacaaatgaatatgaacccatatttattaaaaggaaacttatacctttacggttttaaaattaaaattcaccaacttaggctacctttataagttatatgaatttttatggcactaaacacttttaaaatttataaaaaaataaataatatttatcacatcagatgctggaacttattaaattatttccaagaaaaacttacatagagaattatgaagaaacgtaaatttgggaaaattttaaagaaccttgtaattctctatgtaacttatgatagaaaataattttgtaaatgactagaggaatattagctgttttcaataatttttggaaagtattttggtaccataaaaattcaaatatgcttcaaaagtagttaaatttggtgaattttaattttaaaatggcaaaggtacacgagcgtttttaatcaatatggactcatcttcatttgttctataatcaaaaaaagtttcatgaattttggaggtgatttgatggttgttttgttcgaattatgtgacaaaaatgatgaaaatgtcaaataaggaatagaaaatagagctcaatgtcatataaggaacgggacattttttagtgtcaaaaaaggaatttaatcatcttctagtgtcaaagaaggaattttctcggaatcattggatacatttatactcctgttagcatgaatcaattttggttgttataggttgctaaactcccttaacatcccattgtcggtgg

SEQ ID NO: 110804 - DNA, 1011 bp, Setaria italica
  Intron number 1 from transcript Si004563m (locus Si004563m .g) derived from phytozome v7.0 (chr-ID scaffold_5; pos 15 103143 to 15104153 reverse strand)
acaacctccactcgcacaagcgctacctcaccgaggtccgtctcttcctcactccctgtcacgcacacagttggctccgtgaccgtgataataggtggtcttcgcgtaggtttctttcgatctgaaccgagtgtggggccgctccgttggatatgcgggaatatgttcttggattagtacgagccgtggactcgtttgcttctttaggagctgcaatgtgatgcataattaaggcagggctgcaggagaactgattgtcctgagtgatataagactcttcgatcagtcccagtcaacttcgtgttatactagaattggcagaacactcccagatataaaatctcggtttctctggttcaaggtggttactgaattcctaaatttaagggtcttgaaaggatttgggggaggaaaagagcgtttcatttgctggtcctctcgattgaattccatgtgccttgtttgcgctgtgcatttcagtcagtgtaattttgtgccagtatcctgaatgattgtaaatgatgaaatgctttcgtaccggttatcttacattatagtagtcctggaggtgtcattgattggaatttgtactaaatactactaggttcagcagaaggatggagagttattccgtttttttattcaccaataaaagggactgtcgtgctgaaatcaacatataataggcacgtttctagataaatttagcatatatacataggtatcatgccgttcactaaatgtcagatcaaatttctggaggcagcagctatatgtatccattagcggccaaacatcaatgctaaacattgggataaaccctgattatttccagacgccggagctatttgtgtccattaaccatatatgattcccttttttcggatcttataagtcctgaggatactttaactacttcagtattttacttgtgataaatatcaactgtttctcccatcctttcagtgtttcgttttcttttggtaacttttgaataggcccttgcagata

SEQ ID NO: 110805 - DNA, 925 bp, Setaria italica
  Intron number 2 from transcript Si001760m (locus Si001666m .g) derived from phytozome v7.0 (chr-ID scaffold_5; pos 29 985335 to 29986259)
tggtgcggttgaaaggcggcgatcctctggtaatctgtcaatccttatttcaaacctacttatctgttgagaattcatgtgacaattccagttgctagcctagctcaaacattaaactacttagtaaactttgctattggtcgtatcatgttcatccgcattgagtaactttttgagtaaagatagtgatccattcttagtctgctttaatttttttttcaagtaatgaatccatacaaattgatggtctcatactgaccagtattggtatcatcagtatatattggttgtagtttgtcactcttcaaagcagaaaatcatccaagctaacctctttttaggttactgcatggcttttcacataaagttcttaaacttggaaataaacaagattagtaggatggaaatagatcaagcatcgttcaagttttgggcttgcagtttgcacattaatgttgatgaacccagtcctcatctaacttgtccagttatcaatgcagaaatattcttattgaaataatctggcataaatcgatgaagaacagtaaatgatgtcgtgtatttaagctgtatagtagtaactggaattttctttgattttccgttttcattcattttgccaaaaggatttctattcttatgggtagtacatgaaaggggattagcataactgcataacatattaacagaaagaatagaggggtcatagggttacctgcaattgcatttgttttcttaacacaacagaggcaaggaaagtagtaaaaatactagaaaatttattatatttgtgcacacagtgttttactgcatcagagaactaattggcattgcatatgagcatctacctttaccttggaagacatttataggccctaaattcactttgtattcctttcaggtctttggaagaggtggagaagag

SEQ ID NO: 110806 - DNA, 902 bp, Setaria italica
  Intron number 1 from transcript Si000352m (locus Si000352m .g) derived from phytozome v7.0 (chr-ID scaffold_5; pos 45 657226 to 45658127)
caccgcctcatcctctcccggagcgcctacttcaggtgagctctcgaatgcagagccctggcgctcctcccgccttcgattcgttgggaattgaagtgtctgttgcgatctgatcgtctgcaactgcctagagtacttaattgcatttctaagtgacatttttgtctgtttcgttgggacgtctcgatcccttccctaagaaattttcatgtgctttgatccctaccgaaatgtttaataagaatccgaccttatccattgtgcaaatatcatgtcgattacagccttaaaatccccaagaccttaatttgtactatttgttatgggtaggctggcattcttgttgatatcatatttaagcctttggtacaattgaacctagtttgcttcctttagacttccggattcccatttaagctgtgaatcattgttgaagctaaaaatgatttgacagaaatcggttactagctagtgtttcccttgagatttcaaggccagaacttgtggatgggggcataggcatcaaccagtactgtggactgtggtacattaaaaatgaaatcatagtttcctccctttagggatcctatcagatttgtgcacacatatttccctggtcactcttaggagaaaaattagagacctctttcttctcctatgtgatacaattcaactagatgttatcctgatggttatggtctctgcactttggcttgatgctacgtttatttctacatgatatatgcaaaaccaaagtaaattcgaaaggaatcttgctcactccattcctacaccttttcccttttttcccttttctcacattttttcctactaggacatacaagtaattagagatgagtaaaatactaacaaattctttataaaaaatgactggcaggaat

SEQ ID NO: 110807 - DNA, 892 bp, Setaria italica
  Intron number 1 from transcript Si002935m (locus Si002930m .g) derived from phytozome v7.0 (chr-ID scaffold_5; pos 33 730670 to 33731561)
ccgccgccgccgcagccgtcgcgcctcctctacaggtacggtcactcgctcgccgcctcccttttcccctcagcttcgtttctttcccgcgttatccattcctctttccccacgccgccgcagtccatcctcgcgagtcttgaactggccgttcgctgctgctggcttgcctccgccgctagccaagcgctgctgcgggctgcctccgccgatgctcgcgtgctgctgctgcctgctgccccgcctcgccgcgcctcgctgcatccgcatcccatgctgcacgctcctgcagctcctcccctgtaaacccaagcgcgcgcggccgcggctgaggcgtggatggcgcgccgcgcgctcgcgccggcgggttaatggcggcgggcgacgtgctcattcattacaggaggccaatgataattgattgattggacatttaattaaggatgtatattacaaggatttacaagttctggataatggatcgataagatttccgtagtttattcagttattttgaagcagctttgcgctagttttcagttaacattttgtgttgttttaactttatagcgtgatcatgtatatagaaaaacatgcatctagcggtgaccaaaaaaaaagagaaacagcctaatattgattgacagaatctgcaagttttgatgaaaaaccaggattccctgataagaaaatatcactaatgacttcacatcattgttagaagaaaattttgatgtaatatgtataaagtgttttattgtagatatgaatattacttttggatgtaccttcataaagtttcgtcctaggcccccaaaatctcagactgaccccaattttgctgtgcggcggctccgtattcttggttgatttgttagctacaggttgtggg

SEQ ID NO: 110808 - DNA, 625 bp, Setaria italica
  Intron number 3 from transcript Si002935m (locus Si002930m .g) derived from phytozome v7.0 (chr-ID scaffold_5; pos 33 731795 to 33732419)
caaccagcccgcccgcaagcagaggcgccgcatcggtgagctcatcgtctcctcccttaacttcatgcttggatacaatgtctccttgtttgctgctgcgataactttgaattgttaccggggtcttgctgcttcctgtgctatgtacaactaatgggtgataattaggatttagttgcaattcagaagctgtggtgtcttgtactctgcagtagtcttgttgtcaatgataatgcatcgctgtacagattgagggtagggtcaaagtgttcaagccttttatttggtgaacttgttgatgcacttgaattcctgattgtatagctatccattctacaaattggacgccacaagatgttaatagagtttgatctgcatgtaaataatacacgcttgagctgtaatatgagttatccgcaactgtattactcttctgctattaatgcatcaaaatagaaatttctttgctttacttgatattaatgttgtcattaagatttgttccaacaattatgttatgcatcatttttccttagtgtttctcatacttactgactttctaatttgatcctgctatgttctgtatgcagctcgccaaaagaaggctgtgaagatattcccacgc

SEQ ID NO: 110809 - DNA, 719 bp, Setaria italica
  Intron number 1 from transcript Si002502m (locus Si002361m .g) derived from phytozome v7.0 (chr-ID scaffold_5; pos 43 511821 to 43512539 reverse strand)
gaccctcctcgccggagctcgagagaagggcgcaggtattcttcgttcccctcctttccttttcagtcgacggtatgtctggagaagctggttgctgagagacctgtatcatgtcgttgcagtgtgcttggatgggagcccgcctggttaccacctgcagagaggatccggctccggcgcccacaactggctcgtctatcttcaggtgacctgtttttttttcccccgtagaaaattgctgcgtttccatgaatctaaaatgcatctcaaggatgctggctgaaatccgcaagcgagctgagaattgagatggctaaccgctaacctgtgtgacaaaattggttttagttaaccgagttctttccagcgatgggatagggatcctattagaatggagacactgttactgattttgtattacaaatctcagggaggaggatggtgcaacaccacgaaaagttgttccgagcgcaaaatgacggaatttggttcatctaaatttatggaagcagtagagttcactgggatactcagcaatcggcaccgagaaaatcctggtataaaagaagtttcttctggatcagattttgaattgagttgtgatctccatacctttagaatgtgccctcgcatgcattaattccaatgagtcatgatcagatttccacaactggaatatagtagttataaggtactgcgacggggcatcatttgctggg

SEQ ID NO: 110810 - DNA, 673 bp, Setaria italica
  Intron number 1 from transcript Si037770m (locus Si037770m .g) derived from phytozome v7.0 (chr-ID scaffold_9; pos 29 510506 to 29511178)
ccggaaaggtatagtgtagatttttttttttgctagactgctggtgctgtgtaatgatgctctgaaagtctttagtctgtacttgtaatgcaaactccgaactgcaatgctctgactaacttaacatgaatttatgaacttgtaatcttgtagtcttgaaattgttctgccgaactgcaatgctctgactaacttaacatgaatttatgaacttgtaatcttgtagtcttgaaattgttctgtacgatgatctttttccttggaatgatgttccgaagtttgaacttgtaatgctattgtctgaaccatgacactctgactgaacttgtaatgctatagtctgaaccatgtcactagatctgtccctataggataagtttataatctctgtacaacttgtttacttgtcatcaaactttattgtgcagctggagctttagttattttattctatcccctgtccagaaatgcagtagttgtaattagcatataatgtaaacttgtctttcttccagaaaggcagcttgctgcatgtttattatcgtggacttttgacctgtgttgcttgacggcaagctcatttctgatccactcatctctgactgtgactctattctttcttgagttttggtgtgtaggtgtagttgctggtggagctgaatcctggagctgc

SEQ ID NO: 110811 - DNA, 620 bp, Setaria italica
  Intron number 2 from transcript Si000417m (locus Si000413m .g) derived from phytozome v7.0 (chr-ID scaffold_5; pos 62 14059 to 6214678)
agctgttgcgaaaaacacagcagttgcagagggtaggtctatttctgtttcattcgtgcagagttttagcatcaccagaggcatgttgttcttcacacggtgctgtttccatcgtattaaaatttaagcatgacatgtacctgcgctgctactgaaaattgttaagcttagggtgaaatccagcaagttccagcggagcaaaattcaactggatctgtggttggtattatcatgtatcttgaaacgcctttccgcccctgttctcttttactgaaatggcaaaaccatgataccacggcatgcaattttttgcttaaaggattaacacaatcgagatgttttattcactgcaaaattttggatatggtactttcattgactagagctttctgtatggtttatgtttctattttcaaacactgccaacaggtacattaatttgaaagctattggtctgtactctgtactgtaatcagttcaacttgtctcgtgaagtcattatgaaaaaacacaactcttgcttaacatgtaacagctagaattatacttccccgtcatatttgtgggcatcaatcttttgatctggaaggtgcttacttttatttggtttcagagggaag

SEQ ID NO: 110812 - DNA, 494 bp, Setaria italica
  Intron number 2 from transcript Si002604m (locus Si002604m .g) derived from phytozome v7.0 (chr-ID scaffold_5; pos 35 987184 to 35987677 reverse strand)
agaaggtcgagttccgcggcgtcgccgtcctcaaggttgctgcgtttcctttgccccacgcgccttatcagttacaggctaatactaggttagcgcaactgcaagatacctatacgcacaagtagcgatcggaagtcaggatcacgtgttggtagaaatatcgtctcctctacctctttgctttacgggattcgccactctcgtccccttttcctcagttttcttgagcgatctcctttaaccctttcttttatggctatggatcgtgatcaaaatcaaattgatcgttttgtcattttcacccaaatctgatatactccaatagcaaagtaataattgcgctgatccttatctcttccttatttgcaccacaaatcaagcaaaggaataaaaagccaaaattggacaatgtcaaaagttttcagcctgtcactgacctgctactgtgtgtgtgcgtaggtggacgagcagctgcgggcggaggacgtggaggt

SEQ ID NO: 110813 - DNA, 941 bp, Setaria italica
  Intron number 3 from transcript Si038428m (locus Si038277m .g) derived from phytozome v7.0 (chr-ID scaffold_9; pos 50 69234 to 5070174 reverse strand)
ctaattccaagccataatacggtatggtatttcccccatataaaagtggtcagttttgtttgtggattctgttaggtagatggaataaccaatcttggagatgttgttatctcctactaattatttgtccctctaaaatgtgtactcgcttgaatgtctatttagaatgaaaacaagttatgaaatactgtttggtcaaggggatagaatattaatgccttgcaatcggagtgtggctcatttttttttctgcaatatgtgtggatcagatggttttatggtactatttcagatgaagggaacaagatataatattatgtctagacattctggtgttgtctgtgagaaacaaatttttagctggctcattaccaatcagctatggttggtgattggttggaacttgtattttgcatcaagcaatatatgacttcacactgattttaactaattatctagaattttcaaggattgaggaagccaatggcagtaacgataacattgttctttatcttgcaccaataggctagactttatggaaaatgtcatacatggtaaattgaatttggcaggacagtgttgttagggcaagcatgtgaataatttatttcgaagctatgaggatgagatctcaacgccttaagcttctaaacaactgtactgcaacccaagaattaaggtagtataaggtggctgatgatgcagggctttttggtgctggtgttagcataatgagtatccctgtcctagatgttgctaaggatatttgatgtccaccaatcatcatgtttgattctgttcaatcttttttgtattgccatgatattattttctcacataaatagcacagctagctgagttaacaacagtttacatagactcatgcggtattttcttcaaatacagatccaggccagcaatcccaagagcaagaataggcg

SEQ ID NO: 110814 - DNA, 450 bp, Setaria italica
  Intron number 2 from transcript Si004461m (locus Si004461m .g) derived from phytozome v7.0 (chr-ID scaffold_5; pos 84 44651 to 8445100 reverse strand)
cattctcctcgtcgcctacttcaacagcggctcaggtcggttaaaggctctcggttagactcgcaaacttgtttttcctaattgatgttggattgtggaaagtttataattgctaattggcgattagagcgtggcttgtgacatgtacaaattgaattcatagactagcgagaagagcatggcgcattacttttcaaattaaattcatcaattacttgtctcctaagtcaatacttcatttgacacacctacgatgcactgctgctggttgtttgtggagagtaataatgcatatgtattatcacacaatgttgaaagcaaagtgactgaatcaatacgtcatcagttggcaccaatgaattatgattgaaatcttatcctttactttttgtttgactctttctccaatggacaggtgtaactgttacaagcagagaagctgttagcagg

SEQ ID NO: 110815 - DNA, 1023 bp, Setaria italica
  Intron number 2 from transcript Si035472m (locus Si035472m .g) derived from phytozome v7.0 (chr-ID scaffold_9; pos 54 047717 to 54048739)
cctcagttcacccccgtcaatccccagcgaagaaggtaattaccgccattctccccgtaattttgctttacggaattgctaatccctctacttcgccactactatctgttccgaggccacacgattcttcgcactactgtctgttctgatttgggggttctggatctcctcctgacctgtttgggcaaatccttaaatttctccaatataagaggttcttgaaggattcctttccgttacggatagggtttttgattagcgcaagaggcttataatctctgttcgttgttcactgagtcgagtatggcattctgattgtgcctagctatcggtaccccacaccaatgttcttctgtcattttgcgttaacgctttgccggcgaattatcaaattatgtctttgattcgagtacttgggctggacaataggttcccgttggatatacaaatgcaacctctttctgatttcttaaaaagttgcaggctattgccgttacgcactgaatattggttctgtttgtgtccccagtttattaatcctcacgtgctcttactgttccgagcaaatcagtacccgttagctttctaacatcagaagtttcgtcttttgctgcagttggagatctttaaaagctaaaattccttcagatctgaacccaaatacgttcgagtattccacctaagttgccttctgattacagagtagcctgggcctaagggttactttcaagttttatctgcttcagttctttagttttaaaatctagaaatagcaaccaccccacctttcagttttacatgatttaataagttctgctactgcgagctcaaaatctccaatgtaggtccaatcgttttagctatgtatcgaatttatgagtatcaacttgacttaggctgaactttgtactgttattcttttacaagggtacaagtgttatttgttcacacaacattctttctgattgatcattgaacctatatcttttttctgtgcgtagtgtagtacttagcacatctgca

SEQ ID NO: 110816 - DNA, 685 bp, Setaria italica
  Intron number 3 from transcript Si034547m (locus Si034547m .g) derived from phytozome v7.0 (chr-ID scaffold_9; pos 17 167706 to 17168390 reverse strand)
gctctgaggaagactcttcagattctgaagaggaggtactaccgttcttcttttgtggttcactcgtccccttctgctatactatgccaaaataggttgcacgatatgagtactgtattgtttctattgttgttattcgctgcgtgctattggttgatttacttttattccttgaaacttttgacagtcaagcttgcagttgtggtaactcatatttacccattgcagatgccttattgaatatgaggcaagatttaatgttatttttaaaacaaacaattacatagaaatctatatgccagcaagcaaaaacagtaatccttgaggctagtattggttggtatctgtatgccgttgtcagaatatctaaaattgaggttaatttgttgttagaacaaccttgacattcgttcgttgttagatggttgcattgtagtttcatgctgttaatacctgtggtgtaaacagcaatcgtgtctaaaaagcgacttagttttgcacctttttggatttttcattggtatgcacgacagagaatgttttatggcattggtgtcctcaggcttaatggtaaactagtgtatgggtgggatccttgtattcttttgatttctattttcaacttaatagaaaaagaaaaatcattgcaggttgaggtccagccaaagaaggttactcaaccaaa

SEQ ID NO: 110817 - DNA, 759 bp, Setaria italica
  Intron number 2 from transcript Si002445m (locus Si002445m .g) derived from phytozome v7.0 (chr-ID scaffold_5; pos 43 292706 to 43293464)
agttcttcctttctgtaccaggctcttaaaccaaggtttgtttcctttgcctccaggcattattagtgttactggtttatgtatttttttgttactttaaccattttgtttgttaatggtgtgatacattcattatcacaagttgctatgtttagttttcttgaagtcttttaggttagggctgttaatcatgcattcctgtgaactttgatgattgcctcagcactttgtcttcttggattttctgtaatcatatcatactattgttgttcagaggagttaattagaggattgttttgactggattttgttgttgattcatttttcaaatatcccaacatactattgcctgttactttatttatggttataatagggtaatattccgttgagttctggccctaaacaatatctttttgttcacatagttgacttcacactctaagaaatggctgctgttatgtcaaaacataaatttttatcttaagaatggtcattgtccagcttatgcgtatcttaagaatggtcattgtgctgcttatgtctatttttagcaaagttgaggtgtttactatctcattggcacagtgcattagttcatgtcattgtacaaaatttggaaatcccacatacgttgcttttgccccagtttagagtggcatacaaagtattaatgtcattattatttccaacttatatgtatcattgtctaattgagttaacgctctatttaatgcagagattttgcgggcatctact

SEQ ID NO: 110818 - DNA, 1017 bp, Setaria italica
  Intron number 1 from transcript Si004750m (locus Si004750m .g) derived from phytozome v7.0 (chr-ID scaffold_5; pos 94 71333 to 9472349 reverse strand)
ttgcggccgtgatttggggattttttttaatcgactttgagatattgcaacatgatttttgtgatgtttcgatatttcacatgcgatctgcgatgttgcatcagtgatttgattgggatgaaatgtttcatgcatcgtcagttcgatgttgaatggtttattttttcatgatgttttggtatgttactttggatgttgcacaacatttttatgatgttgcaatagttagtttgggatgttgcattttttccaatgcgagattgaatgtcgcacgcaacatgatgcagatgttgcggcggaattttttcatcatcaacgaatcactaagaagttttttacacgttctttgatgttgcaaacgttggttttcgatgttgcaaatgttaattttctatgttgcagatgctattttttgatgttgcaacggactatcaaagcatccgatagatttgactccgtccgaacattcgagcgctagcaactccggaagcgagcactgagactacaattttagctggattggtcatcgggcggaaaagtgtagctggttactcggtgagtccctatttcctccagctggccaacatcatctgcatgatccatctcatgcttaaggcgggtctaaagtccagtcagtagaccgaaacttgctaattgctaaatgtctctatcgtgtaagggtgtgtttggttggttgtatcatttgattcatgtatgaaatgattcaaaataataatgatccttttgtttggttaggtgaattgaatcaactcatccaggatgaggccatcccacttaatacattattctactaattagagtgaaccatatggtacaagtaaattggttgaaccacctcattcaggatcatccatgcatgcatcatgtgatgcatgcaaccaaacacaccctaagtatcgaagaaaaatctcagcccgggatccagagcactcgcagctcgtgagactgctgcgactgggagggtgttgtgtgcggtgacgacgacggctacgtgat

SEQ ID NO: 110819 - DNA, 806 bp, Setaria italica
  Intron number 1 from transcript Si000192m (locus Si000192m .g) derived from phytozome v7.0 (chr-ID scaffold_5; pos 28 735343 to 28736148)
acgtcggcaaggtgcccaaggagctcaagggcgtacgactttgacataacgtgtttctgtttgattttgcgtgcctgtatgtactgcttagcattgatcttaggcaattaatttgctgctaggaaggttacaggattgttgctcatagtttgctactagttactcgctactactgcactcaatactggctaggaagttaaggtgagtagtgttgatgtgaatgtgaaaaacctgacgattgtgtctaattagggtccttaatcccattatcgattaaggaatgccctaaaaggtacaaagacattatctaagaagattccatttatgtttctagtgtagcatatggcagtgttgcgcccagaaaatttgcctaatgggtgttgttcttaaaaagtttgcaatgatcctttcctcaaataacatccttgctgtgccagtgtatcaaattttgtaatggttttcttggcagttgcatagtttaattaattcccaaggtttggtgcgctgatttgtaaaaaatcttgtgagtttagttaacctcactcgttgcatagagtccctgcctctgacatttggtagaactgtagagactaattagatttttttttcccaatcttgaggttaagtgtgagattctagagattttccaattgtacgtcttttagtttaccatgtggtgtctcttggagttggaatttgtcaggagattttatattcgtcatatttctgtgtttgaaatggtgcgctagtcatgacagttaatttgacatccaaagcatgatcatatttttctcgtgtttcaggaa

SEQ ID NO: 110820 - DNA, 1023 bp, Setaria italica
  Intron number 1 from transcript Si037084m (locus Si037084m .g) derived from phytozome v7.0 (chr-ID scaffold_9; pos 36 711336 to 36712358 reverse strand)
gggcgcgccacgaccccacgacgcccaatcgccaggtaagcgatttctggtgctggattggaaccaaaatttaggggattttgatgcgaagttacgaaattttagggggaactgctgaattaggccgcctgctgaatttggttcgagagaggcgctagaagtctagaacagatagcttatgttgcaaactgaatgagataaaaaaaaaattaaaaacgaatattcgtcgcctgagagattcgaactctcgcggggaaaccccatgtacttagcaggcacacgccttaaccactcggccaaagcgacgcttctgacagctctgatcgctgtggcctgttcttgctcaggaagaacaaggatattgtctgttgcagaagcagtgtctcggtgtaaaatgccagctgcaattctaatcctgatcggccaaaaatggctggtgtagcactagaattctagaagtaagattgccatggttggtttcagtggatgggtaatgatattcatgccacctgcgctgcttcatgtaagtggggttgttgttggtcagcctcagccatctctggctcccttgagcccagttatgttattattatactagttgattgcaaagttacagcagcccttatataatttgaagaaacgacgcaccatgaactagtgtgggagtgccattgctagttcttgtgttaagctaacgagtagtttgatggttgaccttgagattgagctgcaatatctagttctgatttatgttgccaaaatgtttttgccaagagtgacgtagaaacacattgatcagtatataggttgatgatgtactaacacttcagcccatccaacttctgcactagataagcttttgtcaagtattcacttgaatctctgaacatttgaacgaccatacattgtttgaatatagcatttgaacttgtctctggacaattggaaatctcaagtcaagtaatttttttgaacatgtttgacaagaattaattttctgacggcatacttgcatgcagggca

SEQ ID NO: 110821 - DNA, 773 bp, Setaria italica
  Intron number 2 from transcript Si037689m (locus Si037689m .g) derived from phytozome v7.0 (chr-ID scaffold_9; pos 22 467977 to 22468749)
gcccaaggaattcctgcccctctccaagcttgaaggtaaggtgcccatgtcttttcttctttgcttcagttattgagttcttggcacccatcctaggttccttttgctacaagttgttcccaatttttgatccccttccgagtacgcggaattgaggatatgtgcaaggcttggcgctgctatcttaggcctttatgcttttgtgccaatacaattgcttgaacagggacacggactgcaattgatcaaacaggttcgatatgttcccgttgattcagatttcagtggacttagtgttctcaaatcaaccgagaagttgtttgctttgtatggtcaaatgctaactcaatgttcagtatctatcaatgtttccctgaaattatggttcttcagcaacatctgcattgctattctgcaattgggtcatttgtctgaatgtgttagcaattgctgtgctgcgtagaaatatcaaggtagctttttgagagcacttcctttgtctactctgttggtggaatattcttttggagccataaccacaaaattcatactggaattggtgaaagtttgttaacgaattggattccaaacatgctcaaagtgaccgtaaatagtaccattaggattctgacttcttgattatgtggtgattaactttcaattggattggatccaactacagcagccaaccgtaccgatggtatttagagagtctgttaagctctttgttctgtacctgcttcgttatgtgacttaagtacctgtttttgcag

SEQ ID NO: 110822 - DNA, 914 bp, Setaria italica
  Intron number 3 from transcript Si004544m (locus Si004544m .g) derived from phytozome v7.0 (chr-ID scaffold_5; pos 34 928855 to 34929768)
gctgctccatcatcgacgacggcctgatccataaggttctttttttgcaaatgtttatcctttcctttcttttatggcacggtttgccatatgtgcgctttttgtttaacttttggaccccgtttgtgcggtgaggcttttttatgattccagtgacagactgacaatccacaattgaactgtctgctgtgaaatttctgcatattccagtgaaatttgtgccctccaaaaagtattgatccagtttaacgaatccataacgtggaaaatgggaccctcaatttgatgttagattattccttttagtattagttgtgccggcgcctcccagattctaatcgatggcaactctagaactttgctgggcagtagcaaatcttgaagttggcaaaatatgtgtttccaatgctttttaccatgcaagaagctccctgagtcaattaggactagtttcctcagtttgcactccagtgtccagtggtgttctcacactttcctggatggtacttttggtgccattaaacattttggaagatacttttagttactttacggagagcagaaaggtaaattgagtaattgaccctaacatcttttaagagaagaaagttgaacaagggtaagttatcaatccttgacaaaaggtatcatgcactaaaatggggttgggcattgaaagtagttgaacattagttaaagatgccttgactggcaaagtcttttatttatccactctacaatactttcagtgatggtatgctaaaagcaggatagtctctgccaggtgaagattttatagtggataatgtaccaatccatagtattgtttgtttgttggccataaatttgtgaaagattctacttcttttgtacgagtagctgcagttggcattgttcaagacgccatctgggaa

SEQ ID NO: 110823 - DNA, 975 bp, Setaria italica
  Intron number 1 from transcript Si000704m (locus Si000704m .g) derived from phytozome v7.0 (chr-ID scaffold_5; pos 43 304041 to 43305015 reverse strand)
acgagttcgttatcggccaggccaaggcaaaaaaggtgccccgtatgtccccaattctgccttcttttttcataattggtgcgaattttggcttaatgtgacttagtgcacttgtgagcgaaacaatactgaggctgtatagtgcggtaacttaattctgcaatttaacttgagttcgaattttgggactcctgaaattatgaataactgaagcaatgcagaattgcattgcattgcattgtggtctcgtttgtttctgttttctggtttgaactgatggaactcgtattgtgtgatctagatctctgatggggcctgccaaaattgatgagctaatgatgattgaattctgcatatgtgtcactgtcagtgtgtcacttaacgcaactaccacattttcatcatcctatgctagtactggcactgtgccctcttttcaagtttatggtcttaaagttacattgtactatagtagcttcacatcttgatgagatggattttggcaccgatcgcaggagttcctaaacttggttgtggaaatttaacatgaaggctaatggttttattggtacatcaattgcttgacaaattattatcaacacagctaattgcagagagtgatagaatgttgaaatcaccaaattatgcagttcaattgcatgacttgtgtaaaagatatttctttgcctgtggataagtcatgaactaaattggcaggagttggcagtgttttacttatatttgtaaaacaacctaaaacatgtttgatgtgctagttttttttttgttgaaatatcaaataagtaattggtgacacatcttgttaaaattgactatgatcctttttgctctttgataggagttaagtgggcactgtgatccttttctaagagcaaagtatagtttccaattacttattgcaaataccttttccttgcaggtgctatcagtagctgtatacaatcattacaagag

SEQ ID NO: 110824 - DNA, 973 bp, Setaria italica
  Intron number 2 from transcript Si035743m (locus Si035743m .g) derived from phytozome v7.0 (chr-ID scaffold_9; pos 48 55924 to 4856896)
ggggtaaggcgcttacgtcacgtcacgtcacgccctgactccacttacggagcttgcacgttcgcagttgagctcatgtgatccgtatgtatctccgtgcggttgattaggtggaatcatcggtactggggagtttctcttgactacaaggcttagttgagctgcatgatagttatctggtttagcagggtgcagctagggctgtatgaaaatttagaaggagcagaagattttttttgttttttgaaaaggaaggagtagaatataaatggcaacaaatggtgaggcaataccacaatagagcccttattttcaacgttgtagactcatcatacccaaccttctcatagctcatttatccatttttcataaatcggtctgagtttaagcatttacttttataattaaggcacagttgaacttatcatctcattgagaatctgagttgacgatggccaggcatgctaatcccagtaacttgaaatccatactggaaatcatatatgacatgccactgagtggtagttgagacttagtggaatgcactttattatttattgacacctgagaaagcgcactgtttttttttgtcttggtgaagaccttctaaagtatgctatcaattaatttttcttctatatgctgttttcctagtgggtgttgaagtttgaataagatgtcttgataaaaatgcaactgtggctactttgtttgctgtcttgtctcttctttggaaatctataaagaaaaggtgattgcattttcagtaacttcgctacagcaattttagtttagaattcatgttttctatttccataacaaatctaagaattctcctttaagtctgtccttttggtttgtttacatctttttatcgatatttctcaagcacatagtagtttattacaccttttgcgtttctatggagataatgctttcctaaccatcatgatatctttgaccagtgaacagg

SEQ ID NO: 110825 - DNA, 663 bp, Setaria italica
  Intron number 2 from transcript Si001184m (locus Si001022m .g) derived from phytozome v7.0 (chr-ID scaffold_5; pos 44 703736 to 44704398)
ggagaagctcatctacgtcacctgcgtctacaacggtgagcttgcttcctgcataaccccatacgggccataccggcgtcctgcaactagctatgaacggaaggatcatgcgcatactgcacatggacacatctaggtagatcttggacgtctaattgggtgtttaggagctctaattgggcgttagtggagtacgaggagtgaggtcaggggtgcttaattattattccataaagtttctttattacgggttgttaggatggaaagggacccttcaaaatcaacctgaaattaagtcaagacaaagaaatattctctgtgggcttagatccccaatgaccagggagctaaattaaataggatttttctccatggcctgtactagtgatatatgttttcatagtttaagactatgcctattagtttttgatattaatcatgtgccttgctccatggcggaaacagacaataccaattctgaaacagtttcggttagtggcagaagttcacatggtttctgccttgggaatttccgaagaccacagaaatcatgtgagaatgaagagagctgtggatcttgcaattgttggaggggttttgttcttatgacttatgtatgattgtgcaggtactggaattaacaagccggattaccttgcgacg

SEQ ID NO: 110826 - DNA, 963 bp, Setaria italica
  Intron number 3 from transcript Si000599m (locus Si000599m .g) derived from phytozome v7.0 (chr-ID scaffold_5; pos 25 167806 to 25168768 reverse strand)
ccaaagttgacgataaggtgactttgaccttgccctgctgttttctaatcatttgcaattaccattttatgccctttcctaacatattttgggttcagttcttctggttcatggcccttctcgtaaggacgggtaattcaagaaattgacttaatatcttttagaacattcaggcttttaaaatcttgcccttcataactctaactaaggggctgttcggttctcgggctggccttgcctcgcctcactggcgcaggcaacgaggagcttgccaggctcggcaagccaattcggctctcctactttagcaaggccacgagtgtatgaaccttgcccacacaaaccctagagaatcttgcctgacatccaaacttttagccttgctcgatctcctggcttggcaaggccacacagtggcaagcaaagaaaccaagcataccctaagttcagatgctgatgaacttacctttttgtccaacaaaactatgttcagagttctttattccattatacaaatttaaaacagagcgtgtaaggtgacagaactgagaactcagaatcagatgaaacatccaatttgaagagagggaaggtcagactagagactcacatgagactgaaactatgaaatgacaacaaataactcacactgaagtagaaacaacaaaaaattgggtagcatgccgacaagttatctcaacggttgtagtgcttccattcaatagttcgatctatttggcaactgcaacaacttatgcaatagtttctttcatggctggaatgaaaggaaattatacaatttattaggcatgtagtgacacagttaattcagtctgcagtgcgccagtgctctgttcgagctgcaatcatttacacagtagcatactccgtgcatcctacaagctacataaataattccttttcccaggttattcactgcttacggcttctaaagagatttga

SEQ ID NO: 110827 - DNA, 620 bp, Setaria italica
  Intron number 1 from transcript Si000384m (locus Si000384m .g) derived from phytozome v7.0 (chr-ID scaffold_5; pos 29 046350 to 29046969 reverse strand)
cagagcgcgctcctccacgagctcaacaagttcaggtgcggtgttgactctgagaaatgggcgaatgtagttctgattcagtaaattgcgtggtgatttggacgctttggatggtttgacttgacatcgaaggaatcaatcctaggaatgttttgacaagtttgtgggtaggatttccaacttttgtgatgttgagttgattctgcaccctagatatacctgatatgctgatttgccgatttcaaaaattatcaagaaacaatgtgaggagtggctgattattcgtactgttggatcattgcccggagaaagcacaaatcatggatatgctgaaatttctagccaaaccgtccaatttctcttatggttggagccctggtatctgcacaatcattattagtggttgtattattgacacatgctgcggagttcttttgtgtgctatctttggtactatttagacatttataatggcaatgggtgaaacaattttgttcttctcttttttgtttgcactgaaaatcgtaagaaatcctctacttagaaactacagaatggaatctttctccaacttgatttctcattttttggtgtgcattgaaattatggcagcccggaag

SEQ ID NO: 110828 - DNA, 954 bp, Setaria italica
  Intron number 1 from transcript Si037475m (locus Si037475m .g) derived from phytozome v7.0 (chr-ID scaffold_9; pos 47 626267 to 47627220)
gctccacctccccgtggcctctccgcaagctccaggtctggatcccatccgggttatccccctttaggaaaagttccaatctcggtaaccagtccttgatggattcgtgttcatggtcacccttcttcatcccagatgcggtattaggtatcgtttattttggtcgaactgatctgtctttagcattacgggtttgtttcatacacgttagaactactgttatgttttgggcattctagagcttttttactgagttaatcctattccattcacagtgagaaatcatagaacctatccattgatgcgtcctctatctgtattatctgaaaagcaccacaagttaggcctgccactggggagggtatggacaaacccactcttgttcacacccaaatccaaataattattattcactccttaccctccccaatctcaaccatatccaatggataattaactttgtactacatatatatacatatccaattgattaattatatgaagggcggacctggcgcaatggtaaaactctccacttgtggcctggaggtcctgggttcgaaccagcctctttgcagaattttaaaagaattttgcaagggtaaggctgtctaggaatcttcttcctcagaccccaccttgtgtgggagcttttcgcactgggttacgccctttttttatccaattgattaattataccctaccctccctatttgtaatggttatataattttctacccataccctccccatttgaagtgggtgtggatttggggagagggtatggatacccagtggtaggcttaccacaagtatccatctttatgttttgttggattaacaaagaagaaatttgaattcatccttggatccatgcttttgttcttttggcgtcacattcttcctgttgcatatgtagagtttcacaccagggctgtggtcgcaatacaaagt

SEQ ID NO: 110829 - DNA, 713 bp, Setaria italica
  Intron number 1 from transcript Si035222m (locus Si035222m .g) derived from phytozome v7.0 (chr-ID scaffold_9; pos 37 109288 to 37110000 reverse strand)
cggcttcctcttcggctacgacctcggcatctccggttcgtcccggtcgttgccatatttacttccactgtgtttatctgaaacgatgattcggtactgccatcagtagtaaatcgagatgaaagattgtttgattaattgagatggctcggtcggggatacggggccggcaagccgacgtacgaagtctgtttcagttaaggctttcttcttcaccaatattgcttgccaactttgctgctcctatggtctagtgcatttcatctctgagaagataatacccttctcctctgagtgctttccgttgtttcctttttcgttcactttagcacatggaaagaaaaggtttcaaggaggaaagtagtactagtgcaggttattttataagcagtagtgctatgcgcttgaggcctatgaaatgtggctttggtgtatgatcatctagctaatatggtacaagttttgcaaactgtgttcatgaaaaatgcttaaagttggacatgtctatcagctgaagtggaccagagaaacttgccaatatctgtcatttcttctttttgcatgacaaaacggtggaaacaattcacaggatttttttttcatagaattggtgaacaattgacaatatcctaaattctatgcgtgtatcccaaattttccttaaaattcatgccacgagcttctttgtgtgtgtaacaggtggtgttacctca

SEQ ID NO: 110830 - DNA, 606 bp, Setaria italica
  Intron number 3 from transcript Si001912m (locus Si001426m .g) derived from phytozome v7.0 (chr-ID scaffold_5; pos 44 53619 to 4454224)
ttaaccttatcggctgcttcctggaacctgctactgtaagatccattacttttactttttctgagccattttcaacaataactagacacatcgatattgtacgacattaacaatttggatctgaagtaaagaattatagctttgcctctgattgagtaccttcttctcactaataataatgacattatttggtacagtgtaatgaggtgttgttattcatatatatggagattattccgctcatttctgccagcctgcattattccctgaaggcctgaaccagcgttattaagttttgatattacatttgcaattatctgtgaacaagcacactgtagccataaagtagggacactttattgacaatctagcctgcaaaagataagttccaaataatatgttgtgatccctgcaatatgtggcatctattgctctgatggtgctttgccaataagttgctctattatgaatttatacattcaaccttttcctgtttgatgagaggaaatttacccatgagattacataagagcttcgttttttgaaatatgtgtcaattttaatattttcattttatttatgttgcagctgccgacccagttttac

SEQ ID NO: 110831 - DNA, 434 bp, Setaria italica
  Intron number 1 from transcript Si000582m (locus Si000582m .g) derived from phytozome v7.0 (chr-ID scaffold_5; pos 36 323852 to 36324285)
ggcgctccctgtgctcctcttcttgctgcttgttggtgagtcgctgctacctcgtcgttcttgactgttacgattcttcagttgctcgcttttgagtattgttggcaatgtgtgggccgggagatgccttgcttgcttgaggaggacacgattcgattcttcttgttctttggtctggatattgtgcggcatgttcttagcattttgggggagatgttccgtttgtattgcgccattttaatctatccttatactatgtttatttctttccatcaaaaatcaagaaccaaagattgatcactgtatttgggaaagggaaaaggaactttcgaagccaaatcactgcattgtcctctgtttgcattcgtggtaatctgaacagcgcatccgcaattgcagggcattgtcggggcggcaagattggcatctgctac

SEQ ID NO: 110832 - DNA, 571 bp, Setaria italica
  Intron number 3 from transcript Si036943m (locus Si036925m .g) derived from phytozome v7.0 (chr-ID scaffold_9; pos 72 80043 to 7280613)
atcagctgcctcctgaagcgcacaaacaattatcggtaagaatattttacattttatgacatgatcctcatttcaagttacatcaaattcagaagaaaactggccattttattggattaagattacttttgttcccaaactgaagagctagtttattgcaagttgtttttacaaacaagttattctcgctatgagagtgtttaggggttagctggttagggcagttgttcacataatcacattcttcttatcaagaaaatactcagcattgcaaacaataagaaagtagtgtatctttaacaattctaaacaaactatgcatggtgacaatcagcaagaaaacttctaaattgggcagttaatttgaatcagtcctattcagcaaaatgaaaatgcatgtgctgtctctcaagtcacttacgtggaagtttactttacagtccatttgatgatctgcgattcattttcagatacagcagtacttttcttggatatgtactgatatacttttttttgcatcttgttggtacaaaaagggagcaagccccactactgaatctacagtcaggaa

SEQ ID NO: 110833 - DNA, 781 bp, Setaria italica
  Intron number 1 from transcript Si002970m (locus Si002902m .g) derived from phytozome v7.0 (chr-ID scaffold_5; pos 43 586286 to 43587066 reverse strand)
tggactcaccctgcgcttgcactggcacgctcaaggtgaacgctctcctctgtttctctctccctcccgctctccctctgtgcaaggttccttgcctggatgttgaggaactggcgttaagtttagtggttggtaaaaaatcgaagtagaaatatgatgattgtttgttatattctttatggagctggatagatttcaagatgtaagttctgctctgcttgaatttctatttacactttcttctgcccttctggtcattacgtttttctttggagatttcatttttgttatgttgatgttatatatgctcatcgtgctcctttttgttgaattgtctcagtatttttttattgtggacatctctgatagctataggcttggcactctaggagcatcgaagttctattaagtgattgttttatcgcgtcaactaaagttaaaacagtgatgccatgtttcatctgttcatttgattgcaaagtgctctgccagtgtttggtttgtctaaacagtgtcctcaggattcaatgaattctaaaaagagcgttttagttgttggaaacattatcttcttttctccacacatatacattcatccaatttttcaatcgctagatcatcattatcctaatgtacagctccccattttcagttgttcaataagctttttcctccttgttgttgtacacgtgacttaaggagtacctgttggagaaaatgctgatagtaatatggtatgttgacttattgttgttggttgtatgcagttcgcccacaggaa

SEQ ID NO: 110834 - DNA, 742 bp, Setaria italica
  Intron number 1 from transcript Si000379m (locus Si000379m .g) derived from phytozome v7.0 (chr-ID scaffold_5; pos 41 127103 to 41127844 reverse strand)
ctccgctcccggcggcgcgtccgggtctcggcaaagtaatgcacccttcacacttgaccctcacatagatagctagtgttatattttgagccagtgcattgcttgagttgcttgtgccactagctactgaattgcgctgaacttaggagcggggccttgcattattatttatgacaaaacttaggagcgactaattcaaaaattttatgcagcaggcctgccatttgtataatttatccatgaccagaaaacatttttttagataatggatgaccaaacagcatataaagatgtatgccactgagctccatttctacacttattgggaattaatactgtaccagctttatgttacgaactagaatagcaatggactgccgtttctctattatactgtggttgcagcagattgttttagatagatgtatttttcccaattcatgctgtgtttttggaatatgtatagttgttaaggttcaatcgttcatctagctaatccaatatcactaccatttatagtgggtagtaccatactctgaccattacatgatgttctcccgtcttcttaccttcattcttcaagatgtttatgataatttctggaatggtgcatatggctattaaaaattgttaccactatcaatcatttcctgtaacaataaaaagtgcatggaaacttactgttggaattccttattcttcttcaggataggattgcagggcacaaaagaactgtctgaca

SEQ ID NO: 110835 - DNA, 416 bp, Setaria italica
  Intron number 2 from transcript Si000733m (locus Si000733m .g) derived from phytozome v7.0 (chr-ID scaffold_5; pos 46 728207 to 46728622)
gttccatcaacctgggaacctgctgccttggcaaggttagattcatacttgaacctacaattttgaaactcattgcataatgtaaaagaataggtgattgaacgtaagatgaaaactcttcgtttcttcttcagttcatataaggctttacttcttctaactctgttttccatagttctcctgactttatccggctcatttgttattggacagctggtaaatctgtgtgccacacctcataacctgtcagctaatgccattttctgtccttactaatttcgtgaattacatgtaaataatatcagcttaccatttccaccaaaacattctgaattcaaaagtcatcaatacaacttaaagtttaattgttttattcttcaggttcatcaaaaattttggcactcatatagttgttg

SEQ ID NO: 110836 - DNA, 813 bp, Setaria italica
  Intron number 1 from transcript Si000231m (locus Si000166m .g) derived from phytozome v7.0 (chr-ID scaffold_5; pos 13 886143 to 13886955 reverse strand)
cgcgctccggagagtccctcgactccctcctccccgtgcgtacccaaagcgttacggattctcgcatcgcatgctttcagtttcagtagtgtcaaaacgaaaatggaattttaccacattatgatatttgcagtctgtgatcaaggacacatcacaatgtttcaaattgtgatattacagtctgcgatcatgattgtaatgttttaaagaggaaatggaaaaaccgtgcatttctgttaactaacagcaacaaaattagttcgacgttcagagtcactgaagtatattatattgaaaactttgccttcaatttattctcgaatcagattgtgggggtacgaggaacacgactgtacataaaccaaacaagtagatcaggaaaacagcacaacagagacagcaattgggtacagcaatagcacctagtaaaaagtaatgtaggtattgtttttgctaatttatgtaacataagaatagtacctgcaaatgtgaagttcaacatacactcttgacacgtaactgatccatttttcttgagagatggagaagcttttgatgtgtttgaaaattatctgtgaagaaaaacaactctcaccaattagatgaaccaactctcaccgagattatgtattaagatgcaatattcagaggataagtaaatagagtagctcaatattcctttatcatttgccactacaagataatcgaagacatgttaagcatggcgactcatgtagagtcacacctcaagatgcaattttcgttattgtttctgcaggaagcgtttgctgttgtgagggaggcttccaagag

SEQ ID NO: 110837 - DNA, 780 bp, Setaria italica
  Intron number 1 from transcript Si037488m (locus Si037489m .g) derived from phytozome v7.0 (chr-ID scaffold_9; pos 51 046074 to 51046853)
actccacaaaagcttcagaccaaaatccaaaacaggtttgcgttatttagttctgtttgctgatttgaattattcaatgtaatattgctgcatatcttcctacttgtctctgatctttgctgtcataaattacaatgagcactgtgcatcttttgatttttgaacatgctgcaaggtctggttaaagtgcaatatataaaattttagttattgtggtcatggtgataatctgaattctggtgcaactgctgattacatctattgactaatttatatgcattaaccctgctatgtggttttggacaaccaaaatttcttaagagaagattgttaaatcttccaaaatttgtgatcctgcatatatgttgaaaagactgttataatgatctgctccaaagatttctgccttatggattcataatctcagtggtctcatgtaggcggacccaattatgctattcatttagccaaagccagaagtacttgtagtgttacaattacagtgtcattatgttaaggagaaataaaagtccggtacgaccgagaaaaaaaacccttcatagtccctggctcaacagaagcgtatattgatttaactcttttccttggaatttaggagagcgttgtgtttactatcttccagttttccattcacatcattctgctggagaagacaagttctgtatattgttgcaccccttgacagtttactgtttacagtcagtttttttgtctttgttctcaggagggaaaagacttgtcaactacagaacatccctt

SEQ ID NO: 110838 - DNA, 816 bp, Setaria italica
  Intron number 1 from transcript Si035183m (locus Si035183m .g) derived from phytozome v7.0 (chr-ID scaffold_9; pos 45 594417 to 45595232 reverse strand)
cgggtgttcgacgcgcagggggaggagtccaacaggtgagtgaggacctgtacgcgtgcggttcgatggatatcataaaaattcaaatttcttaaaaagataattatgtgttgagatcgaacagaaagataaattaataaagtcgcttctagaagtgaataaattaaaaaccacattttccccacatttcaggataatcggtgcctttagtttagatataattaaaatttggatcgtacttcctcgcaaatactcagaaaataagaactaatcggaactgtcctctagacagacgaataatcaattaggtagtgacctatgtatgatgtccgtacttaaaaaaatctgtatctgccagctgccaatgactgaaccgtgaagtccctgtcagtgaagagagtcgctcaccaaaacttaggccaagttcccaatttgggagtaccaaagttgggagtttgtcataaatgcgcaactgtagcatttcgtttgtatttgtgaattattgtctaaaaattgactaattaggctcaaaagattcgtctcgcaaagtacaacaaaactgtgcaattagtttttgatttcatttacatttagtacttcatgcatgtatcgcaagtttgatgtgatgggaaatcttctttttgcatagtgtcaaagttgggattttgggagaaactaaacatgaccttagaaagtgaaactgtgaaaagcatcggactaacaaaaattaaatctttttttatccaaaatatggtgtgcaaaacataatgtccgtatcatactatcatgtcgcatcattgtatcagctacaaggac

SEQ ID NO: 110839 - DNA, 949 bp, Setaria italica
  Intron number 2 from transcript Si002450m (locus Si002450m .g) derived from phytozome v7.0 (chr-ID scaffold_5; pos 43 704215 to 43705163 reverse strand)
gttcacgattcgtaagtccacgcaaatcacttgtcttcctcatttggccgctgcacgtgtatcttgtgaatttcccataagcaactattagattctcccgtcagttcattcgatttagatacgtgaaccatagatgattttccaaactttttattgcatatatctgtcctggagttaagactacaaaaaaccacatgctgcgtatttaaataaaattgtcatattaagaaaagacgcaatgcactcagcaattatttgatggttgctgacttaaaagtggtggacgtttttgaatctctgagcaggagtgaacgtcctccaaatagtttacctgcctgatctgttattatgatcagccattgtttgatttggttcctgtcagacataaacttctgctgaactttttgacaccgaaatgcattggtgacagtgacagtgatagcttcggttgcaagtttaaagcatgtgtatgcattgaggttgcacattaaagtgccataagaccatttcttccaagtactaaatatctcatatactaaaatggaattgtcatattaagaaaaggactaaataaatgcgcacagcaattgtttgatcagttgttgacttgaagtggtcgatgtttagaatttctgagcagtaacagtgaacggcctccaaatagtttacctgcctgatttgttgttttgatgagccattggttgatttggttgccatcagacattaactgctgctgaaccttttttttacaccgaaatgtattattgatagtgatagcttccgctgcaagtttaaagcatgtgtatacattgaggttgcacatgggcaccaaagtaatatttagactaagacaattgcatccaagtagtcctgatagccatttcttttctttttttcttttgaaaaaaaagctgatagccatttcattatcatcattctgtctgaacag

SEQ ID NO: 110840 - DNA, 730 bp, Setaria italica
  Intron number 2 from transcript Si001790m (locus Si001321m .g) derived from phytozome v7.0 (chr-ID scaffold_5; pos 26 422596 to 26423325 reverse strand)
acgtgcagaccaacgaggaggtcgcgattaagctggtgagttcacgcaaagcgataatctatttcaatggtccccgagtcccttcgttctgttccgttatacattggtcagttaagatactttcttctgatgcgcgcagtttcgattcagggttgttaactgattgtatatcccgtctctaggaaaatgtactaaacttggtgtggagttttaacttgctgaattatgtaatattagggtattgatagcaaaagcttatctgtggtttcatatgtatgttttgtcaatctaatgctgcctataactcactttcatagcaaccttggagtatttagtaaactgtattcatgttagttccatagagttaaacttcatagatagatttcatgtgaaagaaggtgcagccagacccttctgataaatctcataatcataagcatcaatgtagtccccttctttttctttaagaaaataaaaagaaacagcatgtttggttcctatttgaaaatgatcaacttgtttgattctgtcctaaatggaacccacttcactatgttatgctttgcaaaatgattatttgtgtaggaatcgttataatgtctcattcagtctacttctcttgattatcactttaatcaactgcagggtttggactgtacttactgacaagacctttctctttgtgttttgtccaggaaagtgtgaagacaaaacatcctcagttgctgta

SEQ ID NO: 110841 - DNA, 904 bp, Setaria italica
  Intron number 2 from transcript Si001554m (locus Si001554m .g) derived from phytozome v7.0 (chr-ID scaffold_5; pos 12 953039 to 12953942)
gcaacttgttcctttgggaggtgagtgcattgtggtttcttgctgatgggtgaattggtgaaagagttggttgctagctgtgcttttgtttgaggttgatgtgaaatgtatgctgtgttcttggttagtgtcttggtgaggtgaagggttgtgtgaaatggatgtccccggggtggtggataatcaaaattgaaccaggggcttcttgtgttccagttggttctgaaaaacggtgggggttcttcagcttaggaatatgtctccagtaaaattagtttgatttcttgaaacattctttcttttttttttgctgtgtttgacatactggttaaggaatgtgtgattcaggtagtaaaactttgaacttctgtaatgattcagtctggcataactgtgtcttatgttgaagttggcaattgttttgtgttaatgtttgatctagtaattaattaagctgacaacttgagtagctattggctatgcaatatgttaacagatttgcacatttggagctaaaagctttaactgagacatcagaaactatgatattcaatgacatggcatttgtgtatataccagtttaaaatttcatgattaatgaaattcatctaggtgttttgcccacatgtatctcctgatgacatttcccaaaacagcatgatgtattttctctttcctttttcattttttctatctgaacattgatatttcagactaacttcaaatgaacataccgtataatccatgctttctttcaaagttgtgtggaatatttggcttcttttcttagtgtgtttcacaaatattagggcggcaattatatagttaatgttgggaattattccagcttaaatgactttcttttgatgatgatgtaggtggccagtggagagcttctccacac

SEQ ID NO: 110842 - DNA, 1044 bp, Setaria italica
  Intron number 3 from transcript Si002959m (locus Si002772m .g) derived from phytozome v7.0 (chr-ID scaffold_5; pos 26 10858 to 2611901)
tcgcggtcaccatcaggtaactccccttctcacactgtcacacacgcattggtaactgagcgtttgtattgatacgcgcattaaaatactgccatcacaaactcaccaacgaatgcgtccactgctgaacaccattctggccatttctttgctggcaccctcatctgaaccgcgtggtcaagtatgagggggtgctatctggctcagttgctggccaacctatctttatcttcaattgattgattaattgccagacacttagacgaccaaccaccagagccattgatacttgatcgcataccaccaccagcaaatctccaagatggctgtctgtccacggcatgcatcccaggcccctcatcctcatgccagccactgcattctgatctgatctgaaacccgaatgcattctgatctgacaaacagtatactcaacgcccccctgatcattatccaaacaagagaacaagcattccaatcaaacagttgccgtgacccggcacattccattctggcagctgtcgggtggcatcttccctgttcttcagaacatgcgttcggattttagaacagggggggctggggcctgggtggctgccaggtgggtccggcccagctgtacgttcgttaggcaagctgagccaaccaccgggtcccaatcattccttcccggcatgagatggcaagataaagaatgcaaatgcccttgcactgtcgctgcacgtctgctgtacagctctccaaccgtgtcctgcacagctgcactgttgccaaaggagtcaaaccgtccgttcatcaatagtagttgcagcacggccaatcatgcatttgcaatcgcaatgtgatagagatagagaaaaggggtggcatcagggtcaaaaaaaaaaaagaaaaattagccgaatctgttgagctcagctggtcagcaacgaccgattcatcagtagtggtaaagttaccagctaaccacctcgcacggttgctgacctgtggtacgcgtggtgtgcagagagagcctggaggtgcccaggctgaactacgagc

SEQ ID NO: 110843 - DNA, 748 bp, Setaria italica
  Intron number 2 from transcript Si037622m (locus Si037626m .g) derived from phytozome v7.0 (chr-ID scaffold_9; pos 40 5310 to 406057 reverse strand)
ctgtgggcatctccttcctaccgcagaaactcaaggttcgttcgcatgaccgaaacagttagatgcagggtgtgtgtaatgtcgtcaacgtggccgatgcacatttgagcagacacttagcgagatgattatgcttatatgctaattctcgtggtcaggtacagattgttagggtgctctgtgtttttagctttcgattggaatcctagcaatcagtctctctcatgtctttcactgttggaaagctatgcagttcggatacaccatacggcaggactcaattttaaagtcaaattactgagtctagggaatgtatgtaaacacaccaaggaaccaaatctaggttccaaagttggaatccaatctgtgcattgctctgtgcctgcacactgcatacatctgagtttttacattattttcttagtttggcatatctgtagttgtacacaccttcactagaaagattcaaaactattcatgccttaacataactagtagcactaggtgtgtctgcttccggcattttgctcatagataatcctaaatatgccatctcagtcagttcactgttaatcgtatggtttgagcagcaattgctcacccttttaatcatgtgctctcattttcttcagttatacatcgtcctttgtcaatctgccgacctgtctagaaaaaaaaacctatcatctttctttcaacaatgccttagtacatttacataaaaatgtttcattctttgtgtaggcag

SEQ ID NO: 110844 - DNA, 721 bp, Setaria italica
  Intron number 3 from transcript Si039242m (locus Si039242m .g) derived from phytozome v7.0 (chr-ID scaffold_9; pos 45 95298 to 4596018 reverse strand)
tgtctttcattcagcaaagatctccagttattacagtatgttcgtcttagctaagctgtttactttattcttcacatatacagatttttctcatctaaaaatcctttggttgagacaaagaaactagatgctacaccaatttcatggtatttgtaactttatttcgtcttgctgtgctcagttacatcaagacagtaattgtgttttgcttcgttaccttcataccgtacaacttgcaaacttttacattataacatatttcttctggagatcaaaattcctttgattgaaatgaatttgtcaaagaaagcaacataattgttgcacgtccaattaaagttacatcttttgataatgagcccctggaatgctgtctagacataagtttgtgtgacccagaacagtacggaaattgtgcatatacccctttctttattgaaattagaacttagatttcttttgcaaacatcatacctggaattcttattcttgtggaactacatggaacatttagtaatctctatcgctggaataattaaaataaaatttagtgctgttatgttcatccattttcttttctatgttgaggttgaggcatcatttaggttttcattagcttgtttctatattaatttctgtacctattatttgctcttgcggtcttagtgctagttcttgattatttcatgactatgttaatttttcgttaccaatataggga

SEQ ID NO: 110845 - DNA, 519 bp, Setaria italica
  Intron number 1 from transcript Si036950m (locus Si036950m .g) derived from phytozome v7.0 (chr-ID scaffold_9; pos 48 909227 to 48909745)
agtgcttcaaacttctaaggaggactggaggacacgttttgctcggttttacacgtgggattttcttcggttctttgactttgctaaagcataggaacgaacgagaatgaggccggcaaaacactaagaaaattgaggctggaagggcgaaagtagttggaacaaagccaaaacttcatacagcaagggactgattcaaacgcaattgtttctcgcacaactgacacaagtgccgaacaccattgatgcactcatgcacgtgtttcaggctttcagcaacctcatctgcaatcgggttggacaaggccactatttggcccagtattattacaccacggagcgtaggcccatttattcggcgtacaccgcgacggcccatttattcgccgtacaccgacttttgatccggggcccgagcgagagaactcatcatcagaagaaaaccgatccagacagggaaaacacgctctcgtccccgttccagaatttcccggcccgaaaccgaaaccacccgcgctc

SEQ ID NO: 110846 - DNA, 1052 bp, Setaria italica
  Intron number 2 from transcript Si002431m (locus Si002431m .g) derived from phytozome v7.0 (chr-ID scaffold_5; pos 10 609972 to 10611023)
gatcccgagtttaaggagggcgggcagcgtaactggtgagtgagatcctgcctatgttgctctacctctccgccaagagcccaagacccagtttacaagcaagagtaacatggaaatcttagtttcagttttggggtatgatggtgtggtaatttttttggaaggcgtaaaaactgaatgttaagtccctggatttttatatgtttggtggatgatgttataaattgaggaacgaggaggttttgcggaggtggaatatcgagtattttgattgtctacatcattagctctgtagaaccttcagatgatttcggtttcagttgtttagtaggataatgaattaattcggtggaagagagtttatctgagtagaatttttctccaagtagagagaagtcggtgggaattttgttttcattatttcctgcagtggttctgtagttttgtggctgaaaggaggaaccaagggcttggtatgcttttgaacctaagtcttaaaatgactagatggcctaacttttcataaacggaaggatgatggctatgaatatgaagttttgttttgaatttgattgccttttcttctgttaagaactcatcatactactgtctaaaagatatcttgcatacctttctctttctgtaaactggtgtaaattgatatttcttgccttggagcatgcttgctttcttcatctcaggagctgtgtcaatgattattatgccttgttcagtcttactcaaagtgttggtagaatacaagaaaagtaaaaaacaacgaacagtttctatcttgatgtaatattatccaccacccatatctttcttatttttcagatttaatgagtcagttttccttgatctgaatgtaaatgacgtgcaaccaatgtgcctgtatttatgtgctttctaattttgaaaacgttgacatcaccattgctgagatggatatatttggatttcagaaagttcccttctgaatctttctaatgcaggtgcccccactcttattggcaggaagcaagttttgtcaaatagcggcattgcaagta

SEQ ID NO: 110847 - DNA, 792 bp, Setaria italica
  Intron number 4 from transcript Si001813m (locus Si001291m .g) derived from phytozome v7.0 (chr-ID scaffold_5; pos 19 283473 to 19284264)
cagatattgctctctcacctgatcaacgattcctagtaatcctcttatacatttatctggaattctagtttttgtgaagcagttctcctgtgtattcaaggaaaaaaattattttgtgaaggacttattggcatgtttctatgcttacttgatctttttttacaaatgggccatcatattataattataagcattttcctttagtttatgtctacataatgcttcatgcatgataccagattagcacttcaaaagtactatctagctctttgaaaggccaaaaaactctttacaccatttatatattccttttgagaaaattgtgggttatcttggtcccattctaaactcatttgatattgcctatcactacatatttggcgacatgggtaatctttgtgaactgattaaaacttatatcggtttaatttgattcctaatatcagaacttcatggtcttctcattttgtttcaaaattttagagatacgtctacaaaatttccactcatgatttctgccagttattcttcattgtcacactgaattcatgaagttgtatttaaacataggtatatgtatcatcactatgacatgtgtgttgatattgatgcaaacttccatcctgccttttaacaacgttcttgcacaaatctcagggttcattggagggctaatatagtgcatgtataagtggttatgtatctccttgtctgtatatttattctaaatactaaattgctaggatcattttttcaggcttattccagtctgtcgcctactgttcacatagt

SEQ ID NO: 110848 - DNA, 1049 bp, Setaria italica
  Intron number 2 from transcript Si002134m (locus Si002134m .g) derived from phytozome v7.0 (chr-ID scaffold_5; pos 24 656684 to 24657732)
tcctcgccctcagcgcccgcgactccaccgtcgtacgtcacgtgcagagcgcggcacctcagcaatctttcaaccatttctcgcgcatcagctcctttgtgtttctttctctgttgcgcttgcgctatgcatattcccaatttcttatgtgtttatcatggcgatccaatcaggaaaatatatgcacgcagcacgcatcgcataagatgcctagagattggcatgcctagatgacaagaccttaaacgctttattaaactctattatgtgtgaaactaaaggacatgcctttttttgtggagtattaatgcacaatttattccaaagacgttttgagaaaacaaaaaaaatgaacttaaagattggcatgtcaagcgaaaagagttgttaattacctgcagctgtccacatagctacatgaacaaattagttacatgcgtgcaataatactctattattgtatacccctatctagtttttctcccatagtttcattattgacccactgtagtagtgtcggtgagcatacacgagcgagtgtgatttccatggcctatgtaccacaaggcacatgcaaaacccggccgctcgctgtttctccgccgggccccctgcacaatgatgtgtcctctccagtcttcactctcaccctatccaggacagtacaaaatctacattgctgattccttgtgccacaccgtaaagaagagacaaagttcatgtggggggcacggcaccgtgctcggtaaagcagcgccaaagtgcatgtagtttcaaagcctcatggcatctcatgtctgccatgggataaagacagggtaaactaaaagggcctctctagctaccatgccatctctactttttagacttgtcaacactgtagtattagctcaaatgatacgcgaattcttttttactgccaattttaattacattgcgtccccgactgcttcactgaaatcaccatcaagttaactgctgacatttctgatcattggctgcacgaaattgcagaccggtgggcccgggtggattgtgcctctggggcg

SEQ ID NO: 110849 - DNA, 857 bp, Setaria italica
  Intron number 1 from transcript Si000448m (locus Si000128m .g) derived from phytozome v7.0 (chr-ID scaffold_5; pos 36 290365 to 36291221 reverse strand)
gcgtgaccgggagccacctcgtcgcttctctcaaggtaccgcccgacggagggatgctgcgtgcggccgatatatgtgttgtagtttgcttgttctagccgtctagctttgatcccgtgaaatgggggcggccgggcgggagagtacggtgcttgatgttgttcggtttgccactcgactggagaagaaagttgtatccttttttcgtgaaatagctagggaattagagatgttcatcgccttacgatatccagtgatttcataccgaattcggttcagagaacactgctggtgcacgccaattatcagtaagcgggatgtgattttggttccatcgttgccgttgatgcttcaggttatgttagatgcatggcgacagcttgtttcgtgtatctgttttcccaagttttggcgttaaggttgtgttagagcatttccttggctagtgttgcacgaatgtttagatgatgagggctctcagtcaccgaattggaaatcagctctataatgatattcctagtgccaattttttttttacaagttgtattaatagatgttttaagcaactgtagtttgcatgtaactaatacactgtaatctaacgctcaaagaggatatacaagttaatcaccaccctttttcttttctcctttgctgtaaatttggtcatcatttgaagcagttaatctattattctgtgcacatgagtttcttttattttttacatgcaaggtgttctgcatttgccatagctttcggctgatgttacccggtgtgtctgccgacacacaaatctgctttgtttcatttttcatcattactgtggacatattttttgcttatgtattcgcagggac

SEQ ID NO: 110850 - DNA, 291 bp, Setaria italica
  Intron number 1 from transcript Si040769m (locus Si040769m .g) derived from phytozome v7.0 (chr-ID scaffold_9; pos 44 925915 to 44926205 reverse strand)
aaagtagctacacactcgaaagtcacatagaaaataagaacaagtgatgaccctacacttataagtctacgcttacaaatgcactgcattttgatctcccatgtaattgagtaattcccagtgtatactcaactggtgagaaccaaacatcatacatacaagacacacaaattgaaaccaagaacaagtgatgtgctacagttgcataggttcctaatgtagaacatagcacttctagatcccagagctgttgtggttttgtttttctttaccctcttcttctttaatgaa

SEQ ID NO: 110851 - DNA, 758 bp, Setaria italica
  Intron number 1 from transcript Si003025m (locus Si003025m .g) derived from phytozome v7.0 (chr-ID scaffold_5; pos 45 095741 to 45096498)
gttgtccagtacaggcccgcctggtactgtcatcccgacccggcccaaaaaataaatacccgacgtggggtcgtagggactaggggggacaccaccgagggcgaaatggagaaaagtggaactaggcaacaggaaaagcgaccgggaccaaaaaaaggaaccaaatgcagcgcaaaaaagcgcgaaaacggaaaggtcgagccgtcctcttatcttccacgtcacctcgcgcttgcgtcccgacacgtcatcctcctacctcttcacttatcatcatttcctaggcggctaggcctcacgccctcacctttaaccctcgacccaaactgaatattctcaccatcaaaaaaataaaaactgaatcttctatacgctaaaaataacgcgcgaaacacggtggcatgggccggcctgtcagataagcgataacaccaatcaaacgatgcggcgcggccatgactcggcgccggatagggatgggccgcgtcccatttttataaatccgttccaccagtcacgaccaccctcccaacgcccacccagtctggcccataccgcagcccaccccaccgacgcgtggggccaagcactggcttccctacgtgtctgtgcccgtcagtggcgtcggcgtagcttttcggttgcctcgccttccgtgcgtggacccggctctgacaccgggaggagcagtaggcgggcccggttttgtccactggaccacagcccacgggggttctataaagacctgttctgttctt

SEQ ID NO: 110852 - DNA, 897 bp, Setaria italica
  Intron number 2 from transcript Si000378m (locus Si000378m .g) derived from phytozome v7.0 (chr-ID scaffold_5; pos 35 657242 to 35658138)
aggtgcgttgtgtgtcatgtactatgttttgaatatgttatggctggagacgggttgtgttaggggttgcttgtttcacgttaggtaactggaagtaatttactactatatagtagtagtgcttctcctcaaagctgcaaactgcatttgtttcctatacatgtgctgtggcggtacactttataggatagaaaacatgggtttgttaaacatgaacatggagtttttcgaagatcaagttggctaaattaggcaacaagaaagaaaaactaatattcatgaggcagtagcaaccatggaattattatcaacaatttaaaatattggaatttatgaacaattcaccatgtattctagatttgacattcttgttcaagcctcgatttataataaaaaaatgcagcaaactatcgaaaaggcataacaactaaccagtaaccatcagaccatgcacttgcaggagaattctgccaatttgcgaaaactcagacatatcattgtccttatttccaatttgatagtatctgtagttaatgcttcaattagaaaatgtggctgtattgcaactgatgaaagtgccagcacacttccttgcattttaggagtttctcagtggatctttaggtatggcaataaagacttctatttggacaatagaccattgctggatttaagttcaggttaacatttttttttctttattgtcttctcactactgcaatgtgctagttggtcatatgcctgcccttgacataattaatttttagaaaattaaataattaaagatatgtatctgcatataaactttgtggtattcagtgaagttgtacctcattgaccttttttctcctttttttgacagtgaggtgctacagagtgagttccttaatcagtctc

SEQ ID NO: 110853 - DNA, 659 bp, Setaria italica
  Intron number 2 from transcript Si000515m (locus Si000515m .g) derived from phytozome v7.0 (chr-ID scaffold_5; pos 38 180623 to 38181281)
aagggacatcccctgtcccagagaaggtatgctcttcatatgcacttttgcctgtcctattttgtgtgtgtatcttcacttgcatgctttccatattggtattatttcttgccattgaatttaatttttggcagtgaagttatcttagaaaatgggataatagtgataaaatgtagattgcggcaaggcatcgtgcggcacatggattatgcagaattttataaatgaatgtagttcagctgtgcctattttccaagctattcattatgcatctttgaaaacctacgtatattaactattttacatcatcataatcaagtgagaaacaatgcagtatcttcttccttactctatctctgttgcaaataaccacctgtacctaaaattcttgcatgcattttttcacccaacttgatgtaaattcaaacataagaattttacaaatgaatgcctggatcgctaaagtgaccatgtactccaggttcgtgagattatgttttaattatatatgttagtaactggtaagaactggcagctctggccagtgatatcaaactaagaacagcaagtgtctaactgagtttgaaaatttcgtcgcccagtagtgataaatatcttttgcaggtccaagtaggccattctccgcaatacaaggtaga

SEQ ID NO: 110854 - DNA, 327 bp, Setaria italica
  Intron number 1 from transcript Si034990m (locus Si034990m .g) derived from phytozome v7.0 (chr-ID scaffold_9; pos 58 830644 to 58830970 reverse strand)
ctgggtatgtagtcctcttcttaatgaagttttcctttgatgatgagaggttaattcagcagttttactatttatcttagcttcttcatcaatgattttacatgccttcttgtacgtcattggtctaatttctacagtatagtgattatatattacaagctatatgtgtaagagtgcagtatactattttaattactttacagagtttgttctttaaattaagtcaaaatatactactgcatatagttgaattgtataaagacgatggatgcatatgaattgtgacgagcagcgaaccaggcgcttgtgacgttcgccgtcaactgc

SEQ ID NO: 110855 - DNA, 856 bp, Setaria italica
  Intron number 1 from transcript Si003282m (locus Si003282m .g) derived from phytozome v7.0 (chr-ID scaffold_5; pos 40 787571 to 40788426 reverse strand)
gggtagttcactctctcctgttcgcgctcttgcgatctcttattgtcgtcgtctgttttctggccttagcgattatgaatccagtgtggtttggtgtgtcggcatctcgtagcgtgatgcgttcttgccctggtaggaagtatacgacgtgattttcgattctttgttgcggatttcatctcagtctgactgttttgtcgagaattactagttattgagtctgatgtacccaagcttattgacggtccagtgctgatcagattcaaaaacgtcagtgctaaacatactcataagcgataataatccgttgctgccgtgtagctataatctttcttgatccggttacttgggatctgggaagttatgcgtggtagcatacactttcctcattcttctgtaacatttcagtgagttgcccttggtgtagtgaaattttatatgtttttaagcaaaagcgtgagcctttggccttcaagatactagagttcaatccattcaagagtcaacaattaggctatttcagtaaacattgtaattgtattgctgcttgatatgtcgtgttctgaagaataatctttatttaaactgttgtatgtaggtaactggttatggataaatgtggccgcatttgaacttctatgcttagatgcaatcttttgtctcatttcatgcaattccaactgtttatttggttcagagatctgaaattttcagcaagaccttttcatgatagagctgttattgattatctagctgttctttcatcactagtgtatcaacctgatggtcccttagtaatgattttttagctgtgaatattcatgtttaagttgtcttatacaggaagacacgtggt

SEQ ID NO: 110856 - DNA, 927 bp, Setaria italica
  Intron number 1 from transcript Si000836m (locus Si000836m .g) derived from phytozome v7.0 (chr-ID scaffold_5; pos 10 051126 to 10052052 reverse strand)
cctccgcctccgcctccgcttcgtacaacctcaaggtaggccgcttgttttggtcggtggtgaaacccccgctagatctcccgatctcgcagtactccatgcccttaattttgcgaatccagcacgggtcccaaactttgtagctttgtaggtgatcacttaatcaggcgagtaggtgatcactgtcgagatttacaattactggttgtgcacgccataagttgatgcttacctactagaaatgggatggacgggctgagaaggcagaccattttgtgtgtggtctatttcattgatcaagcatagcaaactggtcagggtaattgaatggaccccttacctaggtgtaagtgctattgtgaaacgtagtttgctgagcttctaatacacgttgtgtctatgctattttgttagagaaaagggtttgtgttgctctactcattggaattttaatgttctttttcatacactgctagtagttgctatgacatcggcgttttgtgaacttgagagcatattttgtccaaagggtacgcatgaatttttgtacaggattggttggatagttactccatccgtgcccgctttgaattaagaacaagtgagttatatatggtccctgtttcttcgatctaacaaattgactctgtgtaatctgttagtgtgatttcactttagtgggtatcagctatctgttgatgtacttagagacatttcctttcaaaggcatgtgtacttgtaaagtacagctccattgaatttatttaattgaagcaattgcaccaatttttgggaggattctccccaagtaaactgttcgtggtttgtggttttgattgatggcatctgcattctctcctttctcatacaagtaaccagctcacattttctcttatggtggctagactgctggtatattggagcctc

SEQ ID NO: 110857 - DNA, 941 bp, Setaria italica
  Intron number 1 from transcript Si002355m (locus Si002337m .g) derived from phytozome v7.0 (chr-ID scaffold_5; pos 13 091096 to 13092036 reverse strand)
acgcttcgttttacatcgggaaccagcagcgcaaggtaataattccgcaacaccccttttgttcttcattcttcatcagaggttgggaggcttggatcggcgccgtggttgcgtttgtgtgtaggatttgatcgcttttctcatcagttgtttggtaatgtttggagttttctttcttatcggtcgtgttggattgcgttatcggttggtggttccgtagtgcggtagttggctttctttggtgaaaggtttatcctctttctctcgatgtaaaggtttgatcgtcacgtgatggcactccataagcgccactgatgatgcactgtcgtgcaattctgttcttctaagctgatcttgttatttgtgcgattgattggatgttttcaatctggttgttgagccatttgatttgattttgaggtggtttcaaatctcactgattcttcttttagtggaaatcacttttttttaatatttttagcagatgcatgctttagcagaatttttatcctacaaacgctgtctgcagtcatattagctatagtaggttggtgaggcattttgaaggaacaaagatattctaaactatagcaccacgatatttctccatactaattgttggggggtagtccattcatctgttttcagtactacatttatgaatgcaataatttaggaaatcttaactttataagtatccatactgacttttagacaaaatgattcgggactaaacttcttttcaaggatttgatcaacatcttgtgtagttttcaattatgtgataattccccaagattgcttctttgtttattattatttttagttcataggatttgctagatgatcagctgtctgcaagaacttatactggatgtgatgatcccattgagaagtataatgtaacgagtgtatttttttttctcatcttcagaggggga

SEQ ID NO: 110858 - DNA, 993 bp, Setaria italica
  Intron number 3 from transcript Si034067m (locus Si034067m .g) derived from phytozome v7.0 (chr-ID scaffold_9; pos 64 13671 to 6414663)
ggtggagcagcatacgaggctctacggcaaaaacggtgagtttttttttttgcttttttatgcgtgtagattactcctctttcttctggtagggattgactggttacagcatcgcacacaaaaaacttaagattatctgtgtggcagtagttgtacagtctgcgtgtcgttatgctatccttttacattttgctgaagtctcgttcaaatagtgaaatgttacacattgggattttagaactgaactggaacagtggttttaggttacactgcttgagagtgtttttcaggcaaaagaatgtttgctctaaattgcgtttcatgaaccaatggaccaattgaatgcatacttcccatgttcatccacattagagtttggtcatccgtgcaaagctaccagttataaactccgttgatttttgtagaatctgtgactcatcactagttagcactgtagtgactagtggtgagcataatctaatctatagattttgaggatcttgctcattgaaggctctttgtgagaaaatcactctacagtttctcaccttaccaaacatttgaataagtttgacatgaaaaatttgcaagtaatgtcacatctcacaggcactagcagttctgatatctgaattaaataatgatgtcactgttaaaggacattatgacaacaccatgtaatgagccagaggacattaacaccatgtaatgagccagaattgcatgccatggaccatgttcttatgatgatctaactgaactataactctgacgcttttaatctagttagagtccctgctatctattagtttgaagtttcagttggagtgtattttggaagttggcatgtgtatggataatttacttttgcgttgcattacacattgttttgattcttatggtctttctgatgactatctgatttttcttcattattttcatggatggactactccagtgcttccccaagaagaaagtaagtcatcacttgaa

SEQ ID NO: 110859 - DNA, 255 bp, Setaria italica
  Intron number 2 from transcript Si000381m (locus Si000381m .g) derived from phytozome v7.0 (chr-ID scaffold_5; pos 36 53319 to 3653573)
cgcgctcactgaggaggaggccgccgcgctctccggtgaggctccgccgttcctggtcgatttttttcataaggaaaagcatttgtttttctttagtcccgaaaagctttgctggtcgaattgtatctttccttgcaatgatcgtgcgcgagcgaagcatcgatggcgacttggttttggatggacctgtccgatctttgatttctcgcgttcttggcagggcacgagcgggtggtgtcggtgttcaaggaccgc

SEQ ID NO: 110860 - DNA, 804 bp, Setaria italica
  Intron number 2 from transcript Si002473m (locus Si002473m .g) derived from phytozome v7.0 (chr-ID scaffold_5; pos 46 897082 to 46897885)
ccgggccttctaggcggggttcagccgcgctccgggtgaggacttgtggcattcccatactctatgaatctcgttgacttcccgaccaagtaatttggctactgtgtcagttagcgaacggaatcgttgcttgtagatgtatcataggagaaaccccagtccagattacaggtagaatatcaaaaaagctaggtccagccgtttcttcctaaatacctgaactctgtcctcatactttttgagttggaactaagctatcagattatgtttcttcaacaaagttaggtctagttggaactatgagctatccaatttgtttcttattatatactgtatcgaagttccaattctgtgtcaggcatctgtgcgctatgacgataaattagtaccttgatatatttgtgcagtgtccaactttttcagagcatatttgttaaggttgacctgatctagatgaaactttgtgccatatgataatatgatgctttgcccctttactactcatcagattattctcagaacattactggaggaattatctgaaattgtcatgtcatacctttgttctcatttgttttgtaactgtgcaaatgaacaagttcctactgatactgttagcaatatttttttttgttggtatgtgagcttatagttctagaactgttgtcatatatgtatctatttgtttttgctgcataattctctgtcttagtccccccaaaaaacctgttgatttctctgatatttaaaatatttggattttggataggtggaagctaagaagcaaacattttcttcatttga

SEQ ID NO: 110861 - DNA, 878 bp, Setaria italica
  Intron number 1 from transcript Si001475m (locus Si001444m .g) derived from phytozome v7.0 (chr-ID scaffold_5; pos 80 96861 to 8097738 reverse strand)
ttgcgggtgtcctccccggacacgacttcgcatcggtgaggaatccgcaccttccctcgttcgagtaatgacggagtagtaaaatttgccttctgctagagtgtgggttgacaggtgcttgatcttcgtgagataaagaacgtgtgattcgcgttgaaaggtctactatatcgtggaaatcttaaattgtcgaacgtgctgatcccgatgttgatggggtcactgcactttgattgaagtataggcttcgatgtagatgggaattgcctttcaggcgctgaattacggagtcaccattttctgcggccagtaagccttttcagccagtacccatgtttcttttagaggacaatctaatttgttgccatccttactgaggtgagtggcatgaattttgccatcatgtgagagggatgaatgtcagaaggccttcagaggaagcgtaaccgaaaaccaagtttggttatatccgctaatatttggtctggatggtaactggcctggtgagatcgtccttgacaacccatttaacctgaaaaaaaatgtttggttagttataagcttagagcagttcgttcagaatacaagccactaaaccaaccagttttgtatcccaaaaacaaaaaccctacataagcataaaggtcctttccgtgtgaaaaatcgattattttgtttagctcatgtagaaatgttccgtttataaaaaagaccgttgaggaataaatggaaagacaggcatgtattattgtttgtttaagatattcatacgtgtactcaagtgttcggttgctgtttatacttcaaatacaagatttaccattccaggtgtatttgattgtaactgttttccaattaaggctagagcaggagtggag

SEQ ID NO: 110862 - DNA, 589 bp, Setaria italica
  Intron number 2 from transcript Si000271m (locus Si000271m .g) derived from phytozome v7.0 (chr-ID scaffold_5; pos 15 410574 to 15411162)
cgggcgtctggctatccggtcatccgccaggtactgctgccgcgtctctgttttctgttcctgtgatccagaattggttgcgaaagaactgcttctgcattatgctttccatgctctgtcacgcagatgtggatctgataaatttctttttgtacgaatcctgttctgatgtgatacaataaagccggtgatgaattttaattataaccagtccctactttgtacaactactaaaattcttaatataaaatctttcatgtgcctgaattttatcaaaacttcagtgtttgatttatgaacgctccaattgttggttctggttcgctgaatatgtttacgatcctgtatttaatcaagcacgaccgtaccaacttttcttgatcctaaaccaatcggcaataccaacgtcatctgtactttactgagaaatgcgcattatacaaatggtttgtgtgctatgggtatgatttgtttcttaagatgagtttttcttggtagatcattttcttatctcgataattgatagtgttactgttgctcttactatattgcagttcagaagtactggaacttgcagatcctgatagca

SEQ ID NO: 110863 - DNA, 406 bp, Setaria italica
  Intron number 1 from transcript Si000122m (locus Si000122m .g) derived from phytozome v7.0 (chr-ID scaffold_5; pos 16 572784 to 16573189 reverse strand)
aggtgagcggccggttagggtttgggtgcttcaatcgggtttttggaggattcgatttatccttctctgcccggggtgggagtagactaaatttcgaaacaaaaaaatagaatgatctgcttgttggccactgctagtatgtgttggaaaaacttctgcatcatctgtaaattttgtttgcatgtagcagtacttcaaagttcattttttcctctcaggtgtggcgtcactttctgcttatagcagtactttcattatccttagatactagtaatactgacaaatatctcgagttttgagctgggagtctcaagggggccattatttgtatcttatgttcttttcctacagttcagtgatgagaattttgcattgctttgcccataactgtttctgttgcagactg

SEQ ID NO: 110864 - DNA, 758 bp, Setaria italica
  Intron number 1 from transcript Si000612m (locus Si000612m .g) derived from phytozome v7.0 (chr-ID scaffold_5; pos 34 137416 to 34138173)
attggaaacaactggtatctcagatcaggcttatttaaggaacacttgataattcttcttaattctggggacaatactaatcaatttgcctcccccaacgacaacgcgaaactagttcagctacgccattgacgtctccaggccccttttgaagtgaatgaattctgcatgtgcatagtacatccggtgagatcctatcctaggctagcactcagctggactccggagtaggcaccgacactggactattctgcaggctgcatgcagccttggaccggagttatataataatccaacaaagaaaggccggtgttgtatttaggctagttgcacaactttggggtgccaaaattactgtagcaacactgtagcgtttcgtttgtatttgtgaattattgtccaaatattgactaattaggctcaaaagattcgtctcgcaaagtacaataaaactgtgcaattagttttttatttcgtctacattcattactccatgcatgtaccgcaagtttgatatgatggggaatcttctttttgcatagtgccaaaattgggattttggagtgaaacatggccttatatatagtcggaggggagcagaaaagaaaattaataagaatcaaaagaaacctcacgttcaatcacacgccttccactggtgtggaaggtgaggaacgcgctctccgcactctgccagcctatttgttgggggaaggttggcaggtccgtgtaccgcgagcccgcggccgaaatttcac

SEQ ID NO: 110865 - DNA, 623 bp, Setaria italica
  Intron number 2 from transcript Si000392m (locus Si000392m .g) derived from phytozome v7.0 (chr-ID scaffold_5; pos 45 554986 to 45555608)
gtggtaagtaaatatgctccatatgaccataagttttctcaacacaacttctagtcagtgctttaaaggcgacaaggaaggcgagctgtgtacgccttatcgcctaggcatcaatgcggacctgtttcccaaggcgagctgtgtccgcccgcctaggcaaaaagagtttttaataacttaagaagaaaatgtttttttacaacttagaagcaatgtcttccttaaagagaatgttaaaaaaatagaaaagaatggtcacaaagggcgacaggagtgaaaatttgataaatcaactagacctgaagtctcccaccacattggtttcgactgcagtatattttattttttgattctgaaaaaaaaaacacaatagggttacctttactgaggattattgaacataaggatatatacgtatgtatagagactgtagtagcttttaacaatatatttcaaaatcattaaaatgctacgtctgaaagcattaagcacataatttgctaagagaaattaaaaaccacaaaagtcaaatattattatttgtttcatgggacagttgacatgtattatcaatttatgatattgtaggaggaacatttgcactttattcattgatatcacgg

SEQ ID NO: 110866 - DNA, 745 bp, Setaria italica
  Intron number 5 from transcript Si000303m (locus Si000269m .g) derived from phytozome v7.0 (chr-ID scaffold_5; pos 38 208821 to 38209565)
cttcagaaaaagatctcatctccttaggctttcaggtaaaattactaaattactctttgctatgcttagcataatatgatttctctgggaagtttctgcccttgcatagctgcccgggcctgttatgtttatgcatacgttggactatggaagttgaattgatatagcatgtttattggatctactatagcaattggcagatagattacagctaactcgccctctccttgagaggctctgagattagagataaactactgcttaactcaaaccatcgggaggtcctgaacatataggaccctcccctaactaactacctaatatccagccggctaatctaatctggcagcaaacaaactaaccaaatcttatctaagtgctccctgacttcttggccttctccctgcgcctgaacttccttccaaagaaggtgtccataacacgaatgtgactatgggactacattgctcaactctagaatggaggaccaaagaagcttttttttaaagtattgataaactaatgtggtacagtgggaaacatttataaattaacaccgattttctttatactggtcattaagtcaaacaaaaggataataaatgttgagtgctcatttgtttttggtgtttttttaatgcaagtgatgtacatcttgatgctttgtttctagcacataagttgtaccatgccctttaaacatgcttcaacgtaaccatttaatttgcagagcatacgtgtaata

SEQ ID NO: 110867 - DNA, 1053 bp, Setaria italica
  Intron number 1 from transcript Si000054m (locus Si000054m .g) derived from phytozome v7.0 (chr-ID scaffold_5; pos 42 620840 to 42621892 reverse strand)
gcctccctcccagccctcctgccgtccccgtccccgtaagcccctctctccccactctcgcctccgcgcgcatgcttatagcatgcgcgcggttaaggcatttagatgtggtcccgatcgactccagtggcctgttttgaatgacgagcggctgatgcttagggtttaaagcgtctcgatgtaattttagggtttttgtttagggttgaggctgggaatttgagataggacgcgtgggattgagcgcgctctattctgtgcaattagaaatatttgtgtttctgattttggtagagagaacccttgagataggcttccattgactgctgaggataagttgccaattgcatattatgttcgtaagttgttatgataggaaatggtgattgaatgcttatggtgaaatgaatagccatcacctgtttagccacgattggtctgatggatggatgcaacctactttgctagttaaaaaaaattggcattttatagcctagacacaattgccggtttgagcaatgcaaaagtcgagtagatgactagcttagttaggctgattgggtgattagttaatttgactgttcttgcagcagaatatacaaggtagccaagttatagaatgtggtaacaacagatacagctgtgcttggtaatgttgccatatataagtaatagaagtttttttttgagagattaccatgatgttcggtcaagaagtgaacactttaattttatgtttggctatagactgaattaatcaattaattaatcttgttgatttactttggtggttattgaaaagaaaatacaaggcctgacatctgcatgcacttgtacttcaccagccaattggacctcactgacacgactcatgtgtgtctgtttgggtttgatcaacagcaccatgcaaatacataacatagcacctagttcttatgattctgttcgtgtccaatggaacttcatgatgccttcaaatgcctctcattcagagaattactatttaattctggttgtaacaaaacatgcaggactggagctccaaggtatcaa

SEQ ID NO: 110868 - DNA, 759 bp, Setaria italica
  Intron number 1 from transcript Si000876m (locus Si000877m .g) derived from phytozome v7.0 (chr-ID scaffold_5; pos 41 345241 to 41345999 reverse strand)
gcgcaggtgaattactgaatttggagcctcggggcctccataagtaaactgaattttgcatctcctcgtgcaccataacaggaaggataaaatgtgaggggaagacttttaaatgtgaattactcatgctagaagcaatcacaataattttataccataatttggtgttaggactccttgtttttttatctgttcaatcaggttcgttttgatgggtagaaacagctttgtaaaatacctgtacatgtgaaatcacgcaagaatatacatgggcagtcgaagcttgttaagcatggtcgaacaggtttcctatacccatctatgttcaattaaaaggaaatgagtagtgaatccagaatactcctatttcttttgaagttatttactgcatcatgacatggacaaaaagaaggaccaaagattaaactcttggatgtgaaggtggactggaaagaaaataaattatctaaactcaattataaaatctcttagcaataatacttattagtagatagttctacttgtggttgtaaatactttcatcgagaaaaattgcacaatgaataagtggcctgttaaaaggaatgacactgtccagagtttgccttttggaattttgattgggtgaggaaagtgtttctttttaaggtacctacagccagctggatttaattcaaggagagtattattttcattatttcttagaagctactaatagagtaattgacttctatgttcctgtaggcaaggcaaaagggc

SEQ ID NO: 110869 - DNA, 1004 bp, Setaria italica
  Intron number 1 from transcript Si003769m (locus Si003769m .g) derived from phytozome v7.0 (chr-ID scaffold_5; pos 35 149330 to 35150333 reverse strand)
tagaggactggctacgacaacatcatctggaacaagtaagaacatcctcactgcatttttgaagattgatatttgaacttgattctgctctacagtttgatttttcctgtatctctgttgtcattccatttttttctgttagtctccatactgtgcaaaattaaacaggttatactcaacactgctctgaaaataatacagatcttattgcttctcttgttccttgtgctagaaaatagatcttacagtttctaataaatgaagcagagtagctaaccaaacgataagtgagattgatgaaaataaccatgctaaaatgatcacatgatctaagtcaaggatgttccgtcagacagttgtgttcttccaaatataccataaacaaaaagcacgtagctagtaatatgataatgtctcaggtagaaaaaaatgttcatttgtaaagtgacatacaattctagtagcacgaatcctatctgtgcgttcaaaccataatacagtcaggtaaaaccacatggggctgttcatttattttactgaaatgaggacaggcaggaggggctacctatttaattgtgtagaagaagtttaaagaaaacaggcaggagattgcctatctgaatccagaatccatccttcacagatcaatttatttgtatgggccacatgcccgattgaaaaaactcttttaaaagtcaaaataaattcagacagaggatgggcattgtgaagtaatacatgccataaaaaattgatcatgaaatcatttctccagtgatttattggaacaatatacttgagactcgtttactatagtgctcatcttttatgcaatagtgtatgtctgaaacaatgcacaggcttttcttggttatcccatgctcaatgtatatattggacttttaagtccactctaaagcaagtaacttcaacttatctcctgaggttttaacttaatgacagaattagttaaacaagctcttatcctatatcatgtttcaaag

SEQ ID NO: 110870 - DNA, 519 bp, Setaria italica
  Intron number 2 from transcript Si037089m (locus Si037089m .g) derived from phytozome v7.0 (chr-ID scaffold_9; pos 39 566999 to 39567517)
ccatatcggagggacagccgccggggttcgagcaggtttgagcttacctaagtcaaacaggacgagtgtttgacattgttcatccaaacattactgcttcctctcgttgtcaattatatattggctaaacgctattttaacaggtttcacacaacgtttaagtctgtgcttgtgatagaataaccataattgttttttatttagatagatgtaaatggtttgagttatccgttataatcactttgtgcagcataaataaagggcacttggtattaggtcatggtagcaatctagtttgtctgcaggtctggtaaagaaaagtatgacgcaatgtggtaacaggggttttagattgaattcatgtttttgcacagtttaggggaatacaacctctgtgcgagagttgtagttagacatgagtcatgaaaagaatggtgtgattacaatatacaattattcagaagtttgcaaggttatgtatcctttggttatttctctttctattgtgcaggtttcata

SEQ ID NO: 110871 - DNA, 717 bp, Setaria italica
  Intron number 3 from transcript Si037089m (locus Si037089m .g) derived from phytozome v7.0 (chr-ID scaffold_9; pos 39 567571 to 39568287)
agtgtggctgtctgccatacctgtgggcttcctgggtaagaactctgtgctgttctgcttacaaaaattcatgctcttacatgctgtcagtgttaagtttttccgtcaatccgtcattcattcactagcaactgcactttacttgtagtacataccatgcttttaattagagtgaagtgcacctgaggtccttaaaacttttctccgattcagatgcccacttcagagtttatggacctaggttgaaaatctaggaaatacacccccccccaaaaaaaaaaccaaaaaaaaaagttagcttagaaacttgtgcggtatcaatttatttcatgatttattgttatgtttaactattctcgagcatcttatgcgtcctcagtagtgtggataagtggtgcatgttcccctaggggcataaactccatgttctacctcatgttattgttttcatattcttgtcatcctggatggtacttctagcatcattttttctagtgaagtttaatgcatatgtaagcaaatcattgttgtcttaggctcttattgcattagaccttatctcggatttgattttgtttttattatttgtgagatgattgatgacgatgactttgaagcttaagccatacatgcccactctggccatacacctagactgtaattttttttttaactcttgcaggcacattgcagctgagtgttcttccaaaggtacct

SEQ ID NO: 110872 - DNA, 713 bp, Setaria italica
  Intron number 3 from transcript Si000769m (locus Si000726m .g) derived from phytozome v7.0 (chr-ID scaffold_5; pos 33 237507 to 33238219)
cacccagcagtaagttataataatagtgtacttcataaagtgttagatatgcctttcctgtagttgtcactagtggtcctatctaaatcaaaacagtggtgcactttgtgagtccctatggtggtgtggtggtaccaacaagctttgtacctgttggctgtcatcttttctttgccatgtttgggaaagtggccaactattttttaatgccctttattattctattgttatccttgttccaaaaatctctctgcaaggtatgttaaatgattcttgttaatctttgttccagacttcccattaccattttactttatgcgttcatgacctcatgactcgtgttgcagcgcctgagattaatagagttgaatgattgccagtgaatgggtatacctgtttttagtgagaattagtctttttagttgcatgcatgctgtacaggaaattatggtcaaggtccttgtatatacttcaaatcctgatcttaaacaatgaagcgtaaatcatgaaagtattgtttggagtacacaatttcagaagcattgattgaatttttgccgtttgttagttccttatcatatattttagtggtgccatcatttctaggatgaactatttcttgaaggttttttgaagcagttaaagatgacaagttgcaagagaactgcttttatatctgctttatgttccatttcaggtggttcaaggtgata

SEQ ID NO: 110873 - DNA, 801 bp, Setaria italica
  Intron number 2 from transcript Si037557m (locus Si037557m .g) derived from phytozome v7.0 (chr-ID scaffold_9; pos 35 639559 to 35640359)
gcccttctcatcctacaaggatcagatcggattcggtacctgccaactgtcctattttcacatgaacatttggttatctataatgcaattagctaaggctgaactgctgtagtttgttaacccaatgttcttttattttctgtttatcgttggtcattgtgggaactgtcattcctttatctcactaatggtatcccggtatggccattgtggaaaaatggacatttaaagtttaaacaagtgcaggtgaaacttgtaatcaagttttcaagaaaaattaatacactagtggtaaacaaaagcctacatcatctgagaacaactatgcatgtcaattgtagtgaaatcatacaaatgcgttcttgattaaaatgtactactagtctactatgcaaacccatactgatggatatagttggccacttcaaattagttatttcacctaaaaaaccatagtttgctttgcatttctagaattagtcttgatagagccataggcatcaaccacttttcactaaaagtaacaattttgttctacttacaatattttgaagcacaatgatatttaattgttcctttgtttggctatagcaacccagtgcatcatgaatgataaattcatatgccctaaaattgagccaaacttattgtttctgtgtgcaaattcattgtcaatatatttttttcaatcagtgcgcttgtccttgtagtatgccgtacagtctactttgagcttcggctaggaaatttttgtatggttttcaatgtttgatgtaacatctcttcttttttcaggtctgc

SEQ ID NO: 110874 - DNA, 889 bp, Setaria italica
  Intron number 1 from transcript Si001261m (locus Si001261m .g) derived from phytozome v7.0 (chr-ID scaffold_5; pos 42 299978 to 42300866)
ggtggcggggcgaggcggcgtcggcttcgaggaatgtgagttcctgtttcgcatgcgggggtgctgtgcttccggttctgttctgatcttcgtactaggttttttagggggtttgtctggtcgggcggtgtgtgtgggcgagtggcgttggggtgaacagcggcctcccggggcgttttcatggccagatcggtagatggtttgagctgattcggtggatacagtgttgtccagggcagatttcctggaggaatctggactttttcttcgcaagtcttcgtcctcttggcttcgccggttacattgcgtggttgacgagcgaaaccgaagattcctacgcttttaccttgcatattttgcgtccaaatttataccaacttgcatatactcagaaacaagttgaaatttcctgaaggaaaataaggaggaaactgaatccttgtagtttgtacgttgctacggtatcgtttctcctgcacatcccaatatttccttcgcgaggtgctagtttaactagtcgactgtctttagtattgttctggtgctgcgtcttactgaagctcccatgggaatttggagattcatgtgcctatgcttaatttaaagcccagatttcttgggtttaaagtgatgccctgtacctaatataggttatgtagtcaaagtcaaaagtccctgcatgcatccccgagccatgatggagttggaaccagatttggtttctagttaggctatgcacggttgttatgatgtctatgttgaaccaacttttagttgtgatgatgcgaccatatgtcggtcaaattgatccatgttaattttcattctctcatcaatgttttttttgtttttttgcaggggcagattgtagaggcagtttcttttgcat

SEQ ID NO: 110875 - DNA, 357 bp, Setaria italica
  Intron number 4 from transcript Si001261m (locus Si001261m .g) derived from phytozome v7.0 (chr-ID scaffold_5; pos 42 301606 to 42301962)
atccacctaccagctgtacctgtgccttagtagtatgtcatgtgctttgcacactttcaaatttcaatagcactactcataagttttatcctatttcatttggagcatattggattattctcaacctgatatgtttctcttgcttgagtgattggttttgctgttatatatcatatcctgcaaacctcttcagttctgaaattacatggtgttttaatctcgtctccatgagaatattttgtcttcaaataatcaaatggatggattatcttatttctcctgatcaaatttattgaaaatcatttttctcccctgtgcacagttgttacttcagaaagtgggaaattcctcttatca

SEQ ID NO: 110876 - DNA, 1024 bp, Setaria italica
  Intron number 3 from transcript Si036980m (locus Si036978m .g) derived from phytozome v7.0 (chr-ID scaffold_9; pos 42 435784 to 42436807)
actacaaattagcaaaggaaggatttctctccaaggtatatcaacttaaaacatgacgttcacttaattttcacgcattgagtttataaatcacaacagttttttttatttcacagagattatgtatctaccaattttcattcttatctttttacctcaataaattagggtcggagacgtgttcattggtcagcttatttgttgctgtatcaagaaagctgttctttgtctgacatatgcttttgtttgacttaggatgtggcctactctgtagtctgtacagctcatgcgaaatccttttctgaataattaagccacattaaggctgcctacctactgattgttccaactactctcggagtgccagctgcttcgcatatctttcgaccttgcaaaaaattcttcacacatctttttattgttatgcccaacaattttatcaagtttaaagcttatccatatggctgcactttatcaggataggattgctgtttgtcagtggatatcatacgagactagcatgatagtgaactcaaggagcttacatcaaattttggattacctttttacttgaaaattgctagtcatcctcatctgatcaaactttgctgctcatgtgttcatgcatatgaaagcttttttttttcaagaacacgcagaagggcatattagggccttcaaaatgagcagatacttttttacaattgtcaaggaaggatgctacaagtgggtgtgtaaactgtaaacaactagcaatgtttcactgaacatctctactgtcgtattggaacaatatgcattatttatccacctttctaactgcatttacatctagtatgtggatcctgtatatatgtttgttttgtttagctcacgttcacaagcacttgatgtaggtttgtaaagcatggcttggattgttttcttgtaagactgttatgaaccattacagcttgtctgctccccgtttccattgggttaaccatgagtctgcatctgaatgacttgtaggtgcctattctta

SEQ ID NO: 110877 - DNA, 992 bp, Setaria italica
  Intron number 1 from transcript Si035331m (locus Si035331m .g) derived from phytozome v7.0 (chr-ID scaffold_9; pos 47 420290 to 47421281)
cacctggcgcccccggctctgcctcccaggagtgagtggttctcgtctgcttcatccggggatttgggtaatgggggtcgtgtttcctggaatctgggccgacctacttgctctgctcttatctggtgaggcccttctgctgcccccgtggcgagaatcagaatgtggtagttctagagcattttatcagctggatcgaattgttccccgggagcaattcaaatagcccactcaaattcgacccgttccttgaataatccctcgcatttggagtgccgtgcattcagaattgccggattagtcagttggtgattacctcttagttctcgattattgggattctttatcttctcgtagtatttttttagaaaaacatttttgtctcgtagtttgtgatgcggaccgcagagttataaaaaatatacttgctggggtgcggttggatgctgtatcttggtattttcagtgaaatcatgttctggggccgagttggttcagatcaaccaatgattggtggcatctcttcgtttgaattttttttatttggtcttgttggcatggacaatctcccttaagttggaagtagaatgagaaacaccaggtttcattaaataattagtagtagtatgccttgagacaatttggtattttgcaaggaatgtttttttatgtttttaccattttaacatgaacagactatttaaactaggagttggttgacttggttcccactctgaagattctaatcatcatctaggtgttaggtgatgatgacttgaaaataatcaggttctagttttgtttataccagtagatcaaggtgtagttgcagtaaatttgagtgctccagaatacagttggctcatgttgccaaagtgtattgcatagcatgatcttgacagtagtctgccatcttattccggcaaatatgatagatgataattcactccaaatataacattcccttttgcatgtaggactttacaagagta

SEQ ID NO: 110878 - DNA, 872 bp, Setaria italica
  Intron number 2 from transcript Si036165m (locus Si036165m .g) derived from phytozome v7.0 (chr-ID scaffold_9; pos 53 599770 to 53600641 reverse strand)
cgccgcggccttgacgcaaattatttgaaccggtatgatctcacaaaaccctttctgagagaaataaaagggtgttggttgtgcacagacctagttggcaaattttcttcagacacggattgtcacttggacttgggcactgatgttgcaatccgattctgatttgggtttctattcaacaatttttcattgagagaaaattggggcagaattggcaaatcattgaacaatgtcagagtaatagtaaaaccacagcctctttcctatcagaatgttgtactaccaatgcaggggcagagctagcatattagcactgggatctaatgaccctgatgacattttgttttaccctttggtaatctctttgcttatgaagagaagtcaaagttttacttttaattcatactcatattgaccccagtgagcccgatgttatttcttcttggctcagcccttagccttaagctcagagcaaagtagattctcatattaaccaactttctctaattttgattttgattttttgcttgtcttggttgaacacaacatggactgttggtgtccctgtatgtgcaaaataagacttattctattggcaaagcaaataccaaatgcaactgtggggtcgctatgcaaagaaatttaaagttcataaatgattatgcaatcttctttccaatttaaatttcaaaagttgatgtactaaatggcagtttaagatgccatctcagagtgaaatggtcaagctaacagcacaccattatcacactgcttgtaacttagaatgcattcctattgataaagtgtatttgaattttctttgcatgcattcaacagtgttcgaatattggattgctattctgacccccttg

SEQ ID NO: 110879 - DNA, 923 bp, Setaria italica
  Intron number 2 from transcript Si037578m (locus Si037578m .g) derived from phytozome v7.0 (chr-ID scaffold_9; pos 56 018845 to 56019767)
cttctgccactgattcaaaggacttgcgtgctaaggtagtcaaactctgccctctttatagttaataatcaatggtggttgatttcatctttcatttctttttattgtttcttttggcattgcattgcttgtggtaccagcatgtcagctgtatatttagattcagctccccaagatgctagagccaaggtgttcgataatagtcatggaaggaaaacatttaattattactcaaaagcacatagatgcgttctatatgtactgaaacttgtctaatctactcttaaggttgggatactatgatactagttgttatagctgtaaattgtgcgcttatgtactattgcatctcagccaagggtttttggggccatgccaagtgaatttgcatactggaatacctaatatactcaagaaatcccatctttctgtggctgacaattaacaattactgtgatgtagcattttagtatatttactgtgttttttcatgtgaaaatagttttcagaaggtgagaagcacaggcattgtgctttacatccagactgttttgtatgttcttcacatgagacacgttccatacagattttcttagatgttatatttattataaaaatatcaaaagagatatattgcagtaatgttattattatcaactactatatcttgagattgtgatttgtttttgctagtatgcattatttgtagcctagacagtagaaggagggacatatgtattgcgcatttttggttcagaaagttaatacattcattgcatcaatggccctaaagccctaccaagttccaagcagatcaccacattgtgatctgtctagtaagcttaattaatgactttgttttatgttttcattcttttcttggcatagttggtattgctgggagactcaggtgttgggaaaag

SEQ ID NO: 110880 - DNA, 785 bp, Setaria italica
  Intron number 1 from transcript Si000072m (locus Si000072m .g) derived from phytozome v7.0 (chr-ID scaffold_5; pos 30 985486 to 30986270 reverse strand)
ggcctactcctacaggagagacacagagatcagtacagtaatcctttttctaaatgttatctacaatgctgataacattcctactgtatgtgtgccattatgttccatgttcctgcttatatggttttgtcatagggatatactagcttgcttaatattttcttatgcagattgtatctagacatgctttgcttgatgctatcattattttcatagttgctagaccttactactttactagccttggcgaaagtgaatgtgatctgtggagttaacagttctcctacatttgtattcttttctgccagaatggaacaatgttgtatccatttgcctttggtacattgatgccatctcacctgtagttgagaagattgttttgcaattgatcaatcgtgtaaattatagtagacttttcactgggtttttttttttggtgttggagaactgatattttatttcccagagaactgatagtattgttaacattgctgtgatgaactctgtttttgctcattatgtatggcttacagtttgatatcttgtcgtataactgtcttaaattatcttagtgtatcagtgtagtcgctggatattataagagctttttatcgggtgctgaatgttgtttacttatttacatgtttttcctgactgctattctttgagtttcctttatatatggtgttgtgctagtttttcttttcttttgttgtgtgttgtttcctaaactagttcttttggaagcagaaatttctgcaaaagagaagtacaataatcctgag

SEQ ID NO: 110881 - DNA, 894 bp, Setaria italica
  Intron number 3 from transcript Si003217m (locus Si003217m .g) derived from phytozome v7.0 (chr-ID scaffold_5; pos 32 864325 to 32865218 reverse strand)
aaggtgcgagcttctaatccggaattttgacgccctttttgtgttgcgtggcgtagattggtattatccagacgattctgttcaaaagatgccactagaaatggggtgaattcggaaatatttgctttagtttatgaacacatagtaaccctgtattctttggtcggtcggtgactttggcccttcaacttttagtttctcaggcagtattgttgtcgatgagtatcatcatctcttttagtattttctattattgatgttaaagggctggcagttttagtaacgtttatgcctatataatatgtgacggttactgctagcttgtgttttatgtgggcagttgctcaatgtttgtgggaaacaaaagtcatttttggcttcctagattgtaacttgtccattgagctattttttgttatgatgattatgcaataatagacttagttccattcatgatctcgttactctatcaatatatgctgtcatgatccccttgccctctgatttgtgtaaattgtaacacaacgtatttactccctgagctctctaggaggtaaggagcttacttgtatgtaacaaggagaaggggctagttggtttccactccattcttaaattgcagggaatgactgaaatgttgcagtgggaactaactttttatcttccttagcagactctttgactttagctcatggtcttttatagtaatcaccataatacctttctgtgctagtgatatttgtaactggaacaatattttctgtttacgttagcatattaatttgtacttaattggtttccttatattcatattcaattactttcctgattacatttcttttgcttatcaatttgtcaggtggagtttttaagcttgagctctttttacctgag

SEQ ID NO: 110882 - DNA, 874 bp, Setaria italica
  Intron number 2 from transcript Si037214m (locus Si037214m .g) derived from phytozome v7.0 (chr-ID scaffold_9; pos 36 391130 to 36392003 reverse strand)
gcaactcccatcgggagagcgttagctgtgagttcactgatagctcaaattcacttggattagcttgctaacgtgacccaaatttgggttcttaatacttgatggtagagatcatagcttagattcttgtggcattttgatgtcgtgctactccttactagctcatttcatgtctcccatctgatgatgcatacaactattgctcgtggtctcaattctaggttttaattagtttatgaataattgttgctgcggtatgtttgcaagcaatggtgaacaatgatattacggcctagcagtgattagtctgattgaggttagtggtaaccatctttaggagcccgaaatttcttctgtatatttgtagcttgattaaatcgaaatgtaatcataactcataagaacctgaaaattctgcgattttcattgtggcaccaggaaatgtgttctgatgggctactaatgttgaattattatttttttctctctctctctctctgtgctctttgtgctttgtaagggaaaaggatcatgaaagagggatatgattgatacaaagctgtgacaaatttgcatcaacacagatgttaacccttccagctgtctaggaaatgaaactatgtaaaactctagggaatcattcgagggggggaaaaactcaggggcataaagtcagatgttgctttaactcacatatacttgtatcactctgtatttgatcagaatgtcatttatcatagtacaattttgtttcgagaatatattatttgtttcatcgttacatttgattattcttctgccaataatagtaggtccttttcattatatctgatgtgctttaactatccctttttatgcagacactgttttttct

SEQ ID NO: 110883 - DNA, 574 bp, Setaria italica
  Intron number 2 from transcript Si037754m (locus Si037754m .g) derived from phytozome v7.0 (chr-ID scaffold_9; pos 80 57746 to 8058319)
ggttacagtatgtctctgcaccatttcttcgtggttgttcgggcatttgattggtttgccctatgaatttttttgcggctagttgtctgttcttagtgcgtatgcatcattgcttgtcaaattagggacagctggacccaaagagtgcaaacacaggatgctactttgaattttgagacatgagttgtttagaggaactgggctatcttcatctgctatgtttttcacacaattagtcatatgtggacatgcggagagtatggtggaatcgatgactttgtagtccaagtaggcattgttccagcagtgcaaatgcacgtgaggatagtgggatttgcaatattgcttcatataagaggggtttacgaagtagcaggtgaagatatgaaaaggatttccggatgagtcaccattaccctagattaatgttagttttaatcttgaacacatcaatgttgaaaactttatccccttctccagcgttgaatgaaatgttctgcttgttccatttcttcctggttcacctttgtttagtttatttaagggaagtaagctagacttctcttttgcagtc

SEQ ID NO: 110884 - DNA, 719 bp, Setaria italica
  Intron number 3 from transcript Si037754m (locus Si037754m .g) derived from phytozome v7.0 (chr-ID scaffold_9; pos 80 58422 to 8059140)
aacttgctggaggaaatcagtgataagatgtaagtagcatgtttctagttatcttttggtttcagtctcttcatctctttttttccctttattgtggatacggtgttctagtgctattattgtatcttcacaatgtcatagttgtaatcttaattgttgcatgatgagttcatagcttatgacttgttctgctttccagatgttccttttccatcttaagggtctaaaaacattaaacaaaatactgtccttcgagagcttttcccagactccgcatttaaacctgtcaaatatttattaatatttatgcttctactcctagatccagcttttgctcactagatcaaggaacatttctctgtctgaccaccttacttaagttctctgtgtataaggtggagcactgagagtgggaagagtgtgtatctttctattctcactagcattctttcctactttcttaagagtatttgatcatatattttctcttgctagacaccaaacaattacatcaatgtgataccggaattgtgacatatgatcccccttaatgtcctagtctggtaacatttcactctgataaagtaacatcagttattctaccgatattagtgttatcaagtacttgtattgttcttggagccattatttctcatactattgtaactcaaatttcctattcagggataaggcctactttgtggatctctttgtaaggg

SEQ ID NO: 110885 - DNA, 687 bp, Setaria italica
  Intron number 2 from transcript Si001906m (locus Si001904m .g) derived from phytozome v7.0 (chr-ID scaffold_5; pos 41 0685 to 411371)
caggcaaatccattgatccactttggacaggtaatgttgaattttacacaagttcttgactgccctgatactatgtttttacctcaaagtaagagccggtttgatctgattgtattatatgttctattagcagtgctcagtccagaggcggacaaggtcctaaaactgataaggaacatcttacttagtcactgagaaaaaatatataaaaatgatggaaaccctttgaacattctcagtcttgatgcactgatattagtaaactagtaaggtgctctctgctctgtcttgaagagggcagattttcagtcatatgtttcacaagtatactccctcttagattgtgggattcaacttactcgggggactgatacaatctttaaatatttttttctcttatatttaatagctagtccattaatctttaaagcagcactgcatgttcaacattatcaaaggttaaagtagtcaagtagctacctttcattggttgagtgacagttggaatttgcaattccacatgagcagtgctcaagtaggcccagttgagatgatcgcctagactgtattttggtccatatctctgtcctattctcaaattacattgtaatggcattactcgataatcatttatgtacatcctggatttcagcctccactccacactcctctttgagtgtcactgca

SEQ ID NO: 110886 - DNA, 1002 bp, Setaria italica
  Intron number 1 from transcript Si004803m (locus Si004803m .g) derived from phytozome v7.0 (chr-ID scaffold_5; pos 11 978574 to 11979575)
gtaccattggtagcagcacaatgccaaactttgcaaataatgtgtacggacaatcttcctccatgacatctccattgatccaagaaggatatgccaatatctcaatgccgcactttacagttggtgctccgtatatccaaggaggatatacaaatctattacttggagttgatcaagctgccacattacagcctgctgttaagaaattaaattttgatggagtgccaaatcaagaaaacaagtgaccttattgtgttacacagaattttatttttcatttgtgctgtgttgggatcatatatttgttatctatatcagttatgtaactcatttatattgtttgagaattatacataacatcattatttgttattttcatttgcgctgtgttcctggcttcctgcacttgggaattatatgtaacagcattattcgcctgtacaagtatggctcattgacgtttgtatctgctaattgttgttgtggaatgaccgaacgaacgaatcaaagaaacaatggagagagcagtcgccttggatcagcagtcgatggacatggcggtgctattgccggggtagttgaagagggcaactgatcgcgaggatcgcggcggacgcacgatgagcgagccgagcgagccgcggacagaaagtaccacgcggacggcgcatacgtaaatgagccagctactatcaagggcatcgcacgacggactgcagggcgctccgtctgcagcccgactgcatgcaatttttttccggcagtggcagcgccgcagcagggatcggcacgtatcgcgtattcccatccattgccatttggcaacacaggatgatatgtccggccggccggcgctgtctccatccatcctgcgctattgcgttactggtcgcaggtcaatgcgaaatgcaataaaaataaaatgaaatattcgtttaaaaaaatgaaatagatgaccaactgaaaggccgcgcttgtttcgttttcgtccctgccagtgtc

SEQ ID NO: 110887 - DNA, 997 bp, Setaria italica
  Intron number 1 from transcript Si002310m (locus Si002310m .g) derived from phytozome v7.0 (chr-ID scaffold_5; pos 40 575810 to 40576806 reverse strand)
acgaggagctcgccaagcgcggcgtcttcgaggaggtaagcgaccttcgtgtgagccctcccttctgcgcctatcttcgccgattattggtgggaccgctggagatgttctatgcgtgtgtgcttgatagtaatagcgtcggagtttccagtgagtagtactaacagtaaggaagccactactgcattacgttaatttcctgtgaactgtgctcgtttgaagtacaatttgcatgttcaaactacacaatggttcgtgggctcgttgctgctgaagttacagaagccgtgagtatcgcatcaatcatcatcactgtcagtccactgaaatactacggtgctccgtactcgcgtcagaatcttctgtgaccagtactgaaggaggccagtgcttcactcggttgtaactccagattccagaatgagttgtgaactgtgaattatgcttttcgaaagtgcaattttggtcacagtgaatggagtgagtcatttattttttcttgcttttacataagttgagtatcactgcaatgaggtattgcagatttgcagtaaacttattgttcaggtgacacaggacaggagctctgcgctgccaagtgctaaatattagctgtgcctttcagaagtatctgtttggttgttactgtgagataggatatttttaggtgaaattggtgatgaactcgtagtcaaatcccacacaaataacctttggtaaaaagatattgcttagtgctgaatgatgagtttaagtatttattttcagttactaaatgtgcgagagttcagcggctatcattaaatacatttagaaagagtggaaaaaacattgtgttgttaccaaaaaacaaagctttgtgaaccttttggacttatgccgcagtgcaccctgtttttcaactattccaggctgactcaaagcgcagtatgtaatgaaaaatgcattttacttttgtgcagaaactcagcaggaaacttgttcatataagtgttgg

SEQ ID NO: 110888 - DNA, 793 bp, Setaria italica
  Intron number 2 from transcript Si002166m (locus Si002166m .g) derived from phytozome v7.0 (chr-ID scaffold_5; pos 10 872396 to 10873188 reverse strand)
acatctacatttaccggtacgtcgatgcgatcaccatcttgttttacgatggttatatttttccatcagttgcatcatttgtgggggggggggtaggggttgtttgatagcagaggctaaagtcacattggatcggatgttccgatgctaacgaaaagaactaaccatgaacttaattataaaattaattgcagaacccctggctaatccgcgagacgaatctactcagcctaattaattcatcattagtaaatgattactgtagcaccacattatcaaatcatgaactaattaggcttaatagattcgtctcacgaattagtctccatctgtgtaattagttttataattagattatgtttaatactcctaattaatatctaaatatttgatatcacagggctgaatggagccaaacacccccttaaaaagagatatcttgcagaatgcacgcttatctgaatgaaataaacaactgcactggtcgactttctgcactgttcatataacatcactgttaattcttttgggagaagaaaaaatattattatctttttggaagtacataaatggaatattaaattgagttgaacaacatggtgaatgccactagattccatttcttttgattggagatggttgcaaactactacaacgatgattaactgaacacataagttatgtgaataattgtcctcggcaccagaattcagaaagaaatggcgacactgaacaatctttgccgtgtgcccttgcagtggcgagaaggccttctgcagcgccaattgccggg

SEQ ID NO: 110889 - DNA, 609 bp, Setaria italica
  Intron number 2 from transcript Si002320m (locus Si002320m .g) derived from phytozome v7.0 (chr-ID scaffold_5; pos 38 301609 to 38302217)
gacgtcggagtggaaagccaccaggtacgcgcctagtttcgttcatgtcacgctttttatgtgtatgttggatgtggaatatcttcttaaaaattttgtgtgtggttgtgaacttgtcccggaccaagaaatgttcaacttcaggcccatgacaagtcaaagaaccgccgcacacaaaatttgatgaacattatccagtcatccagtgacgatgtactattcctttataactttccgagtttatttcaaaacaaacttcctcaaaaccgtgcaaacaattaacagtagtggttcttttttttttacaactattttttttttcacaacaacggatggttacaattctgcgtcaatagagagtaaactgttttccttgctggcggtgtaatttgaaagcagcactttgtgtcctatatgtgtccgccaactgtattctgaaaactatattatacggggaaaaaaataaaaggatggtttttttatttatatgctgacaggtccacatttgcttctattaatatagtcttttctgtcagcgtttgatcactaatgttgatgcatcgtgtacatgaaggtatccacgcgtgaggtggacaaggcaataacaaa

SEQ ID NO: 110890 - DNA, 876 bp, Setaria italica
  Intron number 2 from transcript Si038051m (locus Si038051m .g) derived from phytozome v7.0 (chr-ID scaffold_9; pos 62 40643 to 6241518 reverse strand)
aggtatgtatatgccgtttgttggtgtgcacatagtttgtctctaaatatagcaatgaaaatttttagagcgttagtttcatctatatgaagatactagcttaattttttttaaaaatgcttctagtggccataagtgtacaacatgcatggttgtgggagaattggtctggaagaatatgaggagttaatttcttaaccaatggacatagcttctaatctattgcccttgaggacgaaagattcacaatctaatttctatttggatttgcgctgcatgctttaattttatgtttggtacttgtgcagtttaggctctacacactagtagcgttgttaaaacctgaacataacagagtgtttgctgtgttgttatgctagatataaatcgcatgccttgcatgcatgtcatatcagttttcttactgtgttggtttccaagatgccacatattattagtatagttgtagtgtttttgttattattgtgtcgggtatgcatgctggtcatgtaatttgcggtttgtttgacttctcctcacatagtactccctgtcttctagtttgattaagcacagattggtgtctacacaagaactggaccatatggcttgctctgttgaacatttccaaactgttcttaagctactacttcttgcgtactgtttttccttgattttagctgggtatatgtttcctttttctccttgagcagtgtttattttaattgcctgtttcgttcatgcataaaaaaatattatgcttgttcttatatttcttggatgcaaaatgctgggtatctttttatttctggtgcttgaatttgtgcggcttatttttttttcactttggtattggacagaatcacaccagaaacc

SEQ ID NO: 110891 - DNA, 872 bp, Setaria italica
  Intron number 1 from transcript Si036367m (locus Si036367m .g) derived from phytozome v7.0 (chr-ID scaffold_9; pos 56 885669 to 56886540 reverse strand)
tccccctccctggtaagtgcgctcctcttcatgatcttgtgctcttaattacacatgcaatatgcttggattaacacatggtagcacgttcagaatcatacgattcattgcctagctcagctgccatgactatgaagccgtttagtgggctagtgccaaagaaaattgctagttctgctgcagagtgcagaggaggggccaaactgatgagttagttgcagaggatgagtgcgtgagttcgaggcagagagatgacttctttcgctttcataaatttgtcctaggtaacttgggtctgctaaaccaaatgcagggttctaataggatattgtttggaaattggattcggccatggttcccgtgggtggagattgtttactaaagttctttttaaaaaagatgcgttgacttggtgagctggacaaggttgctgcacatgcaaggttgttcagagacgccgagacacctcaggccaccgttgtgaacggcatggaacatttattagacaactccctgtttgttcatcctgcgcggcaggacaagtccacccatttgaatatttattaagaaaacacaactcattcagaagaaattcgttcaagaaattaaccttttaagttgttatatgttgctgtcaccggccaaactgtttgactttctagtctgaactcttaacatactactaaagccaactctccactgctgacaagtcacaattgccattgatatttggacgcatccttttgactactgttcattttcttttcttatgcattcgcaaatgatttcgcagccaccagtcggtactaactgctcttggaatttctgtactctcagtttgccgttcgtcgatcagcaacacctcggctgat

SEQ ID NO: 110892 - DNA, 602 bp, Setaria italica
  Intron number 1 from transcript Si034438m (locus Si034438m .g) derived from phytozome v7.0 (chr-ID scaffold_9; pos 48 135852 to 48136453 reverse strand)
tcgtcggcgaaacgggaagtgggaagaccactcaggtacggcaatccgtgctccagtacccgggcgcctttgatcttcttatttagtgtttgctgctaaggttaggatatataggtgttttatagattatccatcttttgctttggtaaattggtcagatatatgtatctgcgcttgtttctgtaactgaagtcaggtattgttcgttttgttcttgcggctgacttgttattgtcatgtttgtctgtcattcttgctcagttagttgtgatgattgatttgtgttatgttgaacgtttcccctaattaggtgtttagattactgaatgcttaatttccttatttgtattgttttttttaaggttaggtgatagatactctaaaggcttttcacttttgggcaagtaaaattggtcaggtcaatttgtgttcacatgtcggattgtgatcaggatcatatgttcactatagcttgatttgttcttgttactgttgcggtgattgtggtgtttgtctctcattcttgctaagttagttgtgatgattgattcgcgttatgttgaacagatcccccaattcgtacttgaggctgaaggcctggg

SEQ ID NO: 110893 - DNA, 825 bp, Setaria italica
  Intron number 1 from transcript Si033955m (locus Si033955m .g) derived from phytozome v7.0 (chr-ID scaffold_9; pos 15 470530 to 15471354 reverse strand)
ggtggggtgacaccagctcgtacggtgctaagaaggtgagctgctccatttccatttctgatgcttttgaaatgctacgaacgacaggttgggacttggggagttcagacattgggaaactaatttggtgaaaccacgcaaatgtgatgctgatctgctatgggtgatagttttccagtaatatgtgaaactaaacactaggatgagctatgccaattagtaccattttattttttgggcgcatgcaaaggtgtgatatttgtgtgctttaggttgttcttgcatggcatttgcaaagtaagttatgaaagttgtcgctgagctttggtaacctgttttttagcttttagatctgaatttgaattctttacttccatccttctaggttgttagtgcaatgcaatctgtcgtaaacctgtctcccacagtagcataaatgtgacatgaggaagtgatgtatctcctttgttgtgaccaggaaattttacaatttaatacaaaccaatcttttgtcttctatctctcaaagagttaaaaaccttagtgtttcctactagatcgtagtaataaaatcttggtaactgtagcatgttaaaactaagagaagcatctggtaggttattcagatttcagccagttgatttctagtctctatatttatgattccccaactcagggcatgcctgtttgaagattcacctgttgatatgtgcacctagtttcattgcttttgtcttttttaataactggacttggagtacaatgtcaattcaaattctaccctacccgtgttgcagaagcatagagttttttgtcagcttccga

SEQ ID NO: 110894 - DNA, 931 bp, Setaria italica
  Intron number 2 from transcript Si001151m (locus Si001151m .g) derived from phytozome v7.0 (chr-ID scaffold_5; pos 34 150859 to 34151789)
gcgccgccgatctcgacaaggaggagcgccccgaggtgatccattccgcgatggcatttcccccctttgtccactccggtgcttagcgaatatactgttagcgtttcgttcagttccttttgtgatccatcttcttggatctggggagcacgtgtctgcctttgctcctcaaaatatcacatggtagtctctctatagcgacgtgtgtggaaacaaaggcagatgcactttttttagggatgaaatggttggcaatttgtgttgaacactagtgtgctataactctgagtggagagggtgacgttgatggataatacctctttgcattttaaggagtgaaaattgcggacccatcacttgaggtggcgccaggtctcaactgtaattttctggactagttgaaattttcttcgcctgaataaactgtaatgattactttccatgttctaggctgtcaaatattaaccattgtaataaaattgacataaaagctattttacataataaatttttttatgatgttttatgataaatatcttggtttttctgaaaggttgttttttattccttttttaagaaacacatatttccttggtgctatagccttgtaggaagcatgtgttgatccatcccatgttgtgactatgatatttctttaatgtaacagctgtagagaaagttagaaattggaaactaaagtttggcatctattgggttctttgatttaacagatgaacctgttctgttttatattcaagagcagtttgatataagtccactaggtgcactagtagcttgaaacaactttgtagttttagcattcagcagacattgcttagatttaccagagaaggtgctcctgggctttcaggactaacattttgatatggttgtgttccttttctgtaggtcctgtctttacttcctccgt

SEQ ID NO: 110895 - DNA, 823 bp, Setaria italica
  Intron number 3 from transcript Si037531m (locus Si037501m .g) derived from phytozome v7.0 (chr-ID scaffold_9; pos 52 105038 to 52105860 reverse strand)
atcaccgctgaccaagtatgctgcttacacctcattgagcacactgcacactctgcttgataatctttcatgagctatgatgattggagttacatcatttatgtgaatataggagtcgatttccacactgtagttatcgacaatcaaagtgactggatgcatcccaactctgtcattcttgctgcatttgagctacatgaaatcgtgaatacaccaccattatatttacacagtagccttagcaattttttaggttcagctgcttctggaaacatggctcaacttgtgtgtttgattcttgagtcgatatttactctgccacttttgttaggatgcctgtgaagttaaaacataaaaggacattaacaccgaccatcagctaatgtttattgtttgtaaacattcgcatggatgatagaagaaaagggatggttattgaaatctaggctgaacagtcttcaaatttctggtgatcaaaatcaagaggcataaaagggtggctggatgatagaagaataatcaccctcttgtttgcgctttccctgtgtattcatatagggcattgttagtatctatcaatttatggaaatcaaagttttgctcagattgtactggacagacacaaactatcaaaatagcgatttttaggaatacgactttagaaattagtaaattgatcgtcatcaacattcaagttgactagttgagaatttttatagtttgccacgtgcttgcgcatgttattactgtttaatacaaccattagtgtttgtttggtttttaactcttcttccgacattatgctttatggaggttgtggttc

SEQ ID NO: 110896 - DNA, 978 bp, Setaria italica
  Intron number 4 from transcript Si037855m (locus Si037855m .g) derived from phytozome v7.0 (chr-ID scaffold_9; pos 58 881923 to 58882900)
taaaactcatacgaagtctccctcctcgttacaaggtatgatatcagtgtattcattgtggcaaagaatttctgttacgattatttgcgagagcaattaggttttgatatgctgacgttatgtcttgtactcctgtttatcaagttctagtaatctgtgagttttttcgagttccagggaaaagattccccagcctgtatgcactgcgacagggatcatcaggcttcaattctgttttacagcagatttgatccaagctggggctcacaccaccacactcttttcatcgttacatgacttaacttcattaaaaaaacagctaaacaccaacctcaggagctcccctccgtgttcactaccagatttggttacctccaaaccagtcaattcctatcagattatccactacctcaccctactcaaaacccttctgccagtgcagctcgctttcctcttgcccttggtgccctggcagcagctgggagctactattagcacatcttgttgacgatcatatcttcacgcccaccatcaggagacaccagtcatcccactgatcatcctagtaatgtgtaaataaacgtagtattttgtcagaaaggattagtactgttgtttggtgcgttttcagatgtggcgcatgttcctgaaatgtacaccattctgcatgcccttataactttgttggataaaatttggtcactgataaaattgttatataatttgtatagctcatgtacatgcctgttgtacactctgtagtcaagtagactatttaccagctcatgtacatatcttatgtaccgatgaggaaacttagttttttttcctggtcaacatagtagggaaattgctccttttttcttttgcatattgctgtttgctatctataatttgtaatttgatgagatgatttagttgttttttaatctaatttttgtaggtggacataagggtagcccctggatcacattcaac

SEQ ID NO: 110897 - DNA, 965 bp, Setaria italica
  Intron number 1 from transcript Si001986m (locus Si001986m .g) derived from phytozome v7.0 (chr-ID scaffold_5; pos 39 300420 to 39301384 reverse strand)
gactccattgagatcctgctagacagctgcccagagtatgtcaaagtgtcgtttgctccgttttaatgataatatgcatagatcagtttgtcatagtttaggcatgttaaacttcaggaacaactgaaacttcaaataagctagaaacatacagatactgttgtgtgtattaggtaagtgcgtcaatttgttagaaatgccaagtgaaagactctgagttgttgctccaagcaatttttcgctggatagaattttctagtgctccgaggcacaaccactcttgcaaggtgtaggttagaacctagacctacatgatcgggaaacagaaacctaaaacctttgcctgtttctaaatggatgttgtagtttggagttccatgcgttgactgtgattagatatattatgagttatctgacaatttcttgttcagggtaataggatgcacttgattagacatttgacataagaaaaacttgacgaattcaatgtcgtcatactaatttttgaaaacatctccatgcatcatttctgattggatcaagggctaaactggtacggcctaattgtcttgcggaattcttggcagatgtactgattttcagcagcatttcatttttcatgtgatatacatgtatgcttggtctttatagacattgacatctctggtacaaatttttcctatatttctctcatggaaagtaaggttcaatatatcaatctggaagataaaatctgtatttttaaacagtagttgtttgaaattattaatattgttctgaggataactgcatgcaattgatttgtcctgcattttctttgtaatatttctttaaaaatgatcaacaactagcaacatcttcaatagctatgtcctgcacctttcattataatattttttttctgggtggtcaacaatctgcgtattgagcctcttgagttttctcttgcaggttcttcaattccc

SEQ ID NO: 110898 - DNA, 255 bp, Setaria italica
  Intron number 1 from transcript Si004791m (locus Si004791m .g) derived from phytozome v7.0 (chr-ID scaffold_5; pos 40 023713 to 40023967)
ctaagaagtaagtctaaaccatagccctatatattaaataaagctagttaagcatgtgaactatgaccaaaattatgaccaacagaagggaataattagttgttatggactttcagttgttttttgttacatttgattatcctagttcttgttacctgtgctattcaacttcttcttatggatattttctcaagttattaatggtgctttcctgaagtaggagggtccgcattagcacaagaactgagtacacat

SEQ ID NO: 110899 - DNA, 730 bp, Setaria italica
  Intron number 1 from transcript Si037621m (locus Si037608m .g) derived from phytozome v7.0 (chr-ID scaffold_9; pos 52 904456 to 52905185 reverse strand)
acgtgcgctgcacctactgcaacaccgtgctcgcggtaaactcttcgaaaaatcgggtcagaatgaaacatcatgtgggggaagatcatgatgcggcgcaagaatggtcgccagatatggcatttttttttctttcacccgctggttctttaacttagacaagttctctgctggttcccatttttcttctcccttttgcgttgttctgtatgtgtcctttgcgttggatgggtgaagctcatccacaaggcgtgcctgattaaatcacaccatttttattttcttgtcttgcgattggagggagagcacagaaaaatccactagaattacgcatgtgacatgtgattgatgtgctatgcttcctttgctgtgtttcagtggctcttgcgttgtttctttgtggaatattctgcttactggttctcctgatagtgccatgttccgactttcacttccatcatatctgtttggtgcttcacaagcttccatatcttctcttctttgttgttacatgcatgctgaagtgtagattggacaataatcttctgttcttttctcctctctgccttcctgcccctccctttcaatttcctcccctgagattttattctagctgctactgcgcttagacagtgccatgcacaggaagttgatctagaaacaggtggttgatttgattgcatgctgtgattaattttttgcttcttgggtagctgcaggttggggttcc

SEQ ID NO: 110900 - DNA, 757 bp, Setaria italica
  Intron number 2 from transcript Si036763m (locus Si036764m .g) derived from phytozome v7.0 (chr-ID scaffold_9; pos 27 19781 to 2720537 reverse strand)
ttcaggtacactgttttacatctttatatgctaagatgattgtattgggcaagagatcatcaactccttttcagggtcaattgagatatcatgtttgggatcacctcaattttcttcatagctgttgtaatgcttgactcgatcagcgataaaaactgcacaagttcccaattcacactctatgccatgccgcctggcactagctgaatctgtatttgctaatcaaatctgtaaatttattccaacacatctttgcaacccaactgtctagatatttgttactgtcagatgtgaagaaagatttcttaatccatgtaacttatgcattttataaggaaaaaaaggagcatgggactgtgccaggctcttaatagtttgtagtatggaactgaaacgttagatcaatgaatacagcttcagtttggaaggataaaaaacattggacatagcggtagagttcaataaaagagtcctgaactagacactttgagttgtagcctgtagcctgtaccgtttcttcatggcaacccatactcatatttctttggaatgtatcatgccttcagaattgaagagctttaaccaacattaaatcgcagaagaggcaatggactctttcggacgatctatgccttttagacaccggattcagagatgtagttctcaattggtcgtattatttatttaacatttggtgtttggttttgtcattatgcttgtagcctgtaaagagtccggttacaatttgtggtgatat

SEQ ID NO: 110901 - DNA, 1023 bp, Setaria italica
  Intron number 1 from transcript Si002501m (locus Si002501m .g) derived from phytozome v7.0 (chr-ID scaffold_5; pos 39 768558 to 39769580 reverse strand)
cgccttcctcctcctccgatccaggaagcccaagggtacggacatgcatacaccccgctatccccgtcgtgtacgccagatgcctctggttcgcgtttagatctggttgctgacggtcaccgcgcttttcatttgctccggtggtattagcgttgcacttcagttaccaattttggaaagtgattggagcgcaggggtgtttattcatttgcttttagttgggcacgatctgtagaggtgctacttgcagcttccaggctgtaactcgttgggaccaaaatcaaaagaaaaggaaaacaactagtataagtttattcccatcgacatgaaccattgaagttattattcatgcttgcataccaggctgtcaaacaattactagttttcattgagtacacataagttgcagttagtctttacctgttttcatgtgttggtaggcagttttctggttgtgttggtttgtctgctccatttctgaatggatgaggtagagctttcagatgaattttcttatctcgtcttggtagctctgatcctagcatgatattatgagaaagataccgatgaaaaaggaatgttgactacctgcaaaaaaaagaagaagaaatgttgactaacagctctaaccgcaggatataagcaacaactgttgcctaacaactctaaccacgtgatataaacaaatggtctgtttgacatgtgtagtaggaaatgtctgcattccttattgaaattattagttctcatgtgattttaatgactgagagcctgattgtctgcaatattgttgtaattttattgtgtagtcatgcttctcaggtacctggaagtattagttgtttgcagtaccgggtaatttattcatgtcatccattatcttttgtttatcacccaaaaatttatctgtgcttaattgtgctttctgtaattgaaggttaattcgttataccccaatttgattgttgctatgccattttccctccaggctgcttggatcctgagaacttcaagaagttcaaa

SEQ ID NO: 110902 - DNA, 1008 bp, Setaria italica
  Intron number 1 from transcript Si002294m (locus Si002294m .g) derived from phytozome v7.0 (chr-ID scaffold_5; pos 11 297592 to 11298599)
ggccgcgccgcctgcagacccgtccccctccaccagtgagttccgtctctttcgttacccactcccctagtccactaccattagtctacaaccctaccttccatccttccttgagaattcagatcaccaattcaccatgcccgcaccccagcaaatcaacaccgctaccacttacctagacgtagtggcggtgtcggacggccatttcacttttgattacagaaagggattgttgcttgatgccgaccttgtgccggaccccgctctgttcctgtttacctcttcacactaggatacccacatctcatttctccgtagtgtacgttttccaaatgagggtgtcgagctcggtgtccattgaaccgtagaattgggccatataagctgactttgtggagtactccccatcagccttgaggttccaagtaatgtgatcagggctgtcttcgggtaactcaactgctcacactctagatttccccctagtgttgtcaagtgctgaatagagttgctaatgtgacagtataagagacacttggaacgtctcaatttctttcctctcatcattcttgtttcgaatttgggcgctcctgctacttttattttatggagtaattatcttggatggtcccactaaaattcaacgattaactacctagtactgttctttactagttgttcaaacaagtagcttctgcattgattccactagcaatgggattttttttcttttccttttttccccttgaggaaatcaagatatgttttctgatactaaaatatttccagttatatatggaaagtagttttttccccatttgcaagcgtctatatcgatgggggtagaaattgtatttctaaatatttgattgacaaactataattacaagttcccttttactatcttcacagttcattgtttcttaaggagatagtgtttgataaacttttcgtttttatttacactgtgcagattttggagttcccatatacaggtacactcctctg

SEQ ID NO: 110903 - DNA, 946 bp, Setaria italica
  Intron number 2 from transcript Si003309m (locus Si003309m .g) derived from phytozome v7.0 (chr-ID scaffold_5; pos 36 242050 to 36242995)
gcttaaacctggctcttggggctggctctccgaaggtaaatttatcccgctccagtcgatccatttccgtgccgtgaatgatggatgccattgggacttagggtagcgaatttgaacggatgaactatactgaactagatcagaatctgaatatctgatgtggctcttccgtttttggtgcttgggtttgatgcttgttgttatctattaaatattgttctgctatgtgagtatgtatacagcttacctgtgtcacactcctttaggccttaatgagatggttactgggaataggctagaaactgagggaacttcagatatgaatgcacctatgtaagtatgcctgaattagaagtaatgaagttttgtgttaagctagactactgggctagtgctttgtgtgtgccagtgtctaaaattggatcaaaatgcttgattcgctgctgcttcagtagtggcatctttggtggatgggatcaaaaaactttgtaattcacattcttttcttagttctctgtatggcagttcctaacaaaaaactattgccacaaggattaggatgcacttgcctgactgacctcaagttaatgtttgtgttgtctactactttagcatccagggaacatcatttgactaagtacagaacatagctatgttctttattaaaatagtttttttcaaaaataaatattttcttgatatttttcaatctttatcctttcatacaactgttatccatgcattggcacatttacccacctgatcattttcactcgatatagtacggtgccttggctattttgtttaagattattgctgggatctggaaaacaattatagatctataaattgtattaaaagggcatttaaggtgtctacaagacttaataccaaattattgttacatgcagtttatagtttgtacacagtttgttgtctggatcaa

SEQ ID NO: 110904 - DNA, 607 bp, Setaria italica
  Intron number 1 from transcript Si035868m (locus Si035868m .g) derived from phytozome v7.0 (chr-ID scaffold_9; pos 51 808758 to 51809364)
cttttctattctaggtactctcttcacaaatgcatgcgccataaagattcagcaatatagttgctgagaacgcagtttttgcctcaaaacagatagcaatttaaactattcatttttgcaatggcatgtacaatgaaagcagtgcttaagaaggtgtttgacatgccatgtcgagcatcaatttaggagctcaaagtttgaacacttcttcgttatggtgcttagatagttccgtgaaccgaagatactacataggcacctgacaaccagcgatgtttaatcaagcatgatgctagagtaattttccctatgtggggaaacaaaagaaaaccagtttttttttgtgtgtgtaagcatctccaaaaacacctgcattgtacatatccttagagaatgtctgtttcatgagattttgaactctcagcatatataaggaattagacagaagcccagaacatttggaggcataatgtacagagcattttaaaaataaacataaatactacagaaaatatggtgcagatcaaattgaaacttgtagacatacttttaaagttcggcgatgaagtttatcaagtttaagcatttcttgtctttttgacaggga

SEQ ID NO: 110905 - DNA, 751 bp, Setaria italica
  Intron number 1 from transcript Si005604m (locus Si005604m .g) derived from phytozome v7.0 (chr-ID scaffold_5; pos 32 307751 to 32308501)
ttgagcaggaacaataccttcatcctgagccatagcatcaatttcctcggcagctacatcctcaacttctccgggtatgatttcaccacctagttctgctgggggagtagagttgatatccaaaagaaaacctacttctagatgaacacctacaaggagtagcaagtttctttatatgcatcaaactaaaaaacaaatatatatgttgcatttatgaatctatgtctcttactccatgtttatctctattcaaatgtctgataaatatctaatgaatatgtgtcttatactcatgttgtacctgcaccttcaacgagaacattggcttcttcatcttgagcaagaataatgccttcatcctgagccatagcatcattttcctcatcagctatatcctcaacttctccaggtatgatttcaccaactagttctgctgggggagtagagttgatgttcagaagaaaacctacttctagatgaacacctacaaggataacaatgggataagacaattagattgaatcagatgacacacttaatttctttatttatttttaaatttattctacttctagtgatgaaaacttggcaatcaagggttgatttagcatgttttttgtgttagcttcaaactgagtactttctgattgcatgttaaaaaaacaaatactccaagtatgcaaagttgtatctgcaccttcagcaggagcaacaccttgatttgtagattatcaaagtgggcaatcaaggg

SEQ ID NO: 110906 - DNA, 442 bp, Setaria italica
  Intron number 2 from transcript Si034060m (locus Si034060m .g) derived from phytozome v7.0 (chr-ID scaffold_9; pos 17 736075 to 17736516 reverse strand)
aacaagctttaggatctgagaaagacaccgaggtgtgtgaatctaataaactctttcaattatacggtgacctacttaagttttgtgaagttctgttggtattaatgagatcagatattttcaataaaagtaagaatattatgtaattagtactccttgagaaaatattgcaactgacatggaatttttggaactcttattagccattgttatgttattttattgtttttgctatgctgttctatatcatctatacctttttatgtttgtcagacttcctatcaactacaatgcagtttctcttagaagttaaaattttgatggattgaaatttagcagtttttatttcaagttaaacagtatttgtcaactcttttttcttcttccaaatttgattatcttaacaggtacctctaactgaggaagaagttgaagaattggt

SEQ ID NO: 110907 - DNA, 902 bp, Setaria italica
  Intron number 1 from transcript Si034060m (locus Si034060m .g) derived from phytozome v7.0 (chr-ID scaffold_9; pos 17 736784 to 17737685 reverse strand)
ccgcgccgggcttgggctggtctcttcgttcgctggtgagtaacccgtggttttgctgttgttccgttccttgggcttgggttggttccttgttgcttttgctgctgttcttcttcctcttgggccgcgcgagggatcgtggtcggttggcgccgtggggcttcgtcgtttgactcgggactgcgggcgcggtttgctttgcaaggatttttttttttttttttggggggggggggcggctggttgaaccaagcaagtgtgaagcccccgagtcaaagcgcgcagcgctagttttttttttttttttttttttgcgtcggttgggttcgctgtgattttctgcggtggagtgattccgtggctaccttgttctacaatgataggatcacagcacattaacaaggtactgtgtctaatcaccgcacattagcatcattgttattgagaattatgctaatgtgctgtgattagacacagtacttcttgaaggcatgccatttgctctaatgcagtaatgccgttctgcacttttggccagtatagtttctaggttgcttttatatttggcattgaagttaatcaaatgggaatatgatttaattcatcttggtaacaggtgtttttgtttcagtatgttaaatccagcagtaaacagggtcatggttcattcaacatttcagtgaaacctacatttgggttaatttctgttatcaacatacccttttactgttatttttattatttggcacctgtgcaaatcagcattcttgttttgcttatccatttgttttactttcgtattgtatttttgtttttcagtaaaatagttcatgtatgcaaagatggaatcagatatgtttctgtacaagtaaatggtataatgatactatgtatgaatcagg

SEQ ID NO: 110908 - DNA, 586 bp, Setaria italica
  Intron number 2 from transcript Si035587m (locus Si035587m .g) derived from phytozome v7.0 (chr-ID scaffold_9; pos 17 773307 to 17773892 reverse strand)
acgtcgtcatcgtcgcgtaagtggattcggcttcctggctttcgtgctttcaccggcacgcggcctcatcatgctaattaaaagcttttgagcgcgaccggtgtgggaattccctttcttttcggtttccggtggccgttgtcctgcgatgattcctaggataattcgtgtagcggtaccggcgactgtactttgtttgagttgtggaagttgtgatggtcgtcaaatgcggctgcaactgcaatgatgaattgctgcgaattttggttctgcctgttagtcaacccgagtctaaatctgggcttatagaaacacgcttttctggaattcattatggagcgatgctagggtcatctgttgtacgggagactgctggagaatgtcatggttcagttggacaagcctggttattggatcttaccattagagtcatgataactgtgaaattattttatgtgtagaattgttctctttttctttttgtgttacttctttctcgtgcatacatacagatgaaatcttgtttgattgcataccctttctgtctccagtgcatacaggacggcgatttgcaaggccaagagag

SEQ ID NO: 110909 - DNA, 1053 bp, Setaria italica
  Intron number 1 from transcript Si005524m (locus Si005236m .g) derived from phytozome v7.0 (chr-ID scaffold_5; pos 11 445805 to 11446857 reverse strand)
gaagagggattgcagcgctcccagtttaacttggggtcagtattatatcttcctccctccccggcatgtaagtacaagctggcaccggaatttccagggtagaaacaactcttggtagtattatgctgtcttgcacagcttctattttctcctgtcttccattgtccaagctcatagtacattttgtcagttgtcacacaacggggaagatgaactaaagttaacaaagaatgttagatggtaaagataattgcatcacagtttcagtttccaagctgtaagtcaagggccatctttttcgtaagatcctcaagttgttgggattttggtcaacatatttgaccagatccttgaggtatcattcatatgtctgattacaattgaatcatagagaagctccatgataccattagttacataccaacctcttataaaaagactactcttttatatagtagccagtgatatatctgaattcttattttctatatgatttttcctatttagttatattgttgcatttccttaagaaatttaatagattgcaggaaataaagcttgatataacttaaattttctccataaacggctcttaatggtagatatttgtccatctttatgcctttatatagatacctcaatttctgatatgctatagacctgcaacagacacttttatgtaaaaaaagatcataaccagtaccatttgcaatatcatgtgtggcaatttcgtaggtccgtgtgatttgcaatttgaaaccatagttgaattcaaaagtcattggcttgtgaaattatattccaatattgcacagaaaataaaatgccacatgctgctttttgtcatgcatttatttgtcccattagatctcttctagagtattgctaaattaagtcaacttacgctccatgtttgtaacaaaaaaattggtggcaagcagcttgatgcaatgtaacagtatttagcctcacattgcaccttgttctctggaagggatcacacttaatgaaattatctgatttctttgcagagtaccatatttcagtgtgaac

SEQ ID NO: 110910 - DNA, 846 bp, Setaria italica
  Intron number 1 from transcript Si001954m (locus Si001954m .g) derived from phytozome v7.0 (chr-ID scaffold_5; pos 30 943487 to 30944332 reverse strand)
ttgtggtaagccatgctgttgtgcattaattatttccaaaacatatgagcaaaccatcttttttggttatgtctcttttttattttcataatttattaccatctactttcaatatccgtggtacttcttgctaacttacacagaattgtagtgctttaatcaaaataaacatgtataactatttgtttacttacaatgatggaggcaaaaaacaagaaataagtacataagatgtaattcgtcactatctcactgaatatttggtttaaacaatgtgagccgagatatattgaaaaaaatggaaaccaggctcctacaccatacaaatgcgtccttatcttctcgtaaggtagcaattagtagtggttgatattcaagggaatacatcagagagtatctttcctacatgctacagcatactggagggaatattttgtttgcctgggacatcagaaactgatatcaatatgtaggagatggttttgccttcttttttcaattcctttgcttgactatagttctgcagcctaaatcaaagcctcaaggtataccaaccaaatagagttcccaaaaaaaaaggtataccaaccaaatagaaacagttgctgttttagaaagtgaccttagagaagtgtaaatacaggatgtcaggaactcaggatactattgggagtctgtagactctgtaacaacacttgcggttttagatgtagttcaagggtggaatttaatggtatatacttcaatacttgtgtatcttgtcatcctagctgagcatgttactcgattcatgttgatgttctgcaagtttctgtaatgactccatatttaatagctctgtgcagt

SEQ ID NO: 110911 - DNA, 697 bp, Setaria italica
  Intron number 1 from transcript Si000676m (locus Si000676m .g) derived from phytozome v7.0 (chr-ID scaffold_5; pos 73 3513 to 734209 reverse strand)
cccgccgccgccgcctccaccgccgccgcacaaaggtcagatgccatgccaccttcaatcaccttcacaaacaggtgtcccgtgctttcattcccataccaccactactgagtactgaccatgtcacgtcgtcgtcacctctaattctgctgtgttctggcaaatgtatgtgttttgtgggttttgatgcatagtcgtcgtttcgttgctctcgaggtttttctgcgcacgagatagatgaattctcgttgcggcatgtctgtcatgtgacgaaaatattgaaccacttttattttgttgaggttttgttgcgttcaagaatgtgggtgacaggtctcacgtgttcttcatggggctaagtttagtatggaataagtggtgatgtggatcttcgtctgtcttctgcataaccaagagtgtggattttgacaaaaaaaatttgatagcacactgaatgatctacaattataatcaagactagctggagccgatactgtcaacatcatgtaaaatgttaaccatattttgggggctttggggccatttttaaccttttacgacggtttcttcttcatttgattctgcattgggaaattcatgtggaaatcctttgtccatgatctcatatgaagtcacgactatctttaattgaattatttctgtgcttcaggggatcagtaccaaaattggcagcata

SEQ ID NO: 110912 - DNA, 1007 bp, Setaria italica
  Intron number 3 from transcript Si039403m (locus Si039403m .g) derived from phytozome v7.0 (chr-ID scaffold_9; pos 53 479844 to 53480850)
tctgcagaagggcttcttccaaaggtacattctttgcctatctatggatcatatggaagagcacagtgctggtccagtgttcacactattggagctgttgggcctaacatcatttttccattgagccaattgtgtttttttattttttatttttaatttagtgtgctcagcaaactcttgaaatttcactaagaactgggacatatagtgcatatagatatggtagaagaatgaaggacgtgaagataagaggaagtgacctgccacgttgctaagagtgttagacctgtcagtccttattgatttccctatcttgatccttttctttaaatgttgaacaaatggctagctgaatggttctggttgtgacagattgtctaggaccaaaaggagatgttgacagaagtaacatggattaatatgattaagttttttcagtttgcatcttctactgttcaagtaatctagcacccatgtctgagaccaaatgatgatctcacagaagtaacctgtctttactgttcaatcaatttagcatccatatttaagagcaaaaggagatgctgtgacagaagtgagatgtttccatgaaagaaactgctgaacctaaggattgagttaaactagcacattttgagaagttatttacacttaattgaaaataatgatgtttaccgaactctaagccagtccacagcagtgctgccacttgactaagtaatagcagaactctaagcctgtccacagcagtgctgacacttgaataagcgcagaattgataaaattatacctactcccaccacttttatctctgtacctgcaggaaagaactctaattgatgttttgtgtagatcaagttgcttctcatgttgatgctgcttatgtacttcactacctcagccttttgtctactgcactttgggtgtaatgatcaaagggccatgcctcactccagttttcgaataattgatgcagcgcaagaaagaaaagcaacaggaggaaaagg

SEQ ID NO: 110913 - DNA, 748 bp, Setaria italica
  Intron number 1 from transcript Si001919m (locus Si001919m .g) derived from phytozome v7.0 (chr-ID scaffold_5; pos 37 83477 to 3784224 reverse strand)
ccgccccggccctgccctgctgcgctgcgcccaaggtgattgattggttggttgcttgcttgattcgtttgacgctttccccatttctttgcttccatctttctttcttgtggatccgttcgtgcttctggtcttatcgtcagattgggagtctgctatgatagctattgttcatcttgcagaaaggatggttgagagtttttttttcattcaacctgttagatgatatatgatgtgcattttgttatgcttgttttgccttgtttggattgatccaatctcggggggtctttgaggcgagccttgtgaaattgctccatccctgttgccctgtccttgtgttggtttcctgattggatcgtgtgttagcttcctaatgttttgtttgaccttgctcttgcgtagatgatacttcagcaagaacgcgtgtccttgtcttttgatttgcaagctttcaatgaagcccgcatctgatctgtgcatcgcaagaacatgcaaatgattcgatctgtcaaatgtgtttaaggacgtgagtgtagcacgtcgagaaatagaaatggttcgttcctgcgttcggtgggagaccatgacctgcgcagctcgaatttgttttcccaatcactgattagaccattcacgacatcaagactctgatctttccttcccggtcgatttgtcgcagctgaatctccccccgaacaattagagtagctgcattggcggggaaagcgcaagaagctcggcggca

SEQ ID NO: 110914 - DNA, 1025 bp, Setaria italica
  Intron number 1 from transcript Si000441m (locus Si000441m .g) derived from phytozome v7.0 (chr-ID scaffold_5; pos 37 97933 to 3798957 reverse strand)
ctggtctccggcgtcagccctcttcctccccagaggtaatgcgcgcgcgcttcttccgcagtggtggtgctagctgctagattgcgcagggatgcttcctgttctttgcaatgtctcgagcgttgagttggggatttggaggattaggggggttatggggctgtcccctcctgcggcaacgttgtggttgctctggggttttttcacaggcacgagatttagtttgcgcggtaatatgatttgggtgcgggaatctgagcctccctccccttgcgttgcgtggaaaaagatgtgatttcttttgggttcgtctccacctgaaaaatggacagggtttaatggaagaagatgtttactactgtctccctacagcgttgagagtatttgagcggcagaaaaaaatgtttttgagtttgttgccgtctgcccttttttgaagcttttatttggtgattttagtcttttcggtgagatctggtgatctagacagcctgatttgttccttccaatgggagaaaacttgtctctccgggctcagttttggagagtatttggaactttttttacggcgagcattttgaatttggagagcatccttttgctctatcctttcatttggttctatttggtacgcctttgccgtcaaacagagcaagagatctgatgtgaatgctgctcatcactttccccttttatttctgtccttttatatataataatgtgctcaatgtggggcttatccatcatgcttaacctctggtttataatggaaaacgctgttctgatgtcttcaattctagttttttttttttggtgccgtggggtgtttaacaatgtgcatgtttcctctaaaaagtttgtgtatgtttcatgggaatgcgctatctaaattgctatcttgtagcttgctagtaaaagaaagaggtggcacactatactattacaacccctattttggcaatgctctacatcacatttcgtggaaccaaatttgacaccatgtgctgacattgtaggtttcatct

SEQ ID NO: 110915 - DNA, 678 bp, Setaria italica
  Intron number 1 from transcript Si001741m (locus Si001741m .g) derived from phytozome v7.0 (chr-ID scaffold_5; pos 28 51837 to 2852514)
cggtggtggaggtcgccgtcgaggtgtccgatctggtgagtttttcgattttagctgagcaaaggtttcggctttcttgctctaattcatgttttgataagaaattatatggcctgaaatcattgcatgagaattttacctgtgctgtagtcaaatgttccttgtatcattgaaagaggtaatttttcttatagtatttacttgatgtcgactaatttctgcagtaggataatattcagaggacgggggcttttttctttgtttttttgtgatatctgattatggttcgttggaagtagaacgggtcgatttgtctaggacatatgatctgttgcgtatgtgaattgtgtagactcccctaaattcgttgctgaagtcatctggattgtgcggtctcgtgacatattgttggtttggtcttgggaatgggaatactgtgcgacttaatcaattgattgttttctcctagaacagaaagaatagttatttggtcaattcactacatcatagttggcagcagttaatcataaaaagaacagagctttagggtgtgctttgggttcattaaacatgttttggagaagcaaattctatgctgttcacattatatatagggctgcaagacaccataatacttaacagttttgtgcttgatgcaggagttgaagaggtcttcta

SEQ ID NO: 110916 - DNA, 1025 bp, Setaria italica
  Intron number 1 from transcript Si001431m (locus Si001431m .g) derived from phytozome v7.0 (chr-ID scaffold_5; pos 39 448123 to 39449147)
ccggtcgcctcgccgttcggatcatcccctacctcgtaaggatttctgaactgccctcttaggcgagctttgaatctgtgctgcatcggttctgatttggattggtgatttggggcgtcgttagctagatttttgtgaaatttttgggtcgttttgtgcgatgtatagccggtaatgcgcttggatctgctgatatccaccgacgcatgccctgttcccgcacttgtttttttctatttcagcagaaatgattcgattggtctggtgtgttggagttgtgggatttcgtgctacttgtgcggctaaacattcggtctcgggaatgtagctgttacatgtagatatcttcgtgtgccatgaatttgtggactgatgttagatctaaaaccgccgtttccatttgagcgttttagctcgtgaaattacaatcgcgatgaatcctcgaatagatctgctataaatgaggatgcattttgtatttagatggcgattcagtgattgatctgtgtaagctggtttttaaactacagatctggatgtgctctatgtgatctgtttcggagtccactgacatttcgggtctgaaacagtgtagccttttagtttctccgtatttaacaggctgttagatgtttgtttgcttcaaacggcgtttgttgtatttcgaaccacacttataatttgcctagaacatccatctgatgaaacttccacccattgcatatatggtgagatggtttgctttgtgctatctttttgttcaagttgcccccgaatactgttgtatggtagccatatctggactggtttaggataatgtgagcttgcttgtactctcatttatgatttcaaggttctgattcagttgtaaatggctggacaagtgtatatgcttgatctaatcaacttgaggagtatagcaactagcaaactttttttgctttggcactgttttttaagttagtgtgcttactgcagcatctcaaattaattcatatgctctttttcttgtttctagggcgaag

SEQ ID NO: 110917 - DNA, 604 bp, Setaria italica
  Intron number 1 from transcript Si039683m (locus Si039683m .g) derived from phytozome v7.0 (chr-ID scaffold_9; pos 19 805705 to 19806308 reverse strand)
ggaaggctaacgtcgactacggcctcaccacacgggtcagttttctgtcgctgagctcaatagttctcgatcatgcccaacttgctgcatgcatttcctcaaaaaaaaaaaaacttgctgcatgcatgcttagctttctagaaaaagaagattttgctaatgtactgtactttggttatgttacattgtattgtacactttcatttccatcattctatatggttctgtcattatgccgatcactgctcaattgaaagataggactttgatttttttttttgggggggggggtgtgggcaaagatatgactttgaatttgaaaaaaagggggaaagataggattttgaatttttgattaagacagctgcgttggacatgtgtttaaaatttatattgtaacatggtactcagatagaaattgtaacgtgtacagtacccacagctaattgaattgtcgttgatgattaaagtaaaaaaattgatggtcagatgtttctaagttttgtgaaaatttttaaagaatttatctttatcttgtaaatgtgatgatggttttattctttttgcagtttagtggcaaaagagttggcatttgggctaggca

SEQ ID NO: 110918 - DNA, 820 bp, Setaria italica
  Intron number 1 from transcript Si000018m (locus Si000018m .g) derived from phytozome v7.0 (chr-ID scaffold_5; pos 19 468349 to 19469168)
aagaccgccgtaattcacgtataacctcattgttttttgcattttgactctttttattgctaaattaaagcatgtaacatgtatagttctcctagaattgaagttcctcaaatattatccttcggccattaatcctgaacgtcatggcgagagtttggaatgatacgcagctctcctgcgcgttcgagaaagaaatataatttttttcctgcagtgctgattttagtagtgtaatagtatgactggaaaggctaatgtatttttcgtataaaactttggtcacatcagaactttcctgttgctcaccattttataatatctttttaataagatttgcatttcttaagtgcactttctataggtttgttcttatttggataactgaaactccatattagcctagtagaggcactacatttaagaaaaacatttattaaaattttggaagatgtttatgtttttctcaaatataatataacgatggttaagttgcagcttcatttacctattcttcgttcagaaaataaataaaagttcaatttgattgttagctactatggagtgtgtctgtagtgccttttctttgtttttctttcttgtgggcttgttgggctcaatttttcatacaagcacaaatccaaacaagatgtatgtcagagcatctagggtgtctgcctttttactttctagtagggaagtcggattacatgcagatttggatacaagataggtgccatttttgaaaatccataacatgctatttcctttttctgttctttttgcagagaaaaaaattgcatcatatctcagtaaaattggt

SEQ ID NO: 110919 - DNA, 765 bp, Setaria italica
  Intron number 3 from transcript Si000013m (locus Si000012m .g) derived from phytozome v7.0 (chr-ID scaffold_5; pos 39 847107 to 39847871 reverse strand)
ggtggaactggaggcagcagaggtcttccttgtaagttgttcatcaaccccctgatagttattgttgtgacttgtgagagccatcaatgaaatgtatgtgcagcaatgcattcactacataatgctgttgtttgttcacttggttttcacaacatatctcagaccttgtatgtattgttcaatatagttgcagatattattgtcagtttggcaatgtctgatgcactatcaatattgttacaaatgctaagctgatgtaagattgtgtgccatgttcctctcaccagatagttttcgttttcgcttagcaaatagtttgtcaaattggcaattggcttcaggcacccttgcatgaataaatgtgggaagcatgaaacagcgatttccctcctttgcaattctagtttcattgtggtcataggcatcctgcaaaagcatgcagcagttttatctctatcattaaaaacagtttagctgctacatgagtgttcttccagagctagcgtctgggtaacatgtgtccatttgattggataaatcggtttcattaatttttggttccttatttttgtccgcaccatctgtaatgaagctctgcccccacaaggcttatgaaattatagctgttcctatttgtttgatttatttgctctcccaaaccatctaaagtgctaatctgttttagtcacatgttccctcttgtaactatgtatggcatgataacatgctcaagcaaacttcatatggttgtgctatcaggaatcc

SEQ ID NO: 110920 - DNA, 351 bp, Setaria italica
  Intron number 1 from transcript Si004593m (locus Si004593m .g) derived from phytozome v7.0 (chr-ID scaffold_5; pos 42 111725 to 42112075 reverse strand)
cgcctccgaactccatagccgctccccttcagacggtatacgctgttctcaattttttgatgcaatcagcacaccaatttcctaattcccattgctatctatactgcacacgatctccatcgaatatagtttatcggtttcttatagaactgattttttttatgcaatcagcacaccattttctatgcaatgagcacactaatttgatttcccctaaatcttcatgtactgtgcacatgatgtccattgaaatatggttcgtcggttgctcttgaagtacagccgtacaggaagttgtagaactgatttgtatggcgttgagtgtgtttatattcctgtgcagagtggagg

SEQ ID NO: 110921 - DNA, 686 bp, Setaria italica
  Intron number 2 from transcript Si036510m (locus Si036510m .g) derived from phytozome v7.0 (chr-ID scaffold_9; pos 21 610645 to 21611330 reverse strand)
acgccaattggtaaccttgaagatatcaccttacggtatacttgcctcagctgcaacccattttagactgcctcagttctattgattttgcacatggaaaagatttcagtagacgtccttatgccttgaagtcgcttcaggttatgagatattttttggtactaacaggaatgtcatgaagtcaggcaatttatatgggcttgtcaggtgataaaacggaaaatggaacagatcgcctattaaaagaagaaaattaacatattttgggttgcttgaaatttgattatacatccctaataaatctttgtaaggcctttgaggaggcatgcagagagttggacccttgtttgttaacaaaaaaggaagtggggcagcagagcaatggttgttttaaatcgatatagttaagaaaagtaactaagggttttctagcactgttaggattattttttatttcaaacatattttactttaatgtgaggaggacaccagaaataacttgattttagtgaaacattttttatgttattattgtgtatgaatctcaagttatccccattaagaaatacaccaatggcggatctacatgctaggtattagaatcattgagttattgatcatttcctgaaacaaactactggcattaagcttgataattcttccgtcagggcactgcgcgtccttaa

SEQ ID NO: 110922 - DNA, 730 bp, Setaria italica
  Intron number 1 from transcript Si037675m (locus Si037675m .g) derived from phytozome v7.0 (chr-ID scaffold_9; pos 74 65839 to 7466568)
tgggcgttcggcgtcgtgttcggcgtgagtacatcctcctcctccattggtcctcatgttatccatactcattagtcaagcgctcaacaaagttaaatacatccaaaatattagatgtccctgcgctaattggactcctccatggctacatgttgaattatctgcatatagaagtaattgcgaaacagctcactctaagctgttaacgttagtgtagttttaaattgcagtgtgatattgtgagctttagcttgacatgtgaatcttgattgcgcatctgaatttgtttgtagtagtaatagctactccgtatcattcaaaatccattatatggaggactagttccgctttttgatagcagttatttaccgcacctgggctaaaaaggatcatttccagtggctagtggcctagcgtgtggcagattatgttatgctgaaaacaatcatgaaattgtttcttcgtgtactgcttaagaagacctactgtaggattattttgttgagttacatcactgaatgaaacattttgatttttgtttattggaacttggcctacatccatgttgaacttgtttgccttgaaaaagactttgctcacggttcctcaagtatacacttttaattctccagcaatgagacgtggtagtaatttgtgggttctcagctttgcatcaatgtggcctacttttgcagctcattgcttgtggtgtcgcggtggctacctacaa

SEQ ID NO: 110923 - DNA, 711 bp, Setaria italica
  Intron number 3 from transcript Si034642m (locus Si034642m .g) derived from phytozome v7.0 (chr-ID scaffold_9; pos 27 40198 to 2740908 reverse strand)
gtggagcaccaatacaccagcaggtttatgcttttcattgcattatgacctttgtatgggatgggccttttagttttttgcatgccttgctgccttcattggttttgtttgcatattgagttcttttgcccatcttaatatcttgtctgatattatggcagaaatcttggtgatagttatcctgattagtgtattatgatgcatccattgttttttttatcagttgtaattcttagggaaatagccgagtagtaacacaatgttctaggcactgatttgattttctgcactgaaatgacaaattaataatgaccctattggtgctttatgccctcttcctttccttttttatgccacctaaatttctaacgcagactttctgtagttaagttaatggctatgactcctaagtctggggccaaggagcgcatctgatagggaaaaaattgttccatgttttcactttatgtttttcatatgttgtatagttggaagcttagggtagctacaatagccatggcacaagttatattggtcgtaaataactgaactcatttcagaagcattatcttctaaatttttgggaatataatcgaatggtgctgggcatagtgtactatttttggatgatgattttccacctggatattaagcatgtaaataccttttactgtagctgagggaactggaaagaggtgttgaaatccttgt

SEQ ID NO: 110924 - DNA, 1067 bp, Setaria italica
  Intron number 1 from transcript Si034642m (locus Si034642m .g) derived from phytozome v7.0 (chr-ID scaffold_9; pos 27 41876 to 2742942 reverse strand)
tccgttcagatttcgattggattcttccttcgtcggtaaggaacccctcgcctgtttgcttggattgttcgttttgttcggcagagtctgttgttcgaattgagccgctcaatgcaagtatatcggtctgagtcggacaaactgcaattggtttcggattgctacctgtttgtttgctgcgtggtggactactacttccattgatttccagtttcgactggaccatgcacgttggccagacagaattatggtttcccagtgaatattccatatcaatgcacattgcattgattggaaatatgttcaagtagaactgaattacggttgtctgtcaaaacatttgttaaaatcacataggattttgttgtgcttaggaaaaaaataggaaaaagtctattttactcccctcacctatttactttgtccacttaaccccctaagcaaaatttaggctcactttactcccccaaactatttcatttggtccaatccaccccctaattagatttctcttttttgtttcttcgcgtacaaattgaattttaatttcagattttgtcagttgacttataacatgatgctccatgttaaaaaagtatattagaattatttcatgattacttttcgtacagttttgtatatctaagatcaatttcgtattaattcctaacctatgaaaataaccatgaaaaattcttagtataattttctaacataaggcatcatgttttgtatatgctcacaaaatttgaactcaaaattcaactcatacacaaagaaacaaaaaagagaaatctaattagggggtagattgggccaaatgaaatagttcaggggagtaaagtgagccaaaactttgttcagggggttaagcgggcaaagtggataggtgaggggagtaaaatggactttttccaaaaaaataagttagtcattggttgatgttctctatttatttatttattgctgctgaggtgcctgctagacattatctctattactaacaattcgctgtaattctggtatttataggtctttgtgatcactggtagcgtcttcatcaaagg

SEQ ID NO: 110925 - DNA, 987 bp, Setaria italica
  Intron number 3 from transcript Si000720m (locus Si000720m .g) derived from phytozome v7.0 (chr-ID scaffold_5; pos 22 502005 to 22502991)
tcaacatcggcacacaggaccttgccgaagggagggtaagaatctcaatcaccccttatttctatgtgaccagtgatcatcgccttgtgtatttattagttacggtgtgagattcatcggagtagagctgtcatgaatgtttggtttcgttccctttttagttgtgtagtacttgggctctttcagaagttgatgggaggacatactagtgtgaagtccatgtgatgtgcgggaccataaagcgttacctgcgccagtctttatgttttttagtttcacgtccgtacttcacgctttgctggtagttgacacttgaccaccatggaacaatcatctatactaagttggaggggtaacatatggttggtttgatggctcctgtgcctttttcttatgccagtgataacaaattcaagatagttgaaacttgcgtccatggtaccatggaaaaatcaatcaatctgtattgatgccacttgataatgggtctgacactaatggtttaggtcctctaaaacaccattagattttcccgctaattgatgccacttcataatcggtttgacacaaaatgtttaaggtctgttaagccaccgttagattctgctgcatgtttcagtaacaattgacttatacctttcttttctcttaattttcatttgtaagttgacctgtctgtgccttgattcacttcattttacatcctctaagatctattttgaactctgtctctagcagtcatcgcattcttactgctctctttttatatgttaaagaattcctgcatgtgaacttattcaacctttttcctccatttgcttgcagcctcatcttgtcctgggcttaatttctcaaataatcaaggcaagctcttgtcttttgttactatatccttgataatttctgtccataggtgtttgtttgatgaagaaaaactgaatgtgctaacattttgtcacaataataaccagatacaactgttggcgg

SEQ ID NO: 110926 - DNA, 841 bp, Setaria italica
  Intron number 2 from transcript Si005376m (locus Si005376m .g) derived from phytozome v7.0 (chr-ID scaffold_5; pos 46 649393 to 46650233)
tggtaacgacacctaattgttctgaactcatatcctccaacttttttttgttgcatttgttttgtgaattctcaacaaatatcataagcttgtctaagttgaacaaattattcattgtgatctttgcagcagtacactaagtttggaactgaaaacaggcaatctctaatcttatattctggtgctccatccaaagcttttcactttacatcctactaaaatccttgctgtcaaactttctcaagtttgaccacagatatgcttgaaactatcaagattggctagctaaaaagtgtctcaccaggcttagacttcagaaattctttagcgacacaaaagtataagaaatatagtcgtaaaatagaaccaagggagatatcctttttaaatattttctgaacagtagtgtgtttctgcagtcggttaagcagtggcatgccttttcaaatggccactggctatggttggaagatgtataaactaatggggaaattcggaaataggatctgtttcatataatgaggatgaggcttgctatattgtcgaataatcatgtctggaagcacagcatcacgatatcccaaatatgttagaaccttggcttttggatggaaccatcctgtactttgtcgttcttttcattattattgaaataagaaaacatatttgtcaccgtttgcaacctcaggttaatggaagcccttaagatcttttttattattattaaatggaacagattttcagtggtttcctgattactaaggcaatcatcattgatggtagttgcatactttgtgttatcaaatctaattcagttgttgcttctgataccacccagatc

SEQ ID NO: 110927 - DNA, 879 bp, Setaria italica
  Intron number 1 from transcript Si036458m (locus Si035508m .g) derived from phytozome v7.0 (chr-ID scaffold_9; pos 54 252100 to 54252978)
gacgagtacatcgccgccgtctggggacgtaagaggtcagttcacggaaccatcgcagctgaaatactagtagttcctggtttcacgaaggggcggtgctgagctgtgctgtggatttgcttggtgaggagacgacgggtgaactgctttcgcgatgattcgagcacactgttgatcgttggcgttggctttggttaattgcacgctaagataatagattgtgctgtgtaggtgagaactaaactctaattggagatagtgatgtgtgaagtgatgcgtttgagcaattctagaaaaaagagaagaaaacaaaatgggtctgttaatagtttttaatgtttgtataagagggtggagctggtactttgatgaggattagttgtgctctcatagaaattattctttcttccctgattgcactcaggactgttgatgctggtgagaacttatacatttctacaattgcaaacaatttcttaccatggaagcaattttgtttgtttagagatcgaggatgctgatcttgatcagactagtggtgtctcactgttttgtttgataaaataaaacttttgcatcttgctgtcggtcacatttaaagatgttattgtggtgaagttcaggtctagaactctgaattactttgatgcagtataaagaaggggactgcatgctagtagtcttatgatttattgatgtcacagtatctttcgttggtcttctgcttgctcatcaacattacacctcagaatgcatcttgtttcgatgcagctttcatgccatctttatgaatcaccattttttttgttggataatgtgtaactctatactcttgttgcttcagaacagcaaggtggaggtcactcttagctgggttga

SEQ ID NO: 110928 - DNA, 980 bp, Setaria italica
  Intron number 1 from transcript Si035812m (locus Si035812m .g) derived from phytozome v7.0 (chr-ID scaffold_9; pos 55 251176 to 55252155 reverse strand)
cggaggccgccgccgccgtgggcgaggctgataaggttggtgccttcgaacatcttcttttctccgtacaatttgacgcctccgcgtttcgtatgggcggggaacgtgaaattggaggaagtggtggtagtatgtgcttggacgcagtgatccggtcaatcagaattgggtgttgaattctggctggggattatattggtttctcgagtctggaagtggtgaattattctgtttttccccccggtttgatcatggcaactcatggaatttacagttgattataggatgttgaattttacgttctttctgtttttgctttggattggtaggtaactgtgtaagcaggcacgtttgccacttttggcttccattagcaagcaaatttgccttctttctgtaccacccctttcaaggatagcaacagcgttattgatgtttcgttgaagttatgggcatggttttgtcagccgaagaaacttccagtagcagtttattcaaaggtgctgcacgatcaggctatataaaaatttgaaccactaatcctattgctttgttgcctcttctgattggcctccaaagattttgctgaaagcgtctcgtatctttttctttcgctactgggctccagaagcagctatatcaaccactacacagattgcaacatcccttgatttgtttcttaagcttgagtttagaacatatatgccgtgtaataactaatacgcatcgattacatcaccatgctctagtaatagaagttcataagttcatactacatcgacagctgttttcttagctgtcaggattgggggacaagatttttgttaagtcactgatccaaccggcgcaattatccatgggtctgaacttctaattttcaacaataaaactgaaaacttgaacactctttacaagaactcagcaagactatctgcatggttgcaggacatacaacaaagtggcagcagcacgactgaact

SEQ ID NO: 110929 - DNA, 652 bp, Setaria italica
  Intron number 1 from transcript Si001343m (locus Si001343m .g) derived from phytozome v7.0 (chr-ID scaffold_5; pos 39 296866 to 39297517 reverse strand)
caagtgagattcctcttcctgttatctacctaaccattcaatcgtgctatttctttgttgaattcaacctgcgctctgtttttatttgcgactcttctcggttatatcgaacctggagctctgacctttgaggttcttccttcagtctggtaccggcaatatgtatttgcagttgtcgtctttcgcttctaatttcactacaactatttcagttatgctgttgaagacagatcacatctgcagagtgctgtggaataatctacaaacagttatattcattgtatggctagactttgcatcaaatttttgataagtgtatttgacaatttgagaaagatagttgataaaaccaattgtttgccctgcatgtaggtccagttatgtattctattgcttagcaatcctttaagccatccgacagtacttcaccaggctctgcctgaaacatattccagtttcctatttctgcatacaaaacaatctatagctttatctggcagattttatttagatcaaattagatatatatgtgatttttgctttcttttaatatccaagcatttttgccttttctctctttgactatgtatgatttattgaacattggtttaatgcagctggggttcctctggagaacattctatatcttggt

SEQ ID NO: 110930 - DNA, 708 bp, Setaria italica
  Intron number 1 from transcript Si034356m (locus Si034356m .g) derived from phytozome v7.0 (chr-ID scaffold_9; pos 21 738016 to 21738723)
gttttgttctatgtaagcactcatctttgctctctctcccctaaaggctgctatgaattcttgcatatgtttagtgttttgctgttatggacttacttaaattttttctctcaagagttggttccttctgtacttgacttgaccactgtctgcttagatccagttcaagatgagtccatgttccttgcgatcagtttagcctagtgagtggaattaactgacctccgagttcaggtagcttttgtactcatgcaatagggtaaattgagaaggtcaggtgcgatacagtaagctgtatttagttaatctcacttaggcattatcaccggcagtccggcactccacaattccatcttagatatttcaggctttcatgacttttcttgaattttttacagtgaaaatgcaagttttttaatggaattcatgaagaagcgggactagtgtttgttcttgaaactaaattagatcagaagctcaataccacaaaccttttcaaaagtgaatgttgtaggaagtcaaagttgtaaccaaagaagagttgagattatattgaatagtatgctagcttgatggagctgtccatatattgcatgcaccctcatgtattgacagcaaaatttacttaatccctcctgcaacatgcataacatatgtctttgtgaaattgcagatttagcttagcctagtaaattgtgtacctccagt

SEQ ID NO: 110931 - DNA, 519 bp, Setaria italica
  Intron number 2 from transcript Si002690m (locus Si002690m .g) derived from phytozome v7.0 (chr-ID scaffold_5; pos 46 338761 to 46339279 reverse strand)
gcacttgcagagcaacaaagtgaaaccactgttaggtatgcatacatatgtttccattgtgcatacaattgggacacgagacatccctcaactattcacctgctaatttattcgttattacaagttttttttagcatattcgttattacaagttacaaactaaagtttgaattgtttatgatttttcagtaatggtacaatgatagcttgcttgcattaccctgtaaaatggaaaaaatagcactggaaagtggaaaattgttgcttgccgaagctgatgtgcttgacaagtgccaccttggctatttggtagtaactaataagaagtgtacagtatatgaaaatgtatgtattttcttaaaaaaacataacacatggaaatacaactattacagctgtatttgtctcgagctgacaaacacattttttgccagcaccaaacaacttatgctttcaaacactacattgcttgctcttagtccctcttctcctttttcagctgctgttccaaatcttgac

SEQ ID NO: 110932 - DNA, 718 bp, Setaria italica
  Intron number 1 from transcript Si000685m (locus Si000685m .g) derived from phytozome v7.0 (chr-ID scaffold_5; pos 13 936648 to 13937365)
gcctcacatctcgcacaaccgacagctcaacattggtacaacttcactgactgccatttccaaagagataaaacagtttgattttttctgactctattcgtttagacttaagattagactgaaattgggccaatgtggagagtgtaatgggagaatcaggcataaccgcagaagtctctgatagcatgagatcaaatacacttcaaagctgactttgaagcaaaggtcaccaataataacctgaatgggtagttttttctcttcaaaaagtggcaatgtatttcatacttaaacacgagcaactaaatttgtggcttctcaactcttctgcaagatttgaagtcaaatccctaggctcatattgtaggcggtcattgacagtgttttggttagatggttctagagaaagaatcttgtagtccaggcggcagttttccagcaatggggctggttcctggtgagggaatggtacagatattgtaaagtggatgttgaaatgcagtactattagctttatttagccagtgagagttgttttggcctgtctgtatccaacgtggtgcactgtgtggaacagattcggttataactgtcttttgcttgtgggagggttggttgtttcaaatcttcatctctcttttcctttgggaataaatttcattgctgatggagtgtagagttaattatgcatttcctgatcaatttcctgtaggaagag

SEQ ID NO: 110933 - DNA, 898 bp, Setaria italica
  Intron number 4 from transcript Si000118m (locus Si000118m .g) derived from phytozome v7.0 (chr-ID scaffold_5; pos 46 449908 to 46450805)
caggacagtttttcacatcccaaaagagtggaaaggtatgtttttaacgtaatattttgtaatattctttttctgcgcagcaatcgtgatagtttggtgatagttgccaccctatttttgtatcctcacttctccaaatcctatattgcatttcaactagcataagtgaccttaatactaagagttttagataaaatgaagatattgtcaaggaagttagtttcatttttgccagttatgatttgaataaccttgacttataaatatttgtttattttgaggggatatctgatccattaacttgaaaaaaagttctgattgtggaaggcttcttgtcaaaggattttacaatgtttgtgcgattcttaaggagtttatggcttggcatggctattgcatagcttgctatctccttggacacactgttctgtgttggttacacttacaccgttacagattgtaagcgagattggaacatatacagggttacaagcatttataggtgtcggttacaagcatatataggcaaggatgtcctagggtttggtttatagaatcacaactgggatccttgcctatcaattaaccaatctaccatgcgtatgggctctaagccctgatgctgcacgttacccatgggccaatatgccaaccgagcaagctgtctaacacacatgtttctcaatttattttctttgctatgttattcttttatgtcttgtgggatgcatcttatgacattttctgaacacttttcctttcctcaacatgcataattctgttgtctttgatatttacatggatgcagtactaacattccccatcattttgagcaattctgagttgattatgaattctgataggtcggaggatcttgctgcactttgaagctgttgat

SEQ ID NO: 110934 - DNA, 705 bp, Setaria italica
  Intron number 4 from transcript Si000179m (locus Si000179m .g) derived from phytozome v7.0 (chr-ID scaffold_5; pos 36 918155 to 36918859)
aaaaggagtaaggatcaagcacccatttatagatcttttcaatgactccttgatgaccaatccttctatatgaataagatgatattataaatgaattgtgaatatattaaatcatatttggttagatgaagttgggaatgcttttagatgatcgttgttctgttataatcttccttcttaattaaaagtccacctagttcctcctaggtatgttaaacgattgtttgtacttacgagatcccacatcatctgtatttaaaaccgaacttggtgtctgatgtagttactgtcttaggatataaagcaacttttctatgctggagtagtgaagtaaaacacccaactaattcttgaatacatatatttacacgcttcgtatctcattattaggcctcattttgatctaagccatcgcctcaactatggctaagcctgatctgctagcaattctttatttagttctatgttcaacctaccaacaagtgaactctctcctagcctatttcacaatattttcaactctgcatcgattttctgataagatgccagaaaagtctccatctcatcgtttcatctatagtatatgtgtctgattttgagcgtggacctcaagttagaagactttgcgataattttcccaaaaatgtgatgtttctctctactcatgctgtaacaaaaaacaattttgcagtttgacagacgcgt

SEQ ID NO: 110935 - DNA, 699 bp, Setaria italica
  Intron number 3 from transcript Si000524m (locus Si000524m .g) derived from phytozome v7.0 (chr-ID scaffold_5; pos 84 0236 to 840934)
tagcctggcatcgcaaggtccttcaactaatacaggtcataagatgttcttttgaaatacttagtcgcactggactgaagttatgtcccggaataaaattcttgcttttactgtttaccaccttacccttttatgagctggctgaaaaactatgttagcattaaactggacctccttgtttttttaaaaagaaaactacctctttgattacattgccatgtgtgtaccttaatggcactttgcagtctctagctgcttgtgtgcttagcgtgtcaaatagtgggtgtggtattaatttatgaccagcaaggtagaatttgtcaatccgatatcagggttgtaaagcacatattgattagaggtagtttattttcttattttgtcaatgaacctcattacttttagtaatgcatacatttcaatattataacaatgaagaatgaacaaatatactgatataataaggtgattttctgcaggtaacactgtgcatgcaaaatagttgaaaaataaacaaacaagagtacagtactcctaattgaatgaatattgagaaaatgtacaaattttgcgggagcagtcaccttagtaattttttactgtgttgctgcttcgcattatgcaccttttctgttctcatgatcgtgtatcataaacaatgcagctcctctcagacgtgctagcagctggacttttgat

SEQ ID NO: 110936 - DNA, 653 bp, Setaria italica
  Intron number 4 from transcript Si001560m (locus Si001560m .g) derived from phytozome v7.0 (chr-ID scaffold_5; pos 37 395183 to 37395835 reverse strand)
tttatttgctattttctttatattgcaggtaggctcattatcgcttgcaacatgtaataatttcctctagtaaatacattacaaaaacttcattgtgaatttagaatgtttcaaagcgattctatttttctatttatgatatggttttaaagattttatccaaaccggactatatcctatcaataacttactaacatgttatagtctgctatgctagagtttagctaaggaatcccatagttaattcaatgttactctgcaaatttttcgctagtcattgtttagttaatagctgcccagtttattcaaatgggaaaattaacctttgggttttggtgttatgcttcatatgaacatctgtggatggaaacattatgtttagttttgattataggatgtttcacttcatttcagttattctggatggactgggcattagagtctgcaaatgtccagtgcccagtttttgtaccgtacatgcctgcctaaatgatcactgttaactacatactagttattttcaagtttcttcattctcttgattgtatgtgttgacagtcatgctttaataacaataaacctgcttgtctaaaatttctagtttgtatatgccaaagaggtaatatttatggctcccttgatccagggtttgt

SEQ ID NO: 110937 - DNA, 832 bp, Setaria italica
  Intron number 3 from transcript Si038046m (locus Si038046m .g) derived from phytozome v7.0 (chr-ID scaffold_9; pos 54 431649 to 54432480 reverse strand)
atttcatatctcacctggtaattaactaattttactaataagtgtgggggcaaatcctgaagaaagctcagtttctttttgataagaattatgcatctgtggttcgttgtcacttatcagcacatatatttgtttgaaggttccaacttccaacacctaatagagatgtatacatgggttgtgagtgatgtatttccattgctgatatgctttctattatcttgcgtgggcattttaatctggtcatcaccaaacattattttcttagtgttatgttttctcaaatgcatttcgccagtcaactgtcttttgtcaattcatcagccaaggttggcaattccttaaaccatgcgtgactgtctgaaactgaaagcctccatggtctgatttgatcctacttttattgtcgattatcttatccaggttgtctttgcaccgccatgctatgttaaattccacaaagtagttgtttctaaaaacaaaagggtcaactggaaacatatgttttagtgtcatacatttgaaccacaacccttaagtgcttgccatttacttcagatgtaaagactttttaaagataatgatcctctctggatctaatttattattttgttccattggtgttgagcactttgatttagtattagttcatttcaagcaacttgatgcttgttgagagtatgtgttgtctgttatctgccacgttccttatgtttgtgaaagcatgtgtgactgatcaacaatgtaatgtgttttgtgcctttttgggctgaaacttggtatattcctctatgacagtgtttcatgtacaactccttttttgttgcagcaa

SEQ ID NO: 110938 - DNA, 924 bp, Setaria italica
  Intron number 1 from transcript Si000591m (locus Si000591m .g) derived from phytozome v7.0 (chr-ID scaffold_5; pos 47 122733 to 47123656)
gggtggcctcgagggtttttcatccgccgatccaggtaactgcaaggccatggcgccaccacagatcaaagtaaaaaaagaagaaatctttattccttgcgccgatttccccccttcttccgtgcactgttcttggatcttcttgtttggttgggttcttggtggtttggtggggggttgcttgatctggtgggattcttgaaattcacacgattcgagccctttccttgggcgcccagcttggatttcgtcggatttctggtcagcgggttcgggtttggtttcccgattcaatcttgtagctgcgaggttttgcgtgctgggcttgaattgcgcgggggtttagacgtttatgcccggaattttgtggtatcttctaggtggacggatttgatatgacatccagatcaggacctgtcctgcagtctctttgttaattggattcccgattggtttcgagggtatttgtgtctcaaattctgatggacttttgcttctatcatgtttggtcggtcccctgaattttagctgatttcttaaagtctatgggcttctgaacgtaacactccacatttcatagaaggcagtgtacagttttgtaatagtctcagatgtttgcaatagtctgtcatttgaaccatctgattggagtcatgatttctgtttaagttgctcaaatgtttgtaagtttcagcataggttgctgttgctctgccccaatcaggatgctgtctgctgtgttccttttgctgtgatgtggtttacagttgggtttctttgtccataattgtcttactagaatgcacacaagatctgctttggatctgcaaacttaccttgtcgattcccgtgcatttgtcctttgtcttgatctttgatttattcacaggaaccggagacaaagaatcctgctcaggtgctcat

SEQ ID NO: 110939 - DNA, 986 bp, Setaria italica
  Intron number 1 from transcript Si001411m (locus Si001411m .g) derived from phytozome v7.0 (chr-ID scaffold_5; pos 86 54099 to 8655084)
aaggagaaccccctcgtcggcccctcctccgccacgtaatgcactattcaatctgcccaaatttggatctttctgcagtttgctcgggttaggttattgctttagatgcgtgcagtgtgagagattgtgcagatcgtatgaaatgtgcttccgttatggccttccgtttttaaatgcgcatatcttatgaaattgcttgtatcgaagtcttttgagacaggaatttctgtcactattccttttctcttccggcgaaaatccttttcttttctttttttaaataatcatcacagtttgttcgtattgaattttatgaatatcctaaacactaatatttttttaatcaattgaggttggaggttttggaatgcgatatttctgatacacttgctggtccaaacaattgccagttgatcgggaattttgctggtttaactattcagtggtgaacggaatttctgatacacttgcatgcgatatttctgatacacttgcaacacttggctgatgtaatgttctgaacaagattggagattacatactatttttcgtagggttaaattactaaaggtggtctaagtggatgatcttagtagtcagctacttgtttaccatcttgttcttatcaaagaaagaaattttatttctttgtactggcatatgggagagatcctgtcaatccatatcatgtacagtatcatggattgaatagttttcttcctaaaataaaacaattgtttatatgcaaatcttagacccagtgaggaagcaattgcagtcatacaaagttaccattgtgtgctgttctataactttgttaaaccttattgtttgataatgtatttagggtcacttccccctattgagattttttttcttgttataccctcaggtagcagtactttgatttttctcctgcttattgatataatcttgatagcttgtaggttcaactaacatatgtgtcattccccaggttgttgaaa

SEQ ID NO: 110940 - DNA, 844 bp, Setaria italica
  Intron number 1 from transcript Si036795m (locus Si036795m .g) derived from phytozome v7.0 (chr-ID scaffold_9; pos 46 092375 to 46093218)
acccattccgcatttccgtcccctcttccgccgaggtaaacccctgctctaaggctttgctgcttcatttttcttggggaattttttatggttttccgggcgaaagattgggtttttagggagggagggtggggaggagttgccgaggcgactccgcctctgctcgagcgattcgaatgcggccgagtggatggaagcgaaggggtttaagattaactgcgtgtttgccagggtttgagcagggtttgttttggggtttagtttctcgatctgatgcgatttcgtgccgcttcgatgcgcttcttccctgtgtaaatctccttgcttcctcaccaggatgcgattttttttatcaataggagatcagaaaagaataaagctttggttgttaaccacagtgttcaattcgaaggaactgagattacacgcaaacgaatgaaaaatgactagcactgtacaccttttcttcttgtgaaaggcatactaataaaagctcgatatgaggtctacccggaaactttgaacaagtccatgggacttgtgagatatctgttgcgtaagtaggaaaacctgcctggtcaacacttgaaagcatcacttagaccctagagaccgtgctccatctatttcaaaatcttttcttttttataatttatttcaaaatattttaacagtgcccggtcatgtaaaattatgcttatactcaagagatggtaatgaaatgatacagactgctgactgactgaatgtatctttcccgtgctttttaaatagtattgtgtaatgtaatatactaatatatctgtccttttctcttagcaggatatataattccaagaccctg

SEQ ID NO: 110941 - DNA, 518 bp, Setaria italica
  Intron number 3 from transcript Si036795m (locus Si036795m .g) derived from phytozome v7.0 (chr-ID scaffold_9; pos 46 094117 to 46094634)
cttacggtattactcgtttcatcaatgtgttgattaacaatttctattaggtgtttttttcgaaacttgttttacttccgcaaagattgaagttcaattttctatagctttttgtggacatttctgaagtgaaactttctgcatatttgtcaaatattagtgtggcatgtgtttatcaacctgcaactagttgtcacacatataaaaatacaataaaggtgctgatcatcacacactttttgggttgaaaataattttcttatacaaaggcactgcttgtacagatccatgttcatctaattttgatgaacagtctttgactgtttcaagtcaagagcgcaaaacatttcaaattgcttctttatctgaaaccttctctcatggatttcttccagtgcaacaaaaatgtgatgtctattaattttgtcattaccattgaatgaatgatgaagtaaacaaactgattataattatctcatgcaggtgtttagctgctttggccaatacttctgcttaca

SEQ ID NO: 110942 - DNA, 1015 bp, Setaria italica
  Intron number 2 from transcript Si035583m (locus Si035583m .g) derived from phytozome v7.0 (chr-ID scaffold_9; pos 50 087859 to 50088873 reverse strand)
gaagcaggaggtaaggataagcgaattatcattgcatagtgtgttgctatattatatttcctttggatcattgggtcgacccaaaatttgataaaatgaactacagtggcatgccgtgtaatgtagaggagtgaaatgaactatgatggcaagttactgtaattaattagccaacccaagaacaccattcgaaagcaacttgcatccctagttgctatgaagtcacgagaataaattatatttaaacactacacaaattgggaacacgattcacattttactggggaaattgatttgaactaaaaaaacatacatttttttctgctaaattaatttcttaatacttctttttcatcaagtgtacaagaatattctgcttctaccctgttggatatcacaaaacctttaaacatccttaatgattactacagtgctcccacatttttcttggactatgtatgcttagagtgtatttttattattttgtgttggggttgattgccatcttccaatcttgagatttcttcttggtctcctatgaatatgaatctactcatttggttggcagacccttaccttgttggtcagtgactcagtgtcaccctaagttgatttgtctgactatggaatcacatgtttactgtactcctattcatggtttgcaggcttgctcgtagtcataggtcatgaagtagagagtgatttggtattttggttcaaattctgtatcttttgaccatttgacatgaacatgggtattgaaggctataaaacatagtaatttgtactcgtatatagaacgacatgtttagtgtagtgactttcatgttgcacactgcttggttctttctagataaaactatcaatctgataattgcttggtttatgaatgcaagtaatgagtcatttggactctgtattttagttgttcaacctgattgtgccaattactgcaccccctatgctgttttttgatactgtggctattttgcaggatcgtgacagttattggaag

SEQ ID NO: 110943 - DNA, 915 bp, Setaria italica
  Intron number 1 from transcript Si040264m (locus Si040264m .g) derived from phytozome v7.0 (chr-ID scaffold_9; pos 16 458381 to 16459295)
ggcaactcttgcgtcactggtgctcgtaaggattctttttgaaccttttgttttgtttgtttcttgaatttttgtgctagaaagatgatcactgttgtgatgttggtcaatttctgtttcaaaattagatctttccttgtatatgtgaacacaactaggatgaaattgtgaccattgcttgtataaacaaaatctggataaaatggaatcatcgtcctgcaatcttccgttggagtagatttttttgattcagtgaacaactgcacagaaaaaatgcatcttggtcttacttgctatgaataagtgttatccagtatacattatgtaaactgtgaacaatgacatgtgttgtgagtttgtgacatctgttttgaatatcaatagtaccacgtaactattgcaccactgaaagaaaaaaatgcttgactttctaaaaaatcattcttttcataggactatttaccctcttaactgtggagtgaactaagacaaagtcagtttgctttatgttttgtcatctaatttctagttgtaaacaaacttgattaattctgtttcaatgaaatggaaatgggagtccctgtttccaccagaaagaaaaaagaaaactgttgagaaaaacaagaggcacacaaatggtctatgccatgcaaaactagatcaatgtcctgaattctttctacttcatggccactcatcacaagtaaataatagttttcttctgtttttagttcagatagttgttagttgaatgtaatataagataattttctgtatccagagaactattctgttttgcaatatgtttttctttatttggaactgcaatatgatccataatatgctctagcacataatcttcttttcccctgtcttttgtaattttaaaatttgctcttattctaatttcagctc

SEQ ID NO: 110944 - DNA, 567 bp, Setaria italica
  Intron number 1 from transcript Si039191m (locus Si039191m .g) derived from phytozome v7.0 (chr-ID scaffold_9; pos 11 296707 to 11297273 reverse strand)
ctaattctagacatagagtaagtttgaaatcttgcagtgttcctacatatattgtcttcttcgtttcgttttacatgatcgattcattggaagcagtaagtcaatacttgctttgtacttttgataaacttgattcgagctagccagagcttttaactgaacagaatgcaaatggcaaagatttgtcaagtaaacttgattcgagttagcccaaactgctcatttgattctgtaagtaagtctagtgcagctcccaagctgtttccccgacaaaactaatttactcacaccagcttccgaatgatactgttgacattgctctgctcctgttctttgctatcgtgaactctgtacatgaaaacacgagtgtattatggcatcatagctgctagttaattgcgtagtctccatctgcaaatgcattcctgaccatagaaaatacatcttgcatcacaccatatattttctgttactctggccattacaggggttgctctatttacatcaaaacctttcgctgttgctattacagatcataccaaacaggtttgtgaagcgttttgcagg

SEQ ID NO: 110945 - DNA, 798 bp, Setaria italica
  Intron number 2 from transcript Si033945m (locus Si033945m .g) derived from phytozome v7.0 (chr-ID scaffold_9; pos 21 504173 to 21504970 reverse strand)
tcctgactttcgtacctaaaggactatttgagcaggtatcaatacattatttttgttcatcatgtatgttactgatcaagcaagttctttagattcagcatctattatcaaaatgctcccttcatttttaaatggaaagacactatttgcgtatatcaaatttcatatgtgcattagaatgaatttgctttgctttcttttcttttctgttccacaaaaactaatttgttttggcaataagtgtggaattattcttaattcaatgaaacacatatggtcattttcctctgtgcagactgatctcccctaaaattgttccttttctgatgatctttggatctcttaattggcttagcaatggattgatgatatgtctaccgggttgccaaatgttacagtgaatctaagaattgattctattgtcttttcatattatgcatgcgctgcaaaattgtactaccttgggtgatgttaacgcacattgtgcattcagtacaatctaagctgatctgtgcaacttctcgtatcttgtagcttcctagttcagatctttgttagatgaggggagataagctttctaatgagcctcataaacagtttttattgaatcaagttataagtgttattatttatgtttcccatgcctaacaaatcagcctttgcactcattaatgcaacagagatttgaatgttttatcataacaatatcatgcaacagtatttgacgagaggaacctttcataattcatttgtcttttgctttgacagttcaggcgggttgcaaatctttactttctc

SEQ ID NO: 110946 - DNA, 766 bp, Setaria italica
  Intron number 1 from transcript Si033945m (locus Si033945m .g) derived from phytozome v7.0 (chr-ID scaffold_9; pos 21 504967 to 21505732 reverse strand)
acgaccgcgaggccaacgcgcccgtcgggtacaaggtacgtcgtcgcgcctgctccccgttccgttgcattccgtttggtcggcccgctggctggatctcgatgatgtctcgtgtggtatggtcgggttggagctggatcgtcgggcgcgatgagctagctggttcgtccttcgcgcaggtcgtttaggattcacttcacgaagtttgtgttgctgcccagctgcgagtgccctggttggattggagctttgcctgcagcttggacagatggttttgggaggtggaaatggcagatattaggtacgacgataggatggtgccgtgctattggcaggcagcagtacggtttagacctccaccctgtgggaggtgtggtacaacatcttgctgttttgttctacttttacagttctactcttagtccgggaggtgcaaggcatcctgtgtgctgaactcttgtgtgcctgcctggatgaggtatcaagcttgccacttgatggaactaattttacaagctagtatctgtggttattgtcttaagattcttcatgtttcaattgacattcttgtggatcatactatacctggtaactgtgggttaatgtcagtggaacacaaacacagcagattgttctgaaaattgtttgatctcacctgttttctttactgttggcaactaatattatttcactgtttaatattcttttgcacgctttatttgtatttctagggaaattctgtgtcgactacaaagtacagtatcct

SEQ ID NO: 110947 - DNA, 876 bp, Setaria italica
  Intron number 1 from transcript Si001155m (locus Si001155m .g) derived from phytozome v7.0 (chr-ID scaffold_5; pos 39 632046 to 39632921 reverse strand)
ggagccccgtgcaccggctcatcgagcaggtgggcgtgcggtgagatcgaactgcaattttgttctgtttatcttgtcgagatgatacgaggcgcctggctgtagatttggttgtgtgtggtactagttaagttcatgacagtggggaattttgtccttattgtgaaaaactgagaatcgtagcacattgattcacgtggattgcttcctggttggaagtgggataattatactctcctagcctcctttatgatacacctgctcgctgatgctttggaaagcttgatgttgctgaactgggctgtatgcttgtacgctactccctccgtcccaaattataggtcgttttggcttttttagattcattgattttgctacgcacttagatatacactatgtttaaatgcatagcaaaagctatgaatctagaaaagccaaaacgaactataatttgggacggagggagtagatcccaagagggctggtagaattttcatcatacaaagtttctgttgtgaggtgaatgtgattcacactagagtatcgcatcttattcgtaaagcagtttcagaatttcttttgaacactatcaaatttacacgtataaatgactcttggcattgttttgggtggtgaggtgaatcataccaaaagcaatgaatgttgataccacaattctagctacagaatcatatgtgtaattatgtaacaattattgggcatagttttcaatacatctctgttcagctaataattgtgtatgtaattatgtaacaaatatcgcatactttttaagatattgaactttattccatctgtctacataatcaaattatttcttcattcacatttgcagcattctattgactactggct

SEQ ID NO: 110948 - DNA, 792 bp, Setaria italica
  Intron number 4 from transcript Si001495m (locus Si001493m .g) derived from phytozome v7.0 (chr-ID scaffold_5; pos 31 51639 to 3152430 reverse strand)
gtctggttcaacttcgaggtgtgcttatttatgcaaggcattagttccaacatttgcattaattatgaattttttctcgaatatgcaagagaactgcatatcattgcattaggtcatgtaatttttggtatatcaaatttcagtttccgaaggttgctaatttcgtggagaaacatttgttacaccttttttactgtttttgattgctatgatctaatttcttgttcaagaaacatcatcttgaaatttaggtatgattttgttgatatgcttttcctggtcttcgcattggatacgtacatagctaaatcaaataaattacaatttattattttaaattatttgtatttccaaaccaccttagttatctattctatctgatagctaattgaccattctctcaaaaggaacagtcttactttccattttagaagatatgatgagtgttttattattggaactttacctgctgtctcttcttctgcgccttttctacctttccatatttacgaagtatgtggaatttctgactagtagccagtagtgtgtttaatcattactgatcgatcagatcatttaacacgtaagtccttataaagtaactgcaaggtactatttacagcagtggtctgggcctgctcactgcatgggcccgtgccgtccatgacatgtataaattgtatttagatatcatgtgttatgttgttttgttgtcatacaataattggccctggaccatttcttaaatttgcaacactcatgattatgtttttaattttttgtgcagcagtg

SEQ ID NO: 110949 - DNA, 999 bp, Setaria italica
  Intron number 2 from transcript Si000631m (locus Si000631m .g) derived from phytozome v7.0 (chr-ID scaffold_5; pos 64 51837 to 6452835)
agtacatcctctttcggggaagtgatatcaaggtatacggaaccataaagtgggctcagttaactttcaattgcgagaattgtgtgtttcatgcttgtcgctaccatttctggactctggtgcatggttttgtttaatgcgtacttttgacggtgccttcatgttgttggtgccttgtctctgcttaaagtccaagatgtggattggtaacgtattgtgtttgtatcacacgtgttggctcatcagtgtgaaggtcataggggcacaaaaacctgaacaaaattatctccccaccacattaagccaaatccacacattacattgttgtgttttgcttccctttttggagtgttcatatcattagaatgtacgattgctatcaagtccctaagcacatgttagatctgggtgctttcctacagtaagatttcccacagggacacagtcaattgtttgttttagtcttccatatgcacatcatagcttgtatcatgtgcccaaaccatgaccttggaaaacatcttcttttcctattattaccactacatattatgtcctatttatcatgtctcttattgggtttcatctaacctatctcaacttgcttggaagactctgtgattcacgtttatgtttcgtacttatccaatttagtagaatcagcagacaggtaatgttagctttgcagtcgttagttgtgtatattttggtttgatatatgtgcaacccataagtgcatatttaccatgttctcatgtactcatttaagatttttattttggaaattccttctctaaacagtatgccagccgtcgattattttgcctaatacgttttgatccaagaatgtatctatgttatgttttcaacgcacacatttaaattatatactttgcaatttccttacctgatttgattatttagcatcataatttacctgggtccaaataattttcttctgcaggatttgcaagttaagtcatcgccaccgccgccggc

SEQ ID NO: 110950 - DNA, 800 bp, Setaria italica
  Intron number 1 from transcript Si001209m (locus Si000861m .g) derived from phytozome v7.0 (chr-ID scaffold_5; pos 29 028153 to 29028952)
ggtggcgtcgacggctcgtacctcaccgagacacggtaatgtcctgtcgtcctttctgaattaggtcggtagtgtacctgaaatcctgccgagctttgtaggaacgaaggattctgttctagtgtttttctaattctgtggttattgctgaagcatagtgattgggacaatgaaatcgtagttctttgatagttgttgctagtttaattgtttagccccctttgtagtatttttcatccatcactatgttgtagcaagctgttcgatgcttacaaggtctgcagtaccacatgtcaattatcagtacctttttagtagttttcataagcattaagagctattgataattgagtatcatctgaaattgggagcttttttcgaaagatgaaattcgatgttaactgcaagctgtaatttgtgtcattgtcggttgctccctaaaatttgtgttttagggaagcacctgaattttttgtttataccttagttaaagttaggtatattggaattgcagttcctttacacataagttagaatcagctttttgttgtagttttcaataatgatggtgtaaaattcagagagccttgaataatacctgattcttttctgttagtacaaagttagatataatcaaagccatagatgtcataattggatggctggaaaattgggtgttgggagaccctaaaatgctgaaatgtggcatagacacccctgatgagtcatcttgtcatcctgcatctttactgctgcagtggcttattgtgtaattgttatgcatgtcgcaggtttgatca

SEQ ID NO: 110951 - DNA, 386 bp, Setaria italica
  Intron number 1 from transcript Si004591m (locus Si004591m .g) derived from phytozome v7.0 (chr-ID scaffold_5; pos 14 586800 to 14587185 reverse strand)
aagggtagggtacgtgcccaagcccaatttgatgagtaataaagtaggaaggaggcagaagaagcgtttgagaggcgacatggacatgtcgcaagggaggctttttgtagattatggcactggcgattttgatgtggacaagtcaaaatcattgctcgaagtgccacaagaccattaagaattgcacatgccgcaatagaaaatctaaggccatgaaatctagggtgaacagtaatacgccgcgttcttccaacatgagggtaggcgcattgctcgtattttgtatggttatcattatagcattattgaaagtaaattttcattgttactgtacttatcatacaatgaacctttttactaatgaatgttgtttattgttttttagg

SEQ ID NO: 110952 - DNA, 1014 bp, Setaria italica
  Intron number 1 from transcript Si002087m (locus Si002049m .g) derived from phytozome v7.0 (chr-ID scaffold_5; pos 11 674228 to 11675241)
cggacatccagaattcggtcacgctcctcaagcaggtccgcagttctttcttgattatctcaattttagtcaacaggtgcctgaatagaagaaaacttggaactttctttctcgagacctacgatcacggctaaatcttccacctttttggcaatctgtccgtacacaaggacagtttcaaagtcctgtcacggcatgttggtaggattttttctctttttagtgagggaggtaggaatctgcttgttataattcttggcttttcgtaaggaaggttaatagaattgtgttgctgtcacctgtcagtgaacaagttcggcaaaaacatggacttcacttccaatatacataatactacttgaagtatcattagtcaactgttgctttcacttcgtacattatctaattgtgccttcaaatcttctgcactgaaaccaagattcgttaaagattgtgctgacgagagtgacctgccttcttgcaatttgtttacctgattggtttgtcagcagaagaggcaacacctttgcctctgaaggttttggacaacttggttctctttatttggagtatgtcttcaattagagtccttgattatgccaagacgacatcttgcccctatggcacaatgtatataaaatgcatgctaccatgtttttcatgttattttgaaattggtaaagagtaaaacagtgatttacggcatgcattagcttgaaatgtcatgcccagtattatgttctagattttcatatggttatttcttgatccatactttgttcagttgttgcctcttgacgggctgtaatttagttttgggcgattgggccactgaaatccgttctgcatgatattatgatcaacatatgtgtgacgaacttattttttgctttctaatcaagctatagtttgcatgtttcccagctgaacgcgttgttgaatatctctgctggttctgtttattctaataattccacttctgtttcttatcaagaatgatattgtttggtaggc

SEQ ID NO: 110953 - DNA, 645 bp, Setaria italica
  Intron number 1 from transcript Si001711m (locus Si001716m .g) derived from phytozome v7.0 (chr-ID scaffold_5; pos 44 05418 to 4406062)
aaaagggccgaactgcttctgtgaggcaagaacgttcttgagccttatcattggtactcactgctgttttacatttctggacgagctggagctgctgctcccagtcatgctgtgcttgtcccaaggcgagtagatgcatagataggtctgaattcatttcccctttgcacagatggttcatatattttcttctacttgtgcttccagtgttagctacatctacaaccaaaatccccatggtttctattctttcataaattgtaatgcactcaaatgtgaaagattttacataactcctctgacttagcgtaatgatttgtgtatgtaagtaaataggaacggttcagttgcaatttctgagtctgcatctaggagatgtgaaaaattacagaactgaaatgttagttcctgatttgagtttctgatcttgcaaactgatagcttatgctttgatttgaatggctgtggtagacttgtagaggtagaattgataacttgtgagataatgtgacctgatgccaatgcatgttagcttttgtatagtgattatatgacatgatcttatttctgattgtcctgactctgatctttcatgattttcgatgtgtaggtgccctttgctggaaccaaagaggcccacaaacg

SEQ ID NO: 110954 - DNA, 925 bp, Setaria italica
  Intron number 1 from transcript Si033936m (locus Si033934m .g) derived from phytozome v7.0 (chr-ID scaffold_9; pos 14 709555 to 14710479 reverse strand)
cgcgtgcccgagctctgcaggaacttcaggtgcaggaggctgagctttcgttcccgtaccaaagctgattttttcgcctactcgctgtttcggtgttggatgtggattatgcttctgatgacttcagaagacttcaaaatctcatgttttcgtgcttgaaattgtgatgacggggttaagagatcgtggaatcattgcgttttttagaccgaattcggcattatgaagagagtatgtctacatgttaggattggtttattagctggtaggtattttgggtactgtttgctggttgaaaggcatatttgattactcctttagggtcccaggatatgcctgtgcttattttttagcctggcaatgtttcatgtgccaatgactgaagttttgttgcttataacaatatacgaagctgtttgcttcgtcttcttagattaatttgaatgacagcagttcattctagcttgttggtaggaatggtacctctttaacttttcatgatgagattttgatgaggctaaccttcatttttttaaatatcgttgtttcctaccaattgttttatatctgtatgtgccaacttttttaaagtgctactgccttccggagctgacagtcttatattcatttgacgacctgtttggatagagagaaaacaatggttggtatggggttgattcaaaccctttggtttaactaatccaaaatttcctggaacaatccttctcctctggatacttccctaattctaattgtcctaactgtgtgcattattattattaattttctggattcctgtttctgtaattgcatttacatggtatagatgccagtttgatcctaatgttacctgtaaactgcttagtaactttctattttgttggggctttccgctgcagtgcggttgcttggtgtgggaaactga

SEQ ID NO: 110955 - DNA, 841 bp, Setaria italica
  Intron number 2 from transcript Si002874m (locus Si002874m .g) derived from phytozome v7.0 (chr-ID scaffold_5; pos 42 050548 to 42051388)
aggtacggctgcgcttctcttctgtttcggtcgtggttgcgttttcttttctgtgtgagaacaggcagacatgtctagcgtgatgtagagttggtcgctattagcaatgcaattttattgtcagtgatgtggctcgcattgtttaggagttaccctgttttagattcgctatttgcaagccttttttatcgtgttatttgcacgatttatctgactgtctgaaccccttcttagatggtacatttgcaatccatatttttgttattagttgttatgtgcgtccttgctgcaagatttgaatggaagtttccccattggcagcagcgaaacagttgtggtgtatgttgatctgtcgtagaatttcgcgtgccaaattagttgtgcccggtgctttgtatgtctcgaggtgaagctccatgtactggtcatgttaccaagcttactatgatttggcagtccaacaatagaagtgatggacacacaacactttttctataaatctgtaactgggggcaaatgtctatcatgtataccacctcatttgatgtgttcagggattttgctttctctgtttgagctcattgctgcttaggattaatatgtttacttcctatgcatcatctttttaactaacttatcctgttattttgttaatctgctccttgagtatagatattttgtctgtttcaatcatttgtgttccatggaattgatgtgttcagaaaagctattccaagattttgttgtcccaagcaaaatacctaagaattgcagcatgcaattaactgtctcttgttttatttcagtaagttgcagagcgacgctctgagggaggcaattg

SEQ ID NO: 110956 - DNA, 340 bp, Setaria italica
  Intron number 5 from transcript Si037040m (locus Si037036m .g) derived from phytozome v7.0 (chr-ID scaffold_9; pos 72 49597 to 7249936 reverse strand)
actatcttgtgtttgattgccctggtattttctcaattcatctttgtgtgctgtaattatttcctaatagttacacggtttcttctcatttactattcttagcacttgcacgagtgacaataacaagcaatcatctatctctttatagctattatactcgtgtactaagtgtgtgcaaaataccatcttgagttacctctagtgtgtttagcaattcaaatgtatactttacaaatttacatctttcttgcactgtgataattatacagtcaacatgacacaacatcagttaacaagtttctgcctctcattttcacaggccagattgaactcttcactc

SEQ ID NO: 110957 - DNA, 852 bp, Setaria italica
  Intron number 2 from transcript Si034273m (locus Si034269m .g) derived from phytozome v7.0 (chr-ID scaffold_9; pos 51 131900 to 51132751 reverse strand)
ctgcccaggtacttccctttttaactttgacctcaacttttttctgaatttcgcgttagcattaacttcaaatcttcaccaatgtgctagtcccttctggtcgcagaatatctcttttgctagtaatgatttttagcccgttcccacgataacttagggtgttaccttgagcaagcaatataacttttcattttcctaaataatagttgatatcacatttgtatttgttcactatatatagtgtgaccagcagtgttatcctaaacactaaacggtaaacagtcggggactctttgtttagtgtttagacagtttaaacggtgtttagacgaaattgaacggtctaaacagttttgcactttataactaatttatacataatcatgctcagaaaagataagtattctagaaagtatatatatttatgcatataaaagaccaagtacatatattcatgcatggaacaaaccaaatataaatatttatctatggaaaaacttgagtatatatatttatggaagtaagaattctagtggaattgacagtgtttgcctaaacagtgtgttaaatggccgtttagcctgtataatggcgtttaattccgttcggtttaggccgtttagcccgtgtaatcccgtttttgaccgtttaaacccgttttcgtttaatggaccgtttacagcctaaacaaaacagttggcctccgttcactgtttagatgctgtttaaacggccgtttaggcgaacacgggtgattagtattatgtaaccatgtgttctaatgttgtggttttcacgatgttgttttcttgctctgatttacttgctgtacagatcaaaaggtgtagtgaa

SEQ ID NO: 110958 - DNA, 568 bp, Setaria italica
  Intron number 1 from transcript Si034273m (locus Si034269m .g) derived from phytozome v7.0 (chr-ID scaffold_9; pos 51 132785 to 51133352 reverse strand)
accttggcgacctcggcctcatccagttcaaagacgtaagaacgcctgcccctgctcgtcccttcgattgcgctgttccgggtttaggtatttagagtcttcttttctgctgggtgtgggggatctcgttggtgcccctgccgaatccccacgtttcgatctaaggtggtggctgggtgattggactttgtgatcggggtttcctgggaactagggatccccgtcggcattacgcaattggggattttgcagccacagcgctcaattgttttgctgtttaatactactacatcggaagttgtggtataatggttcgcattggcgtgatcggttgcaatcagagctggtagtttatagtaggaattctttttgattgggaactatatcacatatgcactagttgctttcaatgaaagcaacagttccttgcaaaaaagttactgttattatgcaattgagcttgattagtaggtcgtgaagggtgtgtttttgatgcttcaaaactaggtgctgcttttctatgttgtattttctgttaatctgattattattttttcacctcagctta

SEQ ID NO: 110959 - DNA, 634 bp, Setaria italica
  Intron number 2 from transcript Si001519m (locus Si001519m .g) derived from phytozome v7.0 (chr-ID scaffold_5; pos 61 65060 to 6165693 reverse strand)
ctgcagctgctggttcacaacaaggtagtctatctccctagacatggcgtggattactgtgatatgatctcatttttcagatatcatctttgacttatttgttttctgatatatattgttttggttcttctgattacagccattcgcagttatcattatattgttgttcataagtcggtaacaaaatagcagatccaaattataagaaatcctattgaagctttatcatgcacgatttgtatttgcatctggcacttgcaggaggaagattttactttctgttttctaagctatggcgggataactcacaaacaataatattcctgaaaattctagtaactaatttctgcttgatgaaggtactttcaatgtccttcatttcctctattgcagttgctcttatttccagtgtagcacttgtgacaaacttatttcaaataataatatcttgatgtatctgtaggtttaacgaactatgattttatttccatcgatgatagtttgtaaatagtaccccaaatttcgtgcagagaatcttaccattgactgaagatgtattctgttgttagtaactgtctttttttctttggttcttccagcaaacaaccacaaccaatctgttgagctgcaatct

SEQ ID NO: 110960 - DNA, 670 bp, Setaria italica
  Intron number 1 from transcript Si005199m (locus Si005199m .g) derived from phytozome v7.0 (chr-ID scaffold_5; pos 33 871679 to 33872348)
ttgtgctcatccaacatcaaggtgggccacccgaggtgtacaccaagaccaagtatgtccttcaattcgatttgactcccttcgtttttgcaattactaaacgcattcgaggtttccggttgcatcagtaattttcgaccttgtttagtccctaatcttggagtggcaaaattgacattttaccataaatgcacaaatgtaacatttcgtttgtatttatgaattattatcaaaatattgactaattagactcaaaagattcgtctcataaagtacaacaaaactgtgcaattagtttttaatttcgtctacatttaatacctcatgcatgtaccgcaagtttgatgtgatgaaaaatcttctttttgcatagtgccaaagttgagaatttggagggaagtaaacaaccttcatctcgtagctagcctccttttgcccagtctgcgctgctcgacctaataatggtgaaaggactgaaagcttgacctgacctagtctggatttcgtttggcgtgcttggaaaattagcgcttggggtaggttacataaactggaaattcaggttcctgtttccatcagtccacaacagcaaggttgctttacagcctttcgccttctctgcttttgcaccaaatccgtgctttgtcataaacgagacgaaattcctgtg

SEQ ID NO: 110961 - DNA, 714 bp, Setaria italica
  Intron number 4 from transcript Si002375m (locus Si002375m .g) derived from phytozome v7.0 (chr-ID scaffold_5; pos 95 31513 to 9532226)
ggtcacacagaactactattgctaattacatagaggtgtgcatccttcttttgtttttatttctttctaggagtagagttatagtatatcttatgttctgtgcacaaatgaccatcgccgtttatttgagaataatgtaaaacactatttacactttctatttaagtttggtcagctaaagattttacgtacaaacagcttgtaacatataggttcaatgtttttatagtgtataaaaattaaaaatcagactaggtagcaccacccagctgcctagtcgatgatggatggtgccacccatatctgctgcaacaattcttattactgagtacctaaatatatagcaaacactgtttcataccagaaacaaaattccacatttctactacatctgacctgattgtatgaaaatgagctatcaaagatatcaaatagtagaatccaataattaaagcatgcctgattacacaaatctcctcattgtgtgcaagaactgcaatcgacctcatttcatcctctcttccagcttcctcaaaagcaacttattgcattgtcttcgttcagaattgtgatatcatttttaaattatcgtcatgttttcacttgctttgttaataaattttcgtgaaatgagccatgcttgccttgtcagtcagtttcttaccctggttttatgtaggagcaatattggccacctagtgattttgatcactt

SEQ ID NO: 110962 - DNA, 920 bp, Setaria italica
  Intron number 1 from transcript Si001815m (locus Si001815m .g) derived from phytozome v7.0 (chr-ID scaffold_5; pos 33 302216 to 33303135 reverse strand)
aggtagccggcagatctccgggctctcgcctcctacctctcgttcatctggtttcccggttcttatgcggctgtccgcgcgacagatcgaagtgtgctctgtttttcatcttgtttccgtttgtttcttcttcggtttctggtctcgtcttctctctgcctatggttggtgaaggatttggtttgttcgccgccggccggagctggtcgcccttgtcaaatttctggcctttgggccttcgctttgttcatcggcttgatgtttccaatctccgtcgtttcggtttttggattccatgttcttgttgcagtttggttgatctggactcctgtatctccatccggtgtcgccaattcgagcggccgtgctgaccgtccttgttggatgttcttcatcttctcgttgcgcaggcttctgccggtcaatgtttccttggttttttctgcttttccggctgttttaactggataacaccaatccttctgttgtttgttgtctctgatttgagaccttcgatgctcttctgtgttttttgctgtctgatttgaggccttcgatgctctgctggtggagaggaccgctgctgttcatcacaccgccggagtaatttttcttgtttcatctgccgtcgcttctcttccgagttccggttgtgtcgcgttctttcgttcgtctcgctttacttgggtttcaacgagctgttgatgttgcaattttgcggtcgttttggtctctgcttgggtgttcaacctgcgaggcgatcgatctgtttgattcctcgtttcgctagccgctgcaatggagcaagcgatccgttacttgcatttctcagtgggtctccgtgttccatcaaatcgctgatatgcgcccctcgattcgttgcaggtaccaaaggctaagcccggactgcctcccgctcg

SEQ ID NO: 110963 - DNA, 911 bp, Setaria italica
  Intron number 1 from transcript Si001220m (locus Si001225m .g) derived from phytozome v7.0 (chr-ID scaffold_5; pos 25 921533 to 25922443)
ccggctccaacggctactacaactaccgccaccaggtacgcgccccgacgcctaccaggagatgcgcgccgcgagctccgatcgtcggctcggctgcgcgtaatttgatttccttggtgacgatttagctttttaatcattcttgcgcagcatgtagaacccgattcgtgtcatccccatttgattttatacggtttgatttgacagatgatcatccatagttaaagctagaaagatttttttccccgctgcccattcggtgatgagcactgccgtatcactttgaaagcaggccccacgaatttaagaaagcaaaaaattagagtttcccccgtcccgtctgctgtctgcaccacccgttagtagtaatatcctaggaagatttcatgttttggtccagctcatttgccgtatgaactggattccggttcctcttgttcagcttttctgttttctcagaatgagaaattggcaagtcccctcggccgtaggtgatgaaattttgctgactttaggggggcctacatgtcaccatcagtgctgcagggatcagcaaccatcctaataaggccaaatctgtacaaaaccatatatttctaggagtccacaaacatgacgatttgaatattcatattaattggacaaacaagacttgaatatgtttgtttttactaggtgctggatgtctgattgtacaagcatcatacgtctgccttacggttgtgttccaaattatcgttaacatgatttttcttttcaaaattacttccaactttgtgcttaatggaaaaaagacatggaccataagaagtgctgtattttttatgacaaagaaaggttatctacttagcttttattggaacctaagacaagttcttctgggaaatcaaacttgcaggcggacatctgcc

SEQ ID NO: 110964 - DNA, 574 bp, Setaria italica
  Intron number 2 from transcript Si001969m (locus Si001333m .g) derived from phytozome v7.0 (chr-ID scaffold_5; pos 41 360307 to 41360880)
attctgcatcaggtaaatactccttgagctgatacgagcattctagtatattcttcttcttctttcgttttggaacgggatatgagctatcagatcagcattcccgtactgcttttatctattggcatgagcgccatttttttttggtagtctgttatcatttgccttggaactaataatgggctcaatactagatatggctgtagagttatagttcctgtggtatttttgaacccaagtccacatcatttaagcatccttcatcagtagcttttgactgtgctgtgcatgtagttagcttaccatgcaactattactttctttagcggtaacgtcttttcttttatcataagatttatgcatcaacttgggaaaatcattatgtattacatcataagttcctctccaaacagatatcatctctaggaattttgctttgtgtccaagtacatatgtaagcaccaacaaagtgctcttttcatgtgtgggaagacgaagaaacttggttgcaagaattaaaacttgctcattctgtgcagattgaagctttgaaagaagttggggtcacggaggt

SEQ ID NO: 110965 - DNA, 429 bp, Setaria italica
  Intron number 4 from transcript Si035447m (locus Si035447m .g) derived from phytozome v7.0 (chr-ID scaffold_9; pos 16 699803 to 16700231 reverse strand)
cttgctgatcaactggtgagttttattgactccatattgggtcttgcgctgaatcccaagagttaggaagcacgtacaattatagagtttgatatcaactaagaaattgttaggaaccatatgtacagaattttcgtgagtattctgccataaatgttgccttattttttggttaatttcaaagttttaggtcgtaatcaatggtagaaatcaaaagaatttcacgaacaccatgtaatattatcagtgtattttgtcctaagttagcataattagaatgattatttaagtttatttttttctgagtgagggaggagagtgagattttttttttgtcatatatgcctctttggaagacatgattttgtatttttgctgatacttaactaattggtcctgcccttcttttagataaaccgagtggaatac

SEQ ID NO: 110966 - DNA, 1029 bp, Setaria italica
  Intron number 1 from transcript Si000089m (locus Si000089m .g) derived from phytozome v7.0 (chr-ID scaffold_5; pos 42 418730 to 42419758 reverse strand)
gcctaggcaaggacgccctcgtcaagctcctcaaggtgaccactgctccgttctacccgcttctcctcctggctcatttgctcctcgatctaacccagcgcgattccatttcccgtgaaacgccgcgccgcctctgtttgtttcgaattgataggagaccttgcagtggtgcactggagcgttgctaagtttggtggtatttgctactcaaattagaagttagggttcagggaagtggatgcagtctagtgagtctactgacaagtttcagtgaatttgaataccaagttgcaatacgtattgatttttatctgaagctggagcgatagtgcagtagcactgaagaagttgcgtgtattagtgtataccagtagaggatatcatgtttggtaactatggtgcttatgtttgagcgagtagagatattcaagagttggtttctgaattgggaatattttatggttgatgatgaagatttgtggtgattattgttaatcataaatgttcccccttcatttgaaattagttttgttttagggttattttcaaaggtggggaataaattcagcaatttcctattaaagaccttcctgccaacttgaagcagcagaaaagcattcagaaattcagttaaagtgctttggcactgcttgccattccatctttgctttctttctgaactgctatagctgaaggaagcttctacgcattattttcgcatgaagatttagatgcagaatgaaaggacatatgaggcatggtcctactcatttctgtaaattgacagcgagtcgttaacgtttcaatgatttattagcttttaacttgtgcaactgttgtttgatcatccagttgttttaacagttcagcctagcatagaagtttttctggaactagccatgaagttatacattattaattcatagtcaagttggataaccataatgatgtaaaaggtcaaataatagtggagtaatattatttacttatctaacacacttttttttccttatctgcagcaagctgaaa

SEQ ID NO: 110967 - DNA, 970 bp, Setaria italica
  Intron number 2 from transcript Si001754m (locus Si001754m .g) derived from phytozome v7.0 (chr-ID scaffold_5; pos 41 982909 to 41983878)
ctgcaggaggatttctgtggcacggccctcctcaggtgaaagcactaatcatgatagcctttgtataaacgtcctttctgtcgttttcacaaacgccttgtgtgctacgtgctctgttttacagtctctttaacaagcaacagtgtccggatatttgcattcttgtgcacaagtttttataagctatcacactaggtcctgttcggattgaaggaaaaccaaaggaaaagtacagttttcaattcctatgaaaagttttgcaaatttgctgtttggatcaaaggatttagcatttccgttcactaggaaagggtttgtctccttcacgtctcataggaaaaaagcatccagtgaaagctaaaggaaagaatctttggctctattgcttctcttaacagcacaactttctcactgctgctctcttatcgatcctgacatagagaacaaaatattgtttccagtaacaaatgattgctccaatgaacaaagtcctagtactaggttttcctttgatccaaacatcatgcttctttatttcctacattttaaaattctgtagtttttcgtttttactccattctatttttttccttttccgtgttttcgatcctgtgttccagacaggccctaactgtcagaggattttttttggggtcaaatgtgctccagagtaccatcttatctatcaatacaagctggtcagatttcctgtcgtcagtttaaaaaatgtgctcaagagtagagagagatggtttcttcagcagttttttagtacacccaggagggaggccaataagctgctagataattgcatatttaaactgcaatgcacaccaggtctcagagactgcacgctcatcatgtggtagtcaacaccaggtctcagaaatgggttaggtttagtgtggaatacatgtatttctcttgatttgtggttgttctcttggcagtaccgagtggatccgtactg

SEQ ID NO: 110968 - DNA, 706 bp, Setaria italica
  Intron number 1 from transcript Si039081m (locus Si039081m .g) derived from phytozome v7.0 (chr-ID scaffold_9; pos 55 415173 to 55415878 reverse strand)
gattcagtaatgcaaaccgttctcatcaccatcgttgcctctctctgtctctgcttatatatcattagcatgtgattctctgtcttaatgaggaatgtgtcccatttctttttacctttttgctcgatggcgatcatgaaatgcagtagggaattgaagcatgtctttacactgatatcttgagaaagacatgaagaaaccgaaatgcgatgttgcattttggagaaaacttcttgtggggaagaaaaaaattgtggcatttttagtacaaagatgtgctttgcttgcggtgttttatttgatcgatgtaggtagcacaataacaatgttcctttatttgtttgaggatgggctaattatgatgatactgatggatgtgtacaagttagggttaattttttttatttctttacattcttatttcataatttttgtgagcacatctatgttacaaatgcgcatgacttgtgagttctgaccatgaatatatcctttcatagcagtgaagaatcaaattggacatgatctttccatctctacttccacatagtctctttgatttaatttctatcaatttaggtagtaacagaacaatactagaaaatggtgttggcatctaagaaagctagtgctgcaagcttttcatgtggcaatctatcttgaatttgcagcatactgcgttgttgctactgaagctgctggccgg

SEQ ID NO: 110969 - DNA, 697 bp, Setaria italica
  Intron number 1 from transcript Si001580m (locus Si001580m .g) derived from phytozome v7.0 (chr-ID scaffold_5; pos 31 751956 to 31752652)
gttgcatctttctctaagcacttagtcaaatgtaagataatttgacttagataaaattaaaattgcattgttttggagataaaagggagtactagatagttaatttgtaaccatgctggctccattagcggtgtgctgcgatggtgtggctaatagcataacaatggtcaataagcacggtgaattgttagtgctaaagaaaattactttattgtcggtcaaagtatgagacagagaagcaagtagagattagtctggtggtgcaaatgaaccaaacaaataacgattagagcaatatcggattggaacgaacaatctctttggcaattcggtaaatattaaagctcggccaggcaagtttagggaacccatatcgtggcatacaccgaactaacgactatgactttgatgtggttacatgatttttgtaatcgttccatgagttctgaagaaaaatatcagtttctccacttaattcccgactctgtgtaaaatcctttgagcactttggtaaaaaactttggttggggcagtaaacagttttcacgccctcgtgcaccgtcagatcaaccccgaaacgaactgtgaaagtgagactgagacggaggagacgcggccgacgtgccacgcccggatctcacaagctctgctgcggcaacgagtcccttctaataaaaactctcccaccacatcagcg

SEQ ID NO: 110970 - DNA, 897 bp, Setaria italica
  Intron number 3 from transcript Si000923m (locus Si000923m .g) derived from phytozome v7.0 (chr-ID scaffold_5; pos 41 476260 to 41477156 reverse strand)
cgtggcagtcattccccgacggaaccaggctcgaggtatatacctcgccttcgacatcctccattttcctcgcttcacattctagtattctactgttctagccgtagcacgtacagctgaaatttgcagcgactatcacgcgctttccccatctaagagtacggttctgatactgagtgtgcaatctcaatttacgtgttggaaattcaaatggctgatcagatttcttgcttgtacggtgaatgaactttatatcacaagttgataatcgagcaccgccccacccaagagtgacgatatggtggtttgaaaatggaattcatattttctggagaaggtactaatatcgtggttgttcaagagcaagtacaacagctgggttttgatagaagcgttaagtgcactagaactgtttataatggggctatagatgcatatggaccactaggacatgtcgcttagctcccttggatttggtaccaagtacttacttgatttcgttttcatgccgaaaagaaaaaaaaccatgggagaaaaggttagctgaattgctgaaaggtgtactagccatagaaattgctgaactagtaatacgagttattaatcttatcagtacaattgcgtgcctaatttttggaatagacacaagaagtttcatacagtaagacagaaataatcaatgagtatctgtttatgcagcttgtaaatttccaactgaaagctattaatgagtgttgctaagggagctgtaatctaatgcctgtactcattgcttatgaatcacacactgaactctgatgcaatcatgaaaatcatggcgtaccaacaagcatattgcatatgcctttgccactcaataactgattgaacaaatttcttaatgctgtatctcagatc

SEQ ID NO: 110971 - DNA, 792 bp, Setaria italica
  Intron number 2 from transcript Si036543m (locus Si036516m .g) derived from phytozome v7.0 (chr-ID scaffold_9; pos 31 916718 to 31917509 reverse strand)
acctggagccgtacgtgagagagaccctcgaatcctttcgattccgagcccttagtccccgttatctggtctagatgtcgagtgttgtacttttgacttttgactcttggtttgagatgaactgtcccgttcatgtgtgttccctgaccagattgaagtaatttgtggtgtgcagttagatgttccgataaggaaattggaactttatgtcactggatgagcataattagtcacatagatgctggacgactgtttctggcaatgcagcaaattggtcacgaaaaatgaaaaaacgtagtaaagtttcagatgtgacaccatggtggtagagttcttccaaggaaatattggcagctttgtgcagacaccttggatgggtgccaagaaacatctaccaaattcgctagtttttattccaagttcaggccttttgccttcaaaagtacgaggtgattctcttttaaagaaattgtgtgtgacccatatctctgtttgttctgtaagatgtggatctttaatttcagccttcattaccatccccaaatatgttccaccccgggtgtccgggcatagcttgttcagttcatgtctaactgcttatatccatccataccctacaatccaatggtaattaacgatatgtactaattatatctgtataaacattctaattttttgatgttctgttagattttcatgcagattgttttaaggaatgtagattgcagattgttttaagggatgtaaattgcagatggtttacttctttctactctgtatttgcagaaaggc

SEQ ID NO: 110972 - DNA, 675 bp, Setaria italica
  Intron number 1 from transcript Si036882m (locus Si036878m .g) derived from phytozome v7.0 (chr-ID scaffold_9; pos 42 880954 to 42881628)
ccgtggggaaagaggagccggccaccaccaccaaggtaacaacccccacaccgccttcaaacccaaccgtgattactgtgatttcttcctccccttcgtactttccctcatgggtgtgtgccttttcatcctgcttggtgcttgctcctgctcgaggtggattcagggcgtggcccttttagcatctgctccctgaatcccggattattcccgcagcagagggttttacaaaaagaaaaaaaaaggtttttttataaaaaaatcttgggatgataagaagataatttaggtgcaccatcacttgggatgataagcacgagaggaacttttcgattaaaggtgaggacggtaattcggttgtcaggttttaaggggtgggggttttgacttctgcactcgtactgcaggcaaccccatgtgtagttgtggttttttatatacaagacattacttttttcttcagcttgtcaagatgtttgtatgcttgttacaaatctttagtccgtcaaactttgttgtgcctgttcatgtttcatggctgcccagtattcagacaactgtagtgcagacgtttaccctgttacggccaaatgtcactgaataaatatttctcttcctgttttctcatgtttgtagacagagctagctggtcacactcattgggaaacagatata

SEQ ID NO: 110973 - DNA, 547 bp, Setaria italica
  Intron number 2 from transcript Si034698m (locus Si034698m .g) derived from phytozome v7.0 (chr-ID scaffold_9; pos 21 368272 to 21368818)
cgacgtcgccgacgcagtctacgacctcctcaacggtgagcgcgctgggcctcctgttataccgtcacgattcctctccttttcgtatggtgctatgagttcattgatcgatctgttaattgggaaacaaacaatgccatgttgtacgagcatttagcgtctgaaatggccaatattcgttgtgttaatgttatcatggcactgttattgtcaaattagaagagaattcctttgttgtacctcatgccgtgcgaatttacaatcgatcatctctctacaattggtgtcatgtgcaagctaggtggtatatgtttgtgcattgccatggtatgcagaaactaggagtcaatcaaactatattacggcctgctattcagctacttattgaggtcatagcatcaactagtccttctaggttcttcattagtctcaaaggcatagaaaagactgtaggctgagagcatcgtcttgttaagtatgaacctgaactttccgcaaaatggcccaatcactgaaagaactcttttgaacttttgacagggagggt

SEQ ID NO: 110974 - DNA, 621 bp, Setaria italica
  Intron number 2 from transcript Si002664m (locus Si002530m .g) derived from phytozome v7.0 (chr-ID scaffold_5; pos 21 76593 to 2177213 reverse strand)
tccgtgagagggaggttgaggatctcttctacaaggtgagttgtacttattttacatgtacctttgtcggacttttcatttttttcaagcaaggactagattggtcagagcatatgtcaatttctgaccaggtaataacattttctatctcagtaatatcagtatcatattaatgtgagaatattagtttggagtttaagttttgcatatttttctgttatgatattaactagtatattatctgcaatttggtttatgggttgcacatgaattattgtttgatttcaatctgtgttcttttccttgagttatgtcaacaaaagaaactttgcatatgttgtgtttctctgaagtaaacaatgttctctgttttgtaatgtcgcaaaatccattttactgtgtctctacatgacctgtgcttttaatcatctattagtctaagaccacataaggcacgattagcagcatttgaaaccttgatgatgcatgtagtataacaagaaatgtcttgcataagagaatgggttcacactgtagtattagacattagtatatctattaaatcttgtatgacaatatgcatgccttgatttttttttcttcaatgtatgattgggcagt

SEQ ID NO: 110975 - DNA, 694 bp, Setaria italica
  Intron number 2 from transcript Si037208m (locus Si037208m .g) derived from phytozome v7.0 (chr-ID scaffold_9; pos 65 93526 to 6594219 reverse strand)
aagttcgcagaagtgtggactggttctacactcaggtactatgttttgttactggttactaatttgttagttgtcctagcgctagcgcaaactcatgttgttattttaatgagggctccaaggagaaaaatatatatatcctcagttgtcgatttttaacttgtctcaagtgcaatgcaattgattgaaatctcaaaatcatgttcgggtctgtctatggtcataatctattctattcgcttgatgtttgtaggcaaaaatagaggattgttaggtgaatatgatgttgcagctataattgttagttttcccctcttatgaaccatccttctatgcttaatattgactatgtgtctatgtgaggcttttaataatatattctctagatgattacaataggccaatagggtttggttcccatcaggccttcttcccatgatcaattccacttagtcaaactatttgcaaagggaaaaaacgttttttctgctgtctttcggctccctaatatatgccaagaaacccattgtttgaggaggtttttgatgagccctctgtctcgggaagtcatagagtcaactaaaatttcgtgtttgatccattttcatttgttctgtcctactcttatacttgattgtattgactatttgaaactagacttatatgctcctttttccttcaaaagctaaataaa

SEQ ID NO: 110976 - DNA, 906 bp, Setaria italica
  Intron number 3 from transcript Si002573m (locus Si002573m .g) derived from phytozome v7.0 (chr-ID scaffold_5; pos 34 806494 to 34807399 reverse strand)
ccccttgaggtgcgtattaaattttagctgtcctttttggttcttctttgtgtacgcgtagaactatcgattgctatatcattgtcaattccagtataactctgctcaagcggctaactggttcataagagtcctcagttaaaaagacagaatatggttcgcgtttgattttgttcttgccgacagatggttcatttgaattgtatctgtgaatttggccctggatgccagttttacgaaattcttccaaatctgtcagtgtgctctccaaatcaccatttgattcctaaggtttgttggctcagattgatcaacgtttgcttctgggattagcaatagccaataggtgaataggtgatcactaaggaatcggaactaggatttaccatttaggggaggtgaattgcagttgcagcctatcagtttagacttttgggcagtacaacttggaattttaatgtttgccactggatggctgtaattctagaatgtgtaacttgccaattggatacctcaagttgagaaggggaaaaaagataggcataatttttggttaagcggtagagtatgggttttaaatgattgtccatatgtaactcgaaactgaacactagagggtttttttttgtgaaaaaaactgaacactagagttaggaacgtggccaaggcaaggaggcaaacaaacatgctactctttgtaggtacttgctccaaggtgaacctggagtcctggacaacatttttaagcatgtcttgctgtggaagtgttagccatatataggaagaatggagataggagagatctgaaactatggtctactttcagtactcctgtaaccatttgggacatcattttttcccctcaaattagatatctggtgctagcgttggtgaagtaaaggttgt

SEQ ID NO: 110977 - DNA, 819 bp, Setaria italica
  Intron number 1 from transcript Si002360m (locus Si002360m .g) derived from phytozome v7.0 (chr-ID scaffold_5; pos 34 000377 to 34001195)
agcggtggatccttttgctaatagcttggtcgaaggtttgaatttcacttctcgcctcttcggcatctagttgtcgtgatcaactcccaagcggatttgtctagagctggggacggcaaagcgtcgagcacctggcgtgcgtccctgtgtcaccggtcagatggttcatgtcctggttgtggtgggacgggttgccaacaaatcaataattagtttcttgctccttctccttgctccttgaaaattaaaatgaccgcttaatgtggtgcttgcagcattaggcccgtctatgctactgcagtagcaactgcgctgatcccagcccggttttgacatgttattctgtctgcttccttctcaccctcttttttttttataggctgtctcatcctcttagttgtctatgcctatgatgcttctgaacatgcctcaggagcatccgaggaattatgacattgattatcaagctatgggcgaaataataattattattctatacttacttcagctaacaagcattgagtcaagctgcacaactattttcgcatgacataaaattctataattttgtaggccctaatgaagccgtacctcctgtctgctagttttttttaatcacaaagcgataattagataagtgcaatggtagtctttggtacctctcagatattagaaaaaccaagatcgttgtataaatgtttagttgctttgatgaacgtgcattttgtttctctaatttatttagtggtttttgtaaaaaaaattgaaagacactgtaaatttatttagccagttcacaatttcaggactcaagagaat

SEQ ID NO: 110978 - DNA, 615 bp, Setaria italica
  Intron number 4 from transcript Si001555m (locus Si001555m .g) derived from phytozome v7.0 (chr-ID scaffold_5; pos 67 97163 to 6797777)
tttttggcttactcttttcttcaggcaccttcaacgtgagttacagagctctttacctaactttgattatgttgaaccaccatataaaaaaaaaagaaacacaactcgtggggatggggagagatgtccccaaggcattgcaattaatgttgagaaaggctcggaacgcctgcagcctaggacacaaccgtgtttatctctgaaagcagtttacccaatgagttaccttatcgccatatagatagatataataaggataatagacgcttgttggtacaaaagtggtgcattcctgcatacccgatgttcaatctaacatattgctaatatgattcagcaaacaaccttcccctgcagattgcttcatttgcttaatattgtccttggccctccaccccccccccccccccccccccctgatgacatgggattgtttgccatttcttaaaataactgagcaagggattcatttctctgcagaaaagcatgacttcctcgaagtcttctctatagatttagttattaaggtatgttgcgtttaagcaaactgctactgacatttgcttccactgtgatttagtgtactcattagaccacatcctgccatttggaggc

SEQ ID NO: 110979 - DNA, 817 bp, Setaria italica
  Intron number 2 from transcript Si002702m (locus Si002371m .g) derived from phytozome v7.0 (chr-ID scaffold_5; pos 33 940073 to 33940889)
gaggttttcaccattctcttgctactaaaagcaaggtatttagttaacttcttgtttcttcttgtttggagatagtcgagtgtttgcttgattgtcgaaaagttcaatgtttcagctgcctagcttctgatgtagcagctgcttcactcttttgccttgttagcaaccttactacttcagactgagggtccaattcataatcatttgtagtataaaaaccttgttttcttatggaatatacatggttggagaaacataaataaccagagtagcttactagacagaattaggttattggcttatattgattgttaattgctgactgactatgccgtgagtctcgtgactcgccttttcacactatttttcctgaattcttggatagtctatagaacaatttagcttttagtttaccatgcagtcagaaacttcaaaataatgtatgtggttcttatttctgagaaatacaaatgatgttctggagttgctctgaaacaggttttataatgtactgacatatgtggtagtggaatgatgagtttgcaatgtttgaacatagaaactgaaatttcttcctgacctttggcagcttgaactgcacgtgtcaaaagaagcatccattctcaccatatagtttcccaatgaaccaacactctaatgatagcattattctcgtaatctttgttgttctattttcacttcagctcccatttagatatttttccaagaattgtcaccgtcaatggctaattcttgtcgatgaattttctgactggtattaggtatccagctcacataacccttctgcgtggaaatc

SEQ ID NO: 110980 - DNA, 979 bp, Setaria italica
  Intron number 1 from transcript Si038802m (locus Si038802m .g) derived from phytozome v7.0 (chr-ID scaffold_9; pos 46 787005 to 46787983 reverse strand)
gcactcatgaagacgaggccgtccaagtctgaagctgccagacgtccaggcggtggcgcgtaggaagacgatgctgccggcaagaattacgaggcgagtgtgccgggatccagtctttagctgggtaccgtatggctagctcaagtcgacgaagacggccgatgggcgaacggcgtcaagcgaaggatcgtctcgcccatccttgcacaggatgcgtgcaacgtactcgcgtacgtgcatgtgcacaagctagcaagccatatgaatatcgtgaagactagcacaaatgtgtgtgtgcattactactactggtgatcgatgacggcgtcgggtggaggcgagcggataacgtggggtgaccggtggaggagataaaggaggaggccggttcgatctcggatcgtatggtcaaaaaaatcgagtgagacactctaaaaaaacacacataagctaaatgtggaattaatttggcctcattaaacattattcactcaacacatggactaacaaattgccagtaatcgactaatagctaatgaaaaagcacaaactcacaaagtgaaatgaactcaaaattcaagagataaacctcttatttagtatgtagatcatcagtggttatctgaatttctaacctattatgtgacattaataggtcacaaccaagacagctacaaggttaaagacaagaacaatgctgatacctataggctttgcgtggcaggtgaatcagagatatttcctgagtgcccaaaacatgtttcaggattttgtagctcctcccacgtttactagacacgaagtggagtgcattccccgcaaggacactgggcgcagccacatggacgcggccacggcggagctgagcagaggctggcccgctccatgcaccagtctccgactagtagacacaggcgaacgcctcccttgagctggtgcacacgaagacaacgaggaacgggccgcggtggcagtcgag

SEQ ID NO: 110981 - DNA, 865 bp, Setaria italica
  Intron number 1 from transcript Si004332m (locus Si004332m .g) derived from phytozome v7.0 (chr-ID scaffold_5; pos 44 711935 to 44712799 reverse strand)
cgatcttgtcatctccaacgcccagactggcgaaggtaggttcgttttaacgttaaatagctcgattgcaatcgattactgtgtcatcgtaggccctatgtgcacttcatattatcacgattttgggataattagtagctttgccaatgagatgtttggattcatgcagcctgtaggacatggcttcgattacataaatttgcttgtgaccaggacaccaggtctattcaggattcctggtggtctactttgttttggtttttgagttcacttgtggatgttgtgtgctcaatcttagctctgagcaaaggaaattgcttttggccccagtgattctgcacgtgccacttcaatctggatcttactcactatatggctatttctgtgttgatgcatgcaaattgatggttctccaacaattttgtatgactgggaaaaagatgagcgctgtaaaattgtgtgcagtgaactatcttttttgtatgcccatgggatgtgctcctgaaggtgttagcaaagctgtatcttggatgaaagatgatccatataactggacatcctccctcctggagattgtgccttgcaatcctgatggaaaacttatatttgtaaattgcaatcagttgtaacatcctatttttcttctctttctttctcgatactgtgcatgagtccagtacatctcaatagcgctctgagaaatcccaattgtgaacaaaagtcaatttgtcattcaaaaatcatagtctaattcaatttaaacatctcaattttgatgttaaattaaatgaatcatctcttataacttacaagaatatgttggctgacatttctgttttctgtgctttgttcttgaattcagaat

SEQ ID NO: 110982 - DNA, 946 bp, Setaria italica
  Intron number 2 from transcript Si003049m (locus Si003049m .g) derived from phytozome v7.0 (chr-ID scaffold_5; pos 22 017033 to 22017978)
cccttccaacttctcctcaggtgctgcgccgcctggtaagttacctcagcgcatgcttgcttgcctgctacttttgtctgctatgtactccatttcgtgcttatttgctgccgggttcatcagagatatgggagctggatggtttcgggattgcaattgaagcgatgtagactctttacagttatagaatggatacagattcttcctggcctaaattgccaagaaatgatttgatataatgttggtgttttcacctttggtcatggcctaaatcatactacaaatattgaagaaggtttaagtagaaaaatcctatccattttttgtggaatgtaactgctgctgcattgtctcttggagttggtatgatattctcaattggttggatagaacattggtgttgaacctaattattctcaatatgagggcatgttatactaatattaccattcattaagctcctaagacttgagtgctcttttgaatattctaatgcttaatttggagaccatgatgaaatattttttccttcttgccaagttttccttccaattatgcaaagtctgtctttgaagaggaggatatgacatgcggagatatgcactaagttttgaagataaaatcttcataatgtatggttatgctatcttgagagacgtggtgccatatttattttagataatggatgtggtgcgatattcatgtatcttgctgtattgatcatgaacataggaaccacgatagataagaattggatactcaggaataactagtttcattagcatgtattctaacttttaaatactaccaataccaaacaaacttcatttgttttgtggtaaaattgtctacttattatccgcctttttatgtttgtcttattttctgatttctgtttctatctttattaggtagggtgattatttctggttttcagcagatattg

SEQ ID NO: 110983 - DNA, 607 bp, Setaria italica
  Intron number 3 from transcript Si036473m (locus Si035744m .g) derived from phytozome v7.0 (chr-ID scaffold_9; pos 15 028261 to 15028867)
aactaggagaaggaggtttcggacaagtctataaggtagatcagcaaatgaaaattattgattcttgaattatactttagaatacgtgcaattcaactctgaacatagttctcttactttcttacgtgtatgcttttacatataacttgtactagcacattttgctgacaaaaattgatagccaaggtcgtgctttggcggacacacacatagaatactgtcatctatttgagaatggctggagtgtcattctcctcttacaaagacgtgctgaggaagcataaaaaatatatcagggagtaaaagaaactcaatggaaataacactcaaaattgcagttggaaaatcttactagcactcacgttctcaacaagaaaaaagggagaaaatctactctcaagtagtacagatgcaagcatttcgtgaacaactatacgcgactcacttttgacaggtgaaatcatgaatccaggtatacagcaaattaaaaccaagaatggaacacatcttctaaaagtgcaagcatcagttacgattacatttcggaataacaattgtattgcacaatcgctcaagtttgttttgtttcatcagggtttgctacctg

SEQ ID NO: 110984 - DNA, 700 bp, Setaria italica
  Intron number 1 from transcript Si004813m (locus Si004813m .g) derived from phytozome v7.0 (chr-ID scaffold_5; pos 21 33577 to 2134276)
aaggatcctcaggtgagtttgctttctattcccgtcagtccttcattctttagaatgaacatgattgctggttgattttatacagcctaagtgcaagtttttttttgttcccttcagcagactgcaagtggtgggctgtatggattttttgcatgccaaacagctaattttctttctttaagtttttgggtaatctgatatttctgtgggtagctagacctaaacatgagcaagtacacaaaaattgcacttaaagaaatagtatcacagatgctatggatctatgtatttagcaattgtggtaccagttgtgagattgttctcaatttgtttgaattattcattctttaatgtcaaggcctctgtttttttcccttcttggacaatttgttctttaatgctgaggtctccgtttttttttcttgctgatatactcacaatggactaatgatgctttcaacactgccatttacccacttctttttggtcttcttcaggcagttgaattatgttacttaaagactttttttttgtgcaggatattcagagcacatcagatttgcaggtactaatggagcgcagagtctgcaaccaaatccaagggccactggtgctcctacaggagattctggttcctgtcagtagctagtacaacttaaaggcagatcatcttgttcaatcatttattgcagcaccagta

SEQ ID NO: 110985 - DNA, 816 bp, Setaria italica
  Intron number 2 from transcript Si003479m (locus Si003478m .g) derived from phytozome v7.0 (chr-ID scaffold_5; pos 37 078949 to 37079764)
cccggcttgcaagggattcggctggctctcggaaggtgattcgccctggtctcaatgtcactaccttgtttaatgctagtagattagttacaactatgaagcaaatctgtttgtcgctactcgcaagtcattggaaaactaaaatacataggcatgacttttcaggccatttcaagtagtgataagaatttgatttctgtttggggtaatattggtacataagcatgctgttttcagcagcaaggaagttaattttgtgtatcaaaacgaacagactacattcaaggtcctgctgtggaacatcaaccaaattcttctactcctgtgtcaaggatttgattcggtctgaatgaatatgagttcacattgctatgactagacaacccatagtatcgtagttctgcgcaaaacaatatttgatcctttataagatgtcctaaaaacctattgtcctaaacactgtaaatacattgcttacatcagatcacctgatagaaccaacaagtttcaaatctgtttgtagcccttggtttaaattcctttagatatttttcatgttttccctatataacacgtattacccaagatagcctatttttctagttagatgaatggtttaacatttctatatgaacatgggtaggataatgtggcactcatgcagttcctagtgctcctcaagtcctcatctcataaccgtcatagaaacccgtacacattttctatttcaaaattgaaatatgataataaagttttcatgttgaaatcaatcttatatttccgcgtggcccttgttgtaggtcaaggtgaaactag

SEQ ID NO: 110986 - DNA, 648 bp, Setaria italica
  Intron number 3 from transcript Si003195m (locus Si002890m .g) derived from phytozome v7.0 (chr-ID scaffold_5; pos 58 08103 to 5808750 reverse strand)
gcggtattggaaggccctgcatcgctgctagctgtgtatgtcttctcatctcctgatcgacttacttatctacatagcctgcttcatttcttgtccatacaagtactctctagttttctattgctaatgaagttcagtcaaacctggctctgtgatggggttaagccccattcagatttcaggttgtattgggataccttttctttcatcatgtcagacactagttaggttggttagatagatttacaatagatagacactagttagacgcatcagcaaaggcttcagttattttgtgtttttggtttttcgttgctcaaatcgatccaactgcaaagcatgagatagtagcactatcttgaataccggtgtgctatttccagtgaatttcttgcagagatctgaaaaaactcatcttgacaccttttttgttagaacatagctgtacaattgaaaaactccctttctacttgtctagtaaaaactgtatccaagcaaaactacgaaaatttaacttgtactagtagattttagtctacagacattctgattgtgtgattttgtattttaatgtagcttttacttcatctcaccaaaaatttgctccttgcagctacgctattgcatcccggaagtcctacagccata

SEQ ID NO: 110987 - DNA, 861 bp, Setaria italica
  Intron number 1 from transcript Si000550m (locus Si000479m .g) derived from phytozome v7.0 (chr-ID scaffold_5; pos 20 714852 to 20715712)
gaggtatgcttccagagctacagcgtaaacatcgagttgtaggatccgcatcctcagtaaaaaacactgcatatcggtcctccctctcttccctgtacatagacatattttatttggttacgtgagagtggaggtcaccatgcaccatcagcattgttttacttgtctttgcccttgtttagttcacccccaactcccaactttggtactatgtaaaaagaagattccccatcacatcaaacttgcggtacatacatggagtactaaatgtagacgaaattaaaaactaattgcacagttttgttgtactttgcgagacgaatcttttgagcctaattagtcaatgtttggacaataattcacgaatacaaacaaaacgctacagtgtgctatagtgctgtaacagtaatttgacaccttcaaactttggcaactaaacaagacctttgttcgaatggtctgcaacgtacgaattttgttctaacagctagtgtttaactgcgctagtgtgaatgttcgattgaaaacaccctcggtttgcttttcacaccactgtagcttctcttagttatcttctatctaccggaaccgggagatagataggaaatccgggctggaagcctacgccacccaacagcccgctaatccataagcccgctaacgaaccccgcagccaatcagcgcgtggcatttgatcgagctctctcggccactacccgagatgtgccctcgcacacgtggctttccaactccccaccgcagccgcctgcccaatcggtggcacccacgcgttctcccttccctggactcctctcggtgggtggagactggagagagagaggcgccgaaggggcaacggga

SEQ ID NO: 110988 - DNA, 823 bp, Setaria italica
  Intron number 1 from transcript Si037196m (locus Si037196m .g) derived from phytozome v7.0 (chr-ID scaffold_9; pos 49 7025 to 497847)
cgccgtggccgcaacaaaccaaaccgtacgctgctgcgggcggattggagacgcagacagcagcgtcgccagcgaccagcgtgccaaaactcgtcaacatcatctcgtgtagaatagagtaagcagttcattatcgaaatgacgtaaattatctgctgaaaattataaattaaaattcaatcttggagagaaaagaaacaaattataacagggataaatcaaaccaaatatcatagtttaggaggtataaaattgaaaaaaaaatagtttaggagttatcatacttgaggaatacattaaggtagtgtttggttggctcaaatgtaacgtaatctgatcattgaaggtaacgaatcatattacacatgtttgattgcagtggtttgtaatcaattaacactgtaatcgaatcccttacctaaataatatatatacaagcttgttacccctcctcccccaccgtaatcagatatagcacccacacagtaatctgattacattaccagagtgcaaccaaacaaagagggcaatcatctattccacctccaaatacactgtaatctgattccctttacgtttacattaccttagcacgaaccaaacactatctaaaccttccttcctcttcttctccatgtatttcacttatcatcatcctcatctaaaaaatatattatttctaacgagacctttttttcctttacttttgggtccgattgtcgccagacggcccaaagttcagttacaatttctcacgggctaggcctacatgcatccgattggcccagaagcgctcgtttcagctatccatcagattggccac

SEQ ID NO: 110989 - DNA, 841 bp, Setaria italica
  Intron number 1 from transcript Si038758m (locus Si038758m .g) derived from phytozome v7.0 (chr-ID scaffold_9; pos 55 103970 to 55104810)
gcggcggcaagcgcgactccaagcttgagcacaaggtaaacacgtgcctttcctggggtgttatccatatatacttgttattttctgctcagaaaagtgattgcgaatatacgttacaacttgatgtgatatgtacggtggatactcagtggggatgtagtcgtctatcgtttctgttcttgcaagctcttttgctgctagcgtcattaacaacctgtatgggagcagttccactcatgaagattatttcacgtttacaacggggacatctcgtaaggatctttttttttcttttctacacatgtggaggtatacatatttaacggttgtttgaattggacttctatagactaacaagctgaacaccaacaattaatatagggaaaaagacatgttcatcttttatgtatatttctgtttgtcaagccatgattaaaatcataaatgtttgatcttagcatgcttcaaaaagttagaagtgagacctttgagtatttaccaaaatgattatatacaatcctttataaaagggaattataggtggagtagcatataacttcatagatctaataatgaagttgaacatgcagttcattaagtatatttatcctaatgcatcgtttgaaattgcttgaggatgattataggggtttcaccttttatgcaaattgaaataactacttttgcttttactttgtctcttgttagttgaaatatcaaaacttgaagtttcatcatcataataataaatgatatttgattctcaaagtattgaacaagctattaaattcacatttttactggcctgcagacgatagaactgagcaaaagtatcaaggag

SEQ ID NO: 110990 - DNA, 1001 bp, Setaria italica
  Intron number 1 from transcript Si000115m (locus Si000115m .g) derived from phytozome v7.0 (chr-ID scaffold_5; pos 38 092086 to 38093086 reverse strand)
gaaggtgagattttttggttggcctttcggggttttctcaggcatagtttgatgtaggctacattattggattttttttgctaatgcattgtctttgcagtgcccttttcttgttttccacggtgagacatgattagggacatagcagtatagcactgctctttgatggctgttgttttttatacctgttggctgccactctcagaagctttgcacttgtatctgtttaatcatgatattgagatagttgtcaacttggttggaagtaaaccctatatatagaaggattaatcattttgtaaagtttttttcatcatcttttgtgatgacttccagtattcgtgtctattgtggagtagatataacctatatgtttggtgttgtcgtgctactgttttttagatgaatgtaaattattgaaccacgaaatgttcaagagaatataaaaattctacatcacaagatcacaattcgtgctcgtttgtgatcttcgctgattattttaaaatggtggatatggaatttcggactgaatatcgtgaagtgtatgctcaaatgctacagttattctcacgtgtctgaaactaagatgataattgatagggtcatttaactagagcctctgatggagatcagacattctatgtaagccttgcacgcattctgttcattatgcaacctgtggtagttagtgttttacctatgttcactaagtgaactttcatgggtttgttaggttagttctggttgtcactagtgtctactgtttggtaaataggtcatgatgtcttgacagtgcagagtgactatcaaaatgctaggtgtgtgcatagttggtacaatggttgtagtttctttgacaattgatactgtgggtgaagtacaatgaagcctgaagtatggaaaggcatattacttattgttttctactccattatatcacttatttcttttgttgtcttgcagaatctgcatcaactgttgagaaccaaactgtgcca

SEQ ID NO: 110991 - DNA, 758 bp, Setaria italica
  Intron number 1 from transcript Si001238m (locus Si001238m .g) derived from phytozome v7.0 (chr-ID scaffold_5; pos 69 89371 to 6990128 reverse strand)
tcaccagcaagcactactgggcggtatgtgtcattgtttgaactttaataaagtctcatgcacataaagcttcaattagttagagatgccactgtagtattcggtaatattttttgtggttgttgaaagcgggttaggtatgattcagttggttgcatattgtgaactgatactctgatactttgagtaatctagaagatcaagtagctggactagcttgattatttccttcccataataggaaatactgcactggccaagagtcaagactacacaatatatttctggttggctaatttctaatgtttacacttgatgggcaaagtgtgcctatgacacatgtccaagaacagtactcagttacatacttagttgtctagagttcagaaatagttgaagaagtttagttttcagatatgtgcagtagatattgtagggcttccttatatttatgaactttcttttgctaaaagagtattaatgcaaatcttgaaatggtaatgccttcatggaatgatattgcatacttttaagttaaactacctatatatttaccaagcataatgaaacctgtcgttgtccccttaagaaaaaaaaaaggcttcttactgttgagtttgtccacttagggttagactgttatttcttgatccatcaatcttttttccattttgcagaatactcacattcattgccacattagctgaatcaagtctctttcagtctgtttcattcacaggagtttctggatttcttct

SEQ ID NO: 110992 - DNA, 859 bp, Setaria italica
  Intron number 1 from transcript Si000255m (locus Si000255m .g) derived from phytozome v7.0 (chr-ID scaffold_5; pos 38 351551 to 38352409)
gatctcgcgactcgcgaggctgaatcatcctccaggtgagttcttgctggttcatgactccatggcgcaggtttctgttagttctctcggctggctcagctctcagcttgggagttttctggaccgagcctagctctgctgttttctgttccttgtgctgcgttagatgatgatgatagcggttagctacttgagaattttgttggaaatttgcagcccgttctgttggctgggatcattcttttgaaacgagttgactggaatcattcgaattctagctttggtttctatgggatttatggctgactttaggtggttctgttacttctgtagaaagaattgctttgaattcgacggcaaaaaaaaaatacctccggacgtgtttcggcctactcttcagatcaatctcccttttccgagttacttgtcaaaccaattctcacgctccgtgctgttgtccttgcagcaaaatttgttgcgttatttcgttatttctgattcgtgtggcgtgattgttgtgtatttactctcactttgcaaaattctcttggtcctgggtatctgtcaattgccacaacgtttggtacaggacgcttttaatttatgttttctggtggttcccagcctggtgtttgggctccctgccttttctccaccaatgattagctttaataattcatcaaaatgttatcaatgcctcaatcgtactcaactttgatgtcaacagcccataagcacttttaaattttatcaggcagtaggtgttagatacttctaagatttaactcacatcttgctcattaacttcgtttgtttccttgtagacatcctacttcaacgccagtcatctctggggctt

SEQ ID NO: 110993 - DNA, 816 bp, Setaria italica
  Intron number 1 from transcript Si000521m (locus Si000521m .g) derived from phytozome v7.0 (chr-ID scaffold_5; pos 44 957215 to 44958030)
aaagcaacggcactgttgggtgctcaaggtgtctggtatttcctcgtatttttgtttggtttggataatggaattgattgatccagcaccatctgatcctgcacatggttagcttaataacgaagaatgcgtttgtggcaccaagatttatgagcacttcttttaaaaaaaactcatgaaaaaaaactttataatttgacaattccatcgtagatgaggtgattcctcgaatcaaagaacttgtatggtaccacgacaattaggggtttggcatcagccaccaggcaagggaaaagcaacaatcataagatggacacgttttttctttccaaagaccagataaaacacgtaatttagcttacttgcaattaaacggctccaattggtagcctgtcttctttggtttgccctaactactgtacgaacgtaccctgagtggagtatcagatgctagcatgctgctgctgcatcttttgctgctacagagagagactggcccatctgtaagcagtgtggccgctctgttgcggtggatgagaatgagatgctgccatcgggcattcagaggcgtatcccatccgtacgatcaaaatcgagcggtatcagccagcgtaagcagcgagtgagggagagcattaaggcagcaagcaaaccacccggcgaccgattcaaaaccgcccaactcaccacagcgggcggattagtagtcgactccatttcgcttcccattccattccccttcgccccggcttcccccatcccatccccttcccctccccagttggaagagccggctctcgctccctcccgatccag

SEQ ID NO: 110994 - DNA, 944 bp, Setaria italica
  Intron number 1 from transcript Si003665m (locus Si003665m .g) derived from phytozome v7.0 (chr-ID scaffold_5; pos 35 958791 to 35959734 reverse strand)
ttggagaacttcaagaactcgacggaaggtaaatctttcatatttctattatgtcataatgtgtggatactcactgaactcagtgctaatgggtctttgaatacgcactttggtttgtatcacctattttcttcttaccacttgtttgtgtataaaaacttggacaaatcatttcatatattgaaaaaaaacttgtctgcatatatagtgtatgtggaggcatatatggcaccaagctacagttaatcttggatgtcttcgcattggatggtaactaaactctggatagtttagtagccccctttcagctgcacttgtatggatctgattgttatccttaatttggtcatttcttgagtcaatgactcttcaaacaaatagatcttttctcagtagtgatgtttttgtgcggagtaccatactaccatgcctgtaaaaaagaataacaaagtatgtcatcttgcacccatgctagttttccgcagataaattgaattgacttctgacattcttgcggaagtttgcatctcatggatatggctgcagaccataaacaagtgtagattagcatatgtttatactcctttgggtagtggcaatagtatagatggtattcaccaaaactttggccaaattatattagtttttatagtttttgtgtgttttgcggagtttatagtatttctgtgatattataatcttactatgttttataggtatataaagatatcaattataggtcaaagttatgttgtaggagcatggcgctatccaaaacagtagtctcttgtggctggaaggggtatatgtcggaccaattgccagtggggcatgtgaatcctgtttagcttagagcagagtttcatgagatttttcctttctccagctaatccaattatttcgctgcagctctcttcaatcaaggtcaggaatcgaaggtcgcg

SEQ ID NO: 110995 - DNA, 825 bp, Setaria italica
  Intron number 1 from transcript Si000083m (locus Si000083m .g) derived from phytozome v7.0 (chr-ID scaffold_5; pos 37 918238 to 37919062)
tcttaacagaggtctgtatcttgcatgctacttattactctcttcatctatgtttgctaggttggttttggtaaaaaaaaatggaacatgcttaaaatttcttcgcaaaagacaatgatagttctgacatagaaacaatgaatatttcttaatcccagtgtgatttggtatttcttcatgggctctctatcttttaatgctaattaaaaaagtacttgatatgctataaaaatcatcggggagcagtcattcctttttctgagatcacacattttcttagtcttcattttttccccaaaaaatcttcttgattttccaaagtatagaatggcggagcaaaaattgtcattagaagtgcatttgcaagtaccttgattgcatgttatgcttgagttcaatgttgtgtttgatttgtcaggtgaatctttcttaagtacagccttaggtcattgttgactttgcatgccaagtttgttctttttcgcctttatgttatctgcaaatgtaatggctttgctcaaactaatatatcacttatctaatgttgatatgcaaattatatggaaccaatggaaatgctatgacatgattttccctctagatcatcagagtggctatgactaagcagttatgattcacaaattatgtgttatagtacatatgacctgtacattctttaatgtggttgctgatatgttgcttatatttttttaaagttcatttatactggttttctctctccaatctatacaagctgatgtgaattaccggcattgtctcataattgcagttggagcagcacccggagatacgtggcttcgaaca

SEQ ID NO: 110996 - DNA, 553 bp, Setaria italica
  Intron number 2 from transcript Si003337m (locus Si003337m .g) derived from phytozome v7.0 (chr-ID scaffold_5; pos 29 8086 to 298638)
ctcccaacacgccaggtgttttatctactcacgtcttttttttttggcgaaccttatctactcatatctatggacatttgcatgtcctgttactttctctctctttttgtaatcatattagcttcctccactacaatctcagtttaaattttaagttttgacttggaaattgggcgaaagcattgaatttgatgatgaacgtatcagacaactaacttatatggttgcctatggggtgtgtgtgtgttgttttttacatgacatgtgctatccagtaagctaggtttgtatataaacctgtcatataccttggatggttgtatcttcagtttaattttagatctagagcatactccattcagatttcctcacctgtacccatgcaatgtgctagccactaggataggtctgtatgtaatcctgtccttagcccttggatggtcatgcttctcactttagcttcagatcgagagcatatatttcacatgtagttggtgtggtatcactaacacatttcctctttatttggtctgattttctttgcagtggggct

SEQ ID NO: 110997 - DNA, 768 bp, Setaria italica
  Intron number 1 from transcript Si002281m (locus Si002281m .g) derived from phytozome v7.0 (chr-ID scaffold_5; pos 26 683166 to 26683933 reverse strand)
gtaccaggcgtgccccttctgcaacaaggtcagaggtgagtctttctttctttgctccagtctcgtgattccgatctatgttatgtttgaaataagttttcggtgtagagacttctggggtcaaggaaatttttatgtcgttctgcaatttactacttgtacaagtatgtcattgtaattgctactgaaattcagtggggggcatccacttgatgcagtgctaactttactattcacccttttgatctatatgtgaaagcaaatagacaaataaggggcgagaaagtcttttgtttaggactatatatgaggaatttttaaaccagcattgtgttaaataatcaaatgcggatgctttgctctgttttcttgtagatgcataaaatagagaacatagattaacttataatctagtaaattcaagaatgaatcattcatcacaaaattgcataatcgctagcgggcctgttcgcttcagcttataagctggctgaaaagctgaaacggctgatttgttgtgagaggaaaacactgtttggtggctgataagccgacggaataagctgaagcgaacaggctagctgagagtagtgctagtttgttaagatttttgtgtcaatattggttttccattgcataagagcgggagggcaatagacattgtctgcatggaaacagtaccttgttcttttcttgaattttgatgttcccacagccatgacataaaccttttttccattgccttcatatcagcctttttagactatc

SEQ ID NO: 110998 - DNA, 312 bp, Setaria italica
  Intron number 1 from transcript Si001053m (locus Si001053m .g) derived from phytozome v7.0 (chr-ID scaffold_5; pos 42 500543 to 42500854)
ctctcccgggagccgcaattccgacctgctgcttcgtaagtccacctttgaatttttgtttatccatgaccttttctagctgtatgcttgattgaaacgagagcgccgattgaggaactggtgtgggtaatatgtggggaattaatctgagatttgtatcggtcgcctcttgatggttgtgtagactgcttagaaaagaaaattgtcatggtctcccgtgttaatttcttctattttcgcctgctttatctgatctgggccctatatgataaagataaaaggttttttttttgtagaggaggctcttgaggt

SEQ ID NO: 110999 - DNA, 579 bp, Setaria italica
  Intron number 1 from transcript Si000843m (locus Si000843m .g) derived from phytozome v7.0 (chr-ID scaffold_5; pos 24 274974 to 24275552)
agcgacggctcgacgccgcgcgcgcccaggaagaggtaaccccggccccaccgccacgccctagtaccgtagacgctgattacatgcgatatctgtatgagaaatgtattggtagcacggaattattcggttggcgtgctttaattcctctccccggtttaatcggcgaactttttgatatgttgctccccaatttgatcgcgatcctttcaatccatttgaaaggaagaaatattttgatccaaaaacctgattgggggctaagggcgatggaccctttactggattattaatttcggtttctatccacttaatgggagtagtgcaaacccttgtgctagtcttgttaggattctcgtttactgatcccttgtactagtcttgttaggattctcgtttactgattgttgtaattaagctacttgcattgtcaattttcactacttgctgcggatcataagttccagaataccgattatgtttgtactgctcatctagcaactgtagtcctaatcttctatttttgccactgtatgctgatagaatcatcttttgtacttctgataggctgaccagaaa

SEQ ID NO: 111000 - DNA, 963 bp, Setaria italica
  Intron number 1 from transcript Si001280m (locus Si001280m .g) derived from phytozome v7.0 (chr-ID scaffold_5; pos 39 963167 to 39964129)
ttaccaggtcatcctcaacgactagagcatcgagggttggtacagttactgttattatatgctaaatgtttctatatgtaatatatttcttgatctttgtctatgcaatgtcaagatattttgtgaaggttatatatattttatattatcagtggcatttgaattcactcaggtcatattaatggtttgcttgcataaggaataacaatctactgctgcattcaagttgcataaggaataatgtttgtgacatccttgcaacaataatctatccatgctttacgggatctacaactgcaataactactgatttgggagtttacagtggattcaagagcattttgtgcctagcttcaaaaagttgctagaatcatttttatcttctgtacagtcttaaatagtgtgcacaagattgataagcatcttcatcatctgggtagtctgtcaaattagtggatgttaaaacatgaaattgtactaaaacatagttcttactctattttcagcaatcatgtctcgatgatttgtcaatattgtcaacaaaactttccttaggaataactattatttgtgcaattgcagaaatcactgtccttctcatagggctttgctgattaattgctttatagttggttgattatttggtgaccatatgtggaaacctttaaattattgcacacacctctcatatgttagttgtactccatggtacatgcagtacatttgaatccacaattccacagcattctggaatttacttttgagacatgaaaatcaagtatcatgtagttcaaaatggcaaacttgataatcacccacttcagtcaaattgtgagaacatactcagctacagaactgttttttgaaatttactctcagctgctcatatcgttggggatcatgaatatagttaacacaactgtatggtatgtttgttgcagctttccgcttctgaaccagaga

SEQ ID NO: 111001 - DNA, 720 bp, Setaria italica
  Intron number 1 from transcript Si038442m (locus Si038442m .g) derived from phytozome v7.0 (chr-ID scaffold_9; pos 40 395945 to 40396664)
cgccccgttttctattcatagtcagtatatttgaggtaacttacattccatgccaagctagagagtgtagataattccctttccatttccagactactgttgttctgcaaaggttccttccaatttaaaccggttcttgctccttaatatccttggagttgtctttaccaactggaatgtttaggactctttaaaaaaattggatgcttagagttgacataaagtgtcttagacattacctactagagtaggcaactgggacgctggtagtaaagaataagagttcctggcattacctaaggctgagagaaaagaatgttgtagtttaagaaaggaatatggaggtattaacaatagttttaccttgtaaattttgcacaaagcatctgatagcttttgcaaagattaacaaagtagtattttttttcaattaaaaattaatgtcgtctgaaatgaatctgtatctttctcaagtacattcctgcacatttccatgtagtttttttttatgcttcattcacggagatgcaattggtttgatttagggactatttgatgttgcttaagcatagcacttctatgcttgtgatatctattttgcccctagtttactctcatctgcattaaaacgagaccatgtgcctactcgaggagtcaaacccagtgcttgttctatgcgctacatacaggtctagaacaccaactgaaccctattaagaa

SEQ ID NO: 111002 - DNA, 911 bp, Setaria italica
  Intron number 2 from transcript Si000891m (locus Si000891m .g) derived from phytozome v7.0 (chr-ID scaffold_5; pos 93 73899 to 9374809)
gcaccagcaccaccgcgacgcaatcaagtcctcaggttcgacctcgtgcctgctccccttgtgcatcctctcgctggcgtggcttttcattccaagacacttgtgcgcgcacggccgtggcccgagccctagccgcgcgcccctaaagcgcgcgtggcggttcctttgctcaagttatgaggtccaacgagcgcaaagtgtcctcgcttgggcttctactagaggaaccatctctcgaccgacgttaggcagagctgattaggatgttgaagagtaaccagggagtggcggattgccccttactatgagtacttgtgtagcgactttagtaggctatcaaggtgcggaagcacttgagtgatttttctgcagtggctaaaacctggctaattggcatgaagaacaacaatttgacatgtgtgcctgaaaattagagggctaatcggcatgaagaacaacaataggtagctattagtataaattgaaattcacttatgattagtaccttggctaaaaaggttataaattcatacatgattattcaaactactgaagaagcttattctgtgatgagcaaaagcattataatagtaggtttctgtgctatcataaacaaacaaatcatctatgagcaggggtgaagccagaccactaggacgaggggggagggtgcaaattcaatttttcctttgatttacatggcaaaaatagatgtgcaatagtgacgtccccttccgtcgcccctgtgtgagcataaaggattctgtcacaacatatgtggaaaacacatgtattttggtgcatcatacttagtttggagcatgctgctagtcactacagctggtagtctttcattggttcggtgtctggtttcagtgcacaattcagcatctagccggaggagggaacat

SEQ ID NO: 111003 - DNA, 727 bp, Setaria italica
  Intron number 1 from transcript Si003807m (locus Si003807m .g) derived from phytozome v7.0 (chr-ID scaffold_5; pos 16 676844 to 16677570 reverse strand)
ccaaagagaccaatacaccttttgacaagatcaaagtttgccttattagagtactccctctattccaaaagagtattattctaatttggtcctaagtcaaactatcttaaatatcaagtttataaagaagaatgtcaacatttacgacactaaatacgtatcctatagaaatatatttcacgatgaatcttgtgatacatatttgatatcataaatattgataccattttataaattttgttaaacttcagatgattttacttaggacaaagatagaatgtcactctttggaacggagtaaaagacaggacataataccttgttaggatgcccggccccagtatggagtaaaaggagaatttttttaaaaaaaaatgccagtttcattcatattaatctaagtgcatatttggaatgaagtatttgaatctttgactactactctgtcaaaaatcctttttacagtatgtctgtggagcctggaatggatttaaagttcttcagaaattagactgtttgatgtcttatagcctgatacttcatgtaaaattgtggtaatttactaaagctgatgttatttttcaagtgaatttcagtttcttcacattcagataagatcactcttacataacgtcagcgagatagatgacggccgccagtaccacagttgcctactcttacgtacttgaccatcccaagaatcaggtcggtgtcgagccaagtcagc

SEQ ID NO: 111004 - DNA, 899 bp, Setaria italica
  Intron number 1 from transcript Si005247m (locus Si005247m .g) derived from phytozome v7.0 (chr-ID scaffold_5; pos 33 698822 to 33699720)
agagggcctgcctcgaggtcggcaaagtcggcaaggtacagtggttaggcttagcaagaaaattgctctgtttccttgtgctgttccacagcgaactcgtgttatctccgctggatgattatgtaccgctcgggttccatcttttgcttagattaggggatttattcgattaattggtttgctcaagcatttctagtactgttattagtagggaaaggggaaaagtatagagtaattttggcttgttgtgagaaaagaaaatagctttgacacctgcgcaatcgtgtggaactgcatgaaagtaatcaaggatgttaaaatgttagtggattaagtttgtgccttatattaagaatgcttactgtcttacgattttatagctgaactgaagagaatcccatttgaggtgttggtttcttgacttttaggtgttttatcattttttgcacaggaccaattaatcattttgatattttcttgtgttcgcagtgtttgtatcatagtatgctcatcgtcgtcggtttttggctatagctaatgcaattctttccacagcaaaaagatcatcgcttggccattttatagaataccaatgttaattaaactttaccgttcactagtgtagaggtgtagactttgtgcgattgattgtttgcttcaatcatgtaaaaagcttattccagctttcctgatttcctgattgtgtaaagatccacagcttctgctttatttgaacaaaaaaagaacaagaaaaatctaagcataacatctggatgctttctttctaaacaactgattgtcatacatggatagcaattttgacaaagcttcctttctaaacaacttattgtcatatatggaagtaatttgacaatttcttttaccatcctgtgcagact

SEQ ID NO: 111005 - DNA, 617 bp, Setaria italica
  Intron number 2 from transcript Si037673m (locus Si037673m .g) derived from phytozome v7.0 (chr-ID scaffold_9; pos 60 94190 to 6094806)
ttcgtcgcccaagtaagaacacagaattcctcggtgcaccaatagttcaggcaattttttttccttaaaaacaatcgagggataacatgatgtagccccgtagggatatgcaggcaaagagccacttgaagagctggggtgttatttgtgcagttttttttgttttggttctgttcgagcacattaggaatggacatgtattatatcaacatgctttcattaattgccaggctgcaaacaaaataatgaaatctgaatcaaaccctaaaatagtgcgaagagactatttctggtgttccatctttaacttagtactgtactattttcctcgaatatgtgcccatatttcctgaggcaaaattgcctataccactctaatccactagcagtggcctaaagtacagtgaatttggttatgtatgccatcaaactttgtatgccctattccgtgtaattttaattgccccccatcccatgcacctttgtgttccttgtacaattcttcctgaagcaggtgcttttttggttgtaaagaacagcatgcttaattctatattgcttactcatggtcactgtatgaaggaaatattctccagttggactcacaagaccgagca

SEQ ID NO: 111006 - DNA, 712 bp, Setaria italica
  Intron number 1 from transcript Si000130m (locus Si000130m .g) derived from phytozome v7.0 (chr-ID scaffold_5; pos 44 832624 to 44833335 reverse strand)
ggcggatctggcacctcgcgcgaaagaagaagcaggtccggattcctatttcttccctctgcttgttttatcactttcatctctggatttgtgttatttttctctctaatctgtatgttcctttctttttttttccctcgtgtctctgcgatttccttcccgtgggttggtcaccgttccgttaaatttgcagtgttcctcttcgttgcggagatgcttattgaagcgcaccctgcatgcgcgaattaaatagtatttgaggaaaattctgatagtttcttttattgatgtttaagggtgatgatagatcaggcttgcatggcgtgttgtgctttcagaaattcagaactgtgtacttaactgatgtcacatctaaaaagaaactttaatttggatctcccctgtctcactgttgtacatagaaaagtatctctctgtatcatgtagcatgcatcaaggccgacatggtatgctcacggtttgagtttgctttcccttttccttttgccgaagtcgaactcacgttgctggctgcgagagcagagagttctattttttttttcaatttcgaaaagctttgcgtattaaatttctttgaagaagtggccgacaagtgggctgatactgttctgcttgtttgtactgaaattattagtttgctgatgcttctgagttttgcgatgagcagctggaacttgagggcttccagaga

SEQ ID NO: 111007 - DNA, 802 bp, Setaria italica
  Intron number 2 from transcript Si003181m (locus Si002987m .g) derived from phytozome v7.0 (chr-ID scaffold_5; pos 38 426651 to 38427452 reverse strand)
ggcctcaaggtacatcttgctcctagtatgttagaaattccaccgtgattcatatgtgatcggtgtagatattagttattcgatggtcttaaggctgtttcgtgatggtactcgcggctgatttcgctcaattacgtgccctgcttggaagccctgaccttctgggcttgtggtagatcgttgatttcatcgtcagttgtcattgatctgatcatcaactgacatgccttgcaacctcgcttgctattggacaggtggtgtggtcgatttttgttgttttcgtcatagtacatataacgagaaagaaacgcataatataaagcattcatggagtcatgtgtcagtttatttggttgtgggaaactaccttccttgtaactgataacggttgatacttggtacagcttcgcaattcttcatagtgtactgtagttattctaattctatcttagagaatagaaaccttagtcctgggggagattattgaatgctgatcgtgcatctcacactttcatgatcatgtttatgaaacccgtctttcattatcgaagggtgctgttctaattagtaagaaaaccctgttgttcagagtgttaattggcaagtacatgggtcatgtgaactgcattagagatgcaaaatacattctataaatcagttcatattatggtgtttgagtactggaatacattgcctgtccagccttttacatttgatgaactataaatttgttatacattattaaatacctttttttctttatgcaggtttggccccttgatatagatttgaagttcctaga

SEQ ID NO: 111008 - DNA, 954 bp, Setaria italica
  Intron number 1 from transcript Si003968m (locus Si003968m .g) derived from phytozome v7.0 (chr-ID scaffold_5; pos 13 319192 to 13320145)
gaagttggggagcaagcactcagtttggttggtcggtcggttttctagatctctatctgctgctcgtgtcattggtttttgcttcaagaactcactcggagcttcttaattagaaattaggcctgtgagaatgcagcacattggctagatcgatggcttgtttgttgcattgcagtagccagtaggtttagttgatgttctagttgctctagttcaagctttgtttgcttttttcacccgttcttgttggtgatgcatggatggttattgcgcttcctcctgtggttcaggagctaccagtgctagtagatgttgttgttaaccagatatgtggatggggacaggagtctttcgttctctctttgctttgattggcatttgaaacagattgggcctgtcctaagatcttctcccaattttatattttattgaagttttaaattactctatgcagctaaccagtatcccccaaactccaacctgcctactaagtatttttaatctttggccttgttgtttctaagcctttctttgtagctgaaaaatttaatgacctcaaagccaccagaagagtagtatactttaagcttgttttaaaaacaacacagccttgccttacatttttttttgaaaactgagcagcactgctaattcatatttgccttacatatttcatatctgcattgcatggtcttaccctcatctagcagtatattttttttcttaccctaaatgtccggcacgtgattggtttcctgccgctgctgctgtagcaggacactgcaggagggcgcagcgacagcagcagcagctgcagctgcagctgcagctttcctgtgccatccatgatactacagctactccatccatctatccatcactgggcacggcaagaatgacacaaggaaaaggttttgtgtctctttgcgtgttattagtacaggatctgtctgc

SEQ ID NO: 111009 - DNA, 1062 bp, Setaria italica
  Intron number 2 from transcript Si001212m (locus Si001212m .g) derived from phytozome v7.0 (chr-ID scaffold_5; pos 11 024441 to 11025502 reverse strand)
ggaacctcgctcgcatccatattgcccttttgaaggtggtttattactttatttatctgttaccccgcgcgccgtgggctctcatatattcttttcagattcgtgtggagcgtttccgcataattttgtatccaccggtgcgtgtgtgtggctgtgcgggtttgcattttgctttcaaatctggtgtttgcattttgcttttcaaatcaggtgcatatcggcacaatgcctgggaggtctgactgattgcgtagaggaacaagttctgtgttgatgacttgatgtgtttgtgctatcatgaatcactataaacttcacagagacagaagcgtcatgttttggtcttctcttatggctagtgctagagcacatggttgcggttgttcacataggtttcaagaaaggtcccccttccccttaaaatgaaggatatgtgattgtctaactttttcctttttgacttggtaacgtaaattcccggctggcttcatttattttataccacgatgactccttgtagttatgagctttcttctgtatcaagctagggatagtatcgaaagatttgatttcaactaagcctttagtagtaactgtttatgtacttgaagccacctttcaacccgatcgtttttttagttactgcaagttccttgtgcatcattctgggagtaatatatgatagcatggtgatggttgtccactaactatattgtctgtctgtcaaaactgatcaattctgccaaggccttctgagtcttgtaaaccaaacccgcatgcattctcaagcatttctgtacagtgtatatgcgggccatcttgccttgtttgcatattagttaccaaatttttgcatcagttgctttatgatgtattgttgctttgcatacgcagggggcaaatttcacttaacttcatttttagcacaatttgtcttttttgctgacataattaccatctacatttttttatcttgcaccatgtcatgtttctttgagatgtttgctcatctttaataccaaatatgccagggaatacctccagttaacaaaaatctcaagg

SEQ ID NO: 111010 - DNA, 614 bp, Setaria italica
  Intron number 1 from transcript Si036790m (locus Si036787m .g) derived from phytozome v7.0 (chr-ID scaffold_9; pos 42 30657 to 4231270 reverse strand)
gatcgatccggacctgggttgattcatccgtcgtggtaaggaacccttatcgtgcttggatcgactgttctaagagtcagcttggtcctggtcttctctctttgattagagcaatagaatccaaatccttctctaatttctggaatggatactctaattattgcagttcgctgatttggggatttctttgctgcgcggtggattgctaaatcctgttttgttctctaaatttctttggaggttcagccccacgttaaatccgctccctttagggattcgattaggagaattgatccttttctgttcggattatgtgtgcgtggtagcgatttgattggtcactattacttctagatattggaactagagttctaactgttacgttatggagttaattatagttgcatttgttgtcaattggtcccgcttccaatacaagtctagcaaaatttgacatcttggtctggtgggtaaatttgtggccaagttagcatgtttatgtttgtgttgcttcagtctaacaaaagattcctttgttgatttctattgcactaaacatttgccgtgttgcttttgcaggtactagaattgaactgtccttgaggctgcagtta

SEQ ID NO: 111011 - DNA, 781 bp, Setaria italica
  Intron number 1 from transcript Si003843m (locus Si003843m .g) derived from phytozome v7.0 (chr-ID scaffold_5; pos 10 078642 to 10079422 reverse strand)
tggcaacgcccgatccggagaggacctacttgcatgtgagtgtgctggcttttagtcttttcttcttgttgctgatccatctaaaagctaaatggtgtcgcatagctaaatttccaaattcatgttttaggtgacccacccaaaaggtctgaaaattcaggacacatttcaatgaaccttgatagtaaaatccaggaaacagtacttggtgccattattcagaaattcagaaatcagaaacgtccagcatgaattgcattatgattattcattacctagttgattcctggtatatatatacctagctttcagaaattcaggaaccaaagcgtacagcatgaatttcattacatagttcattcctgattatgttatcagaatttcagaaatcttagatatgattggttcagtaatatgccatgtagccctactgatgcagctgttgtcccctatctcatcctagtgtagtttgaaataataaagattgtgctccaaacattctgtagtagagatatgtgtattttagaagttgtggtactgcctttctgatatgtgtttttttccccaggatcccttgttgccagagacaattgtgccaaccgaggagctgcgttttgacagtagagatgaagccaaggaattttacaaattctatgcgggcaaggcagggtttgatgtacgcataaccaagacaagtaggaagacggtactggagttgtcgtgcaacaaacaaggacactgggattactacaagcctggtgaggagagggtacgtgagaaa

SEQ ID NO: 111012 - DNA, 565 bp, Setaria italica
  Intron number 3 from transcript Si034223m (locus Si034223m .g) derived from phytozome v7.0 (chr-ID scaffold_9; pos 23 22020 to 2322584 reverse strand)
aggagacagctgcaactacaccaaacagcagcaatgtaagattaagatgccattcctctttactttgatcaattcatccttgatagtgcttttgtacaagggccttcaatcctgcacaaatatcaatcttgagataatagagccttttggtcctagagtgcacccttttcgatccacctatctctgttgcgccagttatgttaccgtgaagggaggagtaggattctttttttagggtttccactacattttcatctgtactgctgacgtttgttcatttcaaaatctgcttgtaacttttagtagcgtgatgtctattactactttcataaagttgacttccaagttacttttgatctactgactttttgttttcaccttgctggattgcatattgagttctgaagttattgaataatagctaatttgaattgattgatagatgaattatgtacttgctctctacagaacatattagatgtcttcttgtgtagcggtgttataacgtcctagttacttcccttctacaggtactacctttctctttgcacctttcttcagaaag

SEQ ID NO: 111013 - DNA, 632 bp, Setaria italica
  Intron number 2 from transcript Si004484m (locus Si004484m .g) derived from phytozome v7.0 (chr-ID scaffold_5; pos 29 103928 to 29104559 reverse strand)
gtaaaagtgtgaaagattccgatggcggcactcttcctagatgcctctactatcttgctgtgagtttttattactttttcttttctttgtcataactcatgcctgttgtttctttgatgtcgtttctcccttatacttatgtgattttttgatttgtgtttttattaatggttatcttttaagttttgttttggcaggtactttaccttgatcgtgtagattttggtgctaggcaagtctcagatgctattccttgaatttctgtatggaagagggagatgctgagggattatgctgactattatatgatatctcctgtctgttatggataccaccctttacttgatacttcacggacatgttattcaaagattttgtctccatgtccattgcttccttttttataatgtgtgatgccatttttaaatcctttgaacattgaaaattcttaaatgctctaccttttatatttaggatgtgcggtatctatataatcctgactctctaattctaggtgaataatttaaagataaactagaatcatcagtttctggatgcaagttacctgatgatttgaagaacaacatttgcactgtcattatgaagtattgttttttgcaaacttctgaagc

SEQ ID NO: 111014 - DNA, 697 bp, Setaria italica
  Intron number 2 from transcript Si035576m (locus Si035576m .g) derived from phytozome v7.0 (chr-ID scaffold_9; pos 14 695926 to 14696622 reverse strand)
gctcaagcttcgaggccagggacgtcgtcatcaaggtgttctatccagtgaaacctattctcgtctttcgagtttagcaatgcatttaaactcttggatcgtttctggcaaattggattaaattgggtgaagttttgtggttgatgataatgtcagtacaggcagttaaacttccatgtttctgcattttctctagtgttagaaattcagaatctcgaatttgtggtacacggttaccttgaggtttgcaagcagtaactggattcaatagagtattttgtttatacatatgagttatgatcaagtcaaacaatcaatcatctgatggcttgatgataagattggttacctaagatttgtgcagtttcatgctcttcctcttatggtcaagacaccctttgcaacatatctcacctagtttattctaaactattttatgttacttatggatgcttgtaaactgtagatggctatatgctttttaatgataactggcttatatatttgaagtaaaatcatttacattgacataatcattgcattaagatctttacttcatatccatgatatttttcttagtgtacatgactaaaaaatgtattattcacaccttttaaatatccaatactggacgaatttgactggtgctttacttacactaggcagaaatacaaacggagagacagagaatacttct

SEQ ID NO: 111015 - DNA, 611 bp, Setaria italica
  Intron number 1 from transcript Si002589m (locus Si002589m .g) derived from phytozome v7.0 (chr-ID scaffold_5; pos 30 705322 to 30705932)
gtggcgtgcccaaaggccaaagcaagtccccaatccccacaggagccacgggagcaagtctatcattactctaacccttcccgttagacatctttcatcatcctcaacggtgatgtccctgccacctactggacacgtatgtttgctacgaactggcggtccaactaattggagtagtaaacaattgaacccctctaaagcctcaagatccttctttaaaaaaaaaagcctcaagatccccaatcctaaatcatcatccttaactcaaaatctccaaattcattgcagtctcatcagcattaaaaaggtgggtgaacattggttggaagaaaaatatttcgtagtagagcagagtagccggacacggtatatagcaaataaaaaaatattttttccgttccaatttataagttattccagttttttttgaagagtttaaatgtcaggcgccgaaaagcagtgaggtcgccagtcagagggtcccactagtcagttggtcccactagtcagtttcctagatcagggccaaagggtcggcaagacggcaagcggacgtgggggaacggaactctccagtttcgccccgaacgataaaacgccgcaaggggggg

SEQ ID NO: 111016 - DNA, 942 bp, Setaria italica
  Intron number 3 from transcript Si000607m (locus Si000607m .g) derived from phytozome v7.0 (chr-ID scaffold_5; pos 35 396396 to 35397337)
ccgtcgtacgcgccatcttccattacaggcacgaggtgagtgacatcatcgtgtctctcctctgcaccttccccattttccatcgcaggatccaatcgactagaagttggctcctcctttgcttcctcccatgatttccccggttcttttgggcagttcttttttctttcttttttcgctttgggttcaaaattcaaatacgggtgttaattacttttatgcgaagtaatctaatcggctaaaattggcatgcgaccgcacgctgaaaggaaggcctaaccgtctggcaagacgtgtcgtccatggaagtttgctcagtaactgcttctcctaggtgtaagagccgaggaaaacaaaatcaacttccattgttcgtaaaaaaattatattttactcgtgcaaaatgattactgctcatcaaaactctattgtgcttagtaaaacagcatttttttccctttcacaaactaggggttttctcaaactgaaataatagactgtctgtctcaggaatcaggacaacactgtttcagaacaagacaagcatacctctatgatggacgagcatacagtatatttacttgtgactggatcttgtcctcataacaaaagacccaaatcattggtggctggatcccacaaggccacaacttatgatacggagtacattagtatagctgcgtgcactgggtagatgtcgacatatgatgcttgtttttctacaccctcttgtatcgttttctaccttgcacacttcggtgacattggccaacgccagataaagtgtgatgatccgtgtccatcgtgcgcatcagaatcacgagatgtttacagcttacgtgtagaacattcccatttcttttctgagaaacaaatgaaatgtttatctgtacgtctcttttcctgtgtgcagtggaagtggcagagtgcagttctcggcat

SEQ ID NO: 111017 - DNA, 581 bp, Setaria italica
  Intron number 2 from transcript Si001993m (locus Si001993m .g) derived from phytozome v7.0 (chr-ID scaffold_5; pos 28 365354 to 28365934 reverse strand)
tctacgagcacaacttcggccaccgcccctgccaggtgcgctccgctttgaccccaaaatcgtatgcggtttcgcaatcctgaaccagtgcgaaatattctgtgcttactgcaacggtatcgattaatggtggcttagagccgtagatttatcctaggcccaaggcagaaaattgcaattgtgatgatcagttgatcacttgaagattcagaaccttggttatgccgcctgatgtgcagataatgcgagtatgctttttagcttgtatgcttgaaagtgcgatcatgattttgctcatgtggatacatatcattagaaaagttatctatggctatggccaagttgagttcaatcaaggacgcctttctttaaagtttgcccatagatcgataaatttgtggtcatgtacatctgtcctcctcttcaagaagatataagcattctaatcaagcactgctgtttatgttttattttgacttgtgaatgaactggactatgctctgattgttttattaactaactacacgcatcattcttgaacaacaggggaacattcaaacgctcactgctagcgacctaga

SEQ ID NO: 111018 - DNA, 545 bp, Setaria italica
  Intron number 1 from transcript Si001455m (locus Si001455m .g) derived from phytozome v7.0 (chr-ID scaffold_5; pos 40 792327 to 40792871)
cagcccaccaatcacgctgcaggccggtaacagaaggtgacaacgactgacctatcgtctttctgcggtgcataactgcacccggggaacaggttggtggcgaacgggtggaaggaggaatcggatggtgagggtaagatgtgagggggtagtttgttttttttaattctcacttctttcatcataaaattaatattataatatctatagtgtcttatagcaaatatacgaacttgaagagtgcctacgagcaaaggtgaaattcagtagtgtccatcagcaaatatcaacattgatgaatgtaccgcaacaaaattacctaatttgaaaatatataaactcaaaggccgaaagcccaaaggcccatcgtgccagtcaagaagccctcaccgcgggcggcccagtatccacaaccaccatccaatccagtttccccacgtcgccacgtgaccaccagcacctctagaaacttcctcctcgcctccgcctccgccttccgcttcctcccaggcagccccaaacccacgaaaccctcctctcctcgc

SEQ ID NO: 111019 - DNA, 846 bp, Setaria italica
  Intron number 2 from transcript Si000618m (locus Si000616m .g) derived from phytozome v7.0 (chr-ID scaffold_5; pos 29 179161 to 29180006)
agttgttgaacctgaatagagccctgctttatttggtaccattcataatctttgatacctttacttacgtactcctaattaacaagattttagtcttgctgctgcaaattattagatgtattgtttcttaatcatgaattcttattatacatgaacctgaggtataggctaaatttccctctggacggttttccaagatccttgctattgactaagatatagctacaaactcgaattttacgtgttccagcggagatttattttctcctcatttgacatggcatatatgcatttgatctttgcaattttaaggtttcatgaaagtggtactgttagacttgcaatgttgttataaaaacacttaaattatattgttcaataatattttggcaatgtatgattacataaaaatagtagttagaccgttagacttagagttaagaatacaagctcatctagtatacagactgcaatgtccaaatgggcattgaaatatcaggggaggcagcatattcataggtttactagcatcagttttattctgaaggttctctatatgtaacaactctgtttgaagataagtgagcagtggatttgactgcttattgaacactaatagtcaggtatcgttctaggatctatcaatcagaaatccatgatttctaatttgactagattcttgctctgtttggatgctgatatcattttcctttgttatttatcccttgatgttaacttttagttggagatctcatatttccagtccttttgctgcatagtttgtaattgtgattgactgaatttttcttattgaccagcaggattattagagttcatttggcctga

SEQ ID NO: 111020 - DNA, 842 bp, Setaria italica
  Intron number 2 from transcript Si003222m (locus Si003222m .g) derived from phytozome v7.0 (chr-ID scaffold_5; pos 10 231831 to 10232672 reverse strand)
ggtgagcctctatatcaatccttcgcccttctttctgattttcgatttagtgatggagtaatttagacatctccgctcacgtcgttatgtaaagattttaggtttagatgtgctcggaatgggttcctcgtccacttgaatttagtctattaagtatgctgacatattatgatgtgcaagatgcaagaatccgccgtccttgtgtctgaatgttggatctgtgttggttattgctaaaccctaatgtctcctgtatgtgacatttggtgtttcttgtcggcacttatctcatgttaatagatataacacgctggagcacagcttcaaataagtgctgcaactatacactcaggtgatatttgctcttgttattaaatggctctcgtcttctggtgtaatcacagacagaggcacaatattttcatatccgatagccatgtccgcttgggttttggccaagaactatgttgggggattttggaatttgattctgaggattttatttcaatccaactatattctaagtagccactagagatgcagaaaacaaccataatcatcggtcacaaaaccctagtggtgtttctatgaaatacatgcttgcacttacatagaggacctaaccatgcgcacttcaatcgtctctgcttgcaccatagactgactgttcatgttgtacttggtgtattttgatttttttttcttgatatataaataaaccttagtccattgccatttgttacctgattatctgcactagagtactgtttcaggcaaagctaaccaagttgattgttctgtttccagccatagcgacagttgtgaccgtggcggagattctg

SEQ ID NO: 111021 - DNA, 603 bp, Setaria italica
  Intron number 1 from transcript Si002276m (locus Si001530m .g) derived from phytozome v7.0 (chr-ID scaffold_5; pos 41 763742 to 41764344 reverse strand)
cagccacctgcctcaagggtcagtggggtacccaggtaaacctccaacccccacctcctttcgtttctcctccactccacgtcccatttgttacagagcaccgacaccggtctggcctgaggaggcacatctacatctcatctaaactactactatttgttaacgcgcagctaacttgttgcaattgtttattccttacattacagtatatagttgctgcccctggacctagctgtaagcattcttcctaattcgactcagagggcttgaactattaaccctgcataacattaatcatactgttgcctatctaggtcatccagttcaatcagtatttcaagcaatgcagcacacaatttgacaaagtcctgattgaaaattttgttactgtaggtcacacaacttatatcaaatgttcagttattcatctcatcagagtagtatagcagaatctactagtatgatcctttctgttgttcatttagttcgtggtactacattccctgtctcttacactccacagaaaacaaaacaatgaccctcatgtcgatggttttccatcttataggtcaagatccaccagcttcttctaaagtcaagatt

SEQ ID NO: 111022 - DNA, 792 bp, Setaria italica; identical to SEQ ID NO: 110948
  Intron number 4 from transcript Si001493m (locus Si001493m .g) derived from phytozome v7.0 (chr-ID scaffold_5; pos 31 51639 to 3152430 reverse strand)

SEQ ID NO: 111023 - DNA, 745 bp, Setaria italica
  Intron number 2 from transcript Si034452m (locus Si034452m .g) derived from phytozome v7.0 (chr-ID scaffold_9; pos 10 50532 to 1051276 reverse strand)
gcgtcgtgttggatctccaggaagtccctgattccgtacgtgctttgatctggccatgagccaacatgtcttttcttcttctttttgaccgaaaactgtgaggcaaaagcctcccagcatgatatattaaataaagagtaaagatagagcacacctgtcattcgcaagttagcaagttaaaatattgatcatcaatctttctggattcaggacatcaatattctccacacacgttgagctgaaattcactttatttgactaatttaaattatatctatgtaaaataagtttttatcaatttaattgacatggcaatgcttttatagagtatatggacctggatgacacccgaagccaagtttagggtgctagatctacattctgatagtacagggacaaatgacacccaagcccagcctaagtttagggagccagatatgcattttgagagtacggggacctaagtgacatagccggacaagtttaaggactggctatgcactttacacttaaataaaacatgggaagttatttacaagaaataaactaactggaggggaatctgatattttcttcttgtagagatgtgctactgcattattctctgatgttttcttagttgtatacttgtatgggttatagttaacaaatccgaaaatgatgaaggatgtcccttcttttgtactttatcaatctacattgccttacttggttagcgtttgttaacaattctgctttcagatta

SEQ ID NO: 111024 - DNA, 658 bp, Setaria italica
  Intron number 2 from transcript Si004222m (locus Si004222m .g) derived from phytozome v7.0 (chr-ID scaffold_5; pos 39 694356 to 39695013)
ccggagtccggccaagaacaagaagggcaagcaaggtgaagcctttatgtgcccagcggatgaacaaatgcgattcttttgtttcttctatggtttctctccatttatttgatcatttgagttctcacgctgtagcaaaattcactgacattcttctctgtttcttctgaatttttttttgggtttgtgctcggctgcctcggcattcgtgtgatgtgcggatgtttcatgtctgatgatctgctgtgctcgcttccaacagtttatcttggtgagttggagatcctctcaaatccagaaaaagctcactgacttttccatgcaatgattctcaaattatttgcaactgcattgttctgcgaatgaactgcattgtgctgttcggattgatttcgattttcgaatctgcaactgctttctcccttcttttcaacaaaaagagagatcgagtgtggacggggaaaagtgcttttgggtaaagttgaaaggagtgcattgtgcttgtctccaagtatactcttcattcagaaacaaaacgtttgcacaaaacgatcagacacttgcatacaaatgcaagaacataggaatacatgagttaagatcctaatcttgtttctttgcaggagcttttgacagtgaggaggcagcagcccacacc

SEQ ID NO: 111025 - DNA, 878 bp, Setaria italica
  Intron number 3 from transcript Si001267m (locus Si001116m .g) derived from phytozome v7.0 (chr-ID scaffold_5; pos 32 338616 to 32339493 reverse strand)
caaggccggccaatcgaacagttataagaagagtttgtgacttcgtcccccctagttcctactaggcccttcttacaagcttgatggtgttttatagtgtattgtgtcttggagatcagtgtgtatttctctatatatttgattgatcactattctttcatcgataactaatgtagttttcgtggttgtagtaagtagctagataggcatcatttcagaattttagctgcatatcccccctttgaccattttttagttagatattcatgattataaaaattataattccataatatgtcatcgtagatttatttttttggggaagtaatcaaatcataatgttgataagacttagttgatgcctttacagtatactgaaagctggaaaaaatgaaatatcagaaattatatatgctaatttattgggttgctaaactatgactatgataaccgcctttggtagaattctttattctggtgagcgttctcatcacccatctctgacacccgggttgggggacttggggcaatgctgacatgttgctgcttgcagtcctaactactcgttcaagaatcattagccaatcattttttcagataacggtattattcagacagcgatatctgccctgtggttatgagacttaacatggaaaatgttttgtggtaggcatgagcttcgctagtaaacaacttgaatcttctgtccactgttggggacataagaacccacaacttccattcagaagattaaacattcagcttaagtttattcaacaatgcatggctttattcttaaaactgcagtaatatttttatttaaattggttgtaattcatcctgctccctttttgcaggaaaacctgcttctatacgct

SEQ ID NO: 111026 - DNA, 603 bp, Setaria italica
  Intron number 2 from transcript Si001245m (locus Si000606m .g) derived from phytozome v7.0 (chr-ID scaffold_5; pos 24 526896 to 24527498)
ctcgacaagttccactaccagctgcagctcctctggtcggtttcatgctctctgtcgcacaattcagtatttatttatcgtgttcccatagttactacccaattacttaaaaagggaaagatggttccgatgttctggttggggtcgtgccattggggataataaggagggctgacattctttgacagcttgatggggtaaccatttgtccccaaagaaaacatgaattggatagaagaatgttagttcttatgtggtccactgagttacagcttcatggtagcagcaggaaattccggcgaacagaaacaattttcttttgttaagacttataagactaggagtaatgctgcttgcctacagctgctgtaggcatttatctcatgaggaaagcatggtgggtttacttttcaggatgcactctgacactttgtcattgtggcaaatgatacctttcctgcatgagaagttcattggaacttggaacaggcgttcgcatcatgaataaaccacaaagttccttgccttgtttatttgattaattttgggatttcttatgtgtatgcagtgagttggatcacccagggttggcaaaactgatcg

SEQ ID NO: 111027 - DNA, 884 bp, Setaria italica
  Intron number 1 from transcript Si039925m (locus Si039925m .g) derived from phytozome v7.0 (chr-ID scaffold_9; pos 11 772920 to 11773803 reverse strand)
cccccgtatcgccgccggcgccaacaccacctcaggtaaaatcctcctccgccagaaacgcaactgactggcgccagtcagtatcagcaaatatgagcagtcagtcagcaaacttgttgggttgcgtagttcggtgatgctaagaattgggggcactagtactttagttgatctttatagtgcaaaatgcatatcccaggcctataaaaaattactagtagccagcaagtgtgtgctgaactcatcttgatggagtggtatgtggaataataagtttgtgcaaatctgaagtcagaatgctgctggtcgtgcgcctcacacatgtttatttcttattctatctcgatgctttcttgatcaatttgtaactcctattccaaaccaattcgttaatgtgtacttgattagcaattatggaaatggggtgcatgtaaagctccgaattaggattttttttctttttctctgtttggctatcagttcggttgcagattatctccatatttgacttaagaaatgttttcatagcctcccgcttgaaagtggtattggcaattctggatgggtgcttttgacctgacaacttggcatctgcttgtgactttccagttcctaaacaataagtctaggaatgaacctgttttgaatgtctcgaggacattatcaaagataaattctctgacacaacagtttcctaattgaaactaggcaatgaacatgtggatgccaatcctagggactgaagtagcatttccgtaaaagtcaaaccccaataactttcctgtgcgctataactactttatgggtggaatgaatttcctgtttcattgatttgattctttctttcagcgcgtggtattgatagtagcataatcaccattcag

SEQ ID NO: 111028 - DNA, 846 bp, Setaria italica
  Intron number 2 from transcript Si002062m (locus Si002062m .g) derived from phytozome v7.0 (chr-ID scaffold_5; pos 11 198119 to 11198964)
tctgcaaaggtgccaaggtactgtttcacatacttaagggcccaccattaatgagtacacagactttttaagttacatttttttctgtcattggacgtaattctctgtcattcatgatttgtttcagtcttgagcccgctcttgtttgattgaaacaagatattaaaatgtacttagcgcatgcttcttattgctttgttctaatagaaaggagtaaaaaaacaagttttggtttcaaaagcatgcattaaactggcatgctcatgcctgtccacaaggttatattatctgaagattcatatatagatatattaagcttcatgattgattgtcaatttttgtttgccaatttgactttaagattaacagtttgcagattttttttaagtcgtgtacttttctatttctgcaataacagcccagatataaatgagagcagctgtcaaatggtttccatgatacctatatatctgctgctctttagttgtacctatctctataagaaatacaatgtgaattcaactcagtttgagtggattggatactgaatagtgataacatttccattattttttaccctgttcacaaacttgccactagtatctttattactccccccccccccctccaaaattataggtcgttttggcttttttaggtgcatagtttttgctatgcgcctagatatagtatatgtctagatgcataataatatctatgaacctagaaaagccaaaacgacctacaatttgaaacggagggagtatattgtactgcatcatggactcattgtgcctactgatttaaggttaatatttcaggcgcctagaaattacgtctagtggc

SEQ ID NO: 111029 - DNA, 892 bp, Setaria italica
  Intron number 2 from transcript Si039225m (locus Si039225m .g) derived from phytozome v7.0 (chr-ID scaffold_9; pos 31 890268 to 31891159)
atttgcacagactttaccatcgacaacacctcgacgtgaatctcaataccatatgatacttgtaagtccacatgtaccgcatacacgagttttaaatatatacgtatattttttatatgtcaagtacctgagtgactacctattctacaggatgcaatggatgaaggaagaattgatgaacagcaggttcaaggtagcgtaccttgacccagcacgaattagcgagccaaagaacaagttcaaaatgatggaaatggtcaaagaacaaatggaatcagcatagacacaagcagagaaaaatgctataaaagcaaaagcccacagagatgaaatgcacaaagtgttcgtatacattgcaagagtaataaggaaaaaggctcacaaggattatatcatgggggcttacaattttcagtaagctagctagttttaattactatatatatacttggtactatttaatgccgtctataatataaattattctaatataatgcagataccactagatttgcatcattattttacccaagcatggagaagcggtggtcctggactcagctagatttagcaaagatagttacaagaaaatcataggcattatacaaaagtaagacattccttggcagtatttaaatgcatgttgagattctatacacctaagttgtattactaactcttgtctttatatcctcaaagtgtgtacaagctttacataataaaaggtggggagtgccctgaaaacaagaagaaagctatgaaaataatatatcatagattcgtaagaacgtaaaaacttgtttttttcatataatgtagacttttcattaataataattcatcatttttctatttgattgcagtgccacaggcaacctcccggctctgtgct

SEQ ID NO: 111030 - DNA, 626 bp, Setaria italica
  Intron number 2 from transcript Si000886m (locus Si000886m .g) derived from phytozome v7.0 (chr-ID scaffold_5; pos 46 845135 to 46845760 reverse strand)
aggagagagcagaaccgttcccggcacaaccacaggtgctttaggctttgctgctctaagacatcttttttttcctctaccgcctctgtctttgtattgcattgcttgacttgtatgttcaaaattccttgccatcagtatgatgcattgctgctgagatgttcagcaggttttcctttttgctttcttgtggtttatttaaaaggattttgattcagttcagctatgaattattccaatatttggatgcttgccagatatacaaaagatgtaatgagacgtccttgattaatggtgtgttgtgcagttactgctggaagttaatcagtattagttatccaatgccgagtacgctatctcaagaataaatgctatgtttcactgttcttgcttagcatcagcccttggtcattacataactagcacaggcattcacaatcaatcgagttcagtggttactagaaaaaaaagactcgttaaacgtattctccgctcctcagacattgatttatatcccagttaatgatgccagtagtacaatttttatttctttgcatcacataggaaagctgatttacatccgaatcccccttttgcagaaaggattgcatatactggacacttga

SEQ ID NO: 111031 - DNA, 387 bp, Setaria italica
  Intron number 5 from transcript Si039750m (locus Si039750m .g) derived from phytozome v7.0 (chr-ID scaffold_9; pos 18 553377 to 18553763 reverse strand)
ttgaggactatctgacaggttagtgtctctgtcagtctgtgcgttacttttcttcccttcactttttttttcttactctgtaaatagatgcttagtcttgcgatctatggatgttaagttttgagtgtttgcacaagaactggacatggattgaaagttaaactttgtgctaatcctggtgcatatatgcatgtttacatgttgccagcattgccatctgttaattattgcttgaaacatgagaaccgttgcagtactgtcaaacaactctgaactcattctgtttgtatttttgtagatttatggaacttatgtcttgtaaaatgttctgtgcaaattatgctgtgcacttacatgagacttgcttgtttttcaggattgtgcttc

SEQ ID NO: 111032 - DNA, 966 bp, Setaria italica
  Intron number 2 from transcript Si033961m (locus Si033961m .g) derived from phytozome v7.0 (chr-ID scaffold_9; pos 15 719074 to 15720039)
tgaggcggcttcatcaaataaccacacagaaagtttgtgaactctccaacttccctacatgttttattcagcttttaaagcatatgtttttgtttcttttgtgggagggagggagagaaaaaccttaatattgggcttgatagctgtgagcctacaggctacagcagtatggataaatttgtatgtaaaacacattgtgtacaaaaagtgttatttttagggtgcaatatatggcataaatccccgtgtgaaccgggcatctttaacaacccacagccattcaactcccatgcatagatgcattaccaacacccatgcaatgccaagttggtagtatccagcgaggcagtgcgtcaacactcctaatctccaattcgccatccccttctttgttctcgcagagttgtagttgcaagcacaagttgccgaatgcctacgcggccacacggacatgactaatgaatctcctagttctgcccttcttaattcttccccaaccagagtaggctgcttgccttgctatctttgcctctctcattgccgcattcattggcagctatgctatcacgccttaagccaggtgccgctgtccacaaccacaactcctcaaggcaccagtgtgactccacagcgaaaactcctttcagtctaaatccactgtgtttccttgccgaggtgccaataatatgacaccatgctgagctgacaaggcatggtcgatgcctcggtgtcctgatgagagcttcttttgaaacatgatctgccaggattctattccatcaggtttactctttcaatttgattttctatagtcattgtccgttttatgcaccactcgctccctgatttctcttacgtaaatctattgaataaatgatagtgcctttcatcttctgatgtctggattctatatatttttgatgtgctacagttgacatttctgggaagacactatccagagaatca

SEQ ID NO: 111033 - DNA, 771 bp, Setaria italica
  Intron number 1 from transcript Si003426m (locus Si003426m .g) derived from phytozome v7.0 (chr-ID scaffold_5; pos 11 186840 to 11187610 reverse strand)
gtcagttcgtagtgttatcccggtgagttgaatatgttcgattaaattactgacccatgttatccgaggaactattgcaacggtcatcattcgggcttaaagcttgcagactagcaattgcggatgcaaacttgcagtctgaatgcagtataggctagagaagcgtgtcttgtttcctcttgtccacgaagtttggggtacagacgaaattaaacccactgtcattgtgaagagtagcataggagccatgcagttccttcctctattgtattggcacttgattttttttttgttttgttggtagaattcaactctcgagttcagtcatgtgttccatggtctgcactagctctaagcccataactaattacagtatgcttgaatgtgttctgacatacttttcttttcagaatagggaaatcacatgttatatgaggaataatcccttgctttgaattctgtaatgacaataggcaacagtgctatgctatgatatcctactatttaacttttgtgtactggtgtttggagatttagacggagcacttgctgatgcaggactaatttctattattttctatccatcaccaatgagtttatgaaactctccatgcatttatgagtttatgaatctctgcatgcatttattcctatgatcctatctgtctacacaaagagcacaaattttcatgcctttgttcctaaccaatttactcatacttttatttgaatagaaatcttatacatattcttgctcttcagtgcagtatc

SEQ ID NO: 111034 - DNA, 832 bp, Setaria italica
  Intron number 2 from transcript Si035146m (locus Si034439m .g) derived from phytozome v7.0 (chr-ID scaffold_9; pos 44 144351 to 44145182)
tccgtgggatctcctggcatcaggattgctgtcaggtgagccccgtgcctgtgcccttctgtgttacccgcgcgccttgcgcgatttgtttggtgcccggtattttagtagtggcgtagggtcaggttttggatatatctttatagtttatttggtttttgctccttatgcgtttccctcatggaaccctgcgatctaaggagatgtaaatgtgccctgcatagtgaaaatattttgctttcatatgctagtgttcgctggagcttagtgctccaaaattggtaatgttgctctgttattttctggctgaaagttgcatactgttatcatttatcatatattgtcatttgtgccatctattttgttcagttttattggaaggcaagaacattgttggtgttatagatgaatagttatctttcatcaagacacattgtctagtttttgcttttgctgactttactcctgaattatgctcagctgtaaaattgatagaatgtaagcgagagttctatagtgcacttagtgttcaatattccaggagctgtagttgttgaagtatttgaatccgctgttccttttctctgattaaattattctttagtgacataccattataattttcagctaaaaatctttaggttatttatttattaattaatctagctatttactggactccataggcaaattcatgatttatgctatttatttatttatttttgtcaacggaaaaatattgtactttaccagggaatgatgtaattataatattagtgagatctgataatgttgagtctgattttattgtttcttctgttgtgcagtcatc

SEQ ID NO: 111035 - DNA, 828 bp, Setaria italica
  Intron number 2 from transcript Si004004m (locus Si004004m .g) derived from phytozome v7.0 (chr-ID scaffold_5; pos 16 856564 to 16857391)
acaggggggccttcgacgattacgtcacattcaccgtacgtacgtggcacagtttctttagattactattattacctgcctcctcatcttcgatcaattttactcttcggaaaaaatcgtaacttttggccgtcctttcagattgcatctcttatgtttgtgatatagaaattgtgcacggtttgttggtttctctgtaactgcttgagtttagatcggaagttgttttggcctgatgagcctttaatttggggatgtatatatatagtgctggaagtcaagatccatcttttataatcctggatttttgggatggtttcttgtagatgcttaataaattaatggtccaagcctgattaagttcagagatcgtgcatgatgagcgagcagtgataatttatatagtatcatgtacttatccatctcaaattataagtcattccaagaattttggagagtcaaaatatcttaagtttgatcaaatttatatgacaatataataatatttatgatgtcatctaagtatcattagattcttcatcaattatattttcatagtatacctatttgatgtcataaatttttataattttctctataattttggtcaaacttgagatgctttgactctccaagattcttggaatgacttataatttgggatggagtatagttgttgattgttattatataaagtttgttcaatgagctagagtgctcgttgtgaaatcattcttttggtgttgattaactttgttttgtgattgcgtaggtgttgccctccttgagggagaagcacggtgagttcctgctgagggaactcgtgct

SEQ ID NO: 111036 - DNA, 1028 bp, Setaria italica
  Intron number 2 from transcript Si003234m (locus Si003210m .g) derived from phytozome v7.0 (chr-ID scaffold_5; pos 44 670211 to 44671238 reverse strand)
ccggcgacgtcaccgagcttcagatcggcgtcaaggtgcgtactctgtaaccgggacaatcctctccaactgtttaattgcttgatattcttgcggggttccggcggatctgcgattagtcggttcggggatttagcaaagtgatgtggtcttttagcaagtctgcggacccggatgtggtgggcgtgagcaaatgtgaaagcagctgccgagttcagaaagggcgtttcggtttgcgtagattattacatgatgttaggatagggagctacaccgatctgcaactgcaaattcgagtcctttttccccctttaacacttagtcgtgaagtcatggaatgcacttacttgacttttattatatggcattcaaagatgatccctgaaatttattgtggtactgcttgttgttcgttgctccataattcttatagtcggtggacaaactagaaggggtcgaaaagttcatctaaacaactactcaactaaccagtattgaagagggtatccctcttgctacccctaaaaaaaagcttttattgggcggctagcaccttcaatcaagattctggaccatggtgagcgatgactcataccctcactgtttcaatgaagccacattgggaccttgataaccatgggatgctgttgaagttctctgtatggggccttatcatatgctccaatggaaaggatatgtatcctctgttctggattttggttaccacttcaaaaagcaaaaactaagactcattggatcgtgataataagaaatggaatattggggtacaaactgatgtatacattagggagtgtggtagtggagaattgcatgtcatcgggttctgctttcagcaatctatttattcttttgcaaagtgttgtcgcatatcacattataaatgagaataccaccatacataggctatgttctttttctgctgttacatttcaaaaggagctatcctttcaaccctgagtaatatttttcttcttttgctcatccccctttcagtacaggccagaggc

SEQ ID NO: 111037 - DNA, 1019 bp, Setaria italica
  Intron number 1 from transcript Si035079m (locus Si035079m .g) derived from phytozome v7.0 (chr-ID scaffold_9; pos 36 130969 to 36131987 reverse strand)
gtccgtctcgacgctgcgtcgggctgcttctgcaggtattacgcctctcttctcttcaggtgttatgtttttgtagcatttgattacgaaatcgttttccccgagcggccgagctgagtctaatttcctctcgagaataataaaattatgtttttttcgaaaggtaatatgttaattgctagtctgttcttagaaaaactcagactacgagttgacttagctgtaggatgccatcatactggtagttcagttataataaccacactttctttacagtagttcggccctgtttgtttgcaatagattatataatcttgtcgtccaaggacaatatggtaaaagactaccttgcaccaccaaaataatatgaagtaagctgcccgggagtagcatgggcattattaggcatgggcctgtcaactgtcatggaatgtcgcacccgaaccacatagctcattcattcacagcctgtcactaaattaatttcctccatttctatttgtttgcaaaggatctattcataattcataggatccttctcagtagctcaacaatagtggtagtaattggaatatggggcagggactgcaatttgtgataattctgggtgttagctcttatttttgtgatgataattacttctaaggaacttgcttagttttgatagataggggatgttgcgatttatcttaccaagatatgaatgttgaacagttttcaactgagtttattcattgacttttgaggtactttctagtgtaaggctttaagcctatacatttttttttctttataccttttgtctgctgcctttagtaaatctgatggtttcagtttactaattggagtagatgtagataggagatgggtacaaatgatgaacaattagacacgttgttttgaagtgtatttttagtaggctagccatgcttaggcgagaccatctttttgtacagtaccattaaaaaattcagtgttcatatcctcctaaagttcaacatctcaattttttgcaggta

SEQ ID NO: 111038 - DNA, 1061 bp, Setaria italica
  Intron number 1 from transcript Si033897m (locus Si033897m .g) derived from phytozome v7.0 (chr-ID scaffold_9; pos 16 763298 to 16764358 reverse strand)
gcggcgccgcgagggtgccaccccctgcgcagctggtaagcttactgagggtctcagcgatgttcccctccttgccagaaagaggagctggatttttaaggttgtaatagatgccatcgtgatgttttggtgtatggtcctttctcctttgtggagtaccactccatcgtcacttgtttgtcgtccatatattcagttctgtctgaaacaactgccgtttagcttttgtaactatggtaaactggtcctgatcaatctgttgtaatgttactttgatacgggaatttagatgaatggaaaacttccttgcacctaagctgagaagtgctaatactggacgtcatttgtgattttttttcacaatattttggttgaggcctaatcaggagaaagttttagtatgttgggcctatgccctgtgctataccgcctttcacacttcctgttagcatctctttcatgttttacacttcctgacttgcacctagttaatctaacttgtgcatcttgcagatgaactacgaaatgtagtctgaactattgatagcattgtttctatattgtaaaataaagaatacccgtattttacccaataatggaactaaaataaacattatgcttgtctatagcaactgtttgccaagttattttcagggaagtagaagatttaaaatttgatcagggaaaagatacacatatgaagtaccatcttttaatttagctgcacagtactattcaaatccgccaaacacctgtaagagttgctgtccatattccatatgtaaggatcttggctttgccttctgtatggtgcatgttagtctttgatcttacgcaattaaaatgaaattgagataggttcctgagtttgccagttacagatgatacaaaataagcagatatatttcttcattagatgtttccccctgtccttttgtatcatgcaatctccatatacatgcatgcaccttctggaataaacttgggctagccttggctcatacctgatttactattccacaatttgcaggttctttaataatctgacgcttacctgtaat

SEQ ID NO: 111039 - DNA, 811 bp, Setaria italica
  Intron number 1 from transcript Si038374m (locus Si038323m .g) derived from phytozome v7.0 (chr-ID scaffold_9; pos 57 722696 to 57723506 reverse strand)
ttatcgggtggcttttcattggaggcagtggtgaggtcgttgaactcctcagtccccttcccctttcctctatgtcacagctcgatctttcattgttctgcatacacgtgtgtggttcaatggagaattcgattggtcagaagtcagaaccatactctatatagtcgatttgagttgctccctgagattctgcatcatgggtcggtgccggagcttgtattgtgaatttgtgatccagattattggattcttgtttctgtaacctgtaagtatcaattgagctggacagaatatttggtttgagtttctatttttctaagtctgaactaattgatgaaaaccagatgttctacgatgcttctagtgttataatacaacctagatgttagcttatgttttcttagacatgtatacactctcgctagtccaattgcaatcctccaatgaaatctcccagtaatgtaaaaatctcccagtaattacactctcagatttagtacattgacaaggttatatgcagttttgagctctttcgtaaaattggagattattcctgaactttgcactgctcatttttcttcaaaaacttcagcagaggcgagcttaattgcctagtaaagccagcctgtctgcctgtgtttataattttatatccataagaatgctactgatttcccagagctatatgtcatgccagtgtattatcagtttgtctttatctttgctccaaatcaatgccatcactgttgtttctcgaatactggaaatactcattggtgcagagataaattttattttattttgaatcagg

SEQ ID NO: 111040 - DNA, 788 bp, Setaria italica
  Intron number 1 from transcript Si004960m (locus Si004960m .g) derived from phytozome v7.0 (chr-ID scaffold_5; pos 41 259068 to 41259855)
tcgggcggcagcgtagcttcgcggatatcctgcaggtctgatcttatttgggttgcaaaatctgcttcattttgtttatgttgaatcctatcttgagtgaagttgaatttaattcgaaagaatagttagacttaatggcttctaccttgtgcattattctggtagctacactttgctattagttgttaatttagtgatattatacatgtgaagttcaattttgaatgtggtgttttaaattattttctagatggtttgggctgctgttcattaggttctggtacatgttactctcattaggttatggagtagcatggggatttcggtacttttggtcctaactggagtcgtaattacatggtgtcttcaattcctcagttcaagctcatgcatcggggatgacagtgaatcagattcacttaaagtcagtgttagtggtacaactgttatagtgacacgcctgtaggtcttgtgaatgccatggttttagcaccatcttgagatattgtttgtctttttgtagaatttgctaacaagttttcttataaagttttagacaggagaaagcaaacctttgatgcttgcacccgtgtgcatgcttccggataatatttgctattagacaactactttcaaaattttctgtacattcgtaccatgtctaacttatatatttatgctttcatctacccatgcctttctacaccttttattggacagacatcatatttagtttcatgtgggttgtttcaggacaatattgggcgcagaacacctacttcagagca

SEQ ID NO: 111041 - DNA, 822 bp, Setaria italica
  Intron number 2 from transcript Si003776m (locus Si003776m .g) derived from phytozome v7.0 (chr-ID scaffold_5; pos 43 22335 to 4323156 reverse strand)
ttgtggtaggtgtgcatccgtttattttggacaccttatgttttattactgcaattgcaatgtgctaccttttgatagtaaaattgaccttgcatggtcgtacttgtgagattattaatatagagttctagagttttatacccatcttattgagatattgcttatgcatcaattcgcaggtagtctactagaaattgaatgatgtggatgagaatttggggttagggaattttgggttgtgaattacctgtggcttggggaacactagggggctcgtcggctagcgcggtggagtgaggagagatggtgggggagaggagatagtgaggccactgtcggagacgggcaatggggaatccccggctatggatgaggtaggggcatatagccctagtgggttagggtcggtggaggcgggagtagcgggggagctcaggtatcaagtgtggtgtcgaagagttagatgtggagacaacggatggtggaaaaagaaaataaaggaataaggagggaggggcaacggatttgagtcattggttcaaaatccaacagctgggaacggggatcgatggatatataacacaaaaatcacacctcactgaaacatactcattgttatatattattttttaaaagatgttgtataaagcttcatttttcttgcatcaagttttaatatttttacattatttctgcatacgaagaatagatttatctcgtacaagcaagcgtgcgatgaaatcgattgttcaaatgacgcgccaaacttctttatgcgtgcgtgcagcttggagcattggtactacagaatacttatagtgc

SEQ ID NO: 111042 - DNA, 786 bp, Setaria italica
  Intron number 2 from transcript Si035150m (locus Si035150m .g) derived from phytozome v7.0 (chr-ID scaffold_9; pos 44 81215 to 4482000 reverse strand)
agcaaactgttccccgtgtcctacgaatcttgaaggtttgctcttgttaaaagtttcattctattatttaaccctacttctgagtaaaattggaataatttctagatttagtttcattattcagtgtcaaagcattgccccggaagttagagttcaaagtggcattattcacttttgtcagtctaaaggccacttatattttactgcctccagtaaaatacttttttcgatcttcaaattaagtaaacttcctttatcgaaaaaatattttactgccagcatgatcatgatcaactgttagtaataaactaacaatccttagatataaaaagaggccattattcagtgcaactgaatggtgcctgcatgtccggttcatgctgttacatcaaagggatattgtctgctatacccataatactacaatatgccacttaattaatggaagctgacaaagatcgcatcgtcctatatatttcgcacataccagttggtgggggttgggacaaatttcaagctaggcaggctgtcatgcattatgtgatcgctttatggaccaaatggcacagaaagataattgcaccaatcaggcccatgactgcatggaccctgtccataccatgctagcatggtgccttaaattaggatcgaccaatctggagtcttcagaaatcagaacaaatgctccttttcatctacttatgttttattgttcccttagtaatttattttttttctttttgttatgcaggttgcagagttgttaggtttccaagcgtgcgtcgt

SEQ ID NO: 111043 - DNA, 518 bp, Setaria italica
  Intron number 2 from transcript Si002569m (locus Si002569m .g) derived from phytozome v7.0 (chr-ID scaffold_5; pos 40 886217 to 40886734)
tgctcaagatcaaaacagaaatctaatccatttatgtatgcacagctcctgtttcacgttctccgaattaatttcatggtttggtctcaatttttctttctgcatttacctacgttgatatgtgttgttatgatcaattttgaagtgagtttgttgtgagtacagcttacagtgccttacattgaaccattacatagtcaaacaaaattattagatttgtagggcagagatccagtagatttgtataatcagaggctgcagagtgtgtgcatatagaccttaatttttgctgcgtgtaacaaaagccctttcaagggacaaagaatggaatgcaatcttattcagaagtacaaatggtcttctgataatatatgttagttctgaaatggtgtttccatatcgaatcatagccacaacaatactcgaaatgtttcccattttctttacatgcttttggttttctggtatgttgtttgatactctacatttggtacagacactactggaggctaaagaac

SEQ ID NO: 111044 - DNA, 738 bp, Setaria italica
  Intron number 2 from transcript Si000382m (locus Si000348m .g) derived from phytozome v7.0 (chr-ID scaffold_5; pos 41 406127 to 41406864)
cattcgtcaaggacgtcaagcgcatcatcatcaaggtgaatggtctatacatcctctgttgtttctctattttttttaatcgtctcgtcttgtgcggatgcggacgatgctgttctgttcgactgctcttgtcccggggactagtgattttgctcgctggaatgcgagggttgagaattcgatctcaatctgatctcacattgttttgcgacgtgtttgcaacagtattttttttaaaatattttggggaaaaaatcggtgatgttttcttttcatccccaactcaaagggttgttcgcttggggatctgcgaccccgtaaatatttgttgggaagggaggacgttttaatgtttctcaggtgctattatttcagtcagtgtttcgcgtgttccctgttttggcggagctgattgacctgcgatcggtgaaacttggatggggaaaaacaagtccagctgtttttttaaaaaacaagaacaactccagatagttcagattcttttttcgagtagcaggacagtcattaggataggatgtgtactcagttgcagttgaagattcacatgctagatatttttggatccctcactaaacaaagatgaggattaaaaataagccgcagatttctgtttcaaacaaaagaaattgcgagttttgtcgtcacgttacccggtttcatttatttattatatgtcctgttgcttgcaggtgggcacagctgttgtcactgggcaga

SEQ ID NO: 111045 - DNA, 485 bp, Setaria italica
  Intron number 4 from transcript Si003032m (locus Si002977m .g) derived from phytozome v7.0 (chr-ID scaffold_5; pos 84 47303 to 8447787 reverse strand)
gaggcgccgacttctcgctggcgaatttaacaaaggtacagtgttcaggaagcctgcgtgttcgaggggaaaaaaaaacagtgttcagcaagcagcacatttttcggttccatttcatcaggcaggcctgtgtacgcggctgaattctgttgaaaaatgctggaaatgcttgacacgaaaaattttcagtgatcattacgtcagaaaaaattgtttctcctcaaaaagaaattattcccctaaacaacgtcagacatttgttcaggctcctctctttgttcattcttttcagcaaacaaactccctgttcttttcttctgattgaactatcagttcgtagatatcagcttggcccgacattgcaatagtcagacactggtttcagaaacgacaacaattttattgttcagcttacaggaattgatttttgcagcaatctcatgatttggttttgtctcgttccattttgcaggtcaatttaacaa

SEQ ID NO: 111046 - DNA, 638 bp, Setaria italica
  Intron number 1 from transcript Si001001m (locus Si001001m .g) derived from phytozome v7.0 (chr-ID scaffold_5; pos 29 699002 to 29699639 reverse strand)
ctccacaaggtcgttaaggagaacggtaatttctgtcttctcagctcagatcattcccccgcatctagaattgactccttttgtttcaacctcttttatgttaaaaccaaaatattgaggtgaaatcattagctgcaatttttttttccttttggagcccattcgttgtgattattcttgatattgatgatactgagctcccaataaagacatggggtacacatatacaggagttgaagcagtagtacagtagtacttgaagatgtcttgtaggagattagctttattgtacggccaaatgatagcataattattgcccctgatagaacgcaatatgttaggaaagaagacaggcgaatagtatgtactatgtactagtgggacatttatgtgctggtaactgacaggaccaagtatcaaatcagatcatgtattatttgattaaaactgtcagaatgattgatttagatatcctgtgacagttggtttattttccccgttctgaatcatgtttgtggcagccaaatcctcacaaaaatgatttgggcgttatccgcaagtcttcctacagtcctacttatggtgttcaaaactcaaatgcagggactgtgtcattcacttggtttggcccaaccccg

SEQ ID NO: 111047 - DNA, 876 bp, Setaria italica
  Intron number 1 from transcript Si002374m (locus Si002374m .g) derived from phytozome v7.0 (chr-ID scaffold_5; pos 43 685526 to 43686401)
cgccgcttcgacagccaccgcaggcaaccgaggtaagatcccgaacccttccgctccgtttgtgcttttccagtctaccgcggcgtctgcgcctatgcatctatcttttggtttggtggatttgttcaccaccgaggctccggcatgggaatcccttaggtcgcagccgaggtaggcgagcgcggcggcaaggggagccttgtggcggccgttgagttcgtgctgttgttcttgtttagctgatatcgcgtgttaggcagaagtagaagacgttgaactggatgtggcatgcttaatacttccgctcttatagacccgcaaactggagtttttacatctcagatggacttttgtttagcgggaaggacgggaatggacttgatgtgcccaaattattttgggggaatgggtcggtagtcgcttggatttgtcattagtgcttatgcgatgaatgttatttgtggtttcatgtaaacgtgggtgaatctgttatggcaatttttattcttcttagcctgttcatctaagttatttgagtctaaaatctcgttcagcgttcggtcattgcattatttgttgggtctttagatctacacttgtgcgcatatctgtaatatacgtgcagtagcaaactgttgattgtcagtgccacgagaacgatcttcaagtgctgttactgtttaattggcaattcaatcgagtgcccttttcatcacttatgcaatgatgaataatgcatcagcttcttagcttgcgtgtttgattcactggtatacatatgaatgcttgttagttctcaaagttccaagtgtgcatgtattcacttgcactttgcattgtaattgcagggtggttttgtcaagacccagaagacca

SEQ ID NO: 111048 - DNA, 725 bp, Setaria italica
  Intron number 1 from transcript Si033841m (locus Si033841m .g) derived from phytozome v7.0 (chr-ID scaffold_9; pos 22 239892 to 22240616)
tcacttccgccgctccgcctgagaggctccacctggtatgcttttgctcccccaccccgctctggactctgctgcaagattggatctttggttccctttttccgtgccgtgattattgcccgtttatggcctttcttgatccatgttttgcacctggatgcttcaaagatccatctttttgggtgcttcgtgatttgcatttgctgggaattggattggcggaatggttggtgttgacgggtgggtctggttggtggggtgagacaaagaacagccagccggcgtggatcatgtgattcatatcccttctctgttttttttttattttctgcttgttgaatggcgcctcggtcgtgaggtttgcttccgaaacttgctcctctgatcctttcttgggtgctgctgtcctgctgcagcatcgcggttcgaggttgttgctccgtgcggaaatttcggctttggggatttgtgttttcagtcctgttgcttttctcttcccaaaatctttgacgggattgctttctggttccacctattatcattcagtctgtgaagattttgattgttgtttacattaaatcagacaagacggaagcgtttcacctttgcagcttgctatgcctatgcatgcacgggttcgttctccatccaatactgactactgtgttgttttctcctccttgatttcaggttactgcagtacgaattatccatatatcttcctg

SEQ ID NO: 111049 - DNA, 624 bp, Setaria italica
  Intron number 3 from transcript Si033841m (locus Si033841m .g) derived from phytozome v7.0 (chr-ID scaffold_9; pos 22 241038 to 22241661)
gctccaggaaaatctcagtggtgagtttttctgtcttcagctcatcttttaccaaagagcaattttcctaatttactagaaaggctaaggcaaagataacagcctgccaagctcatgactatgcactgtttgtgccctacctatcacttattattcagcctgggactacatttctaaatttcattgctcatgctgtgagtcattacatgtgtagctttccagcccattgggctgttttctcaatgccagtgtttgataaaaatttgcacatatggtacttgaatttggaaaagcatgcaatattttcacaatctgattatgtgtcaaaactcaaaagttcccctttcatgtgaaaactgaatgaattttggatgtgaagtgcattttctatatggaaagaagatatcatatgaaaggatgacaaaataatcttatcatggggcgaccctgaatctgatttctatagtcctgtttttccatgggttgaaatgcttggatggcataggtgttttttactttgtcatgtagcagtaggagtaaccaacattgttctatatatatgtaccatttcataactatcagtgtggtcaacgaactaattgggtcttgttttgtgcaacagac

SEQ ID NO: 111050 - DNA, 1015 bp, Setaria italica
  Intron number 1 from transcript Si001874m (locus Si001874m .g) derived from phytozome v7.0 (chr-ID scaffold_5; pos 45 481534 to 45482548 reverse strand)
ctgcgctcggtggtgcccaagatcagcaaggtgatccaccgtggcctctccatattcgtctcttgtatctatcgcttcccatctgtgctgcatgttttagtttatccttacactgatgtttgtgataatggtggtgttctagcattatggtaggattttattacgatcatgtcactttactatgtgtgaattttggcgatgaattcttgaattgtctatgtttagatccaaaagctactctctttggtagatctatggcacgcctagtagctatatgtgcctatgttcattgctttagctagcagcggatagcgccttcatacgttgaaagcggtcttctttctttcatggtaaatcatatacagaagtatatatgtatgcttttgattactccttatgttagactgtaaatttttatcatgtaattttgagcaccaaatggaattactgttacttttcatttccttgatgattggtttactgtccacccatggtaatttcagttacgtacttgaaatgttttcccgtattgtttaattcttacttattggggccttcagttctgagacatgcccagattcattgatgcaaggttaacacagtcccatgcacgacatgtcgctgaaagcgatccatcaacccatagcttgtgagataatgaattgtttgtttttctttctttctgatttctgttaatgatgattctcggttttgcgggctttttttctacgtattgctgttttatcctaaacaatatgtgcacttggaaatttaaccatgatggtacatgtttgattgtaatcaacttatttttctagttcatcccaatgatcaagattgttttgaacaataaaagaagacttcaagtacaactattaagatacatgacaagttgcagtgtatcaatgcaacgccatttacaagtaacacatttttaatgcagcaggacagctcattcatgtttaacgatatagtagttgattagctcatcaacagttttcttctcatgtgacag

SEQ ID NO: 111051 - DNA, 825 bp, Setaria italica
  Intron number 1 from transcript Si036525m (locus Si036525m .g) derived from phytozome v7.0 (chr-ID scaffold_9; pos 51 636951 to 51637775 reverse strand)
tacaaccagtcccgggtcgccgagcaggtaaaaaagcattcgtcccgcccaccaataggatccgtttctgttcgtcggagtcggagtagaatgagcccgttttcctattggcccagttgtcgcgtctgatttgtttatgccacaaagacagccgtcggcactcggcacctgcgtccactggcgcgtgctcgtgatctccaatcctgttttgttagtgcgcatctatcgaaaatggatcaaaagattaaagtggtgtttgtatccttgacctaaagtccgtatcacatcgaatcttcgatagctaattataagggctaaacatgagttaaatcttcagaagctaattaggactaaacatgagttaattataaaattaattacacagaattacacagatggaggttaatttgtgagacgaatctattaaacctaattaattcataattagcacatgttactgtagcatcacattgtcaaatcatggactaattaggcttaatagattcgtctcgcgaattaaccttcatctgtgcaattggttttataattagtctatgtttaatacttctatacttctaatcagtatctaaacattcgatgtgatagagactaaactttagccctgcgaaccaaacgggccttaaatcgtttggagtcgtaccaaactgaccctaaaactttcggcagttttagatccactacgaatcacaggaaacgaacatttttttcactaagcaggctaatctgatgtgaggatttaacttccgggaactgtaaactggtaaaagtagcagtatagtaagaaaatgagcgggtttcgtgcag

SEQ ID NO: 111052 - DNA, 1010 bp, Setaria italica
  Intron number 1 from transcript Si000225m (locus Si000225m .g) derived from phytozome v7.0 (chr-ID scaffold_5; pos 23 45511 to 2346520 reverse strand)
gtggccgggagcagccctcctccattcttcccaaggtcgggctcgtttctcttctttcgacttgagaggctgtgctgtgtgatctgatgcggtcttggttcaggcgctgaattagttactgtggtagtttcctgggcgggaagagagcgagggtcttgttgggaaatcttgaactttgatccgatttgggctgggtcttgttgccttgaagtgacgtagttgcgaaatgcggctgctttgaggtggccactggccagatttaggtttgatatatcggttcttgatccggctggcttaccgaggtgtctctgtgagccttgcactgtgatctagtctgatcttggataatgctctgaccccaaatgcacgtcaggtggtaatgcttaatgcgaattaattccgaggcctatttcatcataaatgaagaaaaccaatttgatctcaattggttattatgatgaattgtgccaaacttggaactctcttccttgtatggagtaagaccagagaacaaacatattaatttgactaatattccccaagttgaggtgaccatcttaaggatctattagtagattggcctagagccctcgactgattgagttacccacattttagtagtttatttggtttacagatacatgtgcctagtgagctaccaagtgaacatttagctaaatgctacaggttttgaattggaccaaccacttgcatccatggaccatatgcttgtaaatctcttgtgttagttctgtggccgtacactcttctgtttattagaatttacaacttaataatctaggcaatcttggagcagaaattccatttgttgttcttcagaaagaaccaaccatgttatactttagatctccctctttatctcaatttcttcatcaaccaaaatatgccattagagtactttgaaatgtcttcaacagaaatacttaaatgtaaggaatttaatttcttttgcaggaaaacgaggataaggatctgaagctatcctctcg

SEQ ID NO: 111053 - DNA, 864 bp, Setaria italica
  Intron number 2 from transcript Si000028m (locus Si000028m .g) derived from phytozome v7.0 (chr-ID scaffold_5; pos 32 778597 to 32779460)
atccgaagctcttaaaggtatatatgtagggaacttttaaatgtaagtttgtatctcttattgtggtggatttgtgccattgcataaactgggtttctgatcgtgcatgtgcataatttttggagtgacattgcatcagtgctaaaattgatggtagtgtggggtttatttacattactctcatattgatgtgcgattatgagtgttgcggttgttgcgctgatttgttagcccaaacttcgacgtggtgtgccctactcaaatgagtgcatgtgcatcatacctcatgtggtgattgccaattcagtttggaatagggcatagctttcagtcttttaaatgataataatgccttgaagattcaaagtcataaatcattttgtgccagttttatgaacacccccttcaccacaattccccaaagtggtcaagactttaccattaagtagtatacgctgcagatgtgttgtaactgatgtggtgatgttattcagaattgggtgagttgggtgtaagcaatattggcatggcacaattatcgtgtagtatttggtggcacctttttttttcttcttttttcattagttctccacaccaagctatacatgggtggtttatgtttcctatggtcaattggtcatactagtagaagagctactgtatctttacaagtgttatcccatgagcatatattcttttcttggtgagttttcatgctgcaatctttgttccccttattatctttgcttcatatgtattctcagaattcagggtgaggctactctatgtgcatagtattattaccacctctaatcttccattcttccttttttccccccttaggcttcagcatttttacctacc

SEQ ID NO: 111054 - DNA, 815 bp, Setaria italica
  Intron number 1 from transcript Si000048m (locus Si000048m .g) derived from phytozome v7.0 (chr-ID scaffold_5; pos 11 539004 to 11539818)
tctgggggcagcatctatattaaggctgcgacgatgtgagtgtttcttgaatgattttaattcctgttctgctttctgtatgctaagtgaactgagatatgggtgtacaagctaattaatttttaagtataatttagaaaaccgttaccaattgaaggccagcagaataaattggtaagcagttaattaagttgaagtttggaaaacagttagcagagcaaatcggtagttcctgcagtttaaggaattagccataatcagcatttttggctgtgtttgtaccctgatgatagtgggttaagaggcaagagaggaagacctttttccccatgcagaaatgcatctagggcacatttgatcatatgtttgatgtactgaattaagacaaacggattctcagttttctaaaattgccgctcgtgtttgatgtattttttgaagcctagagtcaatgttgttaatgagctcaatttgatgatatgatcttgttgagatgttaataaactataaaatttagttctgttgaatcactaagattttaggatttccctttgcatagaaagttaagggtaggaggggatcaccctcatggattgattgagagtagataaatgatgcacaaaattaattggtggatgaatcaagcaagagtttttgtgctggtcataatgatatacatatgtatgaaaaaggggcagtccaggaatctctgttcatttgtaagttttttttcctgtagatctgcttagtgcttattatggtaagcaagaccttgcagtttttccatctcttctgaacttctgctggcaacaggc

SEQ ID NO: 111055 - DNA, 725 bp, Setaria italica
  Intron number 1 from transcript Si039622m (locus Si039622m .g) derived from phytozome v7.0 (chr-ID scaffold_9; pos 16 438615 to 16439339)
gacttgaactggtatggatgtagcagctgctctttgcgactcttgttgcatctgttggttcctacaactagaaccgttcaacatcaactaacttggttaatatcctgcatgaaaaaaacttaatagcttcagaagtctggccaacaaaaaaatgactgtttttaacatctcccccaaggcggattcatctaggcctttatgccgacttgcagctggacccttattccattttgacttccttcaaaactcagcttcaggttcctttcttcatggaaataatcataatcatgagctggtgcatatggatgacaagaaatgatttaatcttcagaggcataccaccaacaacgcaaggggccatcttgcggttcaagtccacctatgccttagtcttgcatagagttaaagaggcctccaaacaatcaatggttgaatggctagagcttatgttgtaatcttcatgattttctttttaaccttctttgtttcttagatacaaactggtttgctctttgtaatccctttatttcttttttctcaatatataaccagcagggctaaaaccctcctgtttccatcaaaaaaaaaaaacatctcccccaaggccccaacacatagcaggctgcaggcctatcagaggtttctgtataagaatcaaaaaagagaacatggccatccatgaacagatcctcagtgccctgtcttaatttgtttgcaggtactta

SEQ ID NO: 111056 - DNA, 1054 bp, Setaria italica
  Intron number 1 from transcript Si004321m (locus Si004321m .g) derived from phytozome v7.0 (chr-ID scaffold_5; pos 37 039010 to 37040063 reverse strand)
ccaagttccgcggcttcatcatcggcatcgcgcaggtgatcgacgctccaccccacctggctcttcttcgtctctgatcgttttcgtactgcaatctgcgcgtcgatgcttggattggtttccgttttccgtggaggaattccttcttgcggttattgctgtatgtggaatcttgcaagttggggctgcttggtcgttttttcttcagtacgggttgggtgatgcagcgagctctccgagattctgctcttctttagcgttgagttcttagaatgacttgcgtttgatctcatgaggggtacttgcggaatggatttattcaatgtgccatgctgtcagagattcagaaattttgctctcatgcggaaagatgtagtgcattgatccatatcgttactgaaatagtgaatgaattgtataatctattgttgctgtgagtctatgatcttaccctacccaagaatttggtgtggacaaattcctgaagtctgttctactttttctgaatgctcataccaataggaatttctaggtggtgagggcatttcagaatgatttcttaagggtcatttgaacttgaatctgggttgctttatcagtattgcgcgtgtcaggttatgataggccccactcattcttccatttttttagcaatgatatgatcctcaccagaacacaataaaaaatcccacaatagtccttgtaagtacttcttcgaatgctgatgatgtagacacatcgtctttcgaaggaaataacagcttgaacatataaatgttgttcagtgcttccgaggaaaattttaccatgatgtttgcatggttcaacaactgaaaatgcagcaggttaatagcatcgttccattatggtattgcttttgttgctattttccttgcatcttatgtcttgctctcttagtgtaaattgaataaattatggttctgtactagcaaacatggaatcacagtactctgcaccatatattatgggactgctgtaactgaaacattttttatggcacattattcaggcaaaccatcgtttcacaacaaat

SEQ ID NO: 111057 - DNA, 461 bp, Setaria italica
  Intron number 1 from transcript Si005314m (locus Si005314m .g) derived from phytozome v7.0 (chr-ID scaffold_5; pos 29 600906 to 29601366)
ccggcaatcctcaggttccaggtccgtccgctaccgcgccatctctgtcctcaactgtctgcttcgggctgattttaccgacgaacgaattaacttgcatttgtagcgcttctcttttaagaattgtagcgcacgatttgatgtttctcacttgggcctcgtgttcctgacgttttcaggattagtctactttgtaggaataggaaagcctggtagagggaagggtgtgatttgattaaatcgagaaacatgagatgaacttggcttcatctttaagctcctaaacctatggatgggcaataaacagagataaaatgtgctttgcaaaatcattggtatcttagtcttctgtatttggttatcttcgatgtttcagctgtccatttgtctgaagttaaattatgttgtttgttgaaattgttgcagaggttgcagcacaagttgctggacaatttcttctc

SEQ ID NO: 111058 - DNA, 756 bp, Setaria italica
  Intron number 4 from transcript Si000329m (locus Si000329m .g) derived from phytozome v7.0 (chr-ID scaffold_5; pos 74 22846 to 7423601)
caaaactatcgaggaggtttcaatctactgttgaggtctgtttctgcaatcttgctgaatatttgttctctatggctcttcgctgaggagtgcattttctttagctattgagctccagatactaaggtgctacatgaaagatgtcagttatacttagggtctgcttgacggtggatactggtaatattgtttttagaactgcttttagaaatttaggttctggctaactgcttttcttttaatttaagttacaaacatatatatagatttgtttcaatgtaccaataattgtgtgagaggcaagggttgtctagcagactttgtacaaacttagtttaattttccgactaaactgaggtttttgacaattgtttttcagtcacttcttcaaaaaataagcacagtggcatcagtacaaactgacccttagtaattttgaccttgggggatgtaatctaaggaatgaactttagaggttctgaatttttttactccattttagtgtaagttaattaattgttaacattagagggaagacatgcttttgagtaggttgtgttattgacatttgttgtatttgattcttggaagtggataggtcccagataaagatactcattagcatgttcctgtatttgatgtattaaatatgtattggaacatatacatgtgaaatcttgcatcgtccatacacagctaacagagctctatgattttgcagagacgtttgaagaatcgaaaaccaaaattaatagt

SEQ ID NO: 111059 - DNA, 931 bp, Setaria italica
  Intron number 1 from transcript Si000076m (locus Si000076m .g) derived from phytozome v7.0 (chr-ID scaffold_5; pos 34 234358 to 34235288)
tcctccaccgcgtcaacaaggtgagctcgtcggagcctggagaaacttccgccacgctagctatcttggcgtttgtgctttcacggccccgggagaacgatggggcgcgtatcttgacttttggcgccattaatcctctggtgtttgctccctcttcatcttttaatttctttcaaaattttctctccttttttgttcttgaatcttgagataaaacttaaggcggaatgatgccaatcgaaactggtacttcttagaaatcaaaatgatcccacgatccgtgctttgacagggacttaactagtgacgtccaatatcaacaagatgctttgcgtgcaaaacattgcactgcttcttctttcttcttggagtatgctgttctcatccgttcagctatgcgtttgaaccaagtttcaatattttcagaccaagcgggcaaacttggccaggtttaaaagaatgaaacatccttctgggttaccaacagcttacaacactaaaggaaaaaacagagagtcgaaaaatagaaccgtttcaggacaacaaacaactcaacaactaactcaacgcttcagggaccaattaacttaataagataccatgtggaacagagttactataattgataactaaccaccacaggtaatggctagaatctttcctgatcaaagatccggaactctgtccaaggatagggttagagatcatccacacggtcaaatttgttcggttgtatgttctttgacagcagttttttttatatggtttctgaataaaataaagttatggccaaagtttcttcaaatactctgctaaaaattcatttcattacattctcttttgagacatgagtacatttctcaccctgctgctgttccacctcactttcctttcaggcagttctgaattttgtctacctgggcattgcaac

SEQ ID NO: 111060 - DNA, 724 bp, Setaria italica
  Intron number 1 from transcript Si000487m (locus Si000487m .g) derived from phytozome v7.0 (chr-ID scaffold_5; pos 26 718088 to 26718811)
gcgtggcggcgcgtcctgacccaggtgcgagtcctgatcttttcctcgttcccgcgctttattgttgtacggggatgcgggctgggctcaaaccttcgatcttggggtgggcgggattggaggcgacggcgtcttctgggtctccggcgatatgaagaacgtgtgcatctatctggttgttatacgtagctatcttggaactgcctcagtggatgtctctgctattgaaacatacaggcgataaggctactgcttttggacaaacagtgatctagtttaagttttgtatgcttactattttcggttagtgatagaaagagtcgtttcctttcagtaaatactggagattatgttatatggcctgccatcagattggtgtggtaacctgtatgagaattcacaagagatgccagatttaagtccaaatgttgtctattatgttgtaggtagcttgtgttttgtgaagctaattttgagaatggaatagtaagaactaaaaaattatagcatcttagtttgtttaatattgcgatctgctggaacaagtattacttgcaatggaataacttactcagctgcattgttgtattctatccttgttgatgtatgtatatgttttaatgttgcttacttgaattaattcaggtttgtctctgtgtttatgtgttttattgtttgttttgttacagatcgcaaagcatcgacccacaaaagcaatatacaa

SEQ ID NO: 111061 - DNA, 915 bp, Setaria italica
  Intron number 2 from transcript Si001638m (locus Si001638m .g) derived from phytozome v7.0 (chr-ID scaffold_5; pos 45 275897 to 45276811 reverse strand)
tgagtatcattcttggtattttttcaactcaccaccttcattgatttcctgggttgtgtgattccactacttaatatatgcaattgctggaatactagtatgagtcttaatgaagctggtagcctcagttcttcaaatgacgggtgtattgtgcatttaactgcttgtttcatgattatgtggttagtttcgttacaatcaaaatatatgtttagaaaaaggaaatgcaactttcccttttgcctttcttatacgttgcatgctaatagggcaagtggcctgccagacaatatactacttaagagctgtcatttaattgttcctaatggcatcaaactgcaatattctgcctttatcgtgtgccatactatgttaaatgacaaagtgattcctgaatcctgattatataaatgtaactgggttttggatatcacgaaaaggatccttcccccctcccccttgttataagagagaggaaatatccaactctgcttttgcatttattatttggtgtatgttaattgggcaagtgacttttcagatggtatagtacttgagcgagatatttaattgctcctaatagtatcgaaatgtgagaatccgcctttattgtgtgccatgtgttaattgaagcgatccctgattatgtagatatacctgagttggatatcaagaaatggggggttattcttcctgttgtgtccttttagcttgctgtgttctaggcttctagcaccaagcatgttttgctggtcctatcttgatcttttaatttgatacatacacaaattatcttcgagtatggtcatgctggcaaagagaaaaaagtatatatgtaacatatcctctaccttgtttaagcattttgccacttttcaagatctgagtcttctgcttctaacttctggaagagat

SEQ ID NO: 111062 - DNA, 637 bp, Setaria italica
  Intron number 1 from transcript Si002124m (locus Si002124m .g) derived from phytozome v7.0 (chr-ID scaffold_5; pos 46 86014 to 4686650 reverse strand)
actgctttgtccaggttgctactgctttcctagctctttgctactgtatcttattgtttgcatgttttgcactattgtgacgcctgataaacttgtagttcccgaagcgcactatagctaatcagcaacgtttcgtaccataaagttttggcttctgtgtttagtacaatggaactgtacgtgatccgtacaaaattattttgaaatccaaacaaacatatgatgaagcactaaaaattcaatgattattgtgcctatttaccaacttcatctgcataaacacatcacttaaagtgcagtctacaactccaactttttttctatatatgtgcgtaggtattggaaaagtcagcatggaagaatctgcagttcctaggctaacttttcttttaccgtaccagtgataagatagcctacctacatttccaagaggagcacgccactttatttgtaccatggttcatcaatccttcgtttatttaattatctactatgaaaaaaatatgactacacaataattgacagcctccacatgtgtgaaattttgatattccattcaaggcatgtttctaatgactctcatgcgcctaatctaactagtaatcttctctgtcactatctttctctgtgtgcaggg

SEQ ID NO: 111063 - DNA, 740 bp, Setaria italica
  Intron number 1 from transcript Si001498m (locus Si001498m .g) derived from phytozome v7.0 (chr-ID scaffold_5; pos 22 563538 to 22564277 reverse strand)
ctcgtcaggggccatcgccggctttttcttactccgtgagttctcttcattcgcttcaccttcctttttgattgcaactgcaaaggatgctgggaatttatgaaatcataatctacttctgatggtctgctgcccaactagtcagcttttgagacttagcaatgcaattaatcttgctcatcattttgtttttaggacccacttcagtactacaattatttgcttctttctttccctcacctttttgctgttcgctccagcagggttagttggttgcacgagggtcagttcagtcatgtttgtctgttttttgtaatgatgggaggcacacaaagtttttgcgtactcttaaaataaggctggactctaagagtcattgtaaaatcatgtgaagaattcagtgagctacaggggatgtaccggaagagccatttatgaatgatatttagaagagagaatagatatggcatcctttgctcattgtacaaggatcacacagttctagtttttgtttattctaataactttatcccgttttcaaatcattcagtcgattggattgctacatataattcttctaatctgcattgcttgttctaggattcatgctatgattccaacgtgataaacagttttcatgtatatcaatgccatgtatttctgcgttgcatctgtttaatactctgtgtaccagagtgattctcatattttgaattgatccttcttgtgaagatttttgc

SEQ ID NO: 111064 - DNA, 782 bp, Setaria italica
  Intron number 1 from transcript Si002512m (locus Si002512m .g) derived from phytozome v7.0 (chr-ID scaffold_5; pos 69 79386 to 6980167 reverse strand)
tggaggctccctgcgcctgctgtggcagcctcaaggtaattctgctctctttattctgaaaccaaaatagttgctcttcattttgtggatggtctgtggccttacaatttgatgattgtgcattttttttccctcagagttcattaaaagtgtgttttcagttcctgttgtcaaatgaaaaatttgcttccttttttcagcagaagattggaaagtgactagtggtccctgaattttattttggtggcctgcttgagtttctaattctaaaatggttaatgtatagtttacttggcatgaaaactgttgacgtttatggttagggttagatgtagtaggttgtgcagttaggacttggcagttcccatgttaacttgagccattgtggacaagggctatgaaccaaatcaactgtgtttatcactatttggtttggaaggcactgcctagtatgtattgggccatcctattggacagtgacttaatagtgtgttgaaagatataggttaggggaaggtgttggtaggggaaatggatggagctatctttgtgagtgtgaccttcacgcaatgtgtggggcaactaccctcattctgctatatgcaaggcaaaaatgtagttgaaacttcagggaaacacaaacaccctggtgttgatcatattgtggttcttgtttctgataatggtcacataccatgctatgtgaggaatgaactaggaagatttcagttggcaatacagtgattgaaacaaaattaaattagtagctactatcttgcagt

SEQ ID NO: 111065 - DNA, 857 bp, Setaria italica
  Intron number 2 from transcript Si034299m (locus Si034299m .g) derived from phytozome v7.0 (chr-ID scaffold_9; pos 19 033641 to 19034497 reverse strand)
aagtcttggcaaggcacaaggttatactcgagcaggtatgatttacgtgctgtcttgatggaatcagatcgtttctcaacatatacacttttagatggcacgttctctggtcaatggtgctgctacaatcaatgcaactagagaattgttatctgtattgcagctagtcgaatgctgcaacatatcacatgacttgtcgtttgccttatgtagatgaagtttaggtacatgtatgcattaacacagatttcgttgagatgcgatttacagaagaatgttagacatccgagtcagattcctgctgtccttgtagcagctgttagaccttgcacttttgaatcaggaacagcgcttttgattttttttaattgacaaattacaccgcgcaacttgtgggtttgtgcatagtcggggcattttgaggaagaacatgatggtatagggaatggttctgctaccttctatataagcaaataagtactgctgatttgtagagtccaccaaagaaagtgtcctttgatatattcttaccggaatcgaataagttttgtcacactgcaaacaatttgaaagtgtcatcacactgcagtttttctgccattttggcccgtaatcattacctgcttcttttcaggactagtggtatgttttgtgatatgtttgctggaacaatttgcaattcacttttaactatccattttttactagctaattactggcattaaaccttaactatctggaatgatgtagagtatgcttatgctgtattgtttattgaactatatgatggtttgaatgatgatatgtgggcaacttattcagatatcggaaaagaagaagctcatctcagttctcgc

SEQ ID NO: 111066 - DNA, 865 bp, Setaria italica
  Intron number 1 from transcript Si001847m (locus Si001847m .g) derived from phytozome v7.0 (chr-ID scaffold_5; pos 42 188892 to 42189756)
tcgcctcggagatccggcactagcagcgcctcccggtgagcctctacctttccccatctcctccgctccttgcccaccctcctcttgtttatttttcaagggtttgggattcattttccttttctcccaaatcgccgagcagatcgtggagccggcttcttcctcgtgctccatgtcgcagatcccccgaccttagcatctcggtgatttctttcgacgtctgaccgccagttcttgcgttttcctggaggttgtggggagggatcaaggtcatagtcattgacgtgtcctgctgatgtttgttgaaaaaatgagttggtagctgttacaatgcgatctgctaagtgctagtagcccacaatagcgcatcatgatgtatatatgcttgatttggtttgctcttattcagtccgttgctacctacaacaggggggcccgtcacctgcatggtggaattgatgaagcaaggggaggaggactatggctggagagaattcaatatttctagattgtgagcttgccactattgggcctaggattatgcagtgcagagagaccaagatttcaatgttgtgggggttccatgctagtttagctgttcctttttgactttatcaaccgggcctcgttttgctgtagacaccaatgttcattttacttcaattcgtgctttgtatatctactaatgacacaaaaaagactatttgatgttgggctatcatgatattagccacatgaaatcatgtaaccacctattttcacttgctttgttttctagtatgcagattctgctttgcttggtgtgatgatagctttacgttaatggacggttttcttgaaattggcaggatatcattttcgacat

SEQ ID NO: 111067 - DNA, 708 bp, Setaria italica
  Intron number 2 from transcript Si035777m (locus Si035777m .g) derived from phytozome v7.0 (chr-ID scaffold_9; pos 56 707414 to 56708121)
gcaatctcacctccctgcttgctggtgtgcacaaggtatagttagacatacatattttggtcacttcttgagttcttgtatcttaaatctgaagtcttatgcacgtttcatttcaaatttttgcaaacgtaccggtattgttcgcttcattcccactgtgcatgtagcttttgaatttcttaagaataacatctgcagcatgtgtgtctgctgttgattagcaggacacataacaagtgctccatctaataaaataattaatgaagttttgggatgcatgtagtcaaacttgcttaacttctgctgcctatatctttatgaatatttagtttatgcaataggcatatgaaaaatgataatgtgtagcattgtctgaaaaaagtgttttcaaactgtaatagtttatcaggttccataattatagtacatcaacaattagctttcaaaattgcactttggagactatgctgatgttcaaaacatcacttatctgcgttgatgaaattagctatgtttgaatctttgaagaggcacagaaagacaaaagttaatctatcattcatatcatactagactttctcatactccacaaagccttccaatctgttctttaataactaaaagacttttgtaataatccttatgatgtgtagagccgcttccttttcataatattcgacattgttttcttaaatttgcaggtcagag

SEQ ID NO: 111068 - DNA, 895 bp, Setaria italica
  Intron number 1 from transcript Si002019m (locus Si002019m .g) derived from phytozome v7.0 (chr-ID scaffold_5; pos 29 627523 to 29628417)
gggagaattccacgaaagcgtacgttctcattactttgatgccactgatttctgtgttcatctcgaattcttgcttgatctgcatctctcttcaatcaaggttcaggagtccgctgcttcttcttggtgcatgttagatctgatcctactgttgtttgcttaaacgaacaaaacttttcctgtgtttatgtatctatctacgacatggtgtgaacattagggtttgttgcgatttccttctttagggttcttcgaccatgcatcaagatttcagatccggccagctccagattttgcagtactagctcgccatgctttccctcttctttatctttcctttccgtcgttcctttttggtgccgtttccagtatgactttctagatcatttggtactgtccaattcaataggcggcgacgtactctccagaagagatctttctttgaattaaacaattgctgcgtgctgcagcttcaatttttgaccaagtagcttcagctctgaagatgaaatcaaagatttctttttccccttttataaaagattttgggattataaatgatatgccccggaagcacctaaagctgccatagatccagagtatcttctgccaaaaaacaactaataatctggatatgacatgatagtgctcgatcccaattcccaacagctcgctagctaatctatagctaataactcgctactcgtcaccatagatctacagcacacgttcgactaattagcgctaatagcccgtgacatgaaatatatatctacttcatctagctatagctagctagcactaattcatatcaaatcactggattcgcgttcatgattttccttgtgatatcactacaggaacaaacccaagaagaaagccgagaagaggcaga

SEQ ID NO: 111069 - DNA, 687 bp, Setaria italica
  Intron number 1 from transcript Si035218m (locus Si035218m .g) derived from phytozome v7.0 (chr-ID scaffold_9; pos 35 280743 to 35281429)
ggcggaccgagacgagcaaccatagtagattaagggggagaaggagaaggggaagaagagaatttgacctctaccacttacaagtggggtccccatatcagccagtccacgtcagtctatcgattcatctcagcgtgctaatgtggcaaaaccaccctacaaaaccagccccaggggtcctttaaacggttttgcaaagttgagggggttaaaaatctggttttataattgaggaggttatgtacttgaccattgatatgtcaggggttacgtagacttttttttcctttcacattttctcacgtgcaagtcaggtgcaactgaaggagcacaacatggtagccacgtcgcgctaatcctaatcctaattggtttaccttagtattacactaaaaaaagagagacttggagcgactccgagtctaatctaatttagtttttgaggcttaactttcaaatctttttgattgacgagtaacaagttataggacgattgaacgcaaaaacatcgagcacgattgaaggtggggtcccttgatggcttgatcgtgtcaactcacgcgcgtggaaagcgtgcttgccgagcagcaacgcaggcgcaggccgggtcagagtcaaaacaacaactgctcctccacacgccaaagccaaggcaacgagccacccacccaccccgcaacaaccttc

SEQ ID NO: 111070 - DNA, 752 bp, Setaria italica
  Intron number 3 from transcript Si001474m (locus Si001474m .g) derived from phytozome v7.0 (chr-ID scaffold_5; pos 32 410456 to 32411207 reverse strand)
gagggaaatccgttggtgtgttcaaggtgctccagcatatttaatctcatattaagcacttgataactaactgtgcacttgtcctggattttcttcataatttccatttttatttatgcttgtgggttcttttgtttcaacggtcttaaggatcaaatccttcatagcccttgcaatattgccaaattgatgtgcaagttgcgatctgttgcttagatgcttccttacacactttgaatatttgcttttattaccgtccaaatagatgtaacaaatcataatctatcatcattttatattcggaaatgattgcatgaatactttgttcatcctagtcctcactcctgactagtaagtttctcaactctttaagtttccaaccttgatttccatgttgattgaacctgtgaaaaagggtgggaatgatgcataatgtatgaaacaattgcaaccgattgaaatataatataaccattgcaattgcccgctgcttgttatcatgtggcctttagcttcaacttgttccgagtaaatgattaatgtggctattagaaatcgcctttgtttggtattgtttgaagtttgatctatagtaaacgttggagattgggtgcattgctttattattgtgttgtctgtactgtttgatttcgttttggggtctcaaaattttgtataagcttgtcttgcaacctaagattgtcccttttatttcaggatttaacatctggagtggtagtttcaccaaattc

SEQ ID NO: 111071 - DNA, 555 bp, Setaria italica
  Intron number 3 from transcript Si000652m (locus Si000652m .g) derived from phytozome v7.0 (chr-ID scaffold_5; pos 36 063673 to 36064227 reverse strand)
ttggactcggggattcaggctatcagaagtacaatgtgaggcttctgtctgagtaattgaccttgctagcacacaattaatcaataatatgtggggatatgtcgaaatcgattgcagtaattcacctacaatatggcgatttattgctggaagaacatttgactgtgtgcatctttagaaaaaagtatatgtttataacatcatatactgtttagatgttctgttcatcttgctttggatagctgcaatgaatgtgcgtgcgtgtggtggatcgggggtaatagattctttttaatcttagtgctattttggtgaatgcttgcaaagttttaatataaccaatatagcagtttgaaaacatttgcaagcccccaacatcacattttaattcctttgtatactgtaaacatgcattctcaaccgtattgatgtcttatttctatcaaattgaggctgtaaggtcataatgtacagtctttttgtttctgtttgtccttcattagtgtgtttactactgcagtttgctgcaaagaagcttgatagaaggctttcaca

SEQ ID NO: 111072 - DNA, 967 bp, Setaria italica
  Intron number 1 from transcript Si000907m (locus Si000907m .g) derived from phytozome v7.0 (chr-ID scaffold_5; pos 39 643028 to 39643994)
gctgctaatgtaagttctatgccgattccttcctctgcacatgaccatgcagttctttaccgagtttccagaattgatttcgttctttgggtctgcacgtacgtgcagtttttaattcaagatgtggatttctgtacttaggaattaccgtttcgtgaaaagtagtaatggtttagtttgcgtactatttcgtttcatgcattcggactgcactagcatgttcatgttgctttaccgttactgttcggtattaacttagatggttttatagtttagttcagtaaatgccatcttctggtttaaaaattagacctggtaactttcgtgcagcaacctgctcaaatcatcctggtatcaagatcctggtccacaaaattagttcactcctgatctggggcaccaagaaaatgatcgctttcaaatatcattttaggtttggttttcaattctatatgacttgtcattgttactcttttatggataaagacattgttggtagtcatattcaaaggtaggaatacttcacctaagcagcaaagatagctaccgcagaggctgactctactttctttgtcactaaaagcatgttgaccttgctactagtttttctttgaatttcaacaatcaactggaagggacactcaacacggcaattgtgtcttatctcttatcaaacctacatcttgagacttaggtaactcatattctcatgttagctaactctaccaatactagccagactgtctttgtctgaaatacaaggtgcctaaatttagaacttgagagttctcatgttcttgtgttttggaaaatacgctattgtgttttgaaacatttcatatgccttatcatgtgtgcatgtctctagtaagttcctattttcatcctgaataattttagcctttattttttctatttgtcatcattaaccttgagcacccttctcagttgccagggcgtactgaca

SEQ ID NO: 111073 - DNA, 845 bp, Setaria italica
  Intron number 2 from transcript Si005388m (locus Si005388m .g) derived from phytozome v7.0 (chr-ID scaffold_5; pos 45 624203 to 45625047 reverse strand)
ctgccgggcgaggaccccgccgaggttcgctccaggtgatgggaatcccaactttgcctgttcttccgtttgctcatccccgtacgtcgtatctcgtgagtcgtgattgtgtgtttggctaaatgtaaatgatcatcatgtgctcgatggaatgcaccagagacaacgatgatgagttctgctctacttgtctgtttgcgtgcggatgcaccatgagagcgacgtagctgttaccatggcgccaaagagtgccttgccgaatccggtttctagttgcgttgattccaaaatatgttcattgcgtgtgcatcagcaatgccagtatgccacttttttggaatacatggctggtatcgttttcacttttgataaaattgacccctcaccattatgctgtagttgctatatgttgccatggaatactgttgggggctgtttgtttgggttgtcttttctttgatacgagcaagcaactactttaagctaacaaattgctctttcagttctatgaagtcactagtgatgttagagtatgcttgttttctcatattacgtatgtgtctcagagtgtttacaggcactttttgggctttggtagtttgccataagtttggaagacttttgtgcatttcttctcagatttgataattgttaaattcaatcatgatgaatcagctgaggatattgtttatgtgggtatattccatcaggcaaaggagcatggttggttggtttgtcatgcctgatactagttagaagagatttaagacagtttggtttgttggttgttgggaaggattcaggaccacttaatgtaatcttatcttcctgcaggtacaagccag

SEQ ID NO: 111074 - DNA, 951 bp, Setaria italica
  Intron number 2 from transcript Si000996m (locus Si000996m .g) derived from phytozome v7.0 (chr-ID scaffold_5; pos 27 906589 to 27907539)
cgctgggcgcccttcgcctcctggatcaccgggtacgtgcgttccatctctccatccctgttcttggaacggtcgccgggtttcttgtcccgtcggaaactggccggaatgattgagggatccggcgactagcgaggatcatgtgaacgggccgcgcttacaatattcttgcttccccaccgttccttctgccgcgccaccgcatcggcgtgagcgacaacttggcatctctctgttttttattctgtttagttttgtcacggagaaagaaattagtttatcgatttcaccgtaccaaatgggaacggaagagactgttactgtgctttgcactgcatagagtctttgttttatttggatttgggatcgtcgtctgcctctggctattggtcaatgcgcgtgctttgactgctagctggaaatggaagaacactgacagaataaacttttatctgcaaaagagggtgtggtaaagttcttttccttcagaacatcatacagaaacttttaacattactcaacggctgctgcagctccacgtatatgggattagtgagtactactatatttggggagttgttagtgattccatcacattcgcttggttaaatactcccatctacgtgttgtcgctggagaccgtatgctacctctactagggcaggcagtactggaccactggctgcaattgagacgaggactttttgcgatgaatacagcgacgagtttcctgcacttgatatggggcagctcaagaaagaaaggcgactgttgtcagtcacagtcacgttcaatctcaatttaaaaccgtgtagccaacatgttctcgtcatgatgttgatgtgtttgattccagcacaactttttagcatctaactttacatgtgtttttttcttttgcctgtctgactttcaggttcaacattgttggacaggtgagcagtcgttttt

SEQ ID NO: 111075 - DNA, 1010 bp, Setaria italica
  Intron number 1 from transcript Si003019m (locus Si003019m .g) derived from phytozome v7.0 (chr-ID scaffold_5; pos 44 457790 to 44458799)
tgatccgacgaccaggagagtctaaggcgtggacggtatttcatttactaccgtccaccctgtaacaccccaggtgtttagcacctttaattagtgttaatcatctgcaaaatcttgcattaacatttttgcatatgcaatttttcggaaatgactaattattttagtagcacatgatcacatttaaatatcatttaaatctcatttcattaaggtttatgctattctgccattaaatattaataaaacgttaaagtatgaaaactttttgctcaaatatagtttaaattgtgatatgattcatttttgtctcatgaataaaaaaacccatttcaaaaacgtggtcaaagttcggtcgaactgctgtttgcaagctgatcctgttttgccaaagtccctaaaaatgatgcttttccctgtttttgaagcctcgaaactctctaaccaataaccaaatcacctatgagcctatacaaaagttgtagttcaatctttattctacatctttcatattggtcttttggagagtgtcgatgcaaaagtttgagtattggtcgtgcaaaggtcgttgccttgcactgtccttggtcgcgagcaccgcagctgcctctgcctgtgcacgacgcgtgtcggccatcgggctgccggcgagctgtgccatcgccatgcgccggctcccgcggcgatcaacgcacggaccgcatgccgacgcgacgtcctgccaccatgcccatgccgcgcccatcccttgacgtaccgcgcccatgccgtcgacgtccgcgccagcgttgcctcgtcccgagctccccactgccgcgtcgtcctcggccgtcctcgcaccactgctcgcgccgtcctcgcgccactgctcgctagcacggccgccatcacctctcccttgccctcttccctggaatgaccggccctatccgtctccctcccattttcttccttcttcttccccggccgaaacagagcagacggcgtagctcccactcgcccgccaaatt

SEQ ID NO: 111076 - DNA, 1029 bp, Setaria italica
  Intron number 1 from transcript Si001394m (locus Si001374m .g) derived from phytozome v7.0 (chr-ID scaffold_5; pos 43 831004 to 43832032 reverse strand)
cttctcgtttcaggtggccagccttggtatcatcggtgagttccgtttccgtaccgaattcgattgcgtttagcataagcgatgcggtggttccggctggacctattcttctggtctcgcaaaggtgacgccccgatgatgtttctgtgctcggagaacaggggagacctgctccttgatcagtgcagcagcagcggtttcgtgtgcggttgctcaccgaatggtttagttttgattctagagtttggttggatcgctttggtgtaactggtttgttagaaatgaggtttgtaatgtgttatgtttgttaattgcagcgactgcagtttggtaaagtgctctgatccaccagggtttaccgtacacatggtgttcaagaattaggcttgctggattgaatataacataacttgggttcggtttcgatgtgaattggtgagcgtgagtggcagtttgcacattcagaagtgtctcttttctcagggaatcatcccagtttctctgaatagaacctcattcattatgtttgacactgtccagccatctctttccccgttttacccttatgtacaattgcagttgagacttgaaggaaatagtgatacacccaattcttcatccatttggatgcatttttttcctcgttatatgttctgatatgaggtgaatactgcattgggctgactgttggtgactgcctttgctagaggaattagtcacttcttctcctttcaaaaaaggcaattgacatttccttatgtgattggtcactatttgtttgggtaccctcttctgctctacattctttgagactacgcctgagctttgttataatctggtaaataatagtatatttaaattgcttcaagagaaataccatctatgcagaatcatccatattgggtacatattcctcaaaaacaagtatttattaagtacatgtgccatcagcgttttatttttttggcttaacaattctattttacttttgcagagcagaattaattgtcctctgctggagtgtaaaat

SEQ ID NO: 111077 - DNA, 517 bp, Setaria italica
  Intron number 3 from transcript Si035487m (locus Si035487m .g) derived from phytozome v7.0 (chr-ID scaffold_9; pos 84 24480 to 8424996)
gaaatccggatttatccctgaaatttgtcgaacaagtaagttataccagattacagtgtatttatgtgcttaagtagttaaattctttgtattcgacccaagaaagttgaaattcattccaaaaaaagaaaatcaccttgggtacattcgttaattcactttaaggaatttcaagtatggtagttttggatggaacataaaatcaaatttcgctgaaagaagtccagtgccaattgttccctgacagcatgatgacccactgacccagagcatggaactcaaatagcattgcattcctcttcgctctgttttctttggaaccttttctttttgtttgtgcctgtgccaaatggtataatgaaaaaacttcgaatgcatctgttaccaaataattcatcaactcagctcctcttaaaaaacactgtagcaatagactgttttcaatttttcattagatttatatgatacttgttactgatcaggttttgccagagaatcaagatcagaactacatata

SEQ ID NO: 111078 - DNA, 727 bp, Setaria italica
  Intron number 2 from transcript Si003141m (locus Si003141m .g) derived from phytozome v7.0 (chr-ID scaffold_5; pos 33 222229 to 33222955)
tcatcgcgcagagcacaggcctcgccgaggttcaggtgagctcctagtgccgattagtatcttctctgcaagcatactgtttagttctgcaatctgtttagttcttggtgaactactgcagattttgtttgctttcaccagcatcggaggaatgatttgtgatgctgtgccaagagatgcaggaaactagctgcatcactaaaactagtaatgaatagcatttgcctgcagaagttttatgatattcctgcactatgggaaatttgtattatcgacgatatatggaaatgagtacgaatagcattgtactagtaaaatagctaactataatagttttgtgaattggaaatgttactaggaaacagaataggagttaatggaaggaagtatgactgtatgagacagacagtctaggaacaactgatactttgagtgcaattgtgcaaagtaggtacagctaataatcatcccttgagccttgttgatgaattaaaagtaaaagttccctttgtagttatttctgtttaaatttaaattatatcatgcctgtggctaaaaggtactcataacttagattcagcatggtacaaattaggatccatcaggcggggctagctgaaaactatgttactttcctgaaagtttgtatctgttcatattcctaaagtgatgtgtgtttgattactgagccacgtttttgtttttataaaattgcagaagggttcat

SEQ ID NO: 111079 - DNA, 988 bp, Setaria italica
  Intron number 1 from transcript Si004917m (locus Si004917m .g) derived from phytozome v7.0 (chr-ID scaffold_5; pos 95 58954 to 9559941)
attttgatccggattacaatccgaatccaagtgaggtaataccgaatataattaccaccaaatatttagtgcacattttcatgtactaagtgcaatgactttgatttgcttaaccttatgattcgtgtagatggctcccaccggaaggagtaaacaccgccgttgacaccctaccccccagaagaagaacttgaagacagtggcagctcggctcccgaagctgaaactacaacctctagaagtcaaagttaaaaaagacagggtgagcgaggaagaaaccaatactctgaaggaaaatgaacagtcgatgttgtcagcccatcaggagagcccatagagcctccgatggtgcattcaaagtttcagaatgcaataggagcaataattagaacaaaggagattttggatccctcaatctctgattggctattggttcatgaggggaggaaagaagcgatgtggaagcttttgaaacaaacatttattttgcctagatcaaaagaactcagaaaatgcgtaaaacattatgcacgaaagcagctcggtgaaagttttcgccggtggaggggtgagctgaatgataagtatgtcaaaaagggtctaaccccctttaatgaatatgggagcatcacaccagcccaatgggatgagtttgtaaggcaaaagacctctccagaagctttagccctaagctaaaggaatagagaacttgcgctaagcaatatacataaagtttaccttgggccgggtgggtaccgagggaagatctacaagtggcagcaggataggaaggcagcaataggcgcagggcaacccaacccttttgaaagcttggatgagcatggctggcagcggcttgcagcaaggaagcctacaatagtagatggtaaacctatattttcaacatccgaaaccaatcaggtggcggaaaagatattcaatctttccgtcagaggaaaggagagctcgtaccaaatagggataaaga

SEQ ID NO: 111080 - DNA, 679 bp, Setaria italica
  Intron number 2 from transcript Si034926m (locus Si034926m .g) derived from phytozome v7.0 (chr-ID scaffold_9; pos 46 402833 to 46403511)
ggaaggagttcacgacatccgactcggcgagaagggttagtgattctgttattaacattcaaagggcaaacgagttttccttttatcaaggcacattatgacattgtgcccttgtctttttaaagtattgatgtcaatgtaactcttttaccctggcggaatactagatttcgccattacaaatatgggtagctagctgaatatgttccacaatgtgtttttttgtaagctactccctctgttcttaaatacatgtcgttctgactggaggattttgcctggagttagttcagtcattttgtcggaatcgacaagttattgagactggagggagtattttgaacatatcaactttaagccgcaaagtgcctagagaatactatttcctcaaggaactactatttcctgctgatacatgttatgtgcctatactgggtgaaggtggtaatgatgcatatcacctctagaacagactccctagaagattgttttgtctgtgcgtgtaccaacattaaactggttttgttcaaatgcagaatacttattcagcttttatggtatttatgatattgtctcccgttatattctttgtgtttatacatccagttttcttttctgactagtagttatgaacttctgtgtaggtggttgagcttaaggctttcaacaagtttgagaa

SEQ ID NO: 111081 - DNA, 923 bp, Setaria italica
  Intron number 1 from transcript Si003336m (locus Si003029m .g) derived from phytozome v7.0 (chr-ID scaffold_5; pos 32 530972 to 32531894 reverse strand)
gccgtactacgcccagggttaccaggccgtgcaaggtacgggggatcctagtcgcctctatgattcgaattctgtgctgcttttggttgattcatttgattggatcgatgaagagtttagtcacgtgtggttggttgattaaatgcaattgccgttggagaaattaggtcggggaagccttgttggctctgctctatgcagtgcttataataatttagaaattacttaactagaattaacctcatatatgcatggtataataaagtatccccatgtagataatttgtaatcgcctatactgacgtggtcacatggcaatatggcattacaatgctctagagcatgtagataatttttttggtttaagtttaccgatgcaagctcaaaattggtttaattttggtggtatcctgccctgctgcttacctgaatctgcagttcttctgcatagttttttgccatttctactccaagttgcaggttattggtgtttctcatgccaaaattagtgattgatagagatctgtagttcatggagttcgagagaatctgaagttatataatttttctcattgaagtgttctggaatgttggaagtaaatgagcagggaatttgatgtgctggaacaaacaattagatgcaggatagttgatttttgtttgcaatgtaagttcaactaaggaatacatgagtgtctctgtgacaaactaattcaactctacaaataaatctatatgtggaaatggtcctttaacaatgcggcatgctactaacatgagtaagtcgatgattcacgcttatgatgttcatcgacagaagatataacatgaatacataaactgggactctgacctgacttggctagttcgtgatttggtgttctgtaggttatattcctgtagttgaagggaggcctgtgaga

SEQ ID NO: 111082 - DNA, 1004 bp, Setaria italica
  Intron number 1 from transcript Si005441m (locus Si005441m .g) derived from phytozome v7.0 (chr-ID scaffold_5; pos 41 727095 to 41728098)
gttgccaccgcttcacttcacatcacttgcattcagtatgattctgtccccatcgcattctattgaaatgaaatataggaatttaggtgaacataaatgttaatgtgctagcactgatttgtctggagttcagttgtttcttctgatgtttgagtttccatccagttatctggcgtgagattgaatccatgggtgttgacttcttgtttatttgatgtagttaactggctttgttgtaaaactgcaacaatgccttgttatgtattcagtcggttttgtagaatagtacatggaactgaactttatacatggcggaatccctgatatcagaatggtgggagtctttgggagcatttctctgctatcatctgttcaacagttgtcaacttcagtccaatgcatttatttcactgctgttacttggacacagacccgggtattggaattggaaatcggacttgtactcgggtgttcaatctggaaaatcttttggacatggaaatgctttttggggggccacagacacagttttagggatccatcttgaattagggttccccttggtcaatttttctttttgccatgggtattcaaataatgctggtttttcttctgcactgtacttaacttctgagaagacagtggactatagttttttttctcgaacatgcaggagaactgtgtatcattatattaagaagattgacagtggactatagttttaagaaataagtttttttctcatgtcttgaatgaaatttgcatacatttttatctgtaatctgtacaagggcaaccctttgttgttgaatatctactcattttcagcaattgcaagtaccatgactttttttttcattttgttaacatgaaagatctttgtttttaaagtagatgcctcatacctcacttcatcaattcaagatcacttaatagtatgctttgaagaatatatcttgtttgatctaagttgtcttaccttttattttcagtgagcagcaaag

SEQ ID NO: 111083 - DNA, 877 bp, Setaria italica
  Intron number 1 from transcript Si003021m (locus Si003021m .g) derived from phytozome v7.0 (chr-ID scaffold_5; pos 32 486812 to 32487688)
cccaagaagccccccaccgccttcttctacttcatgtatgtaccccgctgcgtctgcatcccgtctcttcccttctgtacctgcgcgtgttactgctctgcccgcggctcagggattgactggttcgcggtattaggggctttcttgaaagctgacagtatggcgattttctgcagcacttacctctcagtaagagctaagtgtatgttagtgctatgtgtttattcgctaccctctgatggcgatttgtaattgcttgcatttgatttgggatgctgggaggttaggaacttaggatactggaagcttttatttggtcatgcagtttgaatcctcctggtgcttggtcagagttcgcctcttagccatagatcggctagaggcaggttttagtttttgagattccgtctctcagcttcagaaattcagagctgagattattggataatatcagattagtgacgtttccagacggcaccatttcagatggacacagcccgtctttctgatgtgaagaacatctgacttgccattgaaatcagccttttatacttaatccaaagtatactgggaactggtcgactttatcagtgatttataaataaaatcatatatgttgttgctagcagaattttttatggttgcagagttttaagttgctgctgaagataacggcaataattgcattcgatttgtttaacctaaagtctttatgctgcatccatccacctcctcaaggtttcttacatatccttaggtgtaacacaaatgtgaaagttctttctgttgtttgcctttgtgcgctatgccaatttttaatgaagctgtatgttgtgttgaagggaggattttcggaagacttacaagcaagaaaatc

SEQ ID NO: 111084 - DNA, 706 bp, Setaria italica
  Intron number 1 from transcript Si034607m (locus Si034607m .g) derived from phytozome v7.0 (chr-ID scaffold_9; pos 42 48208 to 4248913 reverse strand)
tcacaccaatcatcaggacgagcttggagaagcaagtgagtgtttcttacattttgtcatacacagagtactatctgtattgcacagttgtatttggagctataaggcacttgataacctccagtgtgtattgaaaggaaaaatgacacaatttgtcattgtcatgtgcatgcagttatgggcctggaattgatcgtataaataagagattagttaagtttttttactttgaaagtctgaggattgatgatgatttgtgattacaaccataattctggaagtagttctcttattatagaatttcatttaactatctttcaaatgctgaatgcattctgtggaatagttaatcatcttcagtataacagtataagggatttgagaagcatgcaagcaaccaaatatcatgcagatacttctgattaaaccttcaggacaattcatagtgatgctcagattcatgttggtgaacattgaggttgctgctgctgttgcactaacgtgttcttgcatgatgtgggtggcatactttgatgatgtttgatatttataattattagctttagctgatgcggcagggttatgtatttctatgttgcatgtagttggggttcattctgtaattctactatgtttatagtgtaccaatccacattttgtgtgtgttgcagggttacaaaattcttggttctcatagtggagtgaa

SEQ ID NO: 111085 - DNA, 665 bp, Setaria italica
  Intron number 1 from transcript Si035922m (locus Si035922m .g) derived from phytozome v7.0 (chr-ID scaffold_9; pos 46 716502 to 46717166)
ctggcatacggaagccatacaaggctgctgaggaggtaatttgatcctttctttatcttcctcttctttgctattatcatgctcggtggattggagaaaaatcagggatcaagtttgcgtcttgcactgaattaatagggctttcatggaatctgtgctctggaacagaatattcttaagcgggttgttttcaaattgtgtcgagttggaaacttcaacattcctgccttgcattagcattttggctctgctaacttcacccaattttaaaaaggggtcgttttgaattatgtacagtacaggggcagaatttattagcgcttttttcaccaaaacaacaccaaatttactatatagtgatatttgagatatttacaagtcagaggaaaaaataagaacatttatatagcgaactacatataaaagggattaagccatcttttaagaaattttaattgacaaaaaacttagtagaggcacgggtgtttttttaaggaaaaactgggataaaagctacatgcctgtccaaagagctactttcccattttatgcacatgtttaatgaccaccctgcaccaattttctaggctctatctaactgttggtttgttgcgttcatctttcactattctaggatttatctgaactatttaaacctctcactg

SEQ ID NO: 111086 - DNA, 935 bp, Setaria italica
  Intron number 1 from transcript Si000753m (locus Si000753m .g) derived from phytozome v7.0 (chr-ID scaffold_5; pos 41 420788 to 41421722 reverse strand)
gaagaggtgagctctagctaccttgcttgcttgttttgccggcttcgtctcggttcctccttccaggttttcttgtggcatggtatccatcctccatgctccatgcatctttaattcaccggccttgttccggaattgcaattatcgctccttctgggtggagaagaatcttgcttatagaggtcacatcaccactgcagttgtggcctgcttttgttcactgtagttgcatgtgcttttgatttgatgatgatttcctctgctgttgatactcacaggacatctttccgagtttttttttcgctatagtcattacgtggttgtgagctctaacagttcgtactgttcattcaacagttgtgttcgttcaattttctgatacgtggtaggatttggatcggctgtttagcaggagttgcttcagagatagtacttgtaatctacatgaaattagaagtaaaaatacgctaactgctatgaactctctttctaatataacctgatggggggaaaatggcgtcgcctcttagatgtttcctgaatctgttgattcgtccttgcttggctcgtcgtagcgtcccctgcgaccgggagcatggggcagcaacacgcgagcatccacgtacaaatgtctctagcttccatttttggcaccctgaatagccgattgtgtttggcagagttctttaatggcatctcgcttccataattgggaagcaggcctgctttgttgatgtcatgtcttcatgcaaacaaaagcaacctgctcccttttcccagcatggagtttcttctttgtttaaaagcctattacgctattagctgtctaatttagatgatgattgcagcctcccttattgagttgtaatccaataattacaacgtccttttttcccttaggtttgcaagaggtaccgactgtactaccagcaggt

SEQ ID NO: 111087 - DNA, 779 bp, Setaria italica
  Intron number 3 from transcript Si004021m (locus Si004021m .g) derived from phytozome v7.0 (chr-ID scaffold_5; pos 39 180486 to 39181264)
ctttggttgaggtacatcaccgtttccctgcaatgtgtactaaagtgaacattattgttctttctgtttgcaaatcttgtggcttggttactggcctccatatccatctttatgacctagcaaatatgttttacattctaccgccatgtggtgctccattataatttaactaaaaatgcgagtacatgcataatctagtgtagttggtatttgaatgatcgtgcgaagggaaagcttaaggatgtcctttccttatgttatgcaagccacgttgcctttcttttcacaaaacatttgaattgatagtctaaaggctctaaagcattatatcatcaattaatttgcaataaatacctgtatccatatttataattacgtacatggatgagctattccctttctattttagttccctatgtttttattaaaaaaatcttgctaatcatctcaaatttatattgtcatataatcaactgcatgagaaattttgcaatatgatctctatttcccaccctgaaataaaagaaaatagcaagatggcttatttttattaactgcaaataactattcataaggaaacagtgaccagattgttacaaagttcatagccatcttctgaacaaagacctcatgattctagttttatgaatttatagaaatgaaactttatcacggttttttaccttcaaactgtggcacttcacatgaattgcacaatgaagatttaatattcttgcaaaaacctgagccactaatacgcagcttgcatatataggtta

SEQ ID NO: 111088 - DNA, 609 bp, Setaria italica
  Intron number 1 from transcript Si034706m (locus Si034712m .g) derived from phytozome v7.0 (chr-ID scaffold_9; pos 17 401932 to 17402540)
aaattgttctgcgggggcacaccaaggtaactgcgagcaatgtgcttctgccctcgtttatttggttttcttaattgttgctgtactgacgtgaccttgtatcttagattagctcgattgctttagggtgccattttcttttctgagataatgtagctggattaagttgatttcaagagacaaatcatcaacgtttccatgctgtttgctgactacggctttattctaggacacaccccaaaggaggcagatcgattgttgatggtgttaaagttggtttaaaccatataatatagtgaaatgccaaatgagtattaactgttggttatcttaatatcttgagaagtagtgcgatttgatggtaaaaatgggtttcaactttgaatgcctaaacttttagcaaaatgtcaattttggtgctctaattgaagctgatgaactgattttcagttacacaaacaaattaccgtattttttattcatgaaatgctaatttgctacacattctaaccatgttgctatagtttccagtacatgcattttactggttaataatcacatcatttctgtccaggttgtctcagcccttgccgttgaccatacaggatc

SEQ ID NO: 111089 - DNA, 631 bp, Setaria italica
  Intron number 1 from transcript Si033979m (locus Si033977m .g) derived from phytozome v7.0 (chr-ID scaffold_9; pos 51 286327 to 51286957 reverse strand)
gcctcagcgcgtgagttgtagggatcatggttttcggctgtatagatgggtgctcccttgttttgtcgccgccttctttctcagtgcaatttgcggtcgtattttctgctccaagtggctctattcgcttgtgccaaatagaaaaatcagtgtgattttgttttgagctatggttgctgtaattgtggatgattataggtgtgatctagctcggttttattttataatttctgctgggaatgggtggaaatcaataaaactaattgaaccatataggtttgaggtgtaccatgttgatatcagtcagtgagcatgtgactttgctcgatccactcattcttcaaaagaaattcgccatctaaagtcataaaatttgttagcagtgtttgttctagaatacatgtagtacttgctgatccgttgtgaccagtttgtattggcagtgttagcatttgagctcctatatgagttacagagttattctttgctggaggtggggttctgggtagttgtgctatttcaatttcttatcttgtcaagtactaattgtagccttgttcagatggtgaccaatggccttggggcaaaaagggagaatgcagggacaaaaaaatccccccagcaaattcag

SEQ ID NO: 111090 - DNA, 815 bp, Setaria italica
  Intron number 4 from transcript Si004443m (locus Si004443m .g) derived from phytozome v7.0 (chr-ID scaffold_5; pos 41 377297 to 41378111)
acgacttgcagcttgagtacttggatctttatcttgtatgcatcttccatttcagaattatatttcactacctagttttttttcctcatctagcttttgtgttcttactatctcactgtgtgtctgtattgaatattgagattctactccactgttgcacattgcaatcctcttatcttccactagtatagaaatgaactgtacagccggttaaaaaataacagcagagtaggtttctgtgtccaagtatcatatcagcacaattctgtgctactgttctcttggggtattaatctggagtacactaaactcaaaacttttaccgggttcatcaacaaatttgtgttatcatgcccgcccattgcttagttatttaatagtttataacgtgtaaatgggaaatgtggtttcctctatattgtccatggatatatgggttcctattcttgtaatctagtcacacatccacatgaccacatccaactcaaagagttattttaaattattcactatttaaaactcatgttccatatgatttgctacagatttatattatgtttctaacttttggtgtggattagtttattatctcaagtttactatgggcatcatttttggcatattgaatactaggaagatactatatgtttgatgacttttatttttttattttaattgtataatgttatcctttgtggtagggttagatgattacctattggagctatttaaccctgttttgatgaataatagttgtttaatcagcgtacaattttatagatccattggccatttagaatcaagaaggggaccgg

SEQ ID NO: 111091 - DNA, 928 bp, Setaria italica
  Intron number 4 from transcript Si003090m (locus Si003090m .g) derived from phytozome v7.0 (chr-ID scaffold_5; pos 46 894000 to 46894927 reverse strand)
aggtgagtttgattttttatatttaatgtattttgcgaatatctttgttagaaatgcgttgtccattcaattttatgacttaacagttaactcagaattctgtctttccatacgtaggtagtgtataattcataaaattcctgttttcctagtcatcacacgcatgaagcctctgctgaatgccagtgcttgtagccatcttaagcacgctattataaaatgttagtctacttgcttgaagctgtgatcaccttagtaccacataaaccttgtattcttgctcagttgttctggttgatgcctttgcctcttgtcctggaatattacatcgattaacatatcctttttcactgattcttgtctttccaccagcatcattcttatttttatgtcagtagatatacagcttttttttttgctcttacttgttgctgcatataagccatgcacgtgctatgaattttaatcaagttaaccctgagtccacgatcagttcgttgagctgtcaaaagatgtaaaagaaatacagatattgattaaacttgaaattctgaggcaaattatttcttagttgcacgttttgccatggtaaccatgtgggtatgaggttcatgttttgcgctggtttatatctgtaccgtttccttcaggcagcaagatacattgatttttttttccataaagtagttttaatggtattcattagctttgtttttgttttcttgtcctggcactaaagcatcaagttattccttatatttctttttccttcagttgctaaaagattaaaattgtgtatgctggttaactcaaatgtgctagccaagataagtctagccatatatgtttctacagtagctatgtgaagtttgtatgttttgcattggtttgatatctgtacccccatgcttttccttcaggcagcagg

SEQ ID NO: 111092 - DNA, 355 bp, Setaria italica
  Intron number 3 from transcript Si003090m (locus Si003090m .g) derived from phytozome v7.0 (chr-ID scaffold_5; pos 46 895040 to 46895394 reverse strand)
gacgaagaaactggactggttctgcccgtaatcaggtacatttgatattccatccttcattccatacttgtttttgcccccataaaacagcaactcttcaatgctttgatgattgaactctttgatattttggattaataaggaggtgtattttaagcatgcataagttacagaattgcagcttgcatggcatcctgtaatatgaagaaaaggaaagacaactgttagggatattatgttactactatgtcccgaattctgtagttgacaatttactgtttgtttattctggatccccacttacgcatggacatattcaggttggtacagtcaggagagctatcgaaaaggggaa

SEQ ID NO: 111093 - DNA, 890 bp, Setaria italica
  Intron number 1 from transcript Si037401m (locus Si037401m .g) derived from phytozome v7.0 (chr-ID scaffold_9; pos 90 7196 to 908085)
ccgcgagcgcggggaggcggaggacggcggcggcggtgggcaggataaggaagagacagtgtgggcagggaagagagagggaaaaataatagggagagaaacaaagtaagagaaaaaaaagaggaataaaaaagagaaaaatagtacattggaaaaaagagaaaataaattggaatgcagtgcggcatctcaatagatagtgtctacgtgaaaaaagctaactaagtgctatcctcagtactgcatttcatatttagatcctgtttgcttttaacatttttttaacacttccctatccaaacacttgtgttaaaagtggggtgttaaagtttaccacctcatttttcataaacacatggaggggtgttaaaacttgctaaaggtgttaaaagtggtccccctctccactttttccccggttaccccttctctctcctccctctctctccgccggccacaaatgagggggcaatggagtcatttcccactaaaggtgttaaagtttaacacaacatccaaacatcgcaatgtgttaaattttagcactctatttgagagtgttaaaactttaacacttgttaaattttaacacagggtatccaaacaggctcttaaacctttctccattcctttcaattagtggcagaccattgaaatgatgtaggcaaagatggaaaaaaaataccaccatgttgtcttatgcaacctatttttgagtggcatgattgtgccacgtgtcagtgtaggccactagataaacttttttgttgcaaatttgcaatgactgccatcatccaacctaaggtttgaagaaagatgcagctgttgaaatcttgtcggacattatgtcctattgcaggtcgtacgtgcaaagaaagcagttgttagca

SEQ ID NO: 111094 - DNA, 880 bp, Setaria italica
  Intron number 1 from transcript Si001574m (locus Si001574m .g) derived from phytozome v7.0 (chr-ID scaffold_5; pos 18 670583 to 18671462)
tccacccggccttggatcgaccccttctctcgtcggtaagggatccctgctcggatggaaccgcccgcccgtccgttcgtttcatatccttttgttttcgctgctgtggaaaggagtcataatcgccgaatcagtttcctttcttccaaaaattttgcgggctgccgctgaatcccccaatacgcattatgcccgctcgtgatgccctttgccgcgctattcggacgcctagtgccgtccgctcaagatcaatgattgcagttagagctgccgggaaattcggacttcgttgcgactattttttaattttacttattattttccttgtccttttcgtccatttaccttttgattgattggatgcctccagcccatggatttgtataatgctgttttgggaacagacaggttctcaccttgcctgtcatgccttgtgctgtaccaccagacaacgttgctttaatttatatacctctcgtgttgttaggataagaaatattcttgtaaaattcgactcaaggctctgtattttactgtctcataagctgatataagcatgctttcttcagtgaattcctggattgagttaagcttaatatttacaagtctctaaaggaaatttgcaacatgcatcttgacattcagtgaagatgttaagatcatgagaagccaaaaggcatcacttgtttccacatgcactctaggaacaccctcactttctactttggcagtttttaaagttatcagttaacaatgtcaaatgatgccaaagccataaatagaatgattagttactgttttattgtctcttgcccaaaaccatgacctgaaagcttaattcctctcaagttcatacccatcatctttgcaggttactaaa

SEQ ID NO: 111095 - DNA, 671 bp, Setaria italica
  Intron number 1 from transcript Si001265m (locus Si001265m .g) derived from phytozome v7.0 (chr-ID scaffold_5; pos 52 93538 to 5294208)
tggagactcgggccattttactcaggtgctcttctttctgttgaaattacaacttgcatgaaaccgtatcgaaatataggcatgtgacaacatacaagtattactggcggttattatatatttgtagtgttagcaattttattagcaatggtgtactgatactatggaatttaaacagcaggtttcttttgcaatcagcatcatatgacacttctactaagtgctgggattatttggtggcattgttttctattcattatctgcgattcagagtgaataataaaaaaatgcttcaaaatttttaatagcagtatatggcaatgcgagtcatatgaattaatgcacaaaatcacacttcaccttttgacacttttatcttgtgttttttgccctacatggttagtgcaaggttagaaagtaagccatgttgcctggtcagtggaatcctgcagtttttgtttttactatctgctttgtatttaccctttttctttggtgtatcctgggtactccttctttttctttggtgtaaactgtaattgacgataccatttttattttatcctctcctgctaagtgctaccataagaatgtcaaagccttctctccatttaacattgccccttttctgaacagggttgtccatccacacttggggcaaataggagaaa

SEQ ID NO: 111096 - DNA, 911 bp, Setaria italica
  Intron number 1 from transcript Si040770m (locus Si040770m .g) derived from phytozome v7.0 (chr-ID scaffold_9; pos 57 357718 to 57358628)
gcgattcaagctctccaaggctgcccgcaatctaggtgtgcatcatctcctcctccgcgccatgtgaagtgcgaatctacgatttggatgctatttccacgtcctggggtgttggattgatcggtaggtttagattagatccaatcttttgggtttaggtgaggttttggggttggatcactttggcaatcctgaacagcagacctataccctacgtcgcttcagagtctgttggaggctacatgattcggggcttgattgggacattctgaatccactggaaagaattgttgattggctgttgtaaacaaactgtgtttggtttatcagaaattagtggtacaaagaaaatgtgggatttcatttgctcggtacttgagagattagataaaacacaccgtggtggaagtgaaaagggagatcttgacatgcacaaggtttatttgcaggaggtttaattcctttagtgtggaacattttgcttgcctgtaaactgaaccagcagcacttgtctgggttttatttcttattgcctacaaatttcaagagcaaagtagctgtgtcctattcatatatgttgtgatgcagtagtatccctcatgaataaaatttgcaattcccaaaattatgatcctctttctccgcggatgcttcccagtcaaggtcttgcatttctaatgatggttttctctgaaaaaaaattgcaatttcttataagttgttattacctagagattcttcaacatgtttgctaacacatcagaaacggttaccaacaagagaaataattcatgttactatcttagtttctgaatttgccgtatacgttttacaagcctagcaactgccgtacacatgtagtgcacaactgaatctatcttgctttgtttgttccagtgttccagctccag

SEQ ID NO: 111097 - DNA, 659 bp, Setaria italica
  Intron number 3 from transcript Si000717m (locus Si000717m .g) derived from phytozome v7.0 (chr-ID scaffold_5; pos 11 143110 to 11143768 reverse strand)
acgccggccggccgacggcggcgctcagatcaccggtgagttcaattcccgctcatcatccgtttcattacgtgttgaattgcggctagtgtgtaggcagaactgaaagccgcgttccggtcctccgtctaatgtgttgatcttatccaatgggtcgtgttttagtgttttctttttaaaaagcaaacccagtcggtcgcgttacggaagagaaagggcagctttggactgctcattcatcccctttgtggtagggaaaaaagatgaactggtcctcatgccgccattagtgtgtttggtgcgtcgcatcatagctttcgccccgccccggcccggcaaccttgaatctccttgtctccaatcacacaaatggcttccaacaattgcctaatctggcagaccggccgacctttatgatcctgcttcatcagtaaaaaaatcatgatatccacacattttcatgtcaaaaacgaaattactattgacatttttaccccaaccataacagtaattcaatgaaatttgtagctttcatcaaaaagtaaaaaaaaaatcgttagtttcaagtgtggaattctcactgttcgatcagcgttgcttctgtcgatttttcactagcatttcttcgcaccgccgtgtgctgaattctgctgcatcag

SEQ ID NO: 111098 - DNA, 641 bp, Setaria italica
  Intron number 3 from transcript Si036593m (locus Si036593m .g) derived from phytozome v7.0 (chr-ID scaffold_9; pos 52 974060 to 52974700 reverse strand)
ctcccagtatgtatacatatgaagtttccaaagccaatggatggcctcttttctagtttctttcaaatgttctgccctttgtacatttggtatgatgtgtttctttagtggggtttgatctgtcacctttaagaccttaatgctccgtaacatactgtaagattcaagttagatttcttcaatggggtttagtctgtctactaaggcttactggtatcatagagattcaattaatgcttctttgactaggttttttctacctttaagtggcatctttcctgcaatggcatgtacttgatagtttattaagttggttgattgaaatgtcaatgccaagagcctcataagtaactgaaatccgtatcatacttctctacatccttataagcttcctttgttggagatgtcgcatttcatcaattttgaaaatatattagtatgttcttttcatgtttctgtgatgaatagttcaaatttccacttcaagaaaaaatggagtgtgtgatatggatggcttttgctcatagatttttttgaatttcttttggtcaaggttccaatactctgtagacgtctgcatcttagttaaaaatttcctcatgttactgttcaacctgtctgctttgactcgacaggcgttg

SEQ ID NO: 111099 - DNA, 861 bp, Setaria italica
  Intron number 1 from transcript Si003325m (locus Si003325m .g) derived from phytozome v7.0 (chr-ID scaffold_5; pos 11 773427 to 11774287 reverse strand)
ggcccagtccgacgccgtcccgcaggtcagtgaatagggtaagcaagcagatccttagccagattgttgtggacgctgcgcgctatgttgccttcattccgccaattatgttctctgacaaaactgaagaactgcactacacctgcagctcttcagtttcgtcagaaaacttcaggtcttgatattgtggccaagtgaagatcgatcaatctaccactaccagagcaatttataaatctctctgttggtcggggcacgagttcaaagtacagaagatttttttttcttgccgtcacctttgtaatgtcgattctgatttaagcattatgtgctgcaatgaattttattgctcaggatgtttctaccttttttttccccgacgaaggcacaggtcattcttgtaaacagttattagtaaaatcaccaaatttaaaccactaacttgctatgtaaaatctgccctcttggtacttgattataaaaacttaaagtttatttatgctaattatcatgtcggccttcactgaactttataaaatttgctattttctaaactctgctgttgaaagcaaaggggtagaacagtggcttctttatttgtgaatttgtgatattgatcattccacggcttaataggctttttctaaactgatgatcgtttccatattcttttgcaactctaatttctggaaatatgagcagaaatgtttccgatgtatattaacttctaagatgtttggtactgattcccatttcagttcatacaaatactttcaacagtttttattcatttttattgcaatcttatgaatattcaaaacctacattttgcaggtgaaacctgaagaaatcactgcaata

SEQ ID NO: 111100 - DNA, 450 bp, Setaria italica
  Intron number 2 from transcript Si036029m (locus Si036029m .g) derived from phytozome v7.0 (chr-ID scaffold_9; pos 46 972689 to 46973138 reverse strand)
aaggcaggtccactcccatttttgttacgattttctcgcttgttctggcataagcattgtgtaattgccagcatcccaatgcctaactcgatgaagggtctacatctattagtatgttctgtctggaaaaactattgatatatcatgtgataagtaatagaactggccaaggttgttgatggaaggaaactgaagtgtcaaatgctagtagggtgtatgatgtaggcttaaaatggactagttgagagagctactaaaacataattagcataactccctgcagaattaatgcctactccacagtccattcttttccggcaaatgtcttaggtacatgtttgttcgactgctttgctgtgcaaacattagtgagcattcgtccttactaacttattaccttttgaattttctgcagagctatcaattgctttgtgagcgatatccaaattt

SEQ ID NO: 111101 - DNA, 755 bp, Setaria italica
  Intron number 1 from transcript Si000687m (locus Si000687m .g) derived from phytozome v7.0 (chr-ID scaffold_5; pos 29 506242 to 29506996 reverse strand)
gtgaaggttccctgcctaaagaaaaacatagagtaatacgatggattggataaatcagtagagttgttttggtgtctggacctgaagctttagcttgaagtgttttttattattttgtatgagctgatagtaccaggctagcacctttgatgcttgcacatggatgtgtgccttttgtattcttcaggatattatgataatgaatagagatcaaagaattaaattgagaagtgtgcaaacctaatggtgctctcagtcaacaacagttccagatttagtggtggctagatgcagaagcaatcagactagctttgttttctatggccaataatattttaatatttcaacaaccagtttagattgttagctttattttctatggtgtgtttgcagcaggttaccatgactggcgaccaactgcaggtatcacgtaagccacaatactgaactgaatcttttgtttcacatggtagcaaaagtatgagctccctacacaaggcatgttaattttcttacgccattagaattgaaactagaattattgggttgtgtgagtattagactcagaacgttctattaggttattatatctgccatacgtacccctcatagtagagtttttataccattaataaagatgctagttcattcagtgaaagaatacgtacccatgtataatgcacctctataattaacaactcttttcctcccccatgccaggcagctctgccatcatccctccgagctgtggtttc

SEQ ID NO: 111102 - DNA, 839 bp, Setaria italica
  Intron number 1 from transcript Si001476m (locus Si001083m .g) derived from phytozome v7.0 (chr-ID scaffold_5; pos 42 639482 to 42640320 reverse strand)
gcgtcgcgcagctcaagcagctctacagggataaggtgtgtgtttgagatatcatgggttatcttctacggagtatgttgttgtttgtaggcttgtagcacatgcagatttctcgtatttgttaatagcaattgatgggttcatttaatagctgacggctgtattatgaaaaatcaatggcaggcgcgtgagttgttgcactcgtttgcaatagttcatatcacagctagattatatctcaatttgcatttagcttcaaaactagactttaacaccagcagacatcactagggataaactgatttcaagtggctcagattatcatttgtgaggccaccatcctcagattgacataatgtaaatgttgttagtttgcttccaagttccaacctttttttccgaacccgacccaacctgacaaatgattaggagagaaaaaaaaatctgaatattcaaatttcatgatctccttatgcgtggcctgtcaaaacattacggattgttatggcgcaaggttagaactgtattttgtcatttgtgcaggattaaaatctgaatagtcgtcttagtaaagttcctacaagaaaacagcaaaaaaaaaacttttatggttgactgtgacctactttttgctcttactttattttggcaaccctgcagtgtgactgttctggtaaatttttctattgaatgatgttcatttaatctaagtctgccatgcagctattctagtaatttttctactgaatgatgttcatttaatctaagttaaatgtaatttgtgcgaagtgctaacattttgtgagtatttccagttctttggcaagtctaacgagaag

SEQ ID NO: 111103 - DNA, 786 bp, Setaria italica
  Intron number 2 from transcript Si002558m (locus Si002559m .g) derived from phytozome v7.0 (chr-ID scaffold_5; pos 33 703221 to 33704006 reverse strand)
tggagaccccctgctcctgcaagggcagcttgaaggcaagcttcatttcctctgcttcttcttttcggtgtccccgtttgatccttggctatcccatgaagtttgcatcgaaatatgattacagctcatacgacatttaccttttcattttttccaaaaagtagatttattgtgagatttttaataacttagcaggagagctaccatatcatataagaagaagggtgtccgggattacaagtgcgatattacataaattaaattggtcttgttctcgaaataaatactaagcgaactaaatttactgtgagtaagagattgcagagacgattgcaaataagaaaaaaaatacacgcaataaaattaggcttgattgatgctgccaataataacaagccaacaagttcagagcctgtttggaattcattactccataatcatggaatattgcaccctttgatgatattttcttatattccaacaaattgctggctacattaaattttcttttcatttctaacaagatgctaccgcgtaacaaaattgctattattctagaatgcaatcagggattctcttgtgttatcagttatcgacttatcacaatcgaattggacctcccaatagatgtcggtatcgccatctgacttccaccgcaatccagactagactaatttctttccatgctatttttccatcaccatgcgcaacagatttttgtactgccccatgaacggaggtcttacttgaattagtttgttgctggctgcagtacgctcaccacag

SEQ ID NO: 111104 - DNA, 820 bp, Setaria italica
  Intron number 1 from transcript Si000878m (locus Si000878m .g) derived from phytozome v7.0 (chr-ID scaffold_5; pos 45 294546 to 45295365 reverse strand)
cccgcggcgccgacgccttccagaagctcgagaaggtgaggacgatcctttccgccgcgcgcccgtgcttgctgatcggcaattaattaccggaaaaagtttgggcttttcatgggaacagcgggttgttggggaaagatttgaacttgccttttctcatccttgtttcgatttgttcgtgcttgtcgtacgcgatcgtcggttgtggaattcggcgagtaatttgagttcttgctttttctggttatcgtaattgagttgttggcgtgtcacctactccaaaaaaagtccttcctcactttcttgttctgagttcaagagagcaatggattctttattgttctgttattatgagttgtaagagtcaaagagagaaaataaagcaaatgatgatctcagcacataaacaagctccgaattcctagaagtgcttaaaaataagcagggatgagcaaatccccagctttcctgagatttaaaaacgacacagctccatcatctacgttcatactttatatgcttgtccgtgtcacaagaattcgtaattcgtaaggacaaatggaaaaggtcaacttgcaatgtgtctattgattcgattggagtacctgtaagtgttatcctctctggtcttttcaaagaaacgagttgctgtagatttttttctagcttttttttagagccgagtcagtgaaaagaaagaaatcagttaaattccattgcttgcctcattcgattggagatattttctaaaaaatggttgcgatcttttttccctgtgccgccagattgggtcaggaacgtacagcaacgtgtacaaggc

SEQ ID NO: 111105 - DNA, 1007 bp, Setaria italica
  Intron number 1 from transcript Si002163m (locus Si002163m .g) derived from phytozome v7.0 (chr-ID scaffold_5; pos 99 41812 to 9942818 reverse strand)
cccgagtgcatcgcccgcgacctcctccgggtacgcatcatgtccaagtatttataaggtttgagtccagtttcaatagaaatttcatagagagtttcatcagcattaatttctatactaagggcctgtttggatataccctcataaactttaggacactcataaagtttaggagctagaaattggtagtcctaaaatttatgagtgggctgtttggatggaatcataatctttaggatgttagaggggaaatgacttttgtacccctaattactccacccctgctccgtttctagcgccgtggagagagaaggggaggggcaagagaggtaaatgatgggttggggaccacttttaggagaaaaataacccattatgatggtttggtcctcctaatgaaaagagcactcctaaacattatgaatgcacttttatgacatatgtttggatgtactaagtcctaaaagtggactaaaagtgaaatcctaaagattatgagtgtgtatccaaacaggccctaacttgcaatgtttataatgagagagaggatgaagttttacggaaggagagagaaatttcatcaccataaaatcccgcaggcacagttatcaagttaggcccgatggtccagatgattaagcatgctactatttgcgaagcaacttaattaagataattaatcatctacgtgcatagccaactacctccgattataattaagcatgatttgccacgattgcacacgcaatgctagttatttttttccttctggttttagggagacgtaaaaaaaaagataaggttttcttttctagatagctaaagaaaggacaattgctatatgttcataaaaaatctctcggttttgagttaaaaaaaaactctccgttttaaatatattatgtttagaacaagagttagttcaaaattttagaaatggatacagtagtaacggtgtattgacacatgcagaaatccttggaggaccgaagagaggagaagatcga

SEQ ID NO: 111106 - DNA, 883 bp, Setaria italica
  Intron number 2 from transcript Si036656m (locus Si036656m .g) derived from phytozome v7.0 (chr-ID scaffold_9; pos 50 312880 to 50313762 reverse strand)
gcccaacaagcgcaagctcgcgccccgcaagtctggtgcgtgagaggaacacaactttcgctctcctttgtatttcccccaattcagctgtctggaatttagctgcaatttatcagcaattgttgtaaatccgagtagtagtaccaactatcatctaggacgctctatttagttctccggctgcttgaacttgtttggttcaatcaaacagaagtctgctactgcgctaggctttttcagactgtttagagggcttatccggggtctcttttattttggttattatggatgttgactcttgggtgtgaaattatgatcacatcaagttatcagccaatagttagttcttgtaaggattccatggtgcttcaggttccctcttggtgtaaacccaaagcctgttattacctttagatattcaccgcatgtttgggtgttgcatgctgcgcctcatgtgtatgggtgcttcagctttaactttatccatccaactattatgctttgcatcctgtttttttcctgataatttcacttaatacaataagaggaagaagaaaaaagctgaatgtgttttttagttgtcaagaacaacacgtacaatgtagttggtgagctgtgatcattatgtctacagtagcctagcttcatttgccatttcatatttagatatgctgtttataattttatccttcgtaaataacacacttggtgattgtttgctactttttttttactatattgttgttgccctttagtagtaccatacactttctgtaacttcagttgtccacacacaatttgtgtcttcttttggcagctgtttttataactctttcctccctttccagttaagatcgggagacctggttatagagtaaccaag

SEQ ID NO: 111107 - DNA, 537 bp, Setaria italica
  Intron number 1 from transcript Si005110m (locus Si005110m .g) derived from phytozome v7.0 (chr-ID scaffold_5; pos 84 8868 to 849404 reverse strand)
gtggagaagaggcaactgattttttaggtctgcaggttcttcctttttcttcatgttttttttattatttatggctctatttgagcactcgtgtgtgtttgtaacatgttttcttaatttggtgacttattttgggacaatcaagatatctggagggatctgggtgtggaagttgcatcaaaggtgtctagaagtgttgtctcaattggtttgtccgatggtgattattctgttgtacccttaatttttttcaaaatatatgtctaaaatcattagttttgaatgatataatttatgatcttgtagggcaaaatgtgctatatgcatcctctggtgtagttatagaatgtcagtcttccttcacaaagtttgtgacttcagcaagtttggttagagctttacatgattctgaaacaaatgaccatacggttaaggtttgtgctgctgataattatttactaattgctattgtttactttacataactgtgaacattctgtgctgttttgcttttatcaatatagattgtagtacggc

SEQ ID NO: 111108 - DNA, 723 bp, Setaria italica
  Intron number 3 from transcript Si039461m (locus Si039461m .g) derived from phytozome v7.0 (chr-ID scaffold_9; pos 62 64900 to 6265622)
taaacatcacgcttcagtatattctgggttttctggtaatatgcacttcctttaactcattaaatacttatgtttatgctgtgtaagtgcttaattgttttatatgtgtttaagcctagtatagaaatttgcaaaagcacattatactggtgtaactttgtactcaacaagtgagtagcatgttctcattttcagatgtgccagattctagaagctaggcctatttacatgggtttaaataaacgaaagggctgttctaattcagtgaaatatccatctgaagtataatccatgtgttggggggttgattggaattgcagcgtagggtttatcgtgggggttatgcttgatgttggtgatttgagtaggcctccttatacagaaatattctcctaacaattttcatttatgtaatcaatctaaataataacctgatagataaggtaaaataattcatggcctagggaaacaactaaatattaaggtaaaataaatatccttatatgtaagattcttccttcctaagtcctgtcttgcccactgctgctgtatcgctgggactattaatgctacactaatgcattctaactgccattgcatatcagctgcggcaacgcaatagatgcatcttcctattaaatatttttgctcttacttattgttcatacttccttttgtctatatttgattttatacattggtaacttttttgtgtaaagccag

SEQ ID NO: 111109 - DNA, 843 bp, Setaria italica
  Intron number 2 from transcript Si002176m (locus Si002062m .g) derived from phytozome v7.0 (chr-ID scaffold_5; pos 11 198119 to 11198961)
tctgcaaaggtgccaaggtactgtttcacatacttaagggcccaccattaatgagtacacagactttttaagttacatttttttctgtcattggacgtaattctctgtcattcatgatttgtttcagtcttgagcccgctcttgtttgattgaaacaagatattaaaatgtacttagcgcatgcttcttattgctttgttctaatagaaaggagtaaaaaaacaagttttggtttcaaaagcatgcattaaactggcatgctcatgcctgtccacaaggttatattatctgaagattcatatatagatatattaagcttcatgattgattgtcaatttttgtttgccaatttgactttaagattaacagtttgcagattttttttaagtcgtgtacttttctatttctgcaataacagcccagatataaatgagagcagctgtcaaatggtttccatgatacctatatatctgctgctctttagttgtacctatctctataagaaatacaatgtgaattcaactcagtttgagtggattggatactgaatagtgataacatttccattattttttaccctgttcacaaacttgccactagtatctttattactccccccccccccctccaaaattataggtcgttttggcttttttaggtgcatagtttttgctatgcgcctagatatagtatatgtctagatgcataataatatctatgaacctagaaaagccaaaacgacctacaatttgaaacggagggagtatattgtactgcatcatggactcattgtgcctactgatttaaggttaatatttcaggcgcctagaaattacgtctagt

SEQ ID NO: 111110 - DNA, 803 bp, Setaria italica
  Intron number 2 from transcript Si036426m (locus Si036426m .g) derived from phytozome v7.0 (chr-ID scaffold_9; pos 36 980679 to 36981481 reverse strand)
catacgagaggcttgttcctagatcactgtacgaggttagtatattacaactgacaaatcgattgcatccagttatactgttctgcagccatttgtttgtgatatatcggttgtttggtggcttgtgatctgatggtatggtgtagttgtaaaccaaatatctatgtagggaacatatataagctaaatattttgttgagctggtcagattaaataggacatgcttcttagttcaacttttgataacttttaatctgattttccttgaacaatattgtggtgaatgcatccaaaccatcaagttcagctttgttagtcatgatatcacccattagatcctgcgtatgatcaattcttcaagtgttcatgagtgattcttttttagtctgattgaatgatgagttcgagattatttggcagactggtctttaaagtcttcaactatgctggtaactgaagtggactgtggagctggtatcgatagctgggcattaaaatttgccaacatagtgcattggttttgacaacaatagcaccaatgcagcaacattgttgattttttttattaatgagctgttgtattgttctcatttttatcatttgcactactgtattcctttacatgttaactgcttttgatgtgaatttagatgttgtataggatggtgataattcaccaagtgccatgatatgctgatgtatcagatcaattcatgttcctatgttagttatttcttatttttgtctgttgtgatctctttttcggaagcataagtaattggataatgtctgattttaggctc

SEQ ID NO: 111111 - DNA, 589 bp, Setaria italica
  Intron number 4 from transcript Si001886m (locus Si001585m .g) derived from phytozome v7.0 (chr-ID scaffold_5; pos 31 899372 to 31899960 reverse strand)
actaccgctacaaaaagtggcattactatctcctggtgagtctaatactgtctcacattttgatgtcctggaagtgcatcaaatatcagaaacgtgcttgaatttttctcagttcatcaacttatgtgtgttggtttcactgatttagtgttctacctaacttaagcatagctgttatcttattctgcacaactagtgaactgatcttacaatagaaaactttgacaaagatggagtgaagtggcacgtgttagtaggatgagtggatgatactgttttgtgacactggggcaacttattgcagttgcacaatatgtgtgtaaactattgtcatatatctctttatttttcctttgaaaaatataaaagagaaccccttgctaatgatgagtggatgataaaaagtatgcctcagtatgtccagatcaacattgtaggttctctttcattttgtagtttgaatgctcttagtcactgttaagtttgctggacgccatcttgatattctcttgatggaatgtcttccatatgtaatcttgtgtgtaaatcttgggatattgttttccctttttccaggacttctgctact

SEQ ID NO: 111112 - DNA, 620 bp, Setaria italica
  Intron number 2 from transcript Si000403m (locus Si000403m .g) derived from phytozome v7.0 (chr-ID scaffold_5; pos 24 285977 to 24286596 reverse strand)
gattcagctgtctatctgcggatttacttagttgggtacgtgatttgtattcgatatactgtggtcatattttaatgcttttgtttgtcatatcagtttctctctccagttgcacctgagataggacattactgactactagtttctgtcaaaggaggtttctgacagcctagacatatttgtaaatagagcatccttttggtttacaaatggtcaatcgacatcataatgtcgctaattattgtattaatctgcaatactaaaaatacatttgaaaggcttcgcaaaaggaatgaactggtgctaccagctttgttgctagctatgttggctaattcagggctaggtctttgctctgtttggttatgccaactactctatattagactactaatttgccaattggatatctagtctccaggattccttctggagaaaagaaaagggaatgcacccaattcgatatgtttctattgaatcaaaacgtttgctgttcccacttgctttatgtttctattgttcacattgctgcccatctccttttttacttagcttttacttatttacttgtttcgatcgttgcaggcttaaaatatttgttccaatcacaattctagcat

SEQ ID NO: 111113 - DNA, 692 bp, Setaria italica
  Intron number 1 from transcript Si002171m (locus Si001408m .g) derived from phytozome v7.0 (chr-ID scaffold_5; pos 50 19653 to 5020344 reverse strand)
ccattgggatctctagaagaccatctgcgttagtttctttggtttatattggaaaagaataatatatgccattgggagcagctcaatttttttcctaggtgccatttgtaatattgtcagaacactgttaatataaaaacattgggtatttcatatcatgtccctcatcatttttttccctttaagcatatctaagtactcgaacatgaccaggtaaactgttctagcatatgggaatgctccactaattcaactgtcagttcttatcacaaattaggagagaaaagcagaaatgtgactgaacttagtcaaacatggtaagataaacggttctagtttacagaatgctctattaatttagctgtctattcaggaaagatatcagaaatgtggactgaacttcagattggagatcctacctagttagagtttaccataaccaacacattgaataaaatttctaaggcattggcttcttaaggatccgccctgacatgtcatttaccttgaagtctttgtatctgatttgttacttctgtaatggttagcgtttgtttactaccacttgtattacacttattcatgaatttgcttcacattttttttgctacttacttgataccccattaaaaaaaataactttgatactttcaacagatcttgcacctgatcaagaacctttagattggaaa

SEQ ID NO: 111114 - DNA, 1013 bp, Setaria italica
  Intron number 2 from transcript Si001521m (locus Si001071m .g) derived from phytozome v7.0 (chr-ID scaffold_5; pos 86 49019 to 8650031)
agctctgggataccattgccggtggtgactcggaggtaattttgattgcgttctatgtctcaatttcattaagctattttcacttctagttgactttcttacttcttggatgccctttctgtgtgtatctctagtagctcgttagagctaccctgagatttgtgtgaaaggctattggaaaattgaaattctgttgacatcagagagatcactcgtgtctcttgaaggatatcataatgcttcctagcaatatactagaaatttttatcagtcaattgactttggaattgttaagtggtggtcattggctgagtttttcttgatggtgatgcgatcattgatttagtttgtatagcagtgatgttggttcatccagaagctatttgtttcctagggaattcagattgttcttctattgtaatgtttatagccagtcctttgtgatcaggtgtattttagatagcatctccactattttcatgtagtatttttaaagtaaactttgtaggctatttagatgtcaaatgtggtgcttggttatatgatggtctatttatatgcctcttattaattttgcaagttagtattttgcttatgagagaacttatagagctgtataatctgtttgtgatatcttatttccaaggaagatagtataactagaatgctgctccgttgaattctgtttatggaagataccttaactttatttttagatgacatggcaattgagggcttctttgtagagatacggtttaaggtgataatgcatctagtgggttatcattattagtttttatctcagttcttgcatttctttttctttatagaaaattgcttacgcagattgggttgtgtaaaaaggttaggtgcatatcaattatcaaatcagatcatcgtaacttgttagctgcaataccactttaccagcttttaattccttttagctgctacttccattgtcttggacatactaacactcaccacatgccatttaaatctggtggagcagg

SEQ ID NO: 111115 - DNA, 379 bp, Setaria italica
  Intron number 3 from transcript Si000317m (locus Si000317m .g) derived from phytozome v7.0 (chr-ID scaffold_5; pos 32 133703 to 32134081 reverse strand)
attggcccctacgtctgcgccgagtggaattttgggtaaggggaacttgctcggttttgctccatttctgtatgaaatgttttgggccacattgatggtcttgctgtgaccattggtgttttttgaacgtaagagtgtataagtttcaagtgaagaaaaaaacaagcggagatttggtagttaatttggtttttgaagtagctttcatgctcttgtagttgacagtgagtgtttgcctgtaatcgtagtcctgtgctttgaatttagccagtgaggaataattaatatagatccattgacgtcaaggtgatgtgaagtatgctaaactatgttcctttccctctttttggttgcagtggtttccctgtttggcttaagt

SEQ ID NO: 111116 - DNA, 560 bp, Setaria italica
  Intron number 2 from transcript Si001296m (locus Si001296m .g) derived from phytozome v7.0 (chr-ID scaffold_5; pos 46 356259 to 46356818)
attttacaccagattttgggctcaagcttcgcacggtatgttctcttatcacaggatctttctatgcttctcttctgttccattactgacaattcttctattggatggtacggcataattttcatgtcggccaaaaggatggtagtgtccataaacagcccagtttgactgctgaaattgtttgtcagaaatcagatgtaggactatgtaggtgtaggaataggatccttacatctaatcagttatcacaatgggttgtctttctctatcttgttctgttcgggagcatatctgatttctgttttcttggaagttcatctgtggcccaaaatgatgacacttccatcaccattcccaataaggcaaaattcttaaatcaaggcaatccttttggttttttgagttttcctgttccaaaacagcgcagtttgagtactctttatctgtttttttcccgaagtaactgtatctgattattgcaaagcttattcttattccattgatttttttttaaaaaaattgaagattgctgagaagcacaactttttgatctttgaaga

SEQ ID NO: 111117 - DNA, 777 bp, Setaria italica
  Intron number 2 from transcript Si000361m (locus Si000361m .g) derived from phytozome v7.0 (chr-ID scaffold_5; pos 10 510625 to 10511401)
tcgcccgcttaagaagcccacactcctcgcgataggtatgtgttcttcttacttggacataagccattctgcgtagcttgactgaagccaaaagttcagacttatgctgatcgtgctgaatacttatgctttaagttccagcgcgaagtgtttgcagcctaagtgaatcgtgcgtttaggttcaggtgatgtcattgtttcttttcggtcttgtttatcatgattattgattgaattgtgatggacagaatggagtttattgtatctgctatctggattcagattcacacgaaatatgtaaattgtgtggcagtgtcaccaaaatactctaggaatgctatgatatatttgcttttctgtttgttgatgaagcctctgtactgtagtggtgtagtactctctaggaatgctgtagcatagcaaggttgtggtattgcgctatgttgtttggtattatctagaaaattaagactgcggtatggattcaaatttacagtggttatgtgggctgctgttggttttgtcatataatttatgattagtatttatagtataatgctaaatttgcagtaagagttgtttatatatctgaattttcatacttgaggtagacacttgttagaactgtacagtgtattcctgtgtttgcagacttacaaatattaggatgtcggtctaggcatttctgttatatacttaagaagttatgatctccattaacgagtttttctgcaattgacaggtgttgaaggaggctttggtgatcaagaacctgag

SEQ ID NO: 111118 - DNA, 1052 bp, Setaria italica
  Intron number 2 from transcript Si001303m (locus Si001303m .g) derived from phytozome v7.0 (chr-ID scaffold_5; pos 50 47540 to 5048591)
gctacaaccacccccgcgatcgcggcggcactgaggtgagcgtgagccccctgtttcccgcgttactccctcgctccgtcccgatctgatgcggcgcgtcgcgccgcggcccccccgtgcccgcgtccgaggcgctgccgcaggcgaattactcccgctccaggtagattcgccgtgtgatcgaggtagttgcggtgtgaaccccgtgaggggcgggacgcagaaactagtgattttgggtaatgtggttcttccgaagccagttcttggcgcggcacttgcgaaattatcagtggtgtcttgttattagtgatcggatgcaagaatcaatgtcttgatcagccttgagcatccttttgggagctgatgggccagtcatttgtgcggaatgtcattccttcttttcgtggtttgttgttgatgtctgctatgccgtttctgtttcttctatgcttcaaattcactactttgtctttatttgctccttcgagtttaccaggttgtaataaatgcatatactgaaagcacatagcccacccctgttttttttcacttttgatgttgtcatagtgatcctgacgtgtgatgacataaaaagttactttcctcccaatttggtagttatttaagttttctacgtcaaatgtgaaggaacaaaagcagggacagtcatctttgtaattcaactttttattcacaatgctgatggttggtacatggtactatggtagcttgaagtaacttttttttatccttgtttttcacggattaggagctttatgacctgctattctttcaaatgttcacaactttgattactgctactacttactagtcacggttagcacttgtaaatctgcttctcatcctgtggtggcaatcctagatgatttaggctatctgacgtctgctgcaaataaatccctagttgctaagagtttatgttttccaatagaattctagggaacctttttgcaaattgttctaatgtgaaaaactaataatttctttcaatattatttcaaaactttagtttggtggaggtaccaaga

SEQ ID NO: 111119 - DNA, 850 bp, Setaria italica
  Intron number 1 from transcript Si000350m (locus Si000350m .g) derived from phytozome v7.0 (chr-ID scaffold_5; pos 38 480871 to 38481720)
ggcgaccgcctctgcaagggcatccccaccaccaggtccgtcctcccgcccggcctcccctttcttggaccaatttcctcccgatagggtttcttgagccgttccgccggtcagatgaacgtgataggcgaatcgggggaaatgcggctctttccaatggatttcgcacctaagccctttgatgtcgtggccgccgaagggagcgattgctcggtgcggtgctcggtgcggccaggggtttcttgtttcggttctgtggttcgggtctcgattgatgagaccctgtccgggtggaagacaaaggggaggacttgctcgcgattcctcaagattttgttacattgtgagagagatccattgtttgctttctctcagggattgcagaatctaagtgtatcgcatccgaatcgcccctatctatggccaatttgctggacctatattcttccctggtgccaagatttcttgtatgcttatgttggaccagtgataccaattaggggaacatcttttgatcatttgacttgattgctgtctgttactactctagttcccataacactacatttccatttatggaagttactccaaatgttctatgtacagacaaatccaaagacactatcatcattgctgcttttctttgttactagcgtttcttttggccacagggttcttcaataatacaaaacgtttaaaatgaaatagtggatcagagtctaaattctcatgtttggtgtcttgccataaactcacccgtgatacttaaattctcatgtttggtgtcttgccataaactcacccgtgatactttcccccttgaaattgaaccaggcatattgaatactgc

SEQ ID NO: 111120 - DNA, 592 bp, Setaria italica
  Intron number 1 from transcript Si039915m (locus Si039915m .g) derived from phytozome v7.0 (chr-ID scaffold_9; pos 28 57993 to 2858584 reverse strand)
gagcgggtagcgggaattgaacccgcatcgttagcttggaaggctaggggttatagtcgacgttggttgatatggcgcttaatctgtagacaagtagagttcgtgcacactgttatacaagacaatatactataacacacactcttggtaataaaaggcaatcaacaatttgctgatataacctggtcttcccactgtgcagaaaccggaggaggcaaaacaatggcaggctttgtaccagaacccgcaaaaagctgtcttcttggaactgaatccttgttaccatgaccaaactcagccagctctctgaaaattagaaaaggtagcaataattagttgcctattcatatggaagctatgtatataattatcaggagctcaacaaagaataacctgatctcattaaccatcatatctcttgttatcacttctaacatgtcttgaagcaacagtaccacattatcaaactttgaggcatctctttctttctgcaggtgaccagcataatgttagcattaccttcaatacatgaattgatcatctgtcttaacaagtagagacgtattgggtgtatccatttttatcgaagctt

SEQ ID NO: 111121 - DNA, 564 bp, Setaria italica
  Intron number 3 from transcript Si003159m (locus Si003159m .g) derived from phytozome v7.0 (chr-ID scaffold_5; pos 40 784054 to 40784617 reverse strand)
gaggtatatgattttcatactcttatttaatttctccatcagaacgtatttgacctttcttaggctgaactgtatagtcgacacaacctattcaggttattgaactataacccctcccttagttagaaaacctttggcagttggcagaggaaatgcgcataatcagctttgaggaatgcgaactagcgaacattaaccacctgaacaaggcttgatatattcttttcctggtttgtatgcctttgtaggaatgatacctgctggtttctatgccatgtggtaaaggtacctgcaggcaataaaccaaaattcacaagcaatgcattgtagatgccagttctgaaaaacttgcatggatgatctatttgtttttgataattgcctattctttgttggactgctccggctaccaaacaagtttctgtgctactactatggttgccgtgagcaagttaataatttcatgtcctatttgcatatccaagatgcagcgaaatactgatcacaatttttcgcaaaattctgctagggtgacagtaagttgtctacaaaagctggtgaggg

SEQ ID NO: 111122 - DNA, 603 bp, Setaria italica
  Intron number 1 from transcript Si000163m (locus Si000163m .g) derived from phytozome v7.0 (chr-ID scaffold_5; pos 51 22351 to 5122953)
cggtaatcgccggggttttctttctcccattccctcctagatcggttcgactgtgtgcgtctctgctggttcgttgcgatgatgccttttttctgcttttggggttttgttgaggcctggaaacgaaaattatatgcatattttagatttttgttggctaggttttcatgaaacttttatttttccttcgtttgctgtggttttggatggggtttctgtcgtagtggggagaaactcgatgggttttagcagtctgaacttttattcaggttgtttcctcagttctctctttattagtgttttctttctcttttaatatttttatgcctgtgtgatgttaccttctgtaccttacagtgaaatttgtactagtcttctcttcacattttatattttgattttgatgcctgtgtgaagtacattctaccttatagtgcctaaattcaccgtatggggttcgaatttcagattcagaatggagaatgttgggcaagatgcaattgtcttgtaaacaaacattgatttttatttaatctactaatgtattcacttttctgttttgttgcagggaagagttctctagtgccccagttcctcttagaa

SEQ ID NO: 111123 - DNA, 979 bp, Setaria italica
  Intron number 1 from transcript Si035008m (locus Si035008m .g) derived from phytozome v7.0 (chr-ID scaffold_9; pos 55 955971 to 55956949)
tcaggtgcatgtccatgaccactttaactccgagcttttccgaaaccgctagaacttgatcttttttttttttggttgtgctggcttatatgacatcatcactaagtttttaagtttcagtggaggaagcggggtagattagttggttggattgacttacagacaaagttatgcctgaatattagtctcattgcatgcagctaagcacaaagcttgttagaacactggtttaaaccacagataaagatcggattacatctattgctttgtacttgtaccaaaagtttctcattccatgtgttatcgatatgatttttgtgatattcaataaaatcgagcattagtgtggggacttgcagacatggtatgcttcagtgatcttgagatgttttttgacagcagtatggcctgggaaattgggtcagactttcgaatactgtttttgtgagataggaattagcaattagcattacactagtacaagagaagtgtactttgtgatggttagatgaacagtatgatgccatcgatgattaatctgttttcctgcatccacgatgtggagctgaactgtatttgttgtgtgacagaaatgctgttcaagttgtgtgttgggcttttttttttgaggcatttctttttactgttaacaacattcagtgttcaatgcactgcacaaacaactatttgttttctgtgctattaagttgcaatagagaattctgtagtgagagcatcccatctggcaggtgtggacgttgtccgcatcatgctacctttttgtctttatagcagattacaccgtgcacagaagattgttggacctgtactttgagacggaatacgttgtgtacttggtattccattatcatttgagctcgcaatataatctttctttcttttttttactacatcaattcatacgagggattctcttttcacagacgtaggaaagaggaggctgcggaacctgaagttg

SEQ ID NO: 111124 - DNA, 777 bp, Setaria italica
  Intron number 2 from transcript Si036594m (locus Si035943m .g) derived from phytozome v7.0 (chr-ID scaffold_9; pos 31 669331 to 31670107)
aagtttcctcgcatcttcggtcacgaggcagccgggtgagtataatcctactctttgatttttttctttttggccctagaaatccgatcgagtgaccttggtattttctttttcttttctttttttttcgcgaggacccttggtattttcttatgggtgtttattgaagatatcttttttttataaggagttaatgacgtatcccttctgaataccgctacgttgactttatacttgtcgcttggtcttagagtttgcatgtacctttcagggggtgatatataaatttatgagtcctctagacttaatttgtttaaaatttccattctccgttggggttttctggaaataaagtgccgtgaaatggtgacttcctgggcacaggaatatctgtgtcaaattgtggtcagcgcctgcatgcagccgcaacttcgaacacataaatgagcaaactttgaccctatcagttcacaggaggctcccttatccagcttttcttattaatactatatagaaaaacatttctgttaactttttgaaaaacaattaacaaagatgtgtcctggaatttttgttctatggggactcgatcttgtcctggaccacaaactcaagtgtcatcagatggaatttaccaaaagtttttcagataattctcaggcttgtctttttctaatcggtcttgcaattatacgttatatattatacctgacgatgacacttagcttggcataactcacagggtggtggagagcgtgggcgacggagtggaagacc

SEQ ID NO: 111125 - DNA, 820 bp, Setaria italica
  Intron number 1 from transcript Si039580m (locus Si039580m .g) derived from phytozome v7.0 (chr-ID scaffold_9; pos 55 265263 to 55266082 reverse strand)
gctactcgcatcaagcatacccaggtagtgccccttctggctggcctcctgcttgatcagacatgaaccttagagttgaatagatagtctatcatgtatgtgctatccctaagagaaattacaaaattgcctggttaaagtctcacttatccagggttgctattcgttagatgtgtaacaatcatgtcattttgatgtgaaaaatattactccctccgtttcaaattgtagttcgttttggcttcttatgtatctagacataacctatatgtagatgcatagcaaaagttatgtatatagaaaagtcaaaatgacctacaatttgggacggagggagtgtttgtcaaggtgaccagttcattttgcattgaacaggtacagtatgctgcacaaagggtattgacttttaagtacttctagtgcccatttagctttggacacgatccattgctggccaaagtgaggttattgcatattttgtatcccttatgaaagcattagtgtgccatggtgatcaaaacggttgtggcttttgaatattataactactggtctcaaactcgagtgatacgcaccgctaacaaacttcaactcatcagggaataatttttctagacatccttaaacttcaagtcttgttcagccaggagaaaccgagaaactgctagtgatgacatatattttttaaaagagcaacgatgtgtatacaaagtccgtgcgttatgattttctccttgtgctcttctggatactcctcacatattccatatctattctctcaccagtcatcaaaagtgattggtacaggaacatttagcag

SEQ ID NO: 111126 - DNA, 818 bp, Setaria italica
  Intron number 1 from transcript Si002816m (locus Si002816m .g) derived from phytozome v7.0 (chr-ID scaffold_5; pos 43 77780 to 4378597)
aggacgctcagcttcccaacatcgcaccccaacttgtacgcttgccatggatgtcgtcggtgcatggaagatgcgatagagaagaatatgatgaggaaaggaagaaaaaatttaaaagattacccaccgccatgtgggtcccacatggaagagaaaggggaaagagaatcctgcagcatatctccccaataaatatatatatatatatatagacactgaaattatgacaagtgtatttggtcttgcacttgacatacttttttctggtcttgcacttgaaaattgaaaagtttaacttggctcaatttgtggcaagcaaaattatggagctttccttcatagatctgtttctttttaacatggcccgttgtcataaacgtttactacctccatcttaaaatcaagcgcggttaaaagtggcatggtctccaatcctgcttctataatataatatttatagcaacaaaattttagccatacaaaagtactttaaacacaaatccaattaaattatttttgcaagacaaaattttcattatacaagattaattgtaggtaaaagttttagaatttgaatcttaaattgcgcgcaccttatattttggaataaaaggaggattatagtactcgcatttttcaatctgcttccatccatagtatatttgtgatatgtaaatgttattgactcgtcgtttccatgctctctcgttccaagtttggaccagtgtgtgtccccccaacgcgagaagagaaactcacggcgtggagcgtggtagccggtaggagcacgagaggcaagtgtcgcgtggaacccacga

SEQ ID NO: 111127 - DNA, 1038 bp, Setaria italica
  Intron number 1 from transcript Si000758m (locus Si000758m .g) derived from phytozome v7.0 (chr-ID scaffold_5; pos 41 692282 to 41693319)
acggacgccctccgcctggtcgcgcgctcttgcaggtaatagctgcttttccggttccctgtgttgctctggtgatctgccgtctgcaacaccttgctagttcagcctgctttgtgctttcccattacggtgtgctgggaaagtaagctggatagttgcgcgattcagtacttgatcttttcccccctctcagagaaatcgtggtttatccggcggagatgttcctaaacggagtgacggataagtagacacatgttgtaatacgggcaggatgcagaattttcttgaccaaattggtatcagcgttagaatgcacaggacagtttcagagtagttgaggtttgatcgtttgctagcccagtattctattccccatctagtaacgcagttttgcacaagcggctagtttgagttattgccaaaatggcaggtgatctatcgttcccatgggtacttgtgtaccatgctgattggaattgaataggactacgttgtccttaatgaaacgtattttgacaaaaattcactggcagctttgcatgttgttggttcctgttatcaatcaattctaccatgatcacatttcaagcagcatctttaccttctttctctttttgcccaaagtatctcagatggttttattttttagttggaatcctgtaactatgatattgaatcagctgaatatggaaactgaatagtgaatgatttgcgtttgataaatatgtatctccaatttcaaagagtcaattgttacttttgtgtattgaagctggttttcattttgatactgaagacaacaaactgcggtaacttctctggttgcaagtcatttgctctgtcgtcaaccataattacatttcaagcagcatctttaccttctttctatttctaagtctctctagcaacatttttttagtgttatattcctgctgcacaatgaatacatcgttctagctgctatgattgcttgagatcttcaaagtaactcattctaaattgtctcaacagatctctgagaactttatttctggaaga

SEQ ID NO: 111128 - DNA, 938 bp, Setaria italica
  Intron number 1 from transcript Si001316m (locus Si001316m .g) derived from phytozome v7.0 (chr-ID scaffold_5; pos 45 744202 to 45745139 reverse strand)
ggtgaagaagaagagaagccttccggggacaccaggtgcgtgcatactagctaatccttaacgatcttagtcatggtgacctccagaataattaatactacatatgtagtagtagtttgttcttggggaaattgatatatgacgctggagtattattgaattgattccctcctattagtatatgatccacagcctgtactctttgatcgatctttgtgttctttcggaaattcggccatcattggtaggcaaggcaagtcaattatgacggtaactgtttattagcagtccaaatctccctttcaccgaagactagcgtgataagatgacgacagacatactgtaagggaatatttgaacattatagtttgtagaaatttgagttagatacatatacaggtagatctaacgctattcagaacatccttttaatgcaaatgatcgacaagctagccaccagtagaaaacgatccaagagctgaaaatttcgaaagtttacttggtaaataaaagttcttgttatgattcttcagcctcaatacattttgttttcaagctagctagctagcttccactattataccgctttacaaacaatgcaacattcttctcgaggaaactaaaaatcagctgacagtctttgtcactttgaaatgatctttttacgacagaaatgactcagataatgctatctcctcagttagacaaccttttttggttttagctaacgatgtttaaatcattcgaattacattgatttatagcacgacgactggacaccctagctgcaatgcaagggggctaggtcagtgcttccattgctgcgtgccttgtattttgatgtgaacaactctatctgacgacgcgcgtcttgcattgcatgcacctgtgtatgtgtataacgaaccaacgacgatgaagacccgagcgcggaggtg

SEQ ID NO: 111129 - DNA, 730 bp, Setaria italica
  Intron number 2 from transcript Si002268m (locus Si002268m .g) derived from phytozome v7.0 (chr-ID scaffold_5; pos 32 494731 to 32495460)
gcaggaaggcgccaccaaggagcctagcgtcgcaggtaccacaccgcatgctcctagacttgtcactttgattggagtgatccgtgcgtagtaggatggtctgctctaaaaaattatcgcttaggtttgattgaggtgcttcctggctttatatgcaccgaacgaacatgacttcgtgacatgagtacacggctgcttcggtatcaatttgttccctttggagagagcaagtggaagtgtgtgcacggatagttgtgtgttcatatcacgttcagtaatttcttgaacaaggtggtcacaagcgatatagagatgaaataatatgtataatgctttcaattataggaaatctagaaaaatgttttcagttgtaggatttttttttctttatatttgcttcatcaagcgtatgagattttgctattggcgctatattgaagaaatgtgaatccaagacaacgtttggtatgagattatgctacttatgttcttttaagaaaaatgaatgtaaacccatttccttggccatttaaaactaaatttcagatgaaacgcagaaatgcccattcccgagtgtcagatgtttgaagtgtgattactgctgcttcttactaatgtcagatgtttcaagtacgactgttgccattttgatttactaaatgaagtggctaatggtaccatgttgtgttttgaagtttcttcggcccgtacacagttggacctcctggaa

SEQ ID NO: 111130 - DNA, 890 bp, Setaria italica
  Intron number 1 from transcript Si001604m (locus Si001604m .g) derived from phytozome v7.0 (chr-ID scaffold_5; pos 98 96274 to 9897163 reverse strand)
tgaaggcgccgccttcctgtgtttttatccctcaggtgagattgggctgtgctctcatgctgcttgcttatgcagaatctggtatgtttcttttcagtttgtgtgtctcggtttcttgatgcatttttttttctctcgaacacttcttgatgcattcggttaagtttagagatggttttcctttcctagcaagatcttgcagcatttctgaaggtttggttgattggttatcctttgatctggtcttgtttggcttagtggccacctccgtttctttctggatgctgctttaccaccgtaatctggccattcttttgtgaaacagtaggatgatcaaagaaaggatgtttcgacattgagtttttactgcttatgttgactgaatccattcattaccctgatgaactgacttgatgtatcattcgttcctccgatcctggatgtctggtgtttgagattgagccatttgtttctctgagtcatactcatataccattggttccttagttttattaagaatagactggagctaattgcatgtacatttgttttgaattggaaaacattttattatccagccgacaagggctaggtaccttccaatcagtagatacactgatatcttgatttggactacctcaaataagaggctgctgacactgttgtcaactgcatgctgatgccacactattgcagtgatctagtctatattacttcaggttgagtttatcttaaatgttttcattgtcggagaaccatgatcctgtatactgtattcatttttgcggtattaatcattcagctgtcatatttgtgactgctatagttattgttcctgatgatgcacgccttcagttttcagatagtgcttcaatctgatacaacttcta

SEQ ID NO: 111131 - DNA, 736 bp, Setaria italica
  Intron number 2 from transcript Si002244m (locus Si002244m .g) derived from phytozome v7.0 (chr-ID scaffold_5; pos 29 085167 to 29085902 reverse strand)
cgggacactgtctttgtgggaggaggttgctgaaggtcagttgcttttatcctttttctggtttcatgtatgatgttctctgtctgcaattatctcgtactttcgtgtcacagagttttgtgctgttattagtatttgggtatcaaaataataaacagtaccctatgttcattgtagagagctttgcagcaatttattattttttacgtattaaaatactaaacggtaccttgtgtgcattgattcagaaagattcgggattcacttagcaatcgtttacttacctttctagtctgcatagttaactcatgaactcagtttgactataaaagcactttttaccatggcatatttggatatatagactaattaacaacatctcttgtatatgatcaaagcagtattattttgctaggataggatggatggaatgccaaaaccaatcttcggattacttcaaggcctatttggatcttgggtttttgtagtctagttccatatttcaacgaaccaccaaaaacatgctttctaaagctcaaaagtatagggttttacccatctctgcttgcaaaagttttcaagttttctaaagctcaaaagtatgggtttaatcattattgacttgaattaaaatcagttttgattaatatttattgctatcttgtattccattcatcaattcatcactggaatgaagtaggccaaagccctttactcttaaaatttctactgacag

SEQ ID NO: 111132 - DNA, 739 bp, Setaria italica
  Intron number 1 from transcript Si001623m (locus Si001623m .g) derived from phytozome v7.0 (chr-ID scaffold_5; pos 45 415616 to 45416354 reverse strand)
ggtgcagcagggccaccagacagagaggatctcaggtgagggaccattccttttcttgtgctcgtttccgtctcgcttctgatcttgataggcacattcttgtcagtttgtcgaactcaagctgcttgttttacctagctggttgtctgtaatacatctgctactaattataagtatgtcagctttatctatcactctatcaggtctctgaatcccaagtttgatccccatctgatatgctaatggagtaataggttacagatagattgaatgcagatgcaggtgtatcctttggctttaggttcatggttatttgatctggttctggcttattcagttaaaaattacatttcttgaacatccactaccactcactaaaagggctttagattttgtgcttgactgatgcactttgtatttgtctgctgtggaaaatgtagaattcagtttgatgcttagtttacctctttcagtggtttctcatggcagctcgttcctcaagcttagacaaacaggatcgtactcacagagcagtcaaatgtcatccttcattcagttttgcaaaggcgcaaaattcactttagacctattgatggcttagctagcatagtttgcttcggatcaatgtgctatatgatcctgtcattcctagcatggttctaaaaccaagtgtattcttttccccacttctgtgcaagtcctaatgctgtgtccgataaaaatgcaggaagtgctggtg

SEQ ID NO: 111133 - DNA, 820 bp, Setaria italica
  Intron number 1 from transcript Si034651m (locus Si034651m .g) derived from phytozome v7.0 (chr-ID scaffold_9; pos 99 40343 to 9941162)
caaggagctcaacgtcccggagctggtcgccatcggtgcggcttcttcttcttcttcttcttcttctttgtgattctgtgttgtgtttcacttttctgtggattcctggtcctgtgtttcacggaaaggtctgggctttggtagttttggagcgctaattcctttgcggacttttagcgaattctggtgagaatgcgagctttccggggggatttattaggctgatgggcaattatgctggtaaatttgatgttctgggtcaatggagttgattagagtttctgattactactttttttagtgaggatgcatgaattgttttgctccgaattaacttgtacttactgaatttcaactgctacctcttctgaaaaactgacgacaataacaggaggatttgtttttttttcctcttttatcatggcgtattctgtctttctcttcgaataaaaggagtacagttgttccaattttatacagttttggggatatgggtcagcggacttgtccctattgtaaggttgttgctttccttccacttgttcagttgttgataggtcagtcaatgttggttgccaactcaaataatgaacctcatgatcctgcagtcgtcacattgtagcttcttaagttgtcatattgttattgaggttggagttgagagataggtgcgatgggctgagttagattctgaagtaatgaattttgttattccactcctcgcagatcttatattttaattgattcatattataaattattgttaatgaaccactgtattatctatcaggggtcggttccacagttggagctggagtat

SEQ ID NO: 111134 - DNA, 743 bp, Setaria italica
  Intron number 2 from transcript Si000057m (locus Si000057m .g) derived from phytozome v7.0 (chr-ID scaffold_5; pos 30 895596 to 30896338 reverse strand)
tggtgcgaagcttgagaagctcgctgagggaggtatgtggcgcactaattctcgtttcgattgtaattggtggtttgggcatgccagtgggtctctatgctcagtggtaatgctattcacccgctgaattgtgatggatgggtgcttaatttgttaaaatgggcgtttgtttaactactagttaccacgagttaggtctgtcagacatgtcattgctctgcccttgtagaagataactttgattaatttcctgtagtaacgtgatcccatagtgatggataaactgtaaattaggtcaataaccttcttctcatgtactcatcgctagttggaacaacaccctgagattactgtatagtgtattggtagtgtatgatttcattcaacttgtacttgggcttgcacttatgttcgaatgcagcaagaatttgtattaagtactgttctgatataaccaccaaactttatgtttcaaatgtcatttgcaaaacttacttatctgcaacatgccaaacccttgacctcgagatccttgttgattctagttgtactgttgttttagtcatttctgctttcacatgtttgccatcccttccacttttcttatatatgtcatttagttgttatcttcattttgttcattaccctttttcaagccggacaaatgtcttttttgcttaccgcacccatttgcaatgttttgtgcagattcaaaagggaaacccacagaggccattcgaggg

SEQ ID NO: 111135 - DNA, 352 bp, Setaria italica
  Intron number 1 from transcript Si034900m (locus Si034900m .g) derived from phytozome v7.0 (chr-ID scaffold_9; pos 55 86983 to 5587334 reverse strand)
ccaccgtctggctcgcctgggacaccgcccactccgtgcgtgcccttaccccttttctcgagatatcttcgtgttcaattcaaatgactagtgttgtcgctagtatgcaacaggggttcgatctggatgcggtttgtctagtttcctgtggcagtttgcctgtgcccaccaactgctcgttcttttgccgtagagatactagaatggattgcttgtaaatgataactactgtttcatttttggttgccactactgcaggcaaatattttgattcgtttattcgctgatgtttagagattcaggccgcaacctgtctaatgtttctggatttgttgattctgtgtgcagagat

SEQ ID NO: 111136 - DNA, 1020 bp, Setaria italica
  Intron number 1 from transcript Si001270m (locus Si001270m .g) derived from phytozome v7.0 (chr-ID scaffold_5; pos 42 813968 to 42814987)
gcgaggaaccccggccgcacggtctacataggtgagagctctcgtcgccttcgtgatcccccttccctttagataccagtccgttcgtagggctcccggactctttaggtttttttctaatatcccacatcatcggcacaggtgcttgcgtgtcttgtgagagattgcgtaaatgtggtgcattagattgcgcgagcgattctgtgtttcgtgcgtgtttgcttattcgttgcttattacacacagattgtgcagtagcagtaacctaaggatacaaacattagatgcggggttcgttttacttctattggtttgggttgtaggttgtttgtgatttaatcttgtctgggctgcagctgattatggacgtcttatgttgtgtcaccgagtcgcttgttagtgttagtagcagctgactgttgatctggtggctttttcttgctgttttgagtcgtcaggcctttgtggttgtaatttgtccgcaggaagatctccaagttttcaatgtcaccatgtctgtagactgctagtagttctctgttcaatgcggtgtcaattgaggtcttgctctaaaacttttcacacactaaacatgaagtggcaatgctcctgttcacgtcattgaaacagctgttgtatccagttaggttgttaatcatcttgattgactacagacaacaaatgtctaggtgatcaaactatcagaatctgcagagcttatttaacttcactcgctaactactagtgtggtgtaaccattgtatatggctgtggtgttgtggacaattgacattttaaataatgcatattactgaaacttgcatgctctagccaactgtgctattgcattgttgagtttcaaactagtgtcacttaatgtttttttgagtgacatacttattggcaattcatagctaggttgtattagacctcccaggcagttgcattgtgttgttttgattaagtaactatatatattttttattaacacaactgttttcctttcattaggtaatttgg

SEQ ID NO: 111137 - DNA, 516 bp, Setaria italica
  Intron number 2 from transcript Si000656m (locus Si000503m .g) derived from phytozome v7.0 (chr-ID scaffold_5; pos 29 533118 to 29533633)
atctccacgcgttcgacacagagttaatccccgatgtgagcccaatcatctgcgttgttttaatcattttggttgctgcttatgtttcggtgacctcggatggttgggataaatcgaaccgttcgagactgctgttggagtgctggatctgacgttctgaatgtgaactgctcgggtcatggattcagcaaaacaatcacgtttatctgtttttttttgaattgaacatcgacttggatagcagatatgtttttcttagtcttcttttaggcgtactagattacacgtgcggatgccataatgttaaataaacaaatatagttttggtagaatcatgggtggttgttgagatgggggcaccacatcagcatgttagttcagatgatgcaatgcataatcatgtgttgatttaattttgatcctaacgttgtgctggtaatgtagtattgagcattaaaaaatataatagtttgagctaacgttcatatgttatttatacagtttcaagtacctggg

SEQ ID NO: 111138 - DNA, 986 bp, Setaria italica
  Intron number 2 from transcript Si005225m (locus Si005373m .g) derived from phytozome v7.0 (chr-ID scaffold_5; pos 32 423917 to 32424902)
gcctagaagaccatcttcgttaagagaggtggggttcgtctaccaaaattgtgcacacgttatcacatagtagttctacattatttaagggaagtttggacctaacagattagtgttgaaatgttgagcttctatttggtccaaaattctattggtagatacttgtgatgtgggtaaattgaggctgataaataaagtttgcaggctttagtgaacattgttggccatcaatggatgatgtggtgggtgtgagagtaagtgtgggctatagtttaggcataaaacaatttgtggaagttaatacttcttctttagtgacacatcaaacttgataggaaaccccgctgttgaggtcacacagggtctgtatcctggatctactacttgaggaaggctttttcattttttttgttaaatatactggtctaacaaactttccacgccttgataactgttggaattttagtgtgggcactgatgttcctgttcttttgttaagcttctacggatagaaaggtttgaactatacttgacaaccttggcattgaagttttttttcctgctacctgtcatatggcaggcctcaacttctcttttcagacatggaaacaaactgacatttgtcccacgtaccatgttcataggcaggactctacttgtctatgcaatggataatccagatgaaagataaatagattgccataatttcagagaagttgagttctcatcttgttttatttaattcggtagaaaaggaagttccagcagtgaaacaagtactaggtgatgtgcattgtctggttggtgagaaggaaagtgtagatacaattatgatcacacctggcacttgcattctcccatcatctggcaacttcattttgattattacatttccatgcttctctgatgtgtattctttatgcattattgtccctttcactgttatttcagtttgtgacttgaaggataaggtccaaagggttact

SEQ ID NO: 111139 - DNA, 411 bp, Setaria italica
  Intron number 1 from transcript Si002610m (locus Si002610m .g) derived from phytozome v7.0 (chr-ID scaffold_5; pos 30 372337 to 30372747)
ccatcgatttcctcaccctctgtcatcgcctcaaggtacttccgtgcgttcgcgttcgtcataattattaattagtcgccctttgatatgtcgctcgaggactgctttttcctataacgcatatcctctaggatcagactaccgatactccattttctgtaagaaattctgaggcatttgattatttgccactctcgcggagtgtcattctgaatttcggaagagcggggagaaagtattgagtaattgtgctgggctgtgcctgtgcaatgatttggattaattcatgcccctcgtttatttatttatgatgatgcccctcgtttctttgatgcttagatagatccatcatatcgcatgattctgatgcctattgcttttgtttattcttcagaccactaaaaggaaagg

SEQ ID NO: 111140 - DNA, 934 bp, Setaria italica
  Intron number 2 from transcript Si005238m (locus Si005577m .g) derived from phytozome v7.0 (chr-ID scaffold_5; pos 33 46623 to 3347556 reverse strand)
gcaacatcgaatccgtactggacaaagcacgagaggttcttatttttcatatccctattcttatttttcatattccataatttgagctctttaggcttgttgaactttacaattgttcttatgtttgataatttctggtaatgggaattgcgaccaggctcctcaacacagctatcatctttctaatgaataggatatcatgatttgtgtctggatatgttgggcttagcgtgtaatcaattttgaattggatttataatttttccagttagatctattatttctcttaagaatgctgataggaaccactctagccagtgatgcatagatttcctattctgattttggtattctaatttttcttctcttatcatctgagtgattaattgattcctactcctaaactctcatgtgagtgaagatatgttctgcaaactccttcaagaaccactccaagctaggtcctctccttcgcatgggttttcacctggttcaccgcacgtcgcacaaaactgacgttggggagacgaacagacatttagtgagcaatcatttgttttgtgaacaaccatatgtccttcagatttagtgcattagtaattataatatataaacaattatttgttttgtgagcaatgttatttgtttttttcgaaatgtcagtttgattgccatttgcattcaatacttgatttctttgttctcagttatctctggcacttgtgtgtactgtgtagtctgaaaaatttgtaatatttttttcaattctcagtgcagatcatgagtacatcagcataggtgtctttgccagtacatttgttatttgcaatgaggaacctaatttagtgacgtgcacatgattactctattattcattactaatttccctgtgtgtgcagattggagagagggtcaaagcatcttcggcaggcat

SEQ ID NO: 111141 - DNA, 713 bp, Setaria italica
  Intron number 1 from transcript Si005238m (locus Si005577m .g) derived from phytozome v7.0 (chr-ID scaffold_5; pos 33 47865 to 3348577 reverse strand)
cgttcttatcgggtggctttccattggaggcagtggtgaggtcgttgaactcctcagtccccttcccctttcctcgatgtcacagctcggtctttcattgttctgcatacacgtgtgtggttcagtggacaattcgattgttcagaaagtcagaaccatatctacatagtcgatttgagttgctccctgagattctgcatcatgggttggtgccggagcttgtattgtgaatttgtgatccagattattggattcttgtttctgtaacctgtaaatgtcaattgagctggacagaatatttggtttaagtttctatttttctaagtctgaactaattgatgaaaaccagatgttctacgatgctgctagtgttataatacaacctatatgttttcttagacatgtatacactctcgctagtccaattgcaatcctccaatgaaatctcccagtaatgtaggaattataattgttctatattagtgtagaagaaacagacaactcttaccttgccttgtttgtttgttttgttgttttttatcttgcaagtgaatcttcggttcatggatgctgttgccatttgttgatctcgtgaatgacttattaaattctcaaactcatttctcttctgtatgcctgcagattgaagccttaggggctaggtaagaggccgagagcaatgagctccaagggtgtacaaaggcgcggccagg

SEQ ID NO: 111142 - DNA, 1031 bp, Setaria italica
  Intron number 3 from transcript Si037764m (locus Si037764m .g) derived from phytozome v7.0 (chr-ID scaffold_9; pos 52 58625 to 5259655)
ggtgcacttatcctgcaaccccgaggtaatccttgcacggcattgctactttgtgcactcctttctctcttttcttggcacaagcacaaccgacgttttagattcattactttatacctttactactcagagctaaaaccagaaaacatttcccgcttactgaaccgattgaaagaagatagggattaatcaggaaaaagttgcatctttctgaaacaatctgaaggacattgccagttttgcttggccttcttgagaaagtcttaatcccttaagcctgggtcctagcaagtgccatgccagatttggtccctttggccttgtggtaccagtaccaccatccggtgggcggccgtgtgttgttcttgagttggatatcctggaataaaggcgatttgcgcgtgggagggactccgttactttctttctttcttttcccgcatttggctgcatcgatgaacagctctgtatccatggagtctttttaggaaatcatgtacccttctggttccgtctcccagctggacgagccagcctctctgcctctgtcgcttttgcttgtgtgtttgtttgtgtgtaggttctcgcattattcgtgactccttttcaaactaggggagtagtggtattcataagaacctggaatgttatcatcaggtcattagatgtttggattcttccaagtgggtttccaagattttcattagtcttttgattttcatgccttgctggtttggtcccgttctctggtggggtcgatgaaccctggcattcagctggtctttggctgcaactgcaagaaaggcctgcattgctctcacgctttatctgtaaatacctgcaataaattgctactaacattgagcatcaaatccaatgaacggcaaacaccacatttggaatatgatcactgaacgcaccgcaactgatgtaatagcatcccagaactgtctcatacactgaaactgaccgttcatgttcatctgtgttgtgcagcgctgctgggactagcaacggcggttcgcccggcg

SEQ ID NO: 111143 - DNA, 806 bp, Setaria italica
  Intron number 2 from transcript Si003810m (locus Si003810m .g) derived from phytozome v7.0 (chr-ID scaffold_5; pos 48 35955 to 4836760 reverse strand)
gtaactctgcaggtaagctccttttcctttgtatgttcatgtcttcttttgttggctcacaagctttagctagattatcatttaatttgcagttttgcagatgacagtaagtgtactagcactactaggggtagccttttggcacattttacagtgctgcaattggaatttgtgttgctattgaatagtttagtggatatgaaacagaatctatatccttcgaggcttgagctggtttcaagattaacaatttcaacttatagaactacattgcacaaaaagatcatttacaacttctcaagagtacaatttcttcaagaattgttaatctggtgagcgatgacatgaaactgaaaataaagggattacgacaacttatagtaaggaaaactatgtcatgagtgaagtatgatgcattatctaaaaaagaggtcaaatatcataaggtggactgctggagtagatattagtttttgatttgtttggaaggtataaacatgaactaaataccattctcacacgctgcacatacaatcccacatagtgaaccaaatcatttataagtcgtgtgcattataaagcattttgttgtatacacattgcgtaagcggcatgttcattatcgaaagtcatagcatcttttttaaatccttgcacaagcataatacctcaccatgtacttgaacttttattggattcttgaactatgagtgattgtggtagttttctgattcagtttttaaaagtggtaaacaaatgctactgttttgtttcaggtggccggagaatcaaccataccttcaaag

SEQ ID NO: 111144 - DNA, 1026 bp, Setaria italica
  Intron number 1 from transcript Si001673m (locus Si001673m .g) derived from phytozome v7.0 (chr-ID scaffold_5; pos 40 075576 to 40076601 reverse strand)
cctacgcgctctgcaagcacctcaacgtcgatcccgtaagcgtcctacatccatctggtagattttggctgctctgaagcgaatcatgcgatagagttctgtagtgctcgctgcttaggttttgtagccttttttttataataaaaaatactatctggtccgtgctgagatttgcggatgcagatttgctgtgctttaggcgtggtgtagctcaccaaaagttttacctgagtagtctcgtcggttagatttcgtttattataacagtttcaaatatcgtatctgtaattgctccagcgtttgtgggagtgtgggcatgtgcgcgcccaatgttgacaattgcacaaatcaggaattgaccttatgggtgtgctgtcgattaatcgtgctgcaattgaaattttagcaagtaaatgaagggacggtgcgtgagttgaacagactggttagctgcaatgtttggtctgctgtttgcaacacatatagaacatggtatagtttagtcacatggtcacatgcagatgaagcttcaaatggtgaattcccacttgcggaattttcattacttgctatttcagttctttatgcctcacggtagatgatgataatgctttacccttatctctcatatggatacctgctcatgctttggtgcagtgctatcttgttaaatttgtttgtacattgggtctaaaaaaattgtttgcttaacttttgtattctagatgttcataaaccgctgacttgtctgctgcacaatgcacagcatttatggtgagcaatgatttatggtgagcaatgattttgttttgtttcgatatactgtggtgtaactctataagcatatacttattgttcttcgtgcttgtgttgtgcttgtttatttgaataaactttgcctagttttaaataaaaaaacttaatttgtgcaggttggttattttgtctggaagttgttactaactttaaacttcttttcttaattgtacagagcactgtatccaatacgagtattgaagaaagtga

SEQ ID NO: 111145 - DNA, 946 bp, Setaria italica
  Intron number 1 from transcript Si034013m (locus Si034013m .g) derived from phytozome v7.0 (chr-ID scaffold_9; pos 53 234493 to 53235438)
aactgcctctcgtgccaggtacagtaactgcttaccaagtgacccgattgctacggcaggtagtaatagggattagcttttgtctgaaggagaacgctcttgtatatggctgtgaggactgcgctgtggggatggatatatgaaactgctgctgaagaaccgactagagtaacgattgcttaacaaagagggtgctagaccataaccgatgctttactttctgtttttcaaatgtttgcctgacaaacagaagctgattctggagagagagctcacttgagatggtgactcatggttacagaagaacaggagggactctgatcacctaacacccatacttccggttctgatatttgacgatctgtttagatgtattaggttttcatacaatgggatgactagcaaaaattaagctgcgcattgggggaagagtatgaatggagatcctggacagtgtgtaatcaaactgtattttcctctttttgtattgcattcctatgacacagggtgttgcacacatccagtaccctgttactgaagttttgtggaaccacagaactaacctctgccaataatacgatatgaagaacttgcatgttttagccagaagagttctagtaatttctttttgatagtcataaatcagtagccatatgtggatgtctgaaaattttggcttgtctgatggcatgagcatttgctatacagcctagctggtgcatcgagataccacttttatcttattgcattcatgtttcttggatgattgaaaaagacatttccataagccttatgcatgtcaaggggaattttacactagcatttcggaaattccttgctcttgtcttcagtactgaattatcttgttgattaaatgtgcttcacagagaatgatctctttgtatctacaggtttttaccttcgggtcagtccctctcaagactta

SEQ ID NO: 111146 - DNA, 846 bp, Setaria italica; identical to SEQ ID NO: 111019
  Intron number 2 from transcript Si000616m (locus Si000616m .g) derived from phytozome v7.0 (chr-ID scaffold_5; pos 29 179161 to 29180006)

SEQ ID NO: 111147 - DNA, 968 bp, Setaria italica
  Intron number 1 from transcript Si001253m (locus Si001253m .g) derived from phytozome v7.0 (chr-ID scaffold_5; pos 39 230743 to 39231710)
gcgccaaggtcatcctctgcagtcatctggtaagcctcgaacaatatgatgttgtccacgcacacactctcccaaatgagtaaacagaaaactcaaattggtttaataaactcgtggaggttgatgcagatttcaactgtggattcagtcagatttagtaacagcacatatgcatctgtatgagtgcttgtataaatattcttcagtgttttcagataggggcatcactttaatgttatggatttgtttgtagacatatttcgtgacattcgaaaattcctcattacgtctgggacgcacaattgaatgaccatgtagatgtagtaaaccctgcatcaggaccgcaggcgaagccaactttcaagtttacactggcataacttctcaagtgatgtgaatatactaattcataggactgatacagattcaagctctggaatctggattcagagttactaacggcacactgggacctgtatgagtaggtgcttcaattatactgagtacatgttcttcagtgttttaagataatatgtgcatcaatttaaaaattttaatttgctcgtaacatattccacagcattgttttgtaatcctctgtatcttctgagataattggacctgcacaattgaattaccatgtagatgtacttaactctgcatcaggagaagttaacgtccaggtttacatgtcttggatctgacgtaatatttcgagtgacgtggatatacaagttcattatgtagggacagcactttttgtcctggaactagaagttctgaacaatttacactttgtatttcctgctggtgaaacttctttttgacaacatttatcataatgcaagtttgatgaggagccccttatggctacttgccaacaaaatttatctcattttcttgtactttgttccccccactgtggatgtgcagggtcgtcctaagggtgttactgccaagtttagctt

SEQ ID NO: 111148 - DNA, 660 bp, Setaria italica
  Intron number 2 from transcript Si033881m (locus Si033881m .g) derived from phytozome v7.0 (chr-ID scaffold_9; pos 16 773770 to 16774429)
ttcaactagcagaagcatcaaagcaggtaacatacacatacctgttttagggtgtacttcaggacatatgaggtcatgaggaaataataaaccctagaaaatggaaccattaggtgcagtacaaggtcattatttgtttggtacctatccttccacatatactgatctagatgtttctactacattatcaacatgtaaactccgatagcctattgcttcttttgagttcacctcccaaagttccacacatggcaagagaacttaatgaatttgtcacattagcagtaattgatgtgatggctttattgtttatacttctattaattgtgccatacctctgacaatgtggtaccctgttttgcttaagatactttccatttatacacgtattgacattttcctgagcaagaaacacacacacacacatagtggtttttgaacaatcatgatgtgatttgctgaggcccagcacgttgtcttcaccttaacatttctaacggcaacacagttttatctccaagattaatcatgaatctctcttttaaattccacgtgcaaatgatatttgctaccagtatctagtgtatgttttctttggcatcctcttcatgcttgggttgtctaattgttgtatctgctgttcgtagggaaaagtcaggt

SEQ ID NO: 111149 - DNA, 563 bp, Setaria italica
  Intron number 1 from transcript Si034169m (locus Si034169m .g) derived from phytozome v7.0 (chr-ID scaffold_9; pos 42 329799 to 42330361)
cggcagccctggaaccgggaacgaactgcctccaggtacttctcgttctagcagctctgcttttgttttacttcagattttcagagtttgttcttgcaacaagagtgcctgttccaagtcaaaaaaaaaaaagactatcaggagacaggtcgagttgtacagcacataattctggaaagtataacctgcatgaagccaaataaaacagggtctaaagtttacttcacgtagaaagtaccatgcaaataaaaaaactccctttcttgggatgcacatggacaagaaactgacaccatgatgaccaaaggtatactgacagcgaagcagttgcagaaatgtatacacacagaacagatagaagatagatggggccaaggaagacatcaaaagttacacaataattatattcatgcaaaagaaaatgatcgagggttcatatgtgttccgatgtttacctttttttatttatcatgtccatggattttcgtgatcacctgcatcgcatgataaattgcatatgtgtttcctttgtctaggtcacgatcttccaagtagcagcacgt

SEQ ID NO: 111150 - DNA, 763 bp, Setaria italica
  Intron number 3 from transcript Si039691m (locus Si039691m .g) derived from phytozome v7.0 (chr-ID scaffold_9; pos 82 97368 to 8298130)
ccacgtttgctctctctggatttgtccgtgctcaggtaattatccttgttgcagtctgaatgggttgtctaacacgaataaaggatatttttcatatgcagctttcggttgtaagtgtgcacaggctactagttttgtattgttgtaagcttttaattgtgagtgtgcacaggtttctagttttgtattgttataagtacccacctacaagatttccttacagtggatttgcatgccaataattgctgggtacctgcctaccagattttctcactgcagatttgcatggcattataccatgcgtcattatatataaatgttcaacatctgtttcaccttctatgcttgatcatgagttgcctgtttgatttattgtgcccccatattattgagtaaagcattcccatgctaagaatatgtaagttttctatgcattttaagtttcaaatatgcaatgaagttgccaagtatatgaaatgtgaaatttgtatttgcagttagatggttctttggctgcatttactttgtctgttgtcaagtgctcttattttgctgaacacaattagctcaccaatttacccttttgtcactttatctagcacttaagcatggcaattgctggagttaaagctgtttgttctaatgtaccaagcttttttgtttagtgacttgtgttctgttctctgtgaatagtagaaagcatgtcatcttagttgctagcaaattgctggttctgatttcacgttctggttctggcagggtg

SEQ ID NO: 111151 - DNA, 671 bp, Setaria italica
  Intron number 1 from transcript Si036878m (locus Si036878m .g) derived from phytozome v7.0 (chr-ID scaffold_9; pos 42 880954 to 42881624)
ccgtggggaaagaggagccggccaccaccaccaaggtaacaacccccacaccgccttcaaacccaaccgtgattactgtgatttcttcctccccttcgtactttccctcatgggtgtgtgccttttcatcctgcttggtgcttgctcctgctcgaggtggattcagggcgtggcccttttagcatctgctccctgaatcccggattattcccgcagcagagggttttacaaaaagaaaaaaaaaggtttttttataaaaaaatcttgggatgataagaagataatttaggtgcaccatcacttgggatgataagcacgagaggaacttttcgattaaaggtgaggacggtaattcggttgtcaggttttaaggggtgggggttttgacttctgcactcgtactgcaggcaaccccatgtgtagttgtggttttttatatacaagacattacttttttcttcagcttgtcaagatgtttgtatgcttgttacaaatctttagtccgtcaaactttgttgtgcctgttcatgtttcatggctgcccagtattcagacaactgtagtgcagacgtttaccctgttacggccaaatgtcactgaataaatatttctcttcctgttttctcatgtttgtagacagagctagctggtcacactcattgggaaacaga

SEQ ID NO: 111152 - DNA, 748 bp, Setaria italica
  Intron number 1 from transcript Si037522m (locus Si037522m .g) derived from phytozome v7.0 (chr-ID scaffold_9; pos 11 43541 to 1144288)
cgattcgacgtgggcttcctcttccttgctcgcaggtacctatcgctgtcctgggcgctctgaatttctcctgtaggcttgatagatctctcttgctggatctggtggtccgacgcgtgctgcaaatcttgctggatttttgatccgtccggttgatgcttagtttggtttcttctctctgcaagaatcgcatctgttcagatatcagatatggtcgtgttgacatgtctagtcgtaggctcacatggatttagagttgctgcgctgttcttgcgatgcgagcgtagttagatttctttattttttttcttctcgtggaaaaaaatcgtcgcgtgcaaatttgcgtcatgctggcttcgtgaacttaccattgtttctgcaaattagtaaagggggcaactgattagttcaattttcgtgagcctatgcttgtcttcaactgtctcttgtgtttttatccgaattttcttatataaactgtcatcaaactttgaaaaaaattatcctatgcatggaaaatttctgaaaagaaaatcatggtgaacttttttattggttgatctgtactctattctgccgttgtaattagtaaggatgccttagaaagtttactggccacgactactagtaatcaccacataaggatgtcttagaaagtttactgacccttgcaatcaccacataggccgcactattcactcttgaatctgatatgtatggtatatgtctttctttatctgctcaacag

SEQ ID NO: 111153 - DNA, 759 bp, Setaria italica
  Intron number 2 from transcript Si037522m (locus Si037522m .g) derived from phytozome v7.0 (chr-ID scaffold_9; pos 11 44365 to 1145123)
cattcggcaaatttggcaacctcactgaggcaaaggtgacacgaagaatctttcatctttagttttgcagggagtttagcatgatgttggaggttgtgttgataactgttgcttaggaaggctatgtgcatgaactgatgcatttgcaattatttcaaccatttttttcaagtcaacactgcccaagcctaagcaattttattttatactccctctgtcccaaattattagtcgttttggcttttctggattcatagattttgctacacacctagttatatactatgtctacatgcatagtaaaaggtatgaacctagaaaagccaaaacaactaatgatttgggacggagggagtactacagagaatgtgctatgtgccagaattgtgttagtttgtccccagagaatcttaaatctaactaagttggtctaacacaaccttttctttttgttctgtcttgtattttttttgccatggtttaataatattcaaaggtttctaacaaagaagtgtagatataagatactaatacagtactatctgatcttgtatgttgttttttttccatcttcctgaacaccttgggcaatgttttttccctccacttaagtcaccggatgatccagtaacatacatctcttaacatatacacattgtttgtttgtacaattttgctttgtattttttttgttatctaacatggtctcgtaattattgttaatttaagtttgttttgtggttaacatgcaggtggttc

SEQ ID NO: 111154 - DNA, 818 bp, Setaria italica
  Intron number 2 from transcript Si037654m (locus Si037654m .g) derived from phytozome v7.0 (chr-ID scaffold_9; pos 11 86632 to 1187449 reverse strand)
ccaaggaattggaatactcggctggaccaacgattgtaagttatcagtaccttttattttgcttgagaaactctgatcttggttgaaatgtcaataccattccaaagactgtaacagaaggttcactgctcattgcataaagcactctttttcggtgcttgtgtgttgcgtgtgttaaatactatgggtaagagtgctctactgaaaatgcatactccttgcacttgtagcgtcataaaccagatgataaattcatccagtaaggactaaggagttcaatgtgcaattaattatctatggcccaatcaaatgtatatactcttttggtactgaaatgtcattggtatttcagactacgtagtttgcgatacaccacttatttctctaaattgtacaataagtacatatatgcatcctttcactattttttcacaagaacagacatggccaaacccttcttgcagtgaaagtaaaacaggttaccagagtagaatagttgagcagaaaatgcaaattttgatatgtttcccacattatagtttccttattctattcacaaatgtaaatccaccatttcatcagtttaccagaagagggagcatttgtggcacagcagtatttgcttatatacagaaacagtcatgttcaatggtcaatttaatcaacacagtcaactcctagattcaatttctatcttttgttaagaatcaatgagattttaggacagcatgttggaaacaagatcacaatggcctgtacatagtctgaaatatgcttttgcagctatttcttgcagataggctattatttgtttgtga

SEQ ID NO: 111155 - DNA, 749 bp, Setaria italica
  Intron number 3 from transcript Si004009m (locus Si004009m .g) derived from phytozome v7.0 (chr-ID scaffold_5; pos 32 951908 to 32952656)
gtcggattatcaacttcacgtctactcgtccgagagtaagatcctgtttgacacggctccactcctaaactccagcaactccatcaaaaaattcagccaaacaccccaacttcaaaacttcatggagttgccaactccatggagctgtagtgcaaatggaggtggagttttggagcacctcttttgctgcttcagaaacctctcttttgaacctcctcgtggagttgttagttaattacccaccaatgctactggttacacaaaaaaatatttcattctattctcccgagccccactcgccgccagagccccgcccgtcgccgctcgtcgccgcgcccgtcgccacccaagctgccccgccgcctgtcgccgcccagcgccacccccgtcgccacccaccccgccgcccgccgcctagccccgccgcccagcgccgcccccatctccgcccaccccgccgcctagcccgccacccaccccgccacctgtcgcccaccccgccacccgtggagggtctcccgtgtgcggcacagtgcagtggaaaaaggggaagaagaagatgggatagagaggatgacaagtggggccttaattggggggcaataatggcaatccacactgaaatcgatcttttttggagctgagagtacccatctagccaaacaccccatttttgttctgaagttttggagcggagctggctccatgtggagttctggagtggagcagctccactcggagttggagcc

SEQ ID NO: 111156 - DNA, 962 bp, Setaria italica
  Intron number 1 from transcript Si003190m (locus Si003190m .g) derived from phytozome v7.0 (chr-ID scaffold_5; pos 43 580879 to 43581840)
ctgcaacgcgctctccgagttcgtcaaggaccaaggtacggccgtgtcgtcctctgacctgcgcctgcttttcatgcgcggcttatgagattcccgatctgaaccgggtaggcgtaggagggaagagctattcggatgtgaatttatcccagtttcgcatattgggagcgtgaaatctgctccagtgatctggatcgggatactctctgcgttgcctgctgccgttgagcactaatccagggaaacctaattaggaattagaagggtaagatatgactttgattctagaccaatggcaactcaattgggagtctgaaagcacgagaagatattgtgatgtgtactgagagtattgtacatgcgaggtttccacatgattatttgttcattgaatctgagggtaagtttactttatcaggattgtcactggttattgaactgtgcatcgatttggtgtctggggttaatgtgaggctttatgaatggaagaaatcatttctgctctaattggagtattagactggagttgcccttaactcagcatttttagatcagtttggtgttgggaaatggaccctcaatgtttggatcatttattttgattggtctatatctatgagcatctgaactggtgttactcacatatgctagtgaaacgtagtttactttctacaaaatctacaaatgtttgatctcaattcttttttaaactagctgcattggaaagaaatttcatttcgccaacacaaccctttatttggagggttatactttatcaggtttgtccattgcttcctgggatgatatatattgttctgttgaggattaagttactgtgtatttgcaaatcaacaaagggtggatttcttttttcacacgcatcacgccatgtgattgtttgattgttttcaatctgagcagcatttttgtttctctgcagagctggtggaggattgtcgtaa

SEQ ID NO: 111157 - DNA, 702 bp, Setaria italica
  Intron number 2 from transcript Si002093m (locus Si002093m .g) derived from phytozome v7.0 (chr-ID scaffold_5; pos 29 67771 to 2968472 reverse strand)
aacaggtgtccttctccccttttgctctctccctttgcttcctcaattactccctccagtcacagtacgatgatgttttgggttgcatttattatctaaactttgaccatcaatacctttttctgtattgagattggaaaattaaaaacggtgcgagtttgatttgcctcaaacagtagtttcatgatattattttttttccatacctttaaatatgttaaaacagaaattaatggccaaaggtatgccttagagacagtttcaatgaccaaaacagtcacttatttgtgattggaagtttggaacgagtgttctgcaagatttttccttaagaaagttttctggctctcaagctatgtcttgctcctctttgcctactgttcttgatgaactaattttgctgtttcattttgttatcaacattgttctgctgtgttatggttctgcacatctttacgcacatatatcttttcatttgcttatccagaagtttcacataattcagtgatcctataacttttacattttcatgacctaataatggtggtgtattgacctcctcatgccagtgtcctattttggtctatttggggtcctagccatttctcaagttgcaattcaaatcagctgataactccccatagtgaaaacttcttctcttctacagtgtcgcaggaagttggttgatctcagatcacaact

SEQ ID NO: 111158 - DNA, 824 bp, Setaria italica
  Intron number 1 from transcript Si002164m (locus Si002164m .g) derived from phytozome v7.0 (chr-ID scaffold_5; pos 33 709451 to 33710274)
accttaggcctgaggtttccgctggcaagaaccaggttagtctcacaaccatcaatctgcatttctgatgttgctactgatcattatagtgataggtcgcgatgatgtcttaaatcttctgtcattgattgatttccaattgttcatacgattattatcgatctgagatggcttagttcatgtatcattggtcattcagtcgtaggtctgttatgctactcatgtttggaatgctaattatattgtctttgtggactgtagtttgtaagttagtagtttgatgttttctctattttagctgtactgattgaaccataccacaatttgaaggtttgtttgtatgatttagtttgtttggttgaagctgctgcttgcattaatttcatgagaacacatcctgtacatgcttaaactgcagtttgcagtatcttagcgcagcttaaactgtaaatgttgatttgcaaggtatgctgttgagccacttatctgttggttggtatattatgctatgttattagattgattggactgtgcatatagaaacaagattacttgctgtgtccttgccaatgctattctgtcttatttgtcatgtggagagaaggtattttgatttatatgtgaaaacctcacctgtttagattatttgttaactactgttagttttggtataacatgtttttcatcttatgctctatatgtaaaaaaaacttgcaccagttactgactctactctttggtgaagtattctcgtctcattagaaatcaattattgttgctgccatgcagattctgtactgcacaagcttgagctggagcgctga

SEQ ID NO: 111159 - DNA, 794 bp, Setaria italica
  Intron number 1 from transcript Si034360m (locus Si034360m .g) derived from phytozome v7.0 (chr-ID scaffold_9; pos 90 91590 to 9092383)
gtattcaggtacttgcatctctattttaacatattgcgtttcttcagtttctggttagtcataaaagttgctgcatgggattttaagctgtttgtgtttgtgttattacttgaatctatcagatggtattttgatctggaaggttcattatgctactttgagaatgacaagcccgctaatgtggctttcaaactgcactgccttttgctgctaattgtggataaagttatatgcagaaagtcagaaattaataaaactctgggaaattaaatggaccaaaacagtgcactgaaaattatgataaacaaatacaacaaacatattactctcatgactattgtcacatcgtatgcttgcttagcgtgtcacacatggctagaccttgtcgtggtccaatatcctaatggatggactcggagatgatagaattgaacatttcttacgacctgttagattcagtagacttaactatttattcaagtatgtttgtctcactttaccctaatctagtcacttctatggcacaggcaccttttgtcattattcttggtggatttgtcgattatttctcttctaactgaatttttaaacatctgtgtaattcaaataaatggggagtaaattgtggccttggtaggacatagcagaaaacttttaatatgctactttcacatcctacagtattatgttcctgtagtttttcaattcttgttattcccaatgtacaacaggacatgctgacgcatttactttcaacagcatacgcatcttctccttagccgccattctttgtg

SEQ ID NO: 111160 - DNA, 784 bp, Setaria italica
  Intron number 1 from transcript Si001081m (locus Si001081m .g) derived from phytozome v7.0 (chr-ID scaffold_5; pos 43 695132 to 43695915)
gccatatactggaggagttcttccgaggtaatttcactaggaattcgaaatatttttctgttactcacatagatctgggttttctttcttttgatttctgcagtccaccaattgttctacctggcacaaatttgttaaaaagtctacagaatatgtccctaattcattagttgcataaaagcggctaaaccatctgctcagcttcttcgtacattgtaatgcaagatgtgcatctcaatttgaacttttgctggttctaaggagtataacatcgccttacactcagatttattatgttgtaaatcatatactaccatttaacatcagtgtttctgtcatgtaaatgggatatcatagtactatataaattagtaacacacttccatgtactagaaggattgaaatggtatttcagtttcaactgcatcatattcttttcattagatacaatcttcatctctgaatgtggtgtagttctggagcttatcatgaaatttcttgcgattacttacatatgactattacatctgcttactgtcagtccacagcaaacttagtattgtccttttgtcctgaatacgcttcactaaaagggaagctgtgtgcccctttgtcctggccacttaagaagccccccttagtcaagttataagcaaataagcgcaacattttttcctctgttgaactgttgcaatgtagcaagaatttgttcatatgctagttggaactgctttcattgcttacatgccctcttttaatatctgcaggaaacccgaagcggata

SEQ ID NO: 111161 - DNA, 741 bp, Setaria italica
  Intron number 1 from transcript Si001362m (locus Si001362m .g) derived from phytozome v7.0 (chr-ID scaffold_5; pos 29 840603 to 29841343)
agcagtggggtcaactctaataagtcatcaaagtaaagtctgcatattttccagtctcatctaccccactagattcattttcatctttcgtgctgccagtgaattctgcttttcctgcttggagtatatatcagtcatgctattgcctgcacctgtgtagcctgtaactgtgtgataaatacattactggaatgcataaaaaacagttcttgccatattattggaactgacactgttcggattttgacttagcagtatttttaacatcaaaggaaccattctcttcatattgtactacagaaagagcctgatatccatatatgatcagtaacaccatctccaacttagacccaaaaaaattactgcgctaagctcacagaaagtttctctaagaaagtttttgtcttcttcaagcaataatctagttttggagttctacgagattttgtgtaaatatattttagatcttgttgtttggattgggaggaaatgtcaatttgactcagctagctgtagcttataagctagaaccagaagcatctttgttgtgtcaaaatgcaaaagggcaaattatagttaatgtgttaaaattaagatacgtgaatgatgtcatgggtaatctagtatagggggtttttattttatctagtagcttatggcttgactgcaagaagtgtatgtcttacaacttcccccctgtttacagtgtgctgcactgccgaagtgtcaggggaaaacacc

SEQ ID NO: 111162 - DNA, 963 bp, Setaria italica
  Intron number 2 from transcript Si001362m (locus Si001362m .g) derived from phytozome v7.0 (chr-ID scaffold_5; pos 29 841427 to 29842389)
cggccctagatccgtaactagtctttattttccttttgtaaagttccacaaaacattagcgtaattttacttctcaccttctcttttcttgtttttcgtttgcttattggcttctaattctcagaagcgagttaattgagttcatacttcatactgtgattttacaaatacatggaagaatgggataaaaagacacaaaccagcccatgacatgacaccattcataattacagccaaccacaaagcatcttttatgtgcttcatagttcatacaggttagatataataccagagcagctaccacttaatcttcaagcaacttcctcaattaaatcattttggatttagttcccttaacttctcttttgatttcctagactctatatttaaaagcttcagttagttttgagcaatttcttttgctagtagcggtgttgaatgcatatacatttgacagctttgattttgaatctccttgttgaacaaatgttatatttgaaatcgtaaaggcgttaggctgaagtgggacaaatccaattaaatgttatgcacttttcctaaatcataataccatggctgagatttgttataggtatattatccagtatttgtgactgtaaatcatgaactattctctattactgatgttgttttgtgcaactcatattgctgaataattaataggatggtgctagttcgtgatcaagatttgacctgtcctaatgcagctgctagtgctctcaatttttgagctctgagcactctgcttagaaacaaattaatggtgtatcagtaaaagtgaactggttgattgttgttaccaacatcatgtgaattcctacagaaaaactgcatcattattttgtgtattatatttttagatgctatggagtatggaatattaaaactattactaaatatttttcagggtccatcatcatctgaccttgagagtatcctctc

SEQ ID NO: 111163 - DNA, 796 bp, Setaria italica
  Intron number 2 from transcript Si002853m (locus Si002578m .g) derived from phytozome v7.0 (chr-ID scaffold_5; pos 43 031610 to 43032405)
acgctgctcaactgcctcctatcggcttggtaaccaactcttcccaaacacaacctgtgcatgagcacacttcatcacatcatttgtgtttcttcaggacaataacttttcacctctcatgtttaatcgagttcagacttcagacccatgcagattagctggtcttgatattcttaagcaggttcctgttagtatatacttttctgtattcttgcaacatgaaagtggctgtaaataaaaccagtaaaactgccgcacgtgtaggcggcacctagctttacatttcagaaatactgcatgatttgctggatgaagcaaggaattggctcgtagcgtagtagcctctgtccaactcgtcctgtagacaggatggcacccgggacccactcgccagcaccgtgacaacgactgctattgaacaaaaaggtttttgtgtaccacacagtccgtggaccctgtcggcactgccaggatggagtggggatgacatgtgggccacacggcccttgtgctcgcacatgcagcttcacgttcaagtgtttgtagccagctccaaaaagtttccatgctttttggtcatgatgataattttcgtatggtacttgttttctttggtaggcaagaaaaggtgattcgtttgattttcacgcgcccttgccaagcagagcgtacgcatgtggtcatgaactcatgatgcgttcatcttctgaatctttctgctgatttttgtctgaaaaaaaaaacaaaaatgaaatgtgtaggtacggtttgccgttcgtgtccccgaacaacatcc

SEQ ID NO: 111164 - DNA, 375 bp, Setaria italica
  Intron number 2 from transcript Si000268m (locus Si000268m .g) derived from phytozome v7.0 (chr-ID scaffold_5; pos 10 501184 to 10501558)
ccaagccgaaagcaacgtgccttcagatcctgtaggtgagtgctacaatatcatgtgctgtgatcgggttataatgatggcacatttttagattctgaactcttatcttccttcatgaagaactggaatttgattccttgaaacattaatttgaagccaaacactaagtttagattcatgtttatctttgactaacacaagaaagaaaacaaaattactacttagtcatagagtggcatatagaagtgaacaataagccttgctgttgtgtatgattgaacaaatgcaagtacgattctttttgcattttgaaaaacacaatttcattccttgtacttaattgccattgcctctttttactttgcatagcgatcg

SEQ ID NO: 111165 - DNA, 656 bp, Setaria italica
  Intron number 2 from transcript Si034054m (locus Si034054m .g) derived from phytozome v7.0 (chr-ID scaffold_9; pos 43 940691 to 43941346 reverse strand)
ctccatcgccgccgagccgcccagcaggccccccagtatggttccttgctctgtgctttcctgttggttcctgttttctcttcaggtactgtagcttttctgaattctggtctgaggttgtttgttgttccattggaaatgatcaaatgatgatgatgctgttgcctattctggttggctcagtagctagggagacaaccggagtagggtttttgtttgctttgtgggctcagcatatcttcatgtgatcactgtgatgccatttagaaatggttttgcattctgaaatggattgcgtgacgtgttgtcaggaaaactgaaatggtggttaaagtttcatggtcaatagtatatgtgattgccactaggcaacaccacccagggtgatttgctttcaagtcatcactgatcattcatcaaactttctcagtatccccattttttagatgcttagagtagtttgttcccgtacagaaagcagtagggcagttacgctagctctagagcttgattgcttgatttggtcaaagctattcttgtggtttgtatgtgtgaccctcagctttgtctgaaaagaaattcgtttgcacttattctcctttactttcattactgcaataggtggctctctctttttatttgatcgcaaagtactg

SEQ ID NO: 111166 - DNA, 773 bp, Setaria italica
  Intron number 1 from transcript Si003914m (locus Si003914m .g) derived from phytozome v7.0 (chr-ID scaffold_5; pos 36 249703 to 36250475 reverse strand)
aacttgaacgccggggagtcgataggcagaggaaggtgagtgaaatgtgggctttgcgcacgcgcaatcgtttcgggtttgcgtcagtgtacgttttcccccctttctgttttcggcttggttgatatcagtcttacagacagttgggttggtgatctggcgacatgaatcatgtgttagtatgcctcatgaatttcacaattgttggggtttagtgtgaggttttaggtaaaagttgttttttagttgcttttagcgaaagaaattacatatgcatagtggatgatgaaagcgagaatcatcctagtaggaactatgatttttttacatacatttagaagaaatagccatccaaactggagatgacattctactcctcaccaactgtgctaggttaagttcctcgcagtggacagaaatgacatgtttatttgtatctgatcgacggaagtataatactttttttgcttacgtcactaagagggatctaagcgataatattatcagttattagcaattagagatcgagtggatatgtaagcggttttcttcccatgatgacgtttgcttggacttgaaaggagggtttttgtctttatgatcaggatagctaataagaccaaaaaaatgaaatactcaaagattacatgttgcttttttcctggcatgcaccaagtacattcctatttctagcacatttcatttccacccatgcgacagccttacattcgcacaaaaaaaccaaccttacgtttcctttacattattttagt

SEQ ID NO: 111167 - DNA, 218 bp, Setaria italica
  Intron number 1 from transcript Si038557m (locus Si038557m .g) derived from phytozome v7.0 (chr-ID scaffold_9; pos 42 677965 to 42678182)
ttgtgtgctttagttgagtttgacttgtgtgttggcgtggtacggcgcgggttgatgccccaatccaaccggccggtattgtttctttatcgtttgtccaatctgaatttattcttctttttaataatataaaaggcaggagacctgcctgcttcgttttgaaaatgagttagctcagttagcaaaacgttgtttgcattcggcagtttggagagatc

SEQ ID NO: 111168 - DNA, 1021 bp, Setaria italica
  Intron number 1 from transcript Si005236m (locus Si005236m .g) derived from phytozome v7.0 (chr-ID scaffold_5; pos 11 445805 to 11446825 reverse strand)
ggggtcagtattatatcttcctccctccccggcatgtaagtacaagctggcaccggaatttccagggtagaaacaactcttggtagtattatgctgtcttgcacagcttctattttctcctgtcttccattgtccaagctcatagtacattttgtcagttgtcacacaacggggaagatgaactaaagttaacaaagaatgttagatggtaaagataattgcatcacagtttcagtttccaagctgtaagtcaagggccatctttttcgtaagatcctcaagttgttgggattttggtcaacatatttgaccagatccttgaggtatcattcatatgtctgattacaattgaatcatagagaagctccatgataccattagttacataccaacctcttataaaaagactactcttttatatagtagccagtgatatatctgaattcttattttctatatgatttttcctatttagttatattgttgcatttccttaagaaatttaatagattgcaggaaataaagcttgatataacttaaattttctccataaacggctcttaatggtagatatttgtccatctttatgcctttatatagatacctcaatttctgatatgctatagacctgcaacagacacttttatgtaaaaaaagatcataaccagtaccatttgcaatatcatgtgtggcaatttcgtaggtccgtgtgatttgcaatttgaaaccatagttgaattcaaaagtcattggcttgtgaaattatattccaatattgcacagaaaataaaatgccacatgctgctttttgtcatgcatttatttgtcccattagatctcttctagagtattgctaaattaagtcaacttacgctccatgtttgtaacaaaaaaattggtggcaagcagcttgatgcaatgtaacagtatttagcctcacattgcaccttgttctctggaagggatcacacttaatgaaattatctgatttctttgcagagtaccatatttcagtgtgaac

SEQ ID NO: 111169 - DNA, 505 bp, Setaria italica
  Intron number 1 from transcript Si000472m (locus Si000472m .g) derived from phytozome v7.0 (chr-ID scaffold_5; pos 41 443695 to 41444199 reverse strand)
cgctgctccacctcgccgggtacgacagcgtcacggtgagctcttgaaggactccccggccctgtcggatttttgaggtttttgtaggagtcgagaaaattttgcaaatcgatggctggtaaagactggtaaagactggtgtcgatgatttttgggctgcaaaattaaaatagttactcccgaacgggactaatccttgactggcgatcagtgactctcaatccctgccagactttactttaggggaaggtttgaggagagtgtgtgaatcaaacctgtaggacggtttgatggatttaaagtttgtgaatccaaatagatagtcctggaaagtggaagggctcaaagattttcttccaatatactacaactaaagggcacaaagctgttgcagtgttgctgtccgttcgataaaagggcacaaagctttgcaacatggtactatgtttcatccatgaacatcttactctgctttcaattttgataatcatgtttgacgttgcag

SEQ ID NO: 111170 - DNA, 594 bp, Setaria italica
  Intron number 1 from transcript Si004078m (locus Si004078m .g) derived from phytozome v7.0 (chr-ID scaffold_5; pos 51 78211 to 5178804 reverse strand)
gccggttcatctccttcgtcgctgcaaaatccgaggttctggttgccacagcaaaataccaaggctacaaacagattgctcctccgaggtcgcgtcgtcgtggaggctgagaggcgataatggtgaggtataaataaattgctcatcttttcttgttatcttaaatttttagttgaattagtcttgcatgcaattcattagtattaatcttgataggtatgattaaataaaaatgattgcacccgacttctacttccatatttgaggtttgagggaacctgtagagagggttgaagtatacttctttgcatatgcaacctttctacgtgcaagcgtgattaaataaaaatacaattattctttttaaaagttatacatgcatacaagttatatgtataatttttatataatttttcgtttcttttgcataatttatatatataatttttatcgtaacaagtttggaaatcaaaattatgcataaaagttatatatataatttcatcatttttcaaaaatggaaagctgtgaaaaataattttttttaaaaaaagacaagttcgagttgtcaggaatctatagctgggaacaccc

SEQ ID NO: 111171 - DNA, 845 bp, Setaria italica
  Intron number 1 from transcript Si035433m (locus Si035433m .g) derived from phytozome v7.0 (chr-ID scaffold_9; pos 44 307297 to 44308141 reverse strand)
tcggcgccaaccgcaaccaggccttcgtcgagttcgtaagcccttccccgcccctccctcccctctcgaatcccgaccctaccccgccgatctccaccgcgatccgatcgggaattcttggcgggcgcgccgctggatgtcctgttcggttttcgcatgcacatgaaattgaagcgttcggcagcttaattgtaggcggatcactggatctagctaggtttaacctgttgtcagcgctctgaatatggattacatgttgcaggggtcatcggagcttcctgcctattcagttatactgttgtttctagataatagatcacatcttgttggttcattttgcgttcactcaggcatcctttgattaaacctgtttgaggaaactgcacaattatgttgagttgcatagatcaggcatgttgaggggatttggggattctcatgccattacgtctgcttgcttctatggtcagtcagatcggtgaagagagtagctacagaatttgaacggattaatgggttatttataggtggaatatatgtgcgagttgcacatttgttttcttatgatggccagatgaattttgtggtgggtgattgggctgttccagttggagttaaaaaatgtacatgtcattactatattgtttcatgttaggatgctctgctagtaatagtggattagacgacaggtacaaaagcataaactctcgctttctcagaataaaatctgtgtactaagttgtgtttggttctactgcttaagtgctgaatgctcatgccagaattacttatgcggatctcgttggtttcttgctttgcagactgacgttaatcaggcaatctcg

SEQ ID NO: 111172 - DNA, 934 bp, Setaria italica
  Intron number 1 from transcript Si002349m (locus Si002349m .g) derived from phytozome v7.0 (chr-ID scaffold_5; pos 17 839483 to 17840416)
ctcgccttctctttcgacgccgacgcccccggaaggtccctctgtttcttttctttcccttttcgcccgcctcggtctgtcctaggttagttcttggaatttcggtttcttggttagttcaaagtattgaaatggcgatgccgtgaccagtcgtttggctcttcatgccctgaggtgccaatagaacctgtagactgaaaattggcccagattttcattgtttttttggcaaattttggttgacatttgaaaaaaaaaatgaatggattttatctgaacgaaaactaaagttgcctatttttatttatttaaccccacagaactgaaaatcactgattttcagctgaaattctgaacattgattagaaccattgcacttttgatcatgtgctcctgtttgattgagcaacaggatgtggttgcttctaaatgatcaaattacacctattccttgaatatattttaattttcattatgttgggttcttagcacatagcagctttgtgttgactgttgggcaatttgaaaaagaaagttgaacaaagtaacacgaggttagtgatttgcactaggtatcgaggttgaacttacaatgtgataggtttggttgagctgtaatgctctcagaatctccgtgattgttggccatgcgcttttgtttgtggagttgccttctcaaaacatacagttatattgtacctatcagattcctgtgtctttttttttgttaccttttgaggttatgcatttatttcttcatttctttgtatcctttcagaggcccctggttttgttgccacaatgccacctattattcgtattgatttataattatctgtagaactttcatgccatctttaattacgagactgattcttgattattcatcctttgaacagcataactgtctatttctttgcgcaagaagacgaag

SEQ ID NO: 111173 - DNA, 761 bp, Setaria italica
  Intron number 2 from transcript Si038664m (locus Si038664m .g) derived from phytozome v7.0 (chr-ID scaffold_9; pos 58 546212 to 58546972)
tcagcctccacctcgcgtctcccacgcgcgatcaggtccggtccgcatccattcgtccctcgcttctctgctatgtgtgccgattggtggttttccttcatcggtgggttcgtcaagtgtgatttgtggttgggattcagtgagtgtcgtgctagttgcagcaggttggattagtttcaggttacttcaactgtgttttattgatgtgtggaaggaacacttaaaattgatgcaagtcacaggaattcgcaaaatgtgttctgcttgagggcttttcaggcgtatcagttgggcctcagctgcaaaattttgtaggatgcagaaccacactgcaagcagattgtccagtttccaataatttatctgtcaaatagattccgatcaatcaaactgtttgctctgtactggtagcaccatctcgccatctagttgttgcattcatgtactggagcttttggggagtagctctcctgagctccatctatgactgtgaatctgtttgaaatttgtgatttcatcatgcgagtctgtttgaaatccatgcccttcttgattccaccagtatgcaaatggtcccttctgctttattcttcaaggcatgataagcacccaatgtggaaatgctcttgctgctcatatttcacttacagctcctgtgtttctatctgcagcccaccagtattcaaatatgtataattatgatttcttgcacaattttgacctccattttcttttgcttggtcaccagagatttgggttac

SEQ ID NO: 111174 - DNA, 878 bp, Setaria italica
  Intron number 2 from transcript Si037794m (locus Si037654m .g) derived from phytozome v7.0 (chr-ID scaffold_9; pos 11 86572 to 1187449 reverse strand)
ccaaggaattggaatactcggctggaccaacgattgtaagttatcagtaccttttattttgcttgagaaactctgatcttggttgaaatgtcaataccattccaaagactgtaacagaaggttcactgctcattgcataaagcactctttttcggtgcttgtgtgttgcgtgtgttaaatactatgggtaagagtgctctactgaaaatgcatactccttgcacttgtagcgtcataaaccagatgataaattcatccagtaaggactaaggagttcaatgtgcaattaattatctatggcccaatcaaatgtatatactcttttggtactgaaatgtcattggtatttcagactacgtagtttgcgatacaccacttatttctctaaattgtacaataagtacatatatgcatcctttcactattttttcacaagaacagacatggccaaacccttcttgcagtgaaagtaaaacaggttaccagagtagaatagttgagcagaaaatgcaaattttgatatgtttcccacattatagtttccttattctattcacaaatgtaaatccaccatttcatcagtttaccagaagagggagcatttgtggcacagcagtatttgcttatatacagaaacagtcatgttcaatggtcaatttaatcaacacagtcaactcctagattcaatttctatcttttgttaagaatcaatgagattttaggacagcatgttggaaacaagatcacaatggcctgtacatagtctgaaatatgcttttgcagctatttcttgcagataggctattatttgtttgtgacagaaggttgatatttggtttccaggaagtagcacaaaagatcggtgaagtgattgccaa

SEQ ID NO: 111175 - DNA, 838 bp, Setaria italica
  Intron number 1 from transcript Si001703m (locus Si001703m .g) derived from phytozome v7.0 (chr-ID scaffold_5; pos 38 512537 to 38513374 reverse strand)
cgccggcggcggcgcccacgccatcgccctcacaagtacgctcggctatagtttctagcttccaccgtgtccggctcttcctttgtagaattcggtctggttagaagaacattttatcacggcattacaggtttcccatgtttcgtcattgttatagagattgtagcaccgacgattatggctgttgcattgctactgctagtattgaaattttgtttctgaacgaaaagtttgttctgataacttcagaaacagggatgtagggagctcagtttggttgcagattgaggttgaattcctagcagcccagctactgctagggcgtcgatcctgtgtctttctggtcaacattaaacccactattttgagttcgcatttgtatatacacagctaagaccttctggttggcacacacatgttttctattgcataattcaaatcccctcttcccttgaatctgaatacgtgatttaagaaaacatcttgcgtacacagctccacactttacaattatagtgaatgtagctcttattttcacattccactatccattttcttgagtaatcattgattaaacatttcactatattgttccatctgctgctactttggagaaaacaactctaattctcaactctcaagtgattttgttcaagcagaatgatcttgtagtcttgttgccagacatgctgtgcaatttccaccagtttctgaagaaattaactgccatgaattagttctttgatgtgccacagtttactctattttcgaaaacaagcttacagttgactcaacattttcaggtgctggtgaagtatttacttggggtagaggtaca

SEQ ID NO: 111176 - DNA, 859 bp, Setaria italica
  Intron number 2 from transcript Si001662m (locus Si001662m .g) derived from phytozome v7.0 (chr-ID scaffold_5; pos 28 30793 to 2831651 reverse strand)
caacttagtcaaaaggtatggaaacccatattctcgttgcagctaggttaattctgatgatgcattaaaaagccccaattttgatttgaaatttgatcttcgtggtcgaaattctgatttcttgagtttcatgacgctttcttgtatcatctgaaagtatcgaaccgcccctaattctggtcgattcctaggattagcttaatctccttggaacaaaagtgctcataaatgtgatctttttatcgtctgaataaaaggttatggcttcaacaactttgttactggtttgcgtaatgattaagaggttatggttactcaaaactcagaaagatgccattttcagctggacgattctaagtgcagactaatatcaaattgagcttgttattgcagaagttgagctggtctatacatcatcgaatctatatatgtgttaatttgggcacaaagccacctaacgctgacctgaaggccgaataagtatcatattgtaatggacaccagtcaaactattcaaactctgaccaacaaaacccgtataaatatctagattggtgatgtgtaagattgcaaacgtttttttggctatattcaattcgaatactacttctttaatactataattctaataattttacataatataacactgtagaaatttatcagtaataattttatgagcttccatgatacaaaacaatacttgtttgtgtctggagagagtaacagaatttattcatgtagaggtgcagataatttattgttggtaaaagactgagtgcataggctgtgcttcatgatttgctaaaataatgcttttgcaggtgaactgagtatatttcagtcagtggaagaaagg

SEQ ID NO: 111177 - DNA, 470 bp, Setaria italica
  Intron number 2 from transcript Si034732m (locus Si034732m .g) derived from phytozome v7.0 (chr-ID scaffold_9; pos 28 62997 to 2863466)
tcgtggtttgcccgacaagggagcttgctatccaggtatatggtttggtgttgttgatttcctctgacaaatcatgatgcgacagtattccttttgattgagctcacatgcagtattccttttgattgatctcacatgttttaaggctgtacaagagctttctgttggagaaacattcgaaaccagatgtgtcagctaggataataattacactttgttaagacaacattttgtaaaaatgaaaaattgttcgtgttacattgcttttaagataagttacagaaaatggttcttcaaattgcaactgccaaaaattggcaaaatgtggaacttgaaactgtaaatgcattagtatctaaattttgtatagttgcagttgcagctccgagattctaaacataagttaatgaattgaagctttttatttcacttttcttaatcattgttgattcattttctctagacacaca

SEQ ID NO: 111178 - DNA, 699 bp, Setaria italica
  Intron number 1 from transcript Si035026m (locus Si035026m .g) derived from phytozome v7.0 (chr-ID scaffold_9; pos 96 49693 to 9650391)
acgcctgaaaaactccgacggaggaaccgtgcaacgtatgtccccgagatctcagcttctcattcctcttctgcttgtaatatatgtatttctatgttttgctcatgttgttactgttgtttttcccactaggccaagacagtgtattttatagttttatttcttatcttgctaagtattagtctgatgctggtgagttttccgtttaaaatgcgatgcgcactctgcttgtcattctggtggtcctccttccatttgagttctgtttctcttctagcatttatgacttatgaggaatgaagatgcacccttctgttgtttatgttgttatcaatcaatacgcagaagctattttttttccttgtttctcactcattttccttattgattcaagctaaactatctatttagtggcccattatcaatgaatgtttgatgagtacactatacctgttcagtgacattatttagtgaccgttttttccttgtattttattgatttttttccttgtatttctctttctttaccaaagtttggttttcctccaggacaccaggaaaacatccttttcttcaatcagtacatagttgattgacatattgctttttttggctagtgccatatcttatgttatcacaacaaggctaacaattcatgttgtactattagggtgctgtgtcagttttgaagcttttcac

SEQ ID NO: 111179 - DNA, 322 bp, Setaria italica
  Intron number 1 from transcript Si037113m (locus Si037113m .g) derived from phytozome v7.0 (chr-ID scaffold_9; pos 49 305918 to 49306239 reverse strand)
gaaggtatgcttgaaaactttgctagaccatgctgatatttaatttgatcattgttgctaagcactaagagcaaatatttagccctacaatcttggtttaacaatttgagttcctaaagacacccctacataaagatgagttagttgaggctcatagaagaccaagttggatggatgcttactgtgtttatctcatttgaattaaccagtcttatcgtttccccatgatattggttttgtttccgccatgattataactgaaaagtgattatgcggtaccatgattaatgcagccttgtctactctttgcagtatctgtaag

SEQ ID NO: 111180 - DNA, 892 bp, Setaria italica
  Intron number 1 from transcript Si037839m (locus Si037357m .g) derived from phytozome v7.0 (chr-ID scaffold_9; pos 47 041043 to 47041934)
gctctccgtccaccagatcgccggcggcgggaaaggtccgttgttcttccctcccctgtgccccgggttgcgcgcgctaggttccgtgtgctgttgttatagccgtgcgattagcagccccggtttggatagcgatgtcattacgccgtaacgccgatgccgtcagtcggcgttttggattgcatcacgtgtcgtgtctgtgctcaacggaagttgattagtactttgcagaattcagaaatggtgtctcgctaggatttgatttgctgggcaatgttgtgtttgtgtcgtggttcagaagctatggtgctgtttgggatgtggacttgcagtcagggaaaagtatgctgttttaattggtattctagtcgttatgaactcttatcaggcctgaaatacttgttctactgaattggacttgatgcttgattgctgcaattaggaaccatttggatgagtcatgtaagaatacacagcatattgagttttgcatcctattgggctgtgtagtacacacttgtcgtgcttgatctcagaggacagtcaatttctcctacacttgtttgctcatcttagcttcaagggatgtgatattattttcttgtgcactgagattcacccttgcctgtcactatagaatatagttgtttctagattggccaacctttcttttctcatagaaatggagagtatagagaattgaagaaaacacccaggtttttttgagggttattggatatcgttgcattttgataggaaggtgtagtttcactttattttggtttgaatttttaaatgctatatatgctacttttatgtcctaataaagtgcagcaggtcatccatttgtctcactattaattcctgccttttcagctgctgatatcatctt

SEQ ID NO: 111181 - DNA, 588 bp, Setaria italica
  Intron number 2 from transcript Si002528m (locus Si002528m .g) derived from phytozome v7.0 (chr-ID scaffold_5; pos 46 507929 to 46508516)
cgaccacgcctactggtccgttgcaaaatcccccaaccttcccctttcccccaaattacccgcacttcgtttcacggtggaattgcgattccggttatttttggtgttttcattgtcttggctgatgatgtctagctctagcaatcgaattggacttggacccgtcccttctttacttctgtgtggtggttgacctgtctattggcatgcaattcacaagctgattctaattcaattatttgtaaacttgcactgattctagcatcttaggcctataaaatacgctattattgacaatttgacatagcaagtcttctgagttaagtgtaattctgaatggatgtttggttccttcatgactattcttcctagttgccatgtgcttctgcttgctcgttaccaactaaccgtattttgaattcaatggctgtttcaacaacccttgtggtttctaccactatattcgattataatgttgttacccacgtaccctttattcttctgcttcccagacgatgattgttttgctaaagggtgattactaactatgttcataactcattttttttttctggcatgcagcgtaac

SEQ ID NO: 111182 - DNA, 564 bp, Setaria italica
  Intron number 1 from transcript Si002116m (locus Si002116m .g) derived from phytozome v7.0 (chr-ID scaffold_5; pos 42 456011 to 42456574)
cgtccaactccggcaagtctcaccttcttctcgtaagctaagagccgacgtttatacccttttggtcaaaaaaaaaaaatgatgcaaatggcaccaacatggcgacacgcttgcagtattagtattttgagtgtcttcagtaaatttccactggttttggtctctgagcgtattgccatgaaattagaaaaaaacctatgggctatatcgtgtatgatcgactgtgtaatgcaatgtagattaagtgctatatttagtatcggagatctgcaggactttcaggaatttgggcaactttggtaggcaacaatactttccaacattggcgatgttgaagcacaggggtctttctgaaaatagggaacataagtgttcgatcttcttcacttcagacttacacaattgcaatgctctaaatgggaggctcctttttgggaaaacaaagtactaggctgggagtgatgctcaagaaaaaaaacatgatttgctttctgttttctttgggaagctaatcagtgtgtgcttggtatcttaggctgcagtgcagtgcatattgccaaagga

SEQ ID NO: 111183 - DNA, 993 bp, Setaria italica
  Intron number 1 from transcript Si001697m (locus Si001697m .g) derived from phytozome v7.0 (chr-ID scaffold_5; pos 39 312820 to 39313812)
ccgcgtcgttcgagcaagggaggaggcaagtggaggtacgcgccttgctaaacccacgattatgcgcggggattggaaacattggtaaaggttgttctgattgcgggagaacatggtggagaaccgtaggattcgcggcgctgttcgtccgtttcggttcgtgggaatttacgtaacgggaagcgtgagaaggatttccgtttctgcggtgattctatacattcccgccgcttctctaggtcgccgttgacgaccctgccctcgcgcggcgatgccaccgcccaccgttgcctgttggctgttgccgaggcgagggtctcctctcttgcgtagcgtcccttacatcacagcagagtagatggtaaccactaaccagaccatggaaaacgtcctctatagtcaattctctgcggctatgaaacttgtttatgctttgagctgtcccgcaatgtgcttcaatcttgcagttcccttttttaggctaccgtgtcctgtgtggcatccaaactttttcctattttaggccccatttttcaactaacctgagattatatgaatatacatccatgaaaattactccctccataccaaattataagtggctttgacttttttggtacatccactttgctatgcatctagacatattgttatatctatatacatagcaaagtgaatgtatcaaaaaagtcaaagcgacttataatttgggatggagggagtacatgatagtgtataacacaaacttttaaggaaataagccccgcattaatatgttactatactctgccagtgatttctaaagggcttgattcattatttagctatttcctctcttttttttctagcttttaccagcttggttcctgaattctggcatcattatttttccttggaattatgaaaaatcttctgtttactagggaaatcaagaaaatctgttgcagttttcttattattgcgagttatgacggtgtatgttttaggtctctt

SEQ ID NO: 111184 - DNA, 806 bp, Setaria italica
  Intron number 1 from transcript Si034927m (locus Si034927m .g) derived from phytozome v7.0 (chr-ID scaffold_9; pos 42 64466 to 4265271)
gcccgccgccgcgtcggcctccggcggcaccagaggtacgaacgagattcctctgcgatctcagcggtcggtctgatgggagatgttttggtggattccatcaggttttgatggttgtttccatgaaatttcgtggctccactccttttgtgataataattttaccgttttggtggatttcatcgggttgatcgtagccgtttgtcgagccggtgatgggcatgcggagattgtagattttgttggaatttgatggttctgcattttgcatcttcggtttgtgatccagcgttttaataagagcgaattattctagtgagatgcgggaattcggtttaccaatttgccccgtatgtccttttaatacgttgccacgttgatcatcgacagttttcaccaactctgaaataattcctgacagtaataacgagcttctactgatcataaagtacggttaacatttttcagtatgttcttgcagtactgatgtattgatctcctatcaggccttgtttagttggggaatttgggaggtgccaaattactgttacagcactgtagcacactgtagcgtttcgtttgtatttgtgaattattgtccaaatattgactaattaggctcaaaagattcgtctcgcaaagtacaacaaaactgtgcaattagtttttaatttcatctacatttagtactctatgcatgtaccgcaagtttgatgtgatggggaatcttctttttgcatagtgtcaaagttgggagttgggagtaactaaacatggcctcactatcaggttgcagtgctgtaagg

SEQ ID NO: 111185 - DNA, 929 bp, Setaria italica
  Intron number 3 from transcript Si002952m (locus Si002952m .g) derived from phytozome v7.0 (chr-ID scaffold_5; pos 36 944008 to 36944936 reverse strand)
aggtgcagttcgaggacaggctcttcactcttcaggtagtacacttgattctgtcagctgttgaccttagcttgagattagtcacgcgtcctcatgaaaacaagtaatcaccaacctagtgcttgcttactgatgctcggaacaagttagttgtgtacatagtttcttaacaggatcatgagaaactgaattgctgttattttgaatgcaaagtaacaggcaacaatttaactaatggagagagctccaaaacaagttaaagctgaaatatagtttagcatgtccgtgctgttttattggccctaacatatacggactcaatatgaaaaatattgttacaaggtatctgtaagttgtaaacagactgtgggtctaagcttctgcataccatgaaggctctcttgacggatgtgattagtttggacctcttgtggttaatcataattagatcaatggtctcttggtgcaagtaaagcgagacagtcagtgagtctttatctgtgttctgtgtcctgttcagtaagtccgtgttggttcttcatcataatttttgcttgtagtatctgaacctggaaaccttttctatgactgtaattacctgttttctgttcaaatactttgaatctgctaactgttgttaactatgaacatgcaaaataaacattggttttatttgtgttcacttgtgtacaataccaacacgcttttttcccctgtatatgtgaccacatgtgcatagaggtttagtaatttggggatatatggatttggcttgatcaagaaaattattttgtcagagtcctccttttacctaccccaactcattcaaaattatcttttgcatttgtgcatctcatggtcatgtttagctcttactgcatttgttccgctttatggattatgatattctacatcctatatctgcagat

SEQ ID NO: 111186 - DNA, 829 bp, Setaria italica
  Intron number 4 from transcript Si034420m (locus Si034420m .g) derived from phytozome v7.0 (chr-ID scaffold_9; pos 35 219621 to 35220449 reverse strand)
ggaaggaagtcttcttcctctgaccacgaaagtcagtaagtagctgacttccatggttctgttaccagttatgcttctatttgaacttgtaccacttttttgcttttgcccttttcatgttgtggttgtttctatgttgaacccgtcaccatcagcggccaaagtattccttttgatgcccttctctgctaataatttgcttgtaccagtttggtaatgctttgggtacatctcccatctatcttattggggctgtcaacagctagtatttctgaaacatcacattctgacaggatgattatttatgttcagttagtgttcttctgagatgctactatgtgatctaaacattttaacctcttatgttcttaaataactaaatacggtaagcatgtgtctcgactcactagcacttagagcctgattggtttggttccaaaatttgccatgccaaatcttgggcatgccaaaacgcaggcatgacaaaattttctgccgaaacctgggcatggtctttaggatatcacttcattgggtgccaaccaaacaagtgccaaaatttatgggcttcccctaattttggctgggcaaattttggagcccaaccaagcaggctcttaggtcctgcggtggtttctgattttataacaccacaccaaaatcaagaaaagatttgttgttgatagcatttgaactcaagtttgtgtatactcggcacacctcatactctattagtttccatcttttgcatgataatacattaatacggtagagttgtagcctgttccaaaatgacatgtgcccatattctcacctggcaggtacagtc

SEQ ID NO: 111187 - DNA, 961 bp, Setaria italica
  Intron number 1 from transcript Si000760m (locus Si000760m .g) derived from phytozome v7.0 (chr-ID scaffold_5; pos 12 556780 to 12557740 reverse strand)
ttccggcgtgctttatccgccgcaatccctggaaggttagtttctttctcgtcctatctttgtgggcgtaaagacttttatttgtttgtggggatagtccggaggtttctgctccgatcagtgttctatataacagtttagttcttcttgagtttttgatcgattttccgctgaaaaggcaagctatttgattgcggatttgctgttcgtgactgatcttttctgttgttgttaaagtttttacctttatgttttggattggtttccttgggggcaatcgtgtttacacgccttgagtttcgatccgcaaccctgttcgaggtttgcatttgctgccggattgaaatattttaaaattgcctcatgattttacataagacgtgtttgcctgatggttatgattttagaggaagtcacaatctttttcgctgtccttcttttgtagaaagaagagaagtcacgatctcataattgaacgttacttttggataagttgttctttgtttggcatttgcgtttaactcaagaatttcccgcaagaattgctcactgtttgatgtgtcgtcccatgaaaagtcactaacctgacaatgatagatctgtacgccgtctagcaattggtcaaccacagacaaatccaactgatgttcagatgtcctgctttatctggtcgtcctagctctcgcagtttctcatggttcaacgaatgcatttgtcaaaaaccgtgcgtttgcaccccttttcatgcatgtttttttttcacagtgccattagaaagggtcaagtcctgtgtgtgtattttttccaaccaaatattggatacttgctttggctctgttcattgaactagacatgtttctattacaataattgccaatataatagttgctgttgctcaaccggttcagtttacaattgtgcctccctcttgttgtattttaggattcttggggaaccctct

SEQ ID NO: 111188 - DNA, 622 bp, Setaria italica
  Intron number 1 from transcript Si035425m (locus Si035425m .g) derived from phytozome v7.0 (chr-ID scaffold_9; pos 75 18262 to 7518883 reverse strand)
atctcctaaggtggaggaaacctcgcgattcttttgtgctttgcatctatgcaggaattaattttctttctttcgcgcactctgcatagtaggtttccacgttatttaggatccaatgatccatatatctttgaattcgatatattggaggctatgcaaatggttgtactggtgagttggtgggaatgcagcagttattgcttatttgggctttggtgtcgtcctgaattaggattcaaacagcaatagccaataagtcttcacttgcatgccatccattgttagactttctgcattttagttagtcggctgaagagtttctactacatctctgctctatatgtgagcatgtttggtaaatcacttgctgattatgatagtcttgaattatgaacccccttcttacctgccaattttttattagcagaattaaatggtacgggcagaaaccatgatgctagttaaaatatcaacatttgggtcatggttgttatcagtgattcggttattaaccgagtcttcagtctgttcacatctatgaccatgccacaagcattctatattttctggctaaactggattttcatttgaacgacgttgcagttcccttcccaagcaggat

SEQ ID NO: 111189 - DNA, 935 bp, Setaria italica
  Intron number 3 from transcript Si003247m (locus Si003247m .g) derived from phytozome v7.0 (chr-ID scaffold_5; pos 42 312205 to 42313139 reverse strand)
ttcaggaggagcggcatcagaagcgacttaaagaggtatctttaagatgttgcttttttaatttaatttatcccaataaaatgcatatggagcgcatatatcttgttttagtttatatggcttgttaaattcaaaaattattatttttttgttggctaacgtttgaaactgtcacttctgaaaacatgaagcagctttttcatctcagtttatcactcatgttcctgaatattggaagaatttgccttgtttcagaacatacgttaaggaccataacagttgtcaaatattgttcatgctcgaaataagcatctttctatgatttctcaaatctggaaagtttggtatcctttaccgatttgacactccaatgagctaacgtgcctaaggctccttggtagccggccaaagtggtttggcaatagataacatgtgatgttgatagcttgcaattgcgttagagcaacacatgacaagtgtgagattgtccttttcatctttcactttctcttggggccatttgcctctcaagatggtgaaactgcatacacctgtgtttttaaaaaggctggagcctgcagtcctgactcttgaaagtacttctccccgatttggccatttgtcaaagttgaagctgagtatgactaaatatcgtgtagttttgtcactatcaatgggagttgggacggcgatgggttgtcaacatggtttgtgcaaatggtcgaatatgaaagaagcaaagtgtattgtttcacctctatttagggttgtggggtataattacccaattggtttaatgcttatattggacttttggacccactgacctgagcaatattcatttgcttttttggggtgccgtttcatgtgttctctaaataactattttggtttatgcagcttttggaacgagtgacgccagtcattgtgaggaa

SEQ ID NO: 111190 - DNA, 476 bp, Setaria italica
  Intron number 1 from transcript Si002126m (locus Si002126m .g) derived from phytozome v7.0 (chr-ID scaffold_5; pos 46 78642 to 4679117 reverse strand)
actgcttcgtcaaggtacgtgaactctctgctgtaattttcgttacatgcatgctttggcacggctgtcatgcttgctaagcacatagctccaaatgcagagtgcacaactggaaacttttggtattggaagaggtagcatggaggaatctgtaaaattttaccaatgataagatggcctaccaatattgcgcatgccaacgctactttaccttatgtcttggtggcatcatgtcttggtgcactgccgatgattgttttttttccctttttctgaaaaagaaaatgattacttacctcaaactcaaaataattgacgcaagttcttcatatgcaataatattttttatcatccactcaatgcatgtgcctaatgagtgttaccacaccgttgtcatggcacgtaccaactttttgcgacacttttctgtcctgcctgcagggttgcgacgcctcggtgcttctggacaacagcac

SEQ ID NO: 111191 - DNA, 809 bp, Setaria italica
  Intron number 1 from transcript Si034362m (locus Si034362m .g) derived from phytozome v7.0 (chr-ID scaffold_9; pos 16 726784 to 16727592)
gcgcctccgccgccgactccaccatccccgacgaggtgaccacctgaccgacccacccacgatcaaacatacgtgctgtcgtctgttcttggtttactactagctcctccaatcttctcggtccaatcgcccagttcttatctgttcctgtctccgttgtctagcccaaactaatcatatcctctgactgacttgcataaacaaagcaaggattcagattcatcttggcatgtcgatatcggagcgttaggtgagaagaatccatttattcatgagcggcgtgcgtcagggacactgccgtttcctgcatgactgcagtactgcacacgcaggtcaatgctctgggagctcacaataggggtattgtcccgtccgcagcgtgtgcacaccaaatacgggtcctgggcctcctggctagataccagcaccgtccttcacgtcgccagggagtgtcccctgaaattggcagatttcccgtccggtgcacgggacagtagcggtgcacccgacctgagggattgaattcgtcgtgccaacaactattctggcatcgacgttgcaccttcagctcgtaccactatgatgtgtagtacagtttcttcttatctatcatggagaagaggaagcactttttacgtcactgtgatgtcatgcctaggccgaaggaaaaaaaaaagattcacgagaatttcgctagaattttttgaaacggagtttggctacaatttgaaaggaaaatagttcgatttctgcaggatataacatgccagcttcttttttcccccctttttattaaggttgctgagctg

SEQ ID NO: 111192 - DNA, 938 bp, Setaria italica
  Intron number 1 from transcript Si039214m (locus Si039214m .g) derived from phytozome v7.0 (chr-ID scaffold_9; pos 15 513890 to 15514827 reverse strand)
gcaacctaggccatatcgaagaagctctgattcaagtatgagttgctgaaagctttggctaggccactgctaccttttttgaatgggatccactttggtggatgtatattttcctttctggaactatattgcccacaaagaaaaaagtaatgatcatttcaggatactcaggccaaatatcatcaccaacaatatatcctatgcagtttttattcgagcagagcataacaaaactatgtttcgtttcttatctatcattattaattattttatttgttcactagaagcctagaagctaagtatagatcctagtgcctagcctcattctcttgcaaattattaggagccctaaagtattgccaattctgtcttattatctggctaaaaaagttgttcgtaatcttagttagcttggatgcttttattgaacacttggcttcctgatggattgctgtatcatgttgtttaactgctaaatacaaggaagtatcatatactctatacaagcaccttgtaaaagtcaaaatcagaagcattcaatatttcaatgttttacgcaactggctcttatggacgaagacagagaactttgttatccctagttctagtgcctggaatggcatattctgatacccatttttcatataaaaagtagtatttgattggtaccatataagatctttggattgtaacttattttgacggtagctttattcaatataactttatgaattatgaaataactatgtatatttttcgtagtcagccatgtcctgttgtaattattttaaccttgtgctctgctattttgcatatttttttatctacccattctgaatttttatgttgaaatattgcgtctaaacacctgggtcttagagaatgtttattttatatcttcaggactatattgaagacaacgacagccttgctctgtt

SEQ ID NO: 111193 - DNA, 1018 bp, Setaria italica
  Intron number 1 from transcript Si034737m (locus Si034737m .g) derived from phytozome v7.0 (chr-ID scaffold_9; pos 16 652958 to 16653975 reverse strand)
actgcgacccgcgccacggatctgcggctgcgacggtgcgttgctccctccctccccgtcccgctcccccctcctctcgtcccggaccgcaatgcggcctcggcctcggcggcggcggcggcggggggcgctcctgctcgatctgccgccgccgttcgctcgaccctgcgcgccctcgccgccgacggggttcgcccctccttggcgcgcgcgcgtgctcccgcggcggatgactatcccgtgccgcgattgctttggttctgttttcctggtctgttaggattcggttggtttcgtcagttttgggattaggccgcccgtttagtttgttggtttgcgatttttaatctgcttctgctctcgcgccggacgcactccccgctcccatctcgcgtcgcgctaccgcactctgccgcactggtgcccgtcgctgtcctgcatttgaaccgcgtcaaattcaaagctttttttttttctgcgcgtgcgtttggctgcctaatctaaaattgttccaaatcttcttttcgtttcttgcgtgtatgcttgggcgcctaatccaattttgttagcttccgtgccagggaaccgaattccagggcgcctcgttgaacgggaggtcccccagatcggaatccgcgagtaaaatagcccggaaaagggtgctttatttaaagtgggggacggtctttcctctttgtgatctgtcccccacttcacttcactgctcctgctatttctttttcacctttggctggacgggtaattccccatttaattgcatactgtacaagtctttgggggcgtttggttggagcatttaattccccccaacgatttccgttcttgggaggcttccatcttggtttcagttctgcaggctgtgtgattttggttgggcttcttgaattgtcttttatttttagcttcctgcttggtgatggcttcagtgtgttgtgtctattgactggtgtttgtctttgcagatccgtgtgacagaggtcaggaatttatttggtgc

SEQ ID NO: 111194 - DNA, 432 bp, Setaria italica
  Intron number 1 from transcript Si037311m (locus Si037311m .g) derived from phytozome v7.0 (chr-ID scaffold_9; pos 42 354882 to 42355313 reverse strand)
cttctgagcaccggtactcctttatttcaatgccccatctagttttccgccctttattttcacatcctaagctcttgaaaaatctgcatatacatctggtcgtctgccttgaatatgcgtgtgtttatgctggttaattgtttgacccatttctatgtaatgatgccttgagagcagcaaccagcaggagaagtggatggtagctgaatatctatggtgaattggtgataggaaaccagtatgacttctggatagatagcacatgcaaaaattgtacttgaactaggcttgaaacttttttagctactctataatattttatttccttttaatatactctgtggcaataaattttttatgttttagaattaatatcaaaatcttttatttagctctctgaaagttttgttcttttccatttgaagttattgt

SEQ ID NO: 111195 - DNA, 670 bp, Setaria italica
  Intron number 4 from transcript Si037807m (locus Si037807m .g) derived from phytozome v7.0 (chr-ID scaffold_9; pos 52 005640 to 52006309)
ctcgatcttgtacaaggtaacgtggcttattgatgctatttttttagtttcagttactagaattgacacttggacaggtaatgtgttattgcctaatcaaagaggaaggcattctcatttgcataaggaaacaaatcatattcagtgtgttatcatgatattcatcggtttgacttgtcttagtacataatcattaactatctactatgcttgttccagtattcaaacatcctttcttgtaattttctattctgtatttgcaatgcaatctttttctgttgataagtacctgtgattgtgatgtaactagagtggcacgttctcaacattcttctctgtccatcaattctgtctagctgctagaaagttcatcttgtatctcagtgtcacatggtagctatacttaggggggggggggggtgctgcaacaccccttcagcccatgaaaaatcatgcaaatttagcctagtagtcttaaagttagtacaagtttaacagcttttaaaatgtaaagttagcccaattataagagaaccagcgctccctttgggctaaccattgctttgcccctgctgtcatgaaagatttcttttgtctaacttcaacaaggagattaattactctacatgacctttgttttgtgcacagtttttgttgaaacgttggacag

SEQ ID NO: 111196 - DNA, 801 bp, Setaria italica
  Intron number 1 from transcript Si036941m (locus Si036941m .g) derived from phytozome v7.0 (chr-ID scaffold_9; pos 41 236355 to 41237155 reverse strand)
ctccgccgggttcaggccgaggccggcagtggaaggtacgaaacgccggcgacgccgcgcatctgcctgtgagcttgcttgtttcgctgactgtaagggcccgcctgccagtgatcccctttctttcccaagttctggctaattgaagacatagtcaaaggtttgtctacggggaaaaaaatatttgttgaataatatagttgatgcccagctgttgctgctaatgaacttgcgtttgtcaatgtcttgctctggaagctgtgtatttgtcatggccttcactgtccagtgatgacatggttcataatctttgcgcatgttgtacaaacaatagcatagactcaactagtcaacaagagtgtagtttaagaagaactaccgttacaaatgagcttcttgccttcttgaataggctaagacctcttctgttttctggtctcccaaatttcaggtgcttgttctgcaaatgcctgggcctgttgaaactggaagctagctagctagtttgatcattctctgggcagttctagaaaagtttgatatgatgtcatgctgtggattccctgctactgtgttgaaaattatgatcagacatgtaattcttaatttatatgacatacatgtggaaaaaactgaaatttggtttcctcatcttggactaaaatttatatgactgcttcttcatcttggactaaaattgttggtttccttgactgcttctttatcttggattaaaattgtttctttctgaccttttcactcttaggactgtggtgctcataaagtctgacaaagataacc

SEQ ID NO: 111197 - DNA, 1033 bp, Setaria italica
  Intron number 2 from transcript Si002958m (locus Si002958m .g) derived from phytozome v7.0 (chr-ID scaffold_5; pos 44 965078 to 44966110)
gaaagccgggcccgagagcctcaagtgccttgaaggtattcctccgtctgattagacgattccgctggtcatagattgggcgattcggatgagcccctttttgtgaattttgttttatgttagcggccctgtctaattagtttaggatctcaatgtgcgctttacgaacccataaatccgcggttcaatccctgcatcatttgttaggcccttgaactgtatgctggcagggttgaccccctacgaatgattgctgcgtgacccattgcgttgtcgttccaggcgttcaggaaatctgtgactcaattcgtgctaccttgctcggaaaactgctgctgtactggtggtggttggactaacagactggctgctagagtgatttttggtcccctcttttttatgtctcactagttcatcttatggatgggtatcaagtgctctaagctttgagtattcactggaaaatttctaatagtatatggagagctgatactcgataataatttgtatttggcacattgagtcattactgatgaaatccagtggcacttttgaatccgtaaacagttatgaaccacttcaggtggttattgcttatgtatccatcaggggactggctgcttgcttccagttttcttctggttgcttgtttggtatagtgaagcttacaggggcattatttataccaactacgtcttaagtatatgacgtctagggcaaggtattagttgaaaaatgaactaatttgcatgtcctagtctttattatggttgctcacttcaagttttctgttgattgcttgcttgttattcatatttacatgcaaggtaccgattttcatatttatgatgcattttgcattgttaaatgatagcagtattgctagattttactatttgagagttcatgataggattatgttgtgtgcatgactgatttcaccttgtgcatgcgtgtaggtttctgtcttttaatagatgttactgaacagggttctaaatgttttactaattcaaattgaatcttgttacag

SEQ ID NO: 111198 - DNA, 745 bp, Setaria italica
  Intron number 1 from transcript Si000478m (locus Si000478m .g) derived from phytozome v7.0 (chr-ID scaffold_5; pos 63 3659 to 634403 reverse strand)
gagatctgcgacatctgcaaccgcgaccccgggtaccgccacctctcatctcccccgatccctgcccagattccgcctgctgcgcccaaggattcggtgtttccccgtcagattcggggcgcccatgccggggctccgtgatggaatgtgattttatgccgtggaacggcgtcattccggaaatggtgggagtctaatttaatttgagcggggatgaggaggccagactgctgggtgcttcggttattgggatgcaatagggccatctgcctgccaggatcgtgggtcgcgagggccgaatctggttcctacgatcagttaccgctctgcttggtttggttcccccaagttagagcaactttctcatgtagtcatcgttcgttgaaatgataattaggcaatttgccgagtccttcatgcttcatcattatgtgaggtgacaaaatggcattctactgttctaaaggagagagggatggtctttgcatcctatgtagtcgctttaattctgcgggactgttttagacattgcccccttttatccctcatgtattcgcaaaaaaaacatgaaccacgacatcaaatagtctatttcactcgagcgaagaatctgacatgtatgattgttgcttgcatacatgtacattttattctcgctaaaaggatacatttgatttatttttccagtcgtttggttatcagttaatgatccttcatacccttttatataataggcaatcaaagg

SEQ ID NO: 111199 - DNA, 659 bp, Setaria italica
  Intron number 1 from transcript Si002180m (locus Si001936m .g) derived from phytozome v7.0 (chr-ID scaffold_5; pos 29 008635 to 29009293)
gcgggtggaagaggtaacacctcctggattgttgctaatgtttgtttttgttggcaagttgtaggctccaatctgtgggtattggttgacaattgagaccttttcatatgaggcgtttgggttcttttgaaacttagttgaaggagttctttttgttatagttatatagagcttgaagtgtgcgctgcttatgatttatcaagtccatgtagcttgtagcatgttagcaccatcttaattagttcgacaagactttcctgttgaatcacttgtgaaacatcaattattagtacattacttatctttgtaacaagcccaactgtatctaacactgatggatgactaccaatttttaaatcatttattaagcaacacaaacaaccaattttttcatgttaatttacagagattatcactgtgtgctcatccactcacagattatataaattgttttacctgagaatgcatggcagctgcagatgtaattttgaagtttggagtgtgtgggtgtgtgtgttgtggtttcccttcttctatcaatgcaatgatacacagctctcctggcgcgttcaatgaaaaaaatgcatggcagcaaacctatttattcataatacctctcttaattgttttccttgtgaatatatgtgcttgcagtgagg

SEQ ID NO: 111200 - DNA, 937 bp, Setaria italica
  Intron number 1 from transcript Si034000m (locus Si034000m .g) derived from phytozome v7.0 (chr-ID scaffold_9; pos 58 177593 to 58178529 reverse strand)
cacgtccggcctgaggcagggcgactgccgctcaggtggtgttcctataccttgctcttagggttcattgttgttcggttaattcgaatcggatcgtgctagttagttatcctcggttcttggagctcggaggcttcctttgcgggggtcggtcagagtagagatcttgaattggtacttgttgggggtcgaggggaacaaaccctaggcaccgcacccctccccaaattggttccttcccccccgataatttagaagctagatctattcagattcgcagattgagaagtactgtcacatacgctgattttattttttccaattagaagctcctggggtgttgtgctgcagagggaacataccaagatcctcctacatacaggaagaaaaatcctttgtagtggtgggactgtcatgcacccaacattcttatgctcatgttttagattaggcttgatgaaacactgtttccttgataagaaactggtgagcattgcctttacatcaagaaattattttgcggtttgttataccatcttccaacataggaactctcagtggatcggtgtgcttacctgatcttttatccccacaaactaaataaagaacagtaatgagattcacattgtaactgaagctaggatatcgttatggcttgcggttgactggtttgcactattgaatatatgatctcatcatattgcaattatgttacaagcttgttgggtttcaatggcctaattgggtgatgaattattaatttttttcatagttgtttctgaataatctaccatacatacacaggctacaagtgattgttcctgatatcaaaattctcaatgttaaaataaaagtatttgagagactttcacttcattatattttggtaactctacagagcccctcttactctcatctgctgcctgtcacaaaacag

SEQ ID NO: 111201 - DNA, 636 bp, Setaria italica
  Intron number 1 from transcript Si037105m (locus Si037105m .g) derived from phytozome v7.0 (chr-ID scaffold_9; pos 34 48826 to 3449461 reverse strand)
cgtcgggctcagcgccggcgacgagtatccactaggtacgcccttccattccgttcccttcccgctgcgcgaaatcgagctccccaaaccctaacgtcgattctttgcaaaagaattatcggatgtcctatactggatccgcccctgatcctgaggggttcagctgtaccggcgtgtcccacgttagattcgcccctgatggccgccgccgtaatcaaatctcgagcattcgtaggcatctctaaaagagggcgtccccacagcatacccttgttttgattactgcggccgaagttggtggtaaagatcgatttgctttgctccacggaatctgttcgtttgctgcgagccctggaatcgaaatctgtctgtttaatttgttctggatttctatgctgagtggcggattctgtagagtagtaaaatttgcagtttaattttttagagattccccatgtcccacgtttagatttgcccccgcttagctaatacggattgtcgccacgcagcagtgaatcgtggacgattgggaccttggtttgtttattgcgtaattatgctttactaatgtcagtgctgaagcatctgatccttttcttttcttaccaggtttgtacttgactgcaactcgcaaca

SEQ ID NO: 111202 - DNA, 588 bp, Setaria italica
  Intron number 3 from transcript Si001704m (locus Si001704m .g) derived from phytozome v7.0 (chr-ID scaffold_5; pos 45 501358 to 45501945)
caaaattctttgagtccactgctgccgaggcttctgtaaggctcctttctcaattttctgtaatatatgggcaatggtagactagtgatttacttagtgaaggtaaccataatatcagtttcctttgaggccactggggagtggggagtgaaaaacaaatggttaatgaattacaacaggctttcattgacatgtagacccatcagttgcagttattgtgtctcagtaatcagtatgcagacaaacttaacaacatagtcttcttttagatttttgatatatgggtttagcttgccaggttttgctaatatgctaaatcacaccctggaaaaaaaagctattctgtttacatatgcttaatttaagtgatgatctgattatacatggtgttttagagcacaacagtatagccttgtagacctgatactaactgagctacttttatgcttgttcagttcaatgcatttcgtcttaacagaagtcaaaactgttgtcatctcttcattctttgtgtgcacaattacattgaattggatgcttaactatgttgatgtggacaggagggtctagttgaaatcagggaagagt

SEQ ID NO: 111203 - DNA, 754 bp, Setaria italica
  Intron number 2 from transcript Si000613m (locus Si000613m .g) derived from phytozome v7.0 (chr-ID scaffold_5; pos 41 556969 to 41557722)
atcaacaattcaccatacaacgtaaccatccactggtaactcctacctcttacttaaactcgagaaacttcttcttcttcttcgtcgtcgtcgtgtcgaaagacaggttactttgcgggaaaaaaagtagagagaaaattatagggttttgtcaacaaaggacagtattgcagttgctttgagttgttatttttttctcttagaagcatcgaagtcgcctgtgacatcaagacatgtacaaggtgccgtaaggaacctgccatcctagagttttattggtgtgatggttttgatcggtttatatgttggattttcttagcctccatccggaagagccgaaagtgaaacctccgaaaaggacagcttacctgtcgaaacatagcctcttaactgtatggatgctcaccccaacattcgccaagtgtagagatgatatggtttatctttacaacagagtgtatccaaaaagcttaaagaaaagtgagacatggaacgccacttaggagtggcataacgtcagaatcacccaaaaagtaaccaagattaagctagactgttactggtaccacttataattactactccactagggcactaggagaagaatttgcatggttttcacactgccttttgcggctgaaagatacagcaagcaatggtctattcagttcagtgcacttcgacagtatgggcaccacccgaggcagagctggcctaactcttaacgctgctgatgctttggaaattgacaggc

SEQ ID NO: 111204 - DNA, 862 bp, Setaria italica
  Intron number 1 from transcript Si039125m (locus Si039125m .g) derived from phytozome v7.0 (chr-ID scaffold_9; pos 11 649791 to 11650652)
atttgggccggcgttgtcatcaccgcattggattggtaagcttctttgctaccctcttcttcggttatggtaggcatttcgcacaaacggtgatgtatctggtgattttggtgctagatctcaagctgtttccgtaaattggagtatccaatatccagtttagtcactggcttattgctaatttataacaagataatgtcaatctggtgtgaaaagtgcattaaagattcttagggagggtagcagataattctccaattcatactagatttgcagcatttgcgtctttgttgaacaatgtaggtgtgattagaacccagtatttcccgttgaatacatcaaatgtggtgagtaccttcatcactttgctatctagtcagctggtagaatgttaaagatttgttgctcgtactcatggcctacaaaaatggatcaagaagccttaccaccatgttcaattattttatttacatttgtgtaaaaacttcagatgcagaacaaatacatgatattatctatcaatttctgtttacatgaattcggtagtgaattgtatctagaatttcttttacattcaaccatatgaacaagaaccctaacctagtatggacttgtggacctatggtgcacatttctaatatatcgatctccaactacttgacgattatagagtagcataagaataacattaaatgcaagttcatgttagtttatttgatttgaacttgtaaattactcatcaatgtcatggtttgtgagcactgcattttattgttcttattgtttgaataacaggaagattgtatcccactgaccgaaatgttgttttccctcagctttatttttctttccctagagaact

SEQ ID NO: 111205 - DNA, 735 bp, Setaria italica
  Intron number 2 from transcript Si037477m (locus Si037477m .g) derived from phytozome v7.0 (chr-ID scaffold_9; pos 54 040981 to 54041715 reverse strand)
gggacggttctcgcccggcaatcggcacaccgaaggttaattcctctgttctgctcattatctttgtagccctcgcccctcggcttgtttagcttactgtttgatcatgaatcgggagaacaaaaattatgttgtcttgattttgacttttattaattttgcaatgaatccgaaaattgtgtcttagttgctgccactaggatgttcagattatatataacctaaaaccgtgctaatttagtacctttgttcttctgtggagtcatacaatcaacgtacgcatctccattcagcagagagcacagccctgatgaatgtaaagatgttttggctaaaaaagtatgcatattttttatatgtgatttttcttaaatgattgctcatctgttcaaatatctgtcaaatacaatagctactgcttgtttattttcctaataatcgcacagccatctttatttctttcggtcccaacatcaaaatatggtatgtgaagtggagaggaatatacagctgtatccaagtggtgggtcgtttttgttcaagcaagttccaagagcatagtagtgtacattgtatctagtagaatgacaatacaaagtttctgcttggttaggtttgttaagtccacttaagcttttcaacttttaaattctgtttgtacttagtattgtttttttgcctataataactttccttttcttgctagcattcatttctaccttatccactgcagct

SEQ ID NO: 111206 - DNA, 792 bp, Setaria italica
  Intron number 2 from transcript Si000258m (locus Si000258m .g) derived from phytozome v7.0 (chr-ID scaffold_5; pos 35 130540 to 35131331)
ggaggtaatagaatcttctcctctcttgctccttttagtgtttttctggatgtggatgcggccttgtgttcatggatcacaggcgatgatttatgcattgttgaacagatgggttaagcaataggctcagacagtcaagcatgcttgccttatgtagctccattcaacgcttgacatggtagaccatgcagtctgtgatctaattttgtattcgcttaggggaaatcatgaacaggttcagtttaaaaaacgattaacaggcgggtgtgccgttgcccctatgggcgcgaaacttgaaaataactttcctttttatcgtatgagggctggcattggagcagttttggctgcgttctacttgattatattgtgcacgacttaaatttcaaatttgtttttatttggaactggaagtaggatctaagcacatgccaggccatggcttcacgacatgtaggaaaattgaaagaatctatcgtaaactgattggttactggttgttacgttcccttgactttgatcccctcggtgtactcttgatatcctgtacttatatcagttaaagaaggaatttgtcgtcatagcgtaattatctagatttgtcattccttcgttccttttgtacgtattcaagcttcaaaactaacactttcacagttttccagaaaagaaaaaaaacaattggttacttttttttttacttcttttgtcgcattcagatcctaccttcttggaaaaaatgtttatttaccaatttcatctcatcatttgctctctgtggatttgcagtga

SEQ ID NO: 111207 - DNA, 874 bp, Setaria italica
  Intron number 3 from transcript Si002630m (locus Si002630m .g) derived from phytozome v7.0 (chr-ID scaffold_5; pos 41 115568 to 41116441)
gtgcgcaagggcggtgccttcactggggagatcaggttgcttctccctcttgtggttcagcgttgtggtagatttggaagaacggagtgcagagtgcttgtctgctctgtcggattggggtcaacagcattagattagtgtgggtgtatggattacgcagggtagaggtacgggtttcacgtccttgtagctagtgtggtttcagtttctgcaaatgtggcttgattatggcagaaagggctctagatttggtcactggggataatataggtatgcttaatcaaacatttgtatgcttttgagtgaccagatcttcaatggtttcaaatttgatactagttgcgttcatttttttgtatactagtaattgctaagagtctctgaacttttggtcgtgtattggatcatgtaatattcagcaatgctggttactacaataggctgctgttaaggcaaatagcacactttgtgattatcgtgttgaggtttgcagtgccataatgatagtgggttggtccagagtcgcccattttattaatccaagtcatcaaatgactagtaagtggagtattgcttccaatcaactaaagggtgtttggatactaggtgctaaactttagcagtgtcacatcggatgttcggatgctaattaggaggactaaacatgagctaattataaaactaattgcagaattcctggactaattcgcgagatgaatctattaagcctaattaatccatcatggactaattaggcttaatagattcgtctcgcgaattagactccatcatccgatgtgacaggcgctaaactttagcgggtggtatccaaacatccccttatatgtgtcagttttcttgttgcagtgcggag

SEQ ID NO: 111208 - DNA, 763 bp, Setaria italica
  Intron number 2 from transcript Si000484m (locus Si000484m .g) derived from phytozome v7.0 (chr-ID scaffold_5; pos 84 75387 to 8476149 reverse strand)
caacgtcgtgcagaggccgcgccaccgcagcacgggtacgccgcattgcgcctcttatcatgctaatttgttggtttggtggctgattgctgtgtgaaggtgtcgattctgcgttctcgtatttgctccatactgttcggtttcagaaattgagcgtgccgtttcacgctggtgatcgaattctactttcttcctagttgtttcgaacagtcgttattgttgtggggattgaagagctttcgctcttttgtttgcttctacaacttgttcggcagcacattgatcctttgggacggttacagagtttgattctgacaccactcaagctgattccatctagtttgctgcttaggtgctgtcggcccccttcccatttgtctacagaaactaattctgttgtagtgtatgggaattggatacgacttcgagatttagttgactgtgtagactcatgatatttgttctttataatctcattttattttactaatggtccattttttgtacaagtactgcaagtaattctgaagacatttaaaagcccagatacttctatagttagatttttatttgtcaagtactttgtagtgttttggatgaatctgtgaaaggaacagaaaagaaaattacttatttgaatctctcatcctgtttcaatcagcagacttgcaagaggattcactgaagttcatatttcaactcactgtaatttactttccatggttcaggtgaaactgtctcaattgttggggacactgatcca

SEQ ID NO: 111209 - DNA, 867 bp, Setaria italica
  Intron number 1 from transcript Si004154m (locus Si004154m .g) derived from phytozome v7.0 (chr-ID scaffold_5; pos 25 54863 to 2555729)
gagaccggctcgtccgccgcagcgcccaggtgacggcctgatcctaatttcccgcgcattttttcgggggcgtagttggaaagcaggggatgcgcagcatgcgaagatcattggcgttgattaatgtggtctgccaagcctagacattacattggaatattggacacagggatcaggggaaattgagatggtttcggtgatgatgagtgcattaagctattttgagtaatgtggtttgagatatgggagggttgtttgcattctttgtgtgttgcacgagtaaattgcagggagctttattctttctagtattttcgttatcaccctagtgacctggtcatagaggcattgaagaacaactatgatcagtgcctgccttgaatttttagccttttttgtttttttcttgtattgagcccattggccatacagagcatgcaaatttaattattgtaggactgcaaacgaatcctggttgtttgattgaaattctgaatgaagcgagtttgtgtacacctcagtttggatctgtggctgtaaagtttggagacaccggtttgatcatttggtgttctaaagaaatctagctctgctttgctgtagcttagagcccaggagtacagttgtccttctgttgcacctggattctcactgtcatcaaatctactgtagtatgccaatgtggcatcaccctcagcttctccaaattattctaggcttctagccagtggtttcttgttcctttaattatctgtctatgaaatttgaaaagtaaactattggttttggtgggaaatgtgcaaaaactaacacacctgttgttctatgataggcccacgaagcctaacctaagtattgacccaagaa

SEQ ID NO: 111210 - DNA, 1019 bp, Setaria italica
  Intron number 1 from transcript Si005068m (locus Si005068m .g) derived from phytozome v7.0 (chr-ID scaffold_5; pos 11 341773 to 11342791)
accggccggtatcgagagggtcaagtccgttctaggtaattgattctctcttcatctcgtggttccggagatcgcgactttgtgctcgtggttgtgtgcatgcgttatgttcgacgttatagatctgtgtccaattcgttcatagaatcgtagttcatcgttgggtggggacgtaagtaaccatgctgatcctgtggtgaagtttctggttttctttagagatgagaattacacttcggtagaaacggggaacacggattgttgagccgctcaaagaaactgaacagactctagactcatctagtatatacatgcaattgcttgaggtggattcaccaacttagattcttacttcttctcaagaaggaaatcttctgcaaataaataaaccagcaagcgaccaatggaatagcacattggattttgatgtaactaccatgctgtgatgcaacaatgccagtttgtggcgtgatttagctgcagcttgcatgtagcatgctattggtcagaatgaaatacacaatgcaatgcctgacttgtgccagttgtatgttccttgtgaaaataaagactactgggacaataataacagaaaccatgtgctgcccatggtatatacacacatatgatgaaactgctggtattatctcgctttgtgggggtgggatagaatcaagattacgtccatcttggagctgcaccaggggtcttttttatttcatttgaccgcctaaagcttgccaggtaccacgaatagttagtgacaatgcacttgcctagcacagttgagcatgtttctcgaataatggcaatggtggtagctgttgttgtaccatccttgagaatatttatttattcctcctgatggatgtactatatgatgttaatttcttcccgagttccagttaagagagtctgcaactgcaagagagttgaactgtccaagtttcacgcatattttctgttccgctgatataggtttcgccatttgtgtcccgcagatagtatcacagcagcag

SEQ ID NO: 111211 - DNA, 1025 bp, Setaria italica
  Intron number 1 from transcript Si040053m (locus Si040053m .g) derived from phytozome v7.0 (chr-ID scaffold_9; pos 41 341522 to 41342546)
agtcttaactcgtcgagttgaagaactccagcgaggtatgcactcacatctgcggtacacaaaatcattatttgtatttactccctccgtcccaaattgtagatcgttttggcttttctaggtgcatattttttcctatgcacctagatatagtgtatgcctagatgcataattatatctctggatctaaaaaagccaaaatgacctacaatttgaaacggagggagtatgtcgctaatcaatcctatcatactgcttttttggtgtttatttttgcagttcactttttggtgtttattattgcagttcaccttttggtgtttattgttgcagttccctgtagatcaactgttcatcctgtagattagtttcagtactgttgtttttctcttgaaatagttcaattcaggtgcctcatttaatcattttacatttacatttaccaatacttagtaagaaaaaggaatcaaaagatagccaactggagttcctttggttttataaaatgcgaaattatgtcccttgacatatttaagttggtgagatcataggagggcacactgagaaacttgatcatttaacttttttactactagttatttggttatgtatgtgagcatgtatgtgatttctgaaatagcatgagacacccaagttcttggttcattccattacactgcaaattccaatacatataactatgaccttttgagaagattgctgatcttatttttgggatgtagctgtacatgtacttccttgagtagtgtgttagatctccttttcaggggagcatggtatcatgttgacaatggttagcacttttaacttgccagggctaatttcttcacactgttgccccctcaaatgaaaggagcaatgtaaactatttttttccctctgaaaatggctcatgtagtcatgtttactagttgtttaagaatcttttcgtttcatgattttatcattatatatcttcttgtggcacaggcatgtgctgatagatactttgtttgcagaacgtg

SEQ ID NO: 111212 - DNA, 509 bp, Setaria italica
  Intron number 1 from transcript Si001716m (locus Si001716m .g) derived from phytozome v7.0 (chr-ID scaffold_5; pos 44 05554 to 4406062)
catagataggtctgaattcatttcccctttgcacagatggttcatatattttcttctacttgtgcttccagtgttagctacatctacaaccaaaatccccatggtttctattctttcataaattgtaatgcactcaaatgtgaaagattttacataactcctctgacttagcgtaatgatttgtgtatgtaagtaaataggaacggttcagttgcaatttctgagtctgcatctaggagatgtgaaaaattacagaactgaaatgttagttcctgatttgagtttctgatcttgcaaactgatagcttatgctttgatttgaatggctgtggtagacttgtagaggtagaattgataacttgtgagataatgtgacctgatgccaatgcatgttagcttttgtatagtgattatatgacatgatcttatttctgattgtcctgactctgatctttcatgattttcgatgtgtaggtgccctttgctggaaccaaagaggcccacaaacg

SEQ ID NO: 111213 - DNA, 525 bp, Setaria italica
  Intron number 2 from transcript Si035666m (locus Si035666m .g) derived from phytozome v7.0 (chr-ID scaffold_9; pos 26 09473 to 2609997)
ggttcccttgccaacccgttggttctcctcaacaggtataaccacatgcctcacattgttaatctgatatgttatagatggacagacaaaaaaaaatatttcaatagtttgaccctgtagctctgttatcttgtaagtctttgaattaatctatccattgctttgcataaacaggaaaacttgaaatatttaaaccgctagcttaaactcgcgaaattaccaagttttatatggtttagctcttatgtttcttggttgtctggcaatgtaatttgatgaaagaaagtccctatgcaaattagtatgctgtattggattttctatgttaacaaacttatttctacggacatgttccagtcaagagaaattttctaggaactattatatgaccctttttcacatttgaaacgaaattgtaactaaaaacatgtaccaaaatatgctgttagcatgtagcaatctatggcactatcgttaatatgttcttatcttttcacagggcttcctccacatctggtggttggg

SEQ ID NO: 111214 - DNA, 714 bp, Setaria italica
  Intron number 3 from transcript Si037919m (locus Si037919m .g) derived from phytozome v7.0 (chr-ID scaffold_9; pos 87 61145 to 8761858 reverse strand)
caggagagtctaaggaaaacttcccagctatcaaggtaccatctctctccctctctctcggctctttccctgtcttcttgcatgccctcttttcccatccatttactggtaatcggaggttctctgtttgtgacctctttattgtttaatgcaattgatttttcattttgaattcagcaaatgcctgccttttcaagcctagctgatgcttcactgaataagagcaaaaagaaaagaaaagccatatgtagcttactcctcttaggttaagcccatcacacaatctgctaagacatgccagtgctgaagtactaaaagtttattagtagattcagtggtggactgtttaactgattagcatctaacttgactacgttcagggtgctgtcggttttcatttcataaatcttcatatagcatgccattccttaatgtgttaagatatttggttaagcaggtttataacaatttccttcaaccatttcagggaaaaaggaaagtaaagtaccagtagacattgtaccattttattctgttctgacatgtaatatttccaatgcttatttagatccaccagtcgagtgttccggtggatctgatggggaaattgcacagttaattttagattccaatacaatctttatgtacaaagctgcatcttatttttaaccggtgagtaatgatctatgaactggattggtgcaggtgcataag

SEQ ID NO: 111215 - DNA, 736 bp, Setaria italica
  Intron number 1 from transcript Si001718m (locus Si001718m .g) derived from phytozome v7.0 (chr-ID scaffold_5; pos 42 101954 to 42102689)
catctttcctgatatacagagggcatcatttccaggtcgatttgagtttgatcttatttatttgtcctgcattgcgttatgagagtacttgttttcgcatgattttgcacctaaacatctctcattgactaaggtgcattggtaattttggggatctatggggcatgtttagcgtatttctgcactcaccacttcctgtcgtgcaaaaggggtgcatctgcgtttagacaatttgatccctccctgcattcgtagttccattctattttggttgggttagttattttgaggagttgttcacttgtgctggtgagttctgaggaatgggagaatctatttagatagatgataaagatggcgcgtccccttttcttcctctacgagtctgttcctgcacttcgacaaaaagcctgtattcccctatccttagctgtgcaggctccctttgttctgattggtaaaggaagctaacaaaatattacaatgtcgtgtactatagcaaagctaaacatttgggtgttcccaagtgaaaaaaacaaacaaacctggctttgcgaggatctggctcactgcctccaggtcccgaagtgggaatcataccgctacaccaaatgccagtcttggcatcttcgatccaagatattagttgcacatttatttaatcaccaagtggttgcatcctgatatgattaggttgtaatctaatctgacgctaagtattttgtgtcacaggagt

SEQ ID NO: 111216 - DNA, 859 bp, Setaria italica
  Intron number 1 from transcript Si034062m (locus Si034062m .g) derived from phytozome v7.0 (chr-ID scaffold_9; pos 30 385146 to 30386004)
aggccatcggctgggcctgggagctcctcaccaaggtacagaaccattctgctacccctgctcttctctctttcctctgtatattctgcaaatctgattgggggggggggttgattggatatgctattgggttgacttcgcataagattgttagaggttgcagattcacgagctgcttggtgaggaaaattgtggcttatgcgccgatctggatcttttgggtttttagatgatttcctagatatttgtaacataatgattatgtggtgattgagttctctaatggcgaaagattcaattattttggtcgacatgtgagaaatttagcaaggcaatatattgatttaccaatttctagttttcctgtaggattccgttgtttcgagtttgagttctgtctccacccctgatttttgtagtgcaggaaagatcctgcattcaatgatcctgagctaatgacttcaattttgaaattggaaggaagagcatgctcaaaatgtgttaaactattaacgtttgaggattgattttatttcaaagaaatgacagtgatggtcttgaatactgattgggaaatgaaatggcaattcaaatgactctcatccatggttattctagacaatctagttactagaacacatttactcgaaccatttttgtccgagacctttatattgtgttttctaacgtagtcttttgatttaaattaacaagataagaaaaaacgatgaggaaatttgtatgtttatgaatgccaagtggtttgtggtttatagaagtatcagcaaccttcatgtattgcctactgattactatgtcttgaattcacaggtttacaaattgcctactgacagaattt

SEQ ID NO: 111217 - DNA, 789 bp, Setaria italica
  Intron number 3 from transcript Si035189m (locus Si035189m .g) derived from phytozome v7.0 (chr-ID scaffold_9; pos 57 405576 to 57406364 reverse strand)
tcctcttcttccccgtcgcatacccgatcagcaaggtacgcgcgcggcggccgatttgtttgcacgaattagggagggattggagcctcgtacttggtggatgccccatgcccgactgaaattgggatgtgacaccacaggtggggcgggcggccgcaagtaggagacacatcgatcgatcgctacctggtttcattatttaattttgcaaaacaaaagggctttttgttccatgctcgtctagtcatccaaattccccggggtcaacatgggcacttcttttataaattggattgcggaacctgactaattctgcacttatttaacattgcgtccgccccatgacacaataacaagtaattggaaccgtgaagcaacaaccattgtcttcatctccatgtcgcccagctaaataaatagagatgtctatatatgcctacgtctaaatgtggaatgtgtctgactcatcaagggaaaagcagttcagttacagaatacttaatcagtttcctgttatctgactgttatcaactagcaattctacaaaatcaattattatgtctaattgttaactgaatatcataatttggctattctacaaaaacgtcagaaacatactttgaccaaataagaaagaggaaggcagccagttttctttcatggcagcaacctgcttattattatgatgtatatatgtatgttttactttcccctttgctgtatcttatttggtcatgtatttgtttttgtttagttgttggactggctacttggaaagggccatttcgc

SEQ ID NO: 111218 - DNA, 752 bp, Setaria italica
  Intron number 2 from transcript Si036492m (locus Si036492m .g) derived from phytozome v7.0 (chr-ID scaffold_9; pos 87 70477 to 8771228)
aggtctacgtgttcgaatccgtcacccccgacaaggtctgcccctcaattcatttctttctgttttgcaattcacgtggaaatgtgccgcttgagaattcgtgcgatcgaatcagaaatttgacgtgcctagctgaagtcgttcgcgattggatatgtgttcgatgttctgttttttgtttggagtcatttccttgtcgaatggtgcacgtatttgaacatcaggatttgcacggctgttctcacagctcattctggccggtttcttttcccacctgattttttggtggggttggagttcgctagtcaatattggtttgtcgaaatattgctgacgtggcatcaattgtgagtaccgagtactgtttcatcggcgaatgaaatggtttgtgttggggtaatggcctaatgggtttgagttttgaagcaaattttgtgctaatgttgacgtacatagcaatacttttatgcagcacagtgctgttgttagtaagaccagtcgtatagttttggtttacttctgtaaattggatacagtccttagtccttttggcttgaggaaaatttgcaaccctgaaatagcttgccttttcccctataaggagcacattaagaaaacagcatggtaatttgtactacttagtgccataagccatatgttttaccatgctacttgaatatccatctgtgttttttctaagctcagtttggtttccaggttcaagctgtcctgttactgttaggacgtggtga

SEQ ID NO: 111219 - DNA, 1006 bp, Setaria italica
  Intron number 1 from transcript Si002286m (locus Si002286m .g) derived from phytozome v7.0 (chr-ID scaffold_5; pos 46 29974 to 4630979)
ccaaggacgtgcgcggcggagccgaaacgacccaggtgcgtgcctctgcctcccttcgttgctgctgcatcgcagttctcggcgatcggcccggccgctgcgaattcccggttgttagcgggtcggggtttaggcgccgtgctctgcgggcgagatcggattcgtgatgctagtcccacgccgccgggccgctttgtttcctcgcctggagatcgcttgggtttgggttttatcgtttatgtgaggcggggtgggggcttcgatccgttcctccagctccggcggttctcggctaccgggaggatcggagctgccttactggcagctgccgcgtcgcgttgactcgatctcgacctggcggtagttaacggcgccagatactcagatccggtcctccctcatgtgaggagcaattgtctgtactattccagtatctcctgccgtgctagtgccatgaatgctgttgcatcctgatggttgctctctgtcagtcccggtaatcgtggatgacatcgactttgcctgccggcggtccctatttattccccccatttcggatatttttggtgtttgaatttatcatcaggtggaggctgttgctgtctgtatttattattgctatatggattgttttccttctgtttgcattgagaccatgaccgtgatgtgtgttcatgtgacttttatactgggtatggcattcataaagctgcagctgaataaaagatggcaacccttctcactgcctaccgaaatctataaaatacttaatcaagtagaacaccgctgtgacaaaattgatgctccagcgctccctcctgatctaaaatgtgtaatgagcagctagaattttttttccctgttatgttcttttgttaacttgagtcttttgaccttttgtacaaagtagctgatgaattagtttgtgcgtcatcactcttctgataatagtatttctgcacgtcttgcagctacgtatctagtggtgttgcttccaccaaggtgc

SEQ ID NO: 111220 - DNA, 920 bp, Setaria italica
  Intron number 1 from transcript Si000646m (locus Si000646m .g) derived from phytozome v7.0 (chr-ID scaffold_5; pos 11 249214 to 11250133)
tcaacaacatcctcctcggggggcgcggcggcacggtaagctcctcagcctcggccgccaacgtcgtttgcttggttctagggtttcgttccaaaataggttatcgggagatgacgtcgtcgctggcgactctctaattagcttttgatttgaacttgttggctcaatttttttccccgacgattacttgcggctgcgtattggtcgggtttagggtttgcaccgcattttaggccaaaatttgctcgccttttgttttattctgccccatttggttaaattcaatgcttcttcttcttctttttttttgggggggggggggttgcttcctcctgtggtttgctggatttcgtttttgtggcttgggtatgacccaatttgtgcttgaggtttctatgcggttgcagaatatgagaccgtcgataactaacggttggaaatgaattacaaatcgtttgtgcgttttttgaagcttacaagcagaatgcctttgtagcgcaccccataaaaagaaagcacaccctgtgctagattcggtgcttataatttttttccccattgatgcacaatcaatgtttgccctgtcgccaatatattttctgcgctcatctgaatgtatatacctatgcttgccctaacctagatctgataatacccgcaatgcttgtaccactcatgcattggaagatgatccggtattgacacctgaccacctttattatacttgtatttgtgaaccttaagactacatgttatgccttcattcctttcaaaatctattactgtttgtacacctgtgtttttctcttgaatggtatacaatttaatacgttttgttaatgtttgggatattgacatactgtcatgactcttgcatctatgcagaaccccggtcagtttaaagtgcattcaggtggact

SEQ ID NO: 111221 - DNA, 505 bp, Setaria italica
  Intron number 2 from transcript Si000981m (locus Si000981m .g) derived from phytozome v7.0 (chr-ID scaffold_5; pos 29 688543 to 29689047)
cagagaaactgaaggttttttcttctgactgaactaccttgaaggttcaaattttatttaatatgtgacatttgacaccattatgctcattttccagcaagcttgagtcatgagttttgttggtttgtcacttcatataccttgtcacctaatgttacttaagtaaattgatgaatacttaatctagttgtttgggcaaacagaaacagcttaatcaagttgtttgggcaaacagaaacagcttatgtttgtgcaattgtgctagtttcctgttgttttattaactgtgagtaaagttttgcgattttgatctgcaaacatcttgatgtgctgtttgattggatgctaattcagtagatcacatactcctgaacaacaataacactttcgtttttaacaccaaaacgtgctgtaaatagacactaaagcagtttaatacaggtaataggtttcttggaaaatttttctgccccgttgacaattatcttggaaatggatgcagggg

SEQ ID NO: 111222 - DNA, 567 bp, Setaria italica
  Intron number 2 from transcript Si002521m (locus Si002521m .g) derived from phytozome v7.0 (chr-ID scaffold_5; pos 39 112517 to 39113083 reverse strand)
tgatcagccgcaagtgcagactcactgtcctctgaaacacacgacccagtagcctgaatagttcgtagtcgatcatgattttggttcggattgttggataatcctctttagttcttaaacttggttcgcctgttagtcatatcactataatctggcattgtgtggaaatgattttgttcaaggtaatggcttaatgggtatattgcaaactgtaggaatctaatgtctgcattagttatggaacttgttaaaatcttcggcaaaatcccttagtttttagaagaaaactcactgggtggagctaatttgttgcctgatggtccatatgattttgtttttgaacaatgcccatttacatttcaacgttaacccacaccatcactttgtttgattgtgtcatttgtattgaaatattggacactgaaatgcacctcacaattttttatacgtgtgtacttttcttccataatttgacttttcctatagataatgaagataatatgcatctatgcattcgttctgttgagtgcagatacaaagaaacctggtggagcagctaaggaaata

SEQ ID NO: 111223 - DNA, 513 bp, Setaria italica
  Intron number 2 from transcript Si004833m (locus Si004833m .g) derived from phytozome v7.0 (chr-ID scaffold_5; pos 17 392583 to 17393095 reverse strand)
cccagctttccaggacggtgatctgattctttccggtgagtttgcaactaacaatgctcgtttcttgcttggttcgatccaattttattgtaagagattttgtagagattattgctggcatcgtggcagtatgtggagacaattatgttaaaaaatgatgtgacgaggaagtcaaacaaagctgctattgttaaacaaactcgttgtttccttcctgttgtttaaggatccacacatcagtaggtctttgaggtcatcaaacttaagcccagtaatatctctgtttcaaaatatttgttgtgaagaaaacataaagctctgctcaggtcaaatcaatatagttggagcatactacttgccccttaatatgccacttccctatgaaagttatgcctaatactcagcaactaatgtgtgacttattactgtgttcttcatgctgttttattcacataaaaaagatggtgtatcataacagagtcccgtgcaatttcaaagtacatccttcgcaaa

SEQ ID NO: 111224 - DNA, 314 bp, Setaria italica
  Intron number 6 from transcript Si002356m (locus Si002356m .g) derived from phytozome v7.0 (chr-ID scaffold_5; pos 40 916460 to 40916773)
tgcaaggtccttatctcaactgaattccacaacagaaagaacacgcctctatctgcataattcatgctaccatttcattttttcttcttgtttttttatgaaatcatttcatttcttcttgtcaagagtcaaatggtcttgagcctcatgcctagattttcctttattctgactatagacggttgtcttgctgtttatttctgtgggattcttccttagcacgagtagccccacgtgtagttctgaatattcttataagaatggtttgctttcgttgacactttattgtcacatgatatcagatctttgacgac

SEQ ID NO: 111225 - DNA, 854 bp, Setaria italica
  Intron number 1 from transcript Si035736m (locus Si035736m .g) derived from phytozome v7.0 (chr-ID scaffold_9; pos 43 568449 to 43569302 reverse strand)
cgggcgacgacgacaccatctccgtgtttgcggtaatggttcactgattctcttctctctctcttttttctctgtgttaattgcatcagtttctcattttggtgtacagtttgtgtttgtccaataattgctgtgctgattggtcatgtggatttggaccaaaagtcttgtaggaatctcggttgccatagaacctaactaggtctagcactgatgcttctgaagcatggattttgtggtggcctcatcattcaccagcttagaatgtgtttaatgtaaagcaccatttcttgaccttgtctaattttctcttcttttgaccaaacactttgctttcattaagttttggtggtgttttccacattaagcgtagtgcttactgtggtgtcttggtttgatatttgtctcttgcatagagtagcatgatgggcatgcctgattttgcggcgagttggcaccaaggcacatggggacatatgtcagctaatatattttactgcccttaattgtcttcattctatcatttcggtggtcagaagaccactggtttgggaatattcaaacaaggtcttattgtttgggatctttcaggcttccagcagttggccatatgggttggccctagaaattttcatttatcaatttaacatgttcttttgacgaaaaatggagcactgtacatggcaaaagtcaaaccataattgcatactcctgtgataattcagttctaaactatgaagcaagactactttatcttctatttttaatttttcatttaatttttttctaataccaactaaattggttgctatctcactcaaacaattcattctggtttctcgcctagatttttg

SEQ ID NO: 111226 - DNA, 1051 bp, Setaria italica
  Intron number 1 from transcript Si002936m (locus Si002930m .g) derived from phytozome v7.0 (chr-ID scaffold_5; pos 33 730670 to 33731720)
ccgccgccgccgcagccgtcgcgcctcctctacaggtacggtcactcgctcgccgcctcccttttcccctcagcttcgtttctttcccgcgttatccattcctctttccccacgccgccgcagtccatcctcgcgagtcttgaactggccgttcgctgctgctggcttgcctccgccgctagccaagcgctgctgcgggctgcctccgccgatgctcgcgtgctgctgctgcctgctgccccgcctcgccgcgcctcgctgcatccgcatcccatgctgcacgctcctgcagctcctcccctgtaaacccaagcgcgcgcggccgcggctgaggcgtggatggcgcgccgcgcgctcgcgccggcgggttaatggcggcgggcgacgtgctcattcattacaggaggccaatgataattgattgattggacatttaattaaggatgtatattacaaggatttacaagttctggataatggatcgataagatttccgtagtttattcagttattttgaagcagctttgcgctagttttcagttaacattttgtgttgttttaactttatagcgtgatcatgtatatagaaaaacatgcatctagcggtgaccaaaaaaaaagagaaacagcctaatattgattgacagaatctgcaagttttgatgaaaaaccaggattccctgataagaaaatatcactaatgacttcacatcattgttagaagaaaattttgatgtaatatgtataaagtgttttattgtagatatgaatattacttttggatgtaccttcataaagtttcgtcctaggcccccaaaatctcagactgaccccaattttgctgtgcggcggctccgtattcttggttgatttgttagctacaggttgtgggatgagtgcgtggtgttacgatatgcttgagattctgccacgatgctaatgaggatggagctatggtgcccattggtttctgttcccgttggtgtccggctttgctgatggcgttgttgttgcgttggtgtgcaggtaagcaggagaggaagggggcgaa

SEQ ID NO: 111227 - DNA, 844 bp, Setaria italica
  Intron number 3 from transcript Si035822m (locus Si035822m .g) derived from phytozome v7.0 (chr-ID scaffold_9; pos 17 722094 to 17722937 reverse strand)
ggcaaacattggaagcgggggaaggattggtataggtatgcttccacagttgattttctttggtacacaagaacattgctgttgctggtgtggcagtttcacaagtatctgttttcttttggttcttatactttgtgtcattctcatgagataaactgtttataacctactacttcaacaagatcctggacataatgctttgtgtgcaaccacttccacggccttcccatagtatgatgtctgttcctgtaaactcaaaaattaggcctcagggaagaagccctggtgggaactggaccttgagtctggaaagtggtgtttctttgcgattcatgtgggaatgaaaccattgtgaaacctgaaaaatcttcaatttgattagttccaggatacccattatcactttggtgccatctgctttgtttttgaactattaatctgccattattggcagaaacagggcttcaagtagggactaggaaatctgcagtcatgccctactccttcaacccaaagcatctatatttttatcttagttctcgctattctggtgtgctggtcagtaactaaatatagctcttatgattccaggctctgtcatattcttttttcctatgggaaactgtcatgtttctctttggaatattctgtagtgctagcatgacagtatagtcttctaatgtaaagcagtcatcacaaagacttggataccatcattgttgatacctatttctgtaaagactattgttattcttggcatgcatttttactagagttgcttatcatcattattattgtgtgatcttgcaaatattatatatccatctcatgctgaacaggcttg

SEQ ID NO: 111228 - DNA, 828 bp, Setaria italica
  Intron number 2 from transcript Si001388m (locus Si001388m .g) derived from phytozome v7.0 (chr-ID scaffold_5; pos 42 903655 to 42904482)
gttagcctattaggtgtgttccacccctttttgtgcttcgctttctctttgtatgctgtgcgctactgcaatgggaaaaagtgtgctcataatctagttagttttgacatgtgaccatgtataacaaccctatgtgatttgtttgtcatgctgggagctaaacttcaatcgttaactcaccgtgaactagtttagagtttattgaagttcttcagttactacgattgatggcctaattcagctactctgttttgcattgctgttccaagcagtatgttaaagcatctctgtgaaactgtttgatacgctgtttgaatgttttcatttaatactattcatgaaagggaaaaaaaacatttggcaaaaacagattgcttattttggttacatgctatccaaggttttcttagtgttagtttgagatagatgcacctccgctacaagtttatgtttagtttctttcaatcaatattttggggggcactatttgtgtgcaggcaaacttgcattgtcatgatcaattggcaacctagctaaaatttcattatatatctttcagaagtcacctcactctcatattccaaagttttctcatgattattatcccgatattggcgatgctcctattattatttgtttatttattttgaattactttgtatggttagttcagttcagcattttcatatggatcaaaacatagttgatttgttactgcagttctcttatgaagattagtaaggggagaaagaagatgaggaacaaacagagaaaatcatctgccctcagttttgatgcaggacgtggacctttattatcttgtattac

SEQ ID NO: 111229 - DNA, 674 bp, Setaria italica
  Intron number 1 from transcript Si001751m (locus Si001751m .g) derived from phytozome v7.0 (chr-ID scaffold_5; pos 43 248509 to 43249182 reverse strand)
gcggcgctccccgccgccctccggccttcgctgaggtgatttgctgagagcttgagtagtttctccgaagttttttaggcaactcctttttggtgatcccgtgcttactgtggtgattaatggtctgggtttgaaccgtttagctgttggggaacgagcaaatatgctgcttattggattatttaagagctaccaagtgctattcttcctatttctgaagtggttaggaggttcaaaaattgccgcgttttagtgcaggaatggtaagcttttagctggctgattcaagtaatttgccaccaacttaaatggcataggttatgcgcctgctgattaacctgatcaagttatggcatttcagtactgtattaacttagttatggcagtcactaatgggtttgtccttgcacgagccctggaggtctagggtataatcaactcaaatcaaatgaatttggttttaggtgtgtagtggtgaagagaaaatagcttttctttttttggggtactagtctttgcaaatttgctttcaatcttatacagttacttgttgattgcagtgcttagaagctggccatcgttgagacttagaaggcagttgcgtatatggtatttgtgggccattgtgctgtcgatgcgagcggagagcatgcgtggcaactgttcttcgggtg

SEQ ID NO: 111230 - DNA, 727 bp, Setaria italica
  Intron number 1 from transcript Si002025m (locus Si002025m .g) derived from phytozome v7.0 (chr-ID scaffold_5; pos 43 276610 to 43277336 reverse strand)
cggcgacgagtccaaggacaaggcctcctcttccggtaggtcctattgcccgtgctctgatgccttgtcgatcggcgagattggtgtgggatctaggcgatttgcgtgtgtgaagtggtcaaacgtctgtagattgggtggggattgatatgattggcgctgggttatgaaactgtcggttgaaatatgtgatctttgcatcgaggttggtgttggttactgtatgatttgtgatgcaaaaggtgtacttgtctcagggggattctagttgttatggttcatgaggtgtaacaaggtaatttggcataacagtggacatagtcttcgaggtccatttggagtctgaggcacttttggtgataaactactttactgcaatatctgcactgatatcaaattctcgatgtatagattgtggagttctgattgctgcatttaattttccagtcacaatattgcttaatcagcgtaacaaagccagtttgatctctcttgacttctagttatatacaacatttcagtggaaagtacatcaccgactgactgcaaaattgggaacttgggtcatgcggtgttgggatttttcatgtttctttcactctacatcagacaaataaattattgtagcattctagttcttttttgatgtggttattataaaatgtttggtagaaagtctgtttattgcctgtgttgagctgctgaattctgcatgcaggaaaaggtg

SEQ ID NO: 111231 - DNA, 866 bp, Setaria italica
  Intron number 1 from transcript Si000081m (locus Si000081m .g) derived from phytozome v7.0 (chr-ID scaffold_5; pos 39 650220 to 39651085)
tcgcagctgctggctgctgccgagcttcctgaaaggtacgttacgctccttgttacaatctgattcaactggtgggttgtagttgatgagcctgggatggaccatgggttagtcgatctcgcttcgctgatttggggatttgggccatggtgctgagttgtcggcagtgaagatctgtttgccccttgcttgatcggcggtgaaggtggcgatgtctcggctgtttgagggccaagatcgggtttctttacccctcgccctcggattggggattaggttttgatctcagaatatgaagctatcagcgatgatcaccagaataccagatcatcgctgatgatctggtgatcagtttgcaaggctggacttgtgctgttttgccgacagtgatctagtaatcagcctgtaaattcaaggtctgacttgtgctgttctgtcaacaagtgcgagctaattgcggtggacatgccttatgcttgtgctgggctattcctgttcggctgttcctgtttgatgagtctctgtggatctatttgtgagggtggtggatagcaaacgtgtgtgactagtttcattagatcaaatgaatagtgagcatctgcgttaacttttgagatgtgattagtttcattagatcaaatgaatagtgaccatctgcgttaactcttggagaaaaaaagagagcctgaatcagcttggttttaacttgcagggtaatttaaacttgggtttattaaattagcatagcttccaagttcctttgtatctatcaattaatcgaaacacagccactttgttctactcaactaacaacttctttttcattatgattgtggtaggtttgtgttggaggctaaggggtttac

SEQ ID NO: 111232 - DNA, 809 bp, Setaria italica
  Intron number 1 from transcript Si004677m (locus Si004677m .g) derived from phytozome v7.0 (chr-ID scaffold_5; pos 23 061186 to 23061994)
catcggtgagtctcgctctcggccctcgtgctctgctttcgtgagatctgttctatcctgtaggatgggaatgcgtagtcaaatggtttttgtccttgcaacgatgctagactatctgtcgaaagcaagtgaatatgttggttaaaaaattaacaatatatttttctattttcagaatttgttcatccattctcatggctagcattattcttgtgattataaaatagaatcattctaactgttccattaggaaattcgtttaatttcattgaagatacttctgacattgtttcggcaaataagctcttcaaatgttgtcgtctaatttgaatgaatgaaagcaaaatcgtttaaagatccgttcatccatataaaattcctgtgacagtcagaaaaattgacgttagcagtcaaatggtttttgtccttgcagcgatgctagactttctttgacaaaagcagatgaatatgttggttaaaagtttattaacaatatatttctgatttttcagcattcgttcatccattctcatggctaccattattcttgttattataaaatggaatcattctaactgttccattagaaaattcgtttaatttcattgaagatacttctgacattgtttcggcaaactataagctcttcaaatgttgtcctctaatttgaaagaatcaaagcaggtttaaagatccgttcatccatataaaattcctgtgacagtcagaaaaattgacgttcgcaagaaaaagcaatacattgcttaattggtttgtacaatgcatgacctggtgctccacttaaaggt

SEQ ID NO: 111233 - DNA, 678 bp, Setaria italica
  Intron number 1 from transcript Si002461m (locus Si002461m .g) derived from phytozome v7.0 (chr-ID scaffold_5; pos 76 12150 to 7612827)
aggatctggaagtttaggcttcgattttgcttctggtgcatagccgggcggatcggagttgtcgaggaaggtgaacatgattcctaggagcttacttgtaatttttctttttttggttcttgttcgtaaggggatgtactgtgttgtgctttaatatatcttccctttcgaaaaaaaataacctggcccagtactgctcaatttcgctctctgtgtatactttaatcaaacactagttagagagatgcaaacgtgcagcctcatcctttgatcggatcggcccacagcccaaagctcacgggtaaacaagtgccgcgaggttgcaactttgagcaatggcagcttggttcttcagagttcagaaagttcagattcagagctcgcgatgtgctgatgcgtgagcagattgatttacaatattttctataccaaatcaactaatttatggtttctgaattcactcgccagtcaaattgaggactacagtgtacacactgtaaaacggcagatggaagaagggcagtagatcagaaggtttcctttcaccagccatcgatttcttatccgacggctgcgggagctcgcacacgtagcccatcacccaaatatacactgccttctcttcatcagattaaaaaaagagcggaaaaaaattcggaaaaaggggggaaaagaact

SEQ ID NO: 111234 - DNA, 955 bp, Setaria italica
  Intron number 2 from transcript Si033913m (locus Si033913m .g) derived from phytozome v7.0 (chr-ID scaffold_9; pos 13 080772 to 13081726)
gaacagcatcaagggtgttttctcagtaagacagaaactgactcgataccagtgcagagaatttcatgcggggtcgaatactataattgactcctcttgcaaaactcttcgatttaccaattagatcaagtaatattggccaaacaatttaatattgcaaaaacaatgatcaaatagctcgttccaaaaaaaatgtataagtacttgatctatatgcacatgtcaaagccctcatatttttccctgtttcttttttttttgaattacagtacagagacaaggctgacataccttcacacatatttacccctatgaataaatgcacgcaaatcctacccttatcagcaccactgaaagtcctcacttttgattatagtggatatcactgtgttgattgctgaatgcacggatgaacttccttctgaaacaccaaattaatccataaatttagaggatgtagtacccgaaggcgggaaacaatcctgtctctatttgaaccaaaacataaaatagtggaatttgcataagaatgtttctttaccttttcatattaaatttacatcatgcttctatgttttatatctttgtggtatataatacttttcgagatgatggtaggaaattcggagtcatgtggcagaatttaatactatcacaaaaattatagcacccttttaatcataaagttctctaatcaaggtcaatccaccaacttgttttcttttacattaatgtccgaaatctctggttatgcaaaagaatcatcgtctaagtgtttgaggttagcgaagttgcaagtataacattgaattaatttgtacagagtaagtatttgcaaccattcccattgacgtggactaatggcttccctaatttacaagataataattatgcttactaaactttctcgtggttcatagggccccatccggttatttgggtcgaaatctaataa

SEQ ID NO: 111235 - DNA, 1024 bp, Setaria italica
  Intron number 1 from transcript Si001176m (locus Si001176m .g) derived from phytozome v7.0 (chr-ID scaffold_5; pos 38 014642 to 38015665 reverse strand)
actcctgggccaccgtcaccggctacgccctggccgtacgtaccagctaccctcctacatctcctgcatgctagatcatttcccatctcacctgaattattttttggttgtatactgacggtttcggatttttcagcagcagtactgtagctagctagctgtaagggtaacagtgagtagtcacagtccacacatgccgttcggtgcccaaaatctacctatagttcccaatttgggagtgtcaaaattggcattttaccataaatgcgcaactgtaacgtttcgtttgtatttgtgaattattgtccaaatattgactaattaggctcaaaagattcgtctcgcaaagtacaacaaaattgtgcaattagtttttgatttcgtctacatttagtactccatgcatgtaccgcaagtttgatgtgatggggaatcttctttttcatagtattaaagttgggagtttggaggaaactaaacatgaccctacacgtacaccaatcataggcagtagttaggcttgcccttgatgtcagcgggcccggtcccacacgtgtgacccaactgtagaggcaagtcctgcagaccagccatttccttctatccagattgaatggctcagcattccaattcaatttcgtgcctgctgcctgctgcctgctggtaggcatccgtcttcattgcctgtgccaatatgctctaccggctaccgggcgctaggtaccatccagtcccgggcgggcccaccttttgattgagctaggtcgccacgagatgtacgtaagcagttttatgaagtgccatgacaatgattttatgaagtgcaatcatactggctagtatcgtggaaacattggtcgaggtgtgcatcagcagttacgtggtttagatacgactattggctattgttgaaaacgttcagtttcaaaaaaaatatattgttgaaaacgttgtacgttggcataacacgcgaggaatgactgtttcagacgggcctgagcggggcgctggagacgctgtgcgg

SEQ ID NO: 111236 - DNA, 546 bp, Setaria italica
  Intron number 2 from transcript Si004533m (locus Si004533m .g) derived from phytozome v7.0 (chr-ID scaffold_5; pos 35 112521 to 35113066 reverse strand)
ggcccggacgtcggcaccagctcctcacgctcacagtacgttttttctttctcccttcgattggcatgcatttatgtgcttgttggactgcttgtggccctcgtgcccattaggtgattgaagaattgggattgttgatgaaaggtgcactggtcttgaagttggtacgtagaatttgtgtttgaactatggaaaatcactcgatttcaccattaggtgatttgccgcaacagcctgtatactaaacatggcgcttgaacctagctgctaacgagttgttttaatggatttgggtatgtcttgctagaagtttggtatagaattgttgcttatgcgagggactgaggatccaattgtccaaggaaaatggtgaaattccaagtttccaacagagtttggacatttgtagtgcatgccatcaaagcgattgggtatgagggttgcagatttggattccttcaaaatagagtggtgattctgatactttattaggtttgacttttggctgcaggaatacagcacctattgcggagaaggggaaactga

SEQ ID NO: 111237 - DNA, 668 bp, Setaria italica
  Intron number 1 from transcript Si036113m (locus Si036113m .g) derived from phytozome v7.0 (chr-ID scaffold_9; pos 54 023061 to 54023728 reverse strand)
ccggggcgtccaactccaggctccgccgcaaaaatgtaagctcctcctccatttctcttctccggttcttcccctccggttaccttgactaattatccaacgaaacagataacagcaagacgatattttgtataattttttaatgtttgattgattgcctcttctcctcgtcgacttattcagacgttaggtttctataagttattaggatgagcgatcaagtagatgacggcgacgtggtgttgattgagaggcggctgggttggagatgacaggaagtatgaaagctacatgatcgatcgcatcagtttagacgtgacatataaaatctgccagatggtctaataaaactcgatttgcttgcttcaccaaccggattgatgtgggatatatagcggggtggtggtttgctttttctcttatcatccattcatgctagactagaaatcaaaaggatgggggtcagaatccaattcccagaagcaacggcacgtctttctggggagtagtagttgaacgaacctgctagccacttcaaaagttgatgcgtgatgacaaatttcctgcttcctgacgtaacacagacgattttggcgcccagcaacttctaaccttgactgaaacgtgctgcagatccacggaatcctgaacgcggtggcctggggcat

SEQ ID NO: 111238 - DNA, 730 bp, Setaria italica; identical to SEQ ID NO: 110899
  Intron number 1 from transcript Si037608m (locus Si037608m .g) derived from phytozome v7.0 (chr-ID scaffold_9; pos 52 904456 to 52905185 reverse strand)

SEQ ID NO: 111239 - DNA, 1025 bp, Setaria italica
  Intron number 1 from transcript Si000080m (locus Si000080m .g) derived from phytozome v7.0 (chr-ID scaffold_5; pos 33 822689 to 33823713 reverse strand)
acatctacaagcaccactgcgacgctgaggacgcggtacggatgctggctgccccgttccgggccccgtttttgtgtttctgtccatttgtcttcctgttgcttcttgttggatgggggacttcaactgtggatttgggcatggatgtgcgtgggcgtgtgagaatttctgtggtattgagtttagggttgcggaatcgttgcctttgcttggatgtacctggcgggatggggattgaatcgggcgagcattgttaggatctgaaattgggtatgagttcataccgtggtgttgaaatttccagtgagttggcgttgtatggtatggtggacagtttgagatgtgtttttggtgaattagccatgctagtacaaatttttttttgcactttacgtccttccaatggtgacacaaggagatgtagtctgagttgaacgaaacatgaggggaaaacctctgttcaattgaaactaccatggaaattttgattcataccatcatatgtggccttgtctgtctagcttccagggtaacaccaccatccttttgctctggttctagcacaataatgttcacgttagccatatgttagattgaatctggtaggctcctcatagttttcactagtcgaatcagtgaatatggaggttgcaaacccaaaggatgaaaataaacttctattatcactttttgctgcaagtctagctggcaagcacaagtactctgatctccagcttttcctaaaatgccgccaaaagtagatgtttgaaaattgaaacgccaaagaagaagaagaagaagctggttgtcgttttgtaactgctcaaccgttttcataacaaggagcttgttgtatattgtttattcaaggcttgaacactgtttgctgtttatctttctaaaatgacgtcaatggtttacaaattgatcatataatagatatgttcattaaaaatgtgcctgatatgttttattccttttggattgcaggttatctttccagcacttgatatccgagtcaagaa

SEQ ID NO: 111240 - DNA, 973 bp, Setaria italica
  Intron number 1 from transcript Si000213m (locus Si000213m .g) derived from phytozome v7.0 (chr-ID scaffold_5; pos 34 324165 to 34325137)
cggccccctcaggtatttatatctttccttttgtcctgcctctactctctgttcttgttgtattttgcgctactatatccgtaactgtcagcttctgccttgcccttcgctgtgtgtttgctatattttcagaagtatgtattgttctacattttggaatgttgttctgaatgcacgcttagccctggtgcaccttgcagaagctggaggtcttatgtttgtcatctgtctgtgatgtggtagaatgagtttttgttcgagatagaagagattggtttggaatctagtaggaacagaggtggtacgcacaatgatgttaaaatatcagtacacaaatatctaacgaacgttaagaacacgcatggcccatgttctaaatattgtttgggtgtgaatcatgtggtttggcaactgaatctttctcttttagtcttttttatgttttgtcgcggcccagtttcagtgactcctaacgctaccatttcggactcatctgaatgaagcctcaatgcaacgcaaaataagtccatgcaatttgttcgaatcacatcgttccgatcgaagcctgttgaatgaaagcaacattttcaaactgtagaaggaatttctcagatattactcccttctatgacctccaagctgatcacctaaaattaaaagtaatatgcaagcaaaagagttcataaagtacatagttgtgcctattagcagtaacacaggcacacgcttaaagttagcattgtttactgtacccatattttttttccccaagtgcatgtttgcaagtttgcaggaaggatgctttgatttaattgatgagcatcttttaatcagttcaagtaagagtttcttgtttcttctattgcttgaaagatgtaatttgtgcctgcatgttttcttccccactcctgattttttgttttttattattctatagcaattgtttagctgagatattttgcttatccaggaa

SEQ ID NO: 111241 - DNA, 695 bp, Setaria italica
  Intron number 1 from transcript Si038737m (locus Si038737m .g) derived from phytozome v7.0 (chr-ID scaffold_9; pos 12 387504 to 12388198 reverse strand)
gagcccgatcacgcagacaaggtgctttttttctctctctctagcatctaatctcccacagttcaaagatgattcggatctctcggcatcaaacaagaaacatcatatcctaaacctgactcaagaaattatgctaaaagagaggcatgctcctcgagaaaattacctgttgatgtgctgctacttgcattgctgtctttaaacttggtcccaagaattcagctcggtggaacatttttcctgcaaaaatattttgatttgtcagcagaaaactggagtaatttagcttttgcagaagaaaacttaacttacctgattcttatctgggaaagtaatctaacatcgatatgacataaaggctcaactcccaagtagcagcctgttgttaggaatcacaaaggacctgttcaacgaaataattcctgtcaagaagttcttctttttctttttctttatagaaactattacaggtaatttggaaacaaggtatttgtctccgagaaaatccaaatatgcaaagttcgtcaatgtactcattctgctacaaactggctaaaaacatcttgttactgtccgaactgatgccagtagacataggaacactatgctggtcacttcaatgtttgtccagtccctacttacaaaacctcacgcacaacttgctatccaggtttcatcttctctgcctgctccaa

SEQ ID NO: 111242 - DNA, 939 bp, Setaria italica
  Intron number 2 from transcript Si002730m (locus Si002730m .g) derived from phytozome v7.0 (chr-ID scaffold_5; pos 34 934798 to 34935736)
cagttgccagatacctccagcttgacagaaagaaggtttggatcattccaaattttttcatttttttgtactatgcaattcggtttaggatccaaggaactaatacaaatcctgatttactttccaagtgaagaaagcctattagtcctatcatcccgacttctgagtagcatgctcgcttgtcaatataccacaattatagtattttattttgtcaggtagttcaaatgttagtgattcgcaaatgtatttttggactgcatggaatcaacacatgtttccttttcttatttaattttgaatgcatggtatgtaaacaactaatattttccaatatgattcctaatcttttagacaatagagtattttataaatggtacttgtgaagttgagtccacaaatgaatatttcatttaataataatatttatttaatatttcatttaataataatatttatttataaaaaacagaagtagaatcctgttaaaaaaagaacatttaaatcaaatatatgatctggaaactgggcctgtgattactctaggcagtagctagctatcacagacagagcacgtcacgtgtagaggactaggacagccaaagctgagtggtttgggaagtcctgatcaatttcagctactgttttctttagtaactgtttctgtaataaagtcatactgtatttgatagataattcttcttgggaacatttagatttcctattttataagggaagacacttttaaaactctaatgctgaagtttcataaattgtttcataatcttgtttggttttaagtttttttttttccaaaacctacttatgttgtcacattacatatattttcatttgaaatgtttaagtttgtgaatgcttcatgacaaacttattgtttcgttcatggccagtgctgctttcctgctaatcttgcggctc

SEQ ID NO: 111243 - DNA, 898 bp, Setaria italica
  Intron number 1 from transcript Si000571m (locus Si000571m .g) derived from phytozome v7.0 (chr-ID scaffold_5; pos 29 037704 to 29038601)
gcttacgtcatccccgagatcaaggtgcgccatcccacagctactaaagatcatcgaaatgataaacccctagccgtccgttcgggccccgacggccgagatcggctgatctaaatcctcgtgctgctcaactaatcacaagcggggggaggcatcctcgagcctacaggctgggcctggaggtgcattcgggtccactgccacttgtcgctgcattttctttttaattttttggaagaattctgtggggctgactcgaattaaaaaatttctcggtatggaggaatcgtctttaatggtgccacattttggtaggatcggggcttcaattcgccgattgctagcaagaaacgatggtttccgatcagtcctcatgcacacaaattaggtgcaacaccctcgtaatttgttagccccactaaggacaacttgcgcgtcaattatttttccattatgccctgtgattattattgaataaattcgtggctgttttcgctgttaggttcgtgccgtagtctacgtgcagttttctggaattaaagaagaaatatctgcacgtagttttctgctgtttcctccaggtagttggctggaaagttgcatataccggcaaatcgaaagccaaattatgtccagtattcaaacattgctatgattttgatgtgattgcggcatgcctttcggttttaattttggatatttgaatgtttccaccattctcgttctcggtaatttaatcaatgctcgttattttgatttttttagtggaatttgttacttttagcctgttgaatgaagcgcatcattgcgatgcgagtaacggcatccgaagaagatcgactgatttcgtgttgtgatttcaggttgaggagctgaagaagcattacggattgcggtt

SEQ ID NO: 111244 - DNA, 510 bp, Setaria italica
  Intron number 1 from transcript Si034821m (locus Si034821m .g) derived from phytozome v7.0 (chr-ID scaffold_9; pos 50 408718 to 50409227)
acgccctccatcgcacttgtcgcccgctcctgcaagtaaatcactctctccccttctgtaattaacttattattactttatctacagtttcccgttcctcttaaaaagaaatttacggttttactgatgttttctagagagtggatggataaggtccttccccttcgcaagaaaagagaaagtgtgcatttattgtgttgttttttatgatgctatatgagtcgcacctcacacctagagaaatatagattttcaacaggaattaggaaattttgatctttagttccattgtggtaacttttttgaagtaaaagttccattgtggtatggctttctatatttccgctttgcttggtagaggttagttcggatagaaatagaccatgtcgagaaggggatatacaatttattagaagaacctacattttagatttgggctccacatttaccctcccatgtcttttttcatgtgcaggaaactggaaacactgttcctggaagaaagtacaa

SEQ ID NO: 111245 - DNA, 907 bp, Setaria italica
  Intron number 1 from transcript Si000874m (locus Si000874m .g) derived from phytozome v7.0 (chr-ID scaffold_5; pos 32 364205 to 32365111)
aagtacctcctctacgaggttttctttctgatctcgtctgtctaatacttaagacacctataaccatctgcagctttttactgtttcgcaattcattacctgaatctgaagtgtgtatacttgtctctacctgcaatttcaacttgatgtaagtatacatgggttctttgatgtcacattgcttgagttctactgagtccagtcacctatatttcctgaactaatgagaaatagactgcattaatattttaaattgcaataactattcgtaatgtacatattgccagctgttcatgcccaagaaaaactctactctttgtcaatattctggctatcagatttttttttatatgctaactgtgattgatctgtgcctcatctcatagtaatttatcatacccacttttttcactcaggattatgtggcgaagtatcatatacaccctaattgagtggttaaatcatctgtgaagtaataacaacataatgtatcctagtttttttctctccaggctgcaggactttttgctcctgactaaatggatggatcaattgtgatgtatatacttgccaaatcatcaacaaatagttttcacttcgagtactatctctacacctgaaacttaatatagatagagtgattgactgaagatggaggcagatacgtaccttttagtcaaacattccttatttttatattataattgcagataaccaaattagtagtttattgaaccatggtggtgctgtctgttttgcagtacattttgtcaactttgtcatatgttagtgttagaagaaaatattcgtactctgtgttaatgtgctgtgtatatcatatttattatataatttttctgttagcttttcaggttccagtaagagttgcaggaggactgttatttga

SEQ ID NO: 111246 - DNA, 839 bp, Setaria italica
  Intron number 1 from transcript Si001914m (locus Si001914m .g) derived from phytozome v7.0 (chr-ID scaffold_5; pos 37 445460 to 37446298 reverse strand)
gcggggggatcacgttcctcgcctcgctcaagcaggtgagggccccaccgaacctctgacggtacgccagcgtcattgcttttgggccatgtttagttactcccaactcccaactttgacactatgcaaaaagaagattccccatcacatcaaacttgcggtacatgcatggagtactaaatgtagatgaaattaaaaactaattgcacagttttgttgtactttgcgagacgaatcttttgagcctaattagtcaatatttggacaataattcacaaatacaaacgaaacgctacagtgtgctacagtgctgtaacagtaatttagcacccccaaattcgccaaactaaacacggccttggttccggctgcaacgccagtcaacattttctttgcttattaaagaatccaaaatgctggtggagcaggcgattctgatgccgcatctgctcctttaagaacaaaaaaatgtcaggcatcggtagtgctctaacgccaaaagtatcttcttggacgcgattccactctctttcaattactttgacgcatctccatatgattaaagtgctcgcggtcctttactttttgtagagtagcttgcgaccaaatgtagacatattttatttgtatggataaaaaacttgacggcttcttgtttaacccgatactatttctaaagtgttacttgcagtacattagtcaactagggcagaaggatgatgttgttggttgttaaactcagtttgctactttgctgaggagaatgcacttgtattttgattcttatgttatatgttacttggtgtatgcatccaattcttcacagcctggacctaggg

SEQ ID NO: 111247 - DNA, 703 bp, Setaria italica
  Intron number 1 from transcript Si000474m (locus Si000474m .g) derived from phytozome v7.0 (chr-ID scaffold_5; pos 46 943371 to 46944073 reverse strand)
cgtttcttttgtggtaaatgctcgcacctggcattcttaattccagttatgattaaaaaaaatcagatctttttgtagttgtgttgaacagtatgctctaagtgaaagctgaggtgaacccgtctcatgtaaaaggataaaaaaaaattagatgtttctttatgcaatggatattccaaccattagcttgtagagttaatgatggggggttctatgactgcagctacacattcttcttgcatcaggatccaacaaactagctatcggttcttttgttttggtttcaattgatccttcgttgatatttgaagagtgttgaccattaattatcacattctccatggatgagtttgatgttgataagttaatgcatatcgcgttttgctcttgctttattgtcagtccagattcaaaagttgtttagctgtgaaaatattactaaaccttccatctgtttcaaattatatggttcaggacaaaagactgatccaaacatagtaatttatttcattgtggcatgtgcctgttttctagagaggagtgtggggtttcatttataaaaaagtggggactctagaatgacaacaaggaagcttgattatattttagaattgaccttaaatttcttttcaaactgctgatgtttttgtgcttatttcattttgcaggggagtgcatagttgatctgatttaaagataattc

SEQ ID NO: 111248 - DNA, 650 bp, Setaria italica
  Intron number 1 from transcript Si001154m (locus Si001154m .g) derived from phytozome v7.0 (chr-ID scaffold_5; pos 15 742792 to 15743441 reverse strand)
cagatttcctcccgcggattactccaaagaaggaggtacggcattcctggattttttttcccctatagttttgtttcgtgatgagcacactgtgtggaacaaggtggtcgtgcccacttattgaactgggcttaactgaaaagtcaaatggaatattgaactgaactaccagtttggagaaatgcatgtgcttgctactctaaggaccaacatttcagaccataatgaaacaccatagcagtggttaatgcttgataatttctgagggtgtgattctcttgataattagctgctcctttagtgttttcttctctttttttgtggtaacaaacaatttatctttctgtttcttgttactcctgtgttacagaaagataagaggccctacagaaggattttctggttattatgttgcaagcatttcttctcgaagtctattgggatataaacctgcaactttcgctatgccctttagatggacaaaaaaaggaaaaaaaatcatgttgttcctaaaggctaaattgcacttaaatatagaccaaatgaggacatatttttagaataaaacatttagaacatatttttcatcaattatcaactatcatcactttccttttaggaggtgcctgaaccttttgttcctcttacgg

SEQ ID NO: 111249 - DNA, 834 bp, Setaria italica
  Intron number 2 from transcript Si002066m (locus Si001624m .g) derived from phytozome v7.0 (chr-ID scaffold_5; pos 43 515393 to 43516226 reverse strand)
gctccggagctcacaactggctcatctaccttcaggtgaccgaatgttcttttcctattgtgagttgccattgctttcatcagtttcatgtatgtataacgtgcatctcagaggctcctacacaaacggtcgtctcatgttcatcctgaacaatttggttaactgaaatctgtaaagaaatactatccgtctttggatgaaaaggtagctgagaactaagatagtaaacccgggtgacaaaaaaaaatggttatacttaagtgacttctttcctgctgatgggataagacgtctagtaggcttactgcttacagattttccattgataaaatctcagggaggagcttggtgcaacaccacacaaagttgctccgagcgcaaaaggagcagcttaggttcatctaagtttatgagagcattaaagttctctgggatactcagcaatgaccacctagaaaatcctggtatacaaagttgcttctgtcatggctttctactgatacattagtcttcatcaagatgcttcttttagggagcaatctgctatattagtcccaattattcattttggaatttggactaatgcagatgcagcatcgctttgtgttggtctttttctgatcataaatattttgaattgagttgggaggattgcactaaattttgtctgtcgtgatcagatttctacgactggaatatagttgttgtaaggtactgcgatggggcatcatttgctggggatgcagagggtgaagatttggtgaatttctgaattctgatttcagctgcccatttaaattcctcaaactgatggtgtactagcatttgtatagg

SEQ ID NO: 111250 - DNA, 1059 bp, Setaria italica
  Intron number 3 from transcript Si002363m (locus Si002363m .g) derived from phytozome v7.0 (chr-ID scaffold_5; pos 45 95500 to 4596558)
aacagcaaaaaggtcatctttcaggtccacaggtaagcagtgcaaaaccataccactatttcatttcaacatttgatagaagggcggacctggcgcagtggtaaaactggaggtcctgggttcgaaccagcctctttgcagaatttagaagaattttgcaagggtaaggctgtctaggaattctcttctccagaccacaccttgtgtcggagctttcgcactgggttacgccctttatagttgtggctgctatactgcattacttgtgtgaaaaagggaagactattgagcatgtagaaaatatgattcccagaatcatttttattaaggaaatacagtacgggacaatcattaagatatatgaattactcaatttgagcattagactattgtgctgccttctatgctgtattttgttccaaaaaagaagcgtatatacattttcttggtggagattttgatttgtagtcactttaatcactatggaccttgaccaataatgtagaagtatatcaaatctttagccatatagtatgtctatgtacaaattgaattttgtttgccttactgtataaacatgctctggttttgcaaaatctaccctgtgctgctaaatcttcactgtacgttcaatcaagatgtccacataagctaagcagtttggagcattagttttcctcaaatgaagattattgaaatcaggattttagctgaaagttaatttacactgcagaacatgttttggtaaattgtatatatgcccgggaattcattgaagtcacatttcaatgattagctgttaatctgcgagttgttcatgtgtaattatccttaattgttgtgattttttttcatgttgctgagtgctgatagtgatagcactgaagaataatatattccatctcaagaagctcttcgaggctttgagcaaaaggcttcatcataaccaaagtcgtgtaactgctttaccagttcctttgctgttacacttcataagcattaataaactgttgatttgtttcaggatcagtaaagttaacaaggaagaggttctgtgca

SEQ ID NO: 111251 - DNA, 826 bp, Setaria italica
  Intron number 2 from transcript Si003334m (locus Si003334m .g) derived from phytozome v7.0 (chr-ID scaffold_5; pos 19 332754 to 19333579 reverse strand)
agatttggattgcgaacaggcgagctcagattaaggttacaagtcacaacaccaaacactgaatttattcaagggaaaatttaataacattatcaggctggtttcttaaatattgtaacatatcaaagttttagaaatcacaataatataccatatggttgaattgactatggcacatattaataattcaggaatagctcttccatagttcacagaattttagtctaactaccaaattagtcaagtaaggattaacttggaactatatataacagtctaagtccaggaaccttagaaacaaatagtgctactgaaaaattagcatatattttgtttttaagagttaacttgagtttgccccaaggatgttaactcagtatattgtctgaaaacaatgatctgactacacattttcatatagccttttgcattgatttggcgcacaaaccatatgtcgtacagacacctagtttcttatttacaccaaatgtgcctaactcaagattaaaaaagaaaacctggaaacccaatggagctaaaaattatatcattatgtacaaaggtgccaactccagtagaaacgttactcagggtacacttatgacaaagatgtataggatgcacagtacttctggtagcaatatagatgataagcagtttgagatgttcacacaattgtatattttgtttggaagttacatgcagtttctaaatgaaaatatatcgcctatgctttaatgattgaactaataacaagtatatttagaatatttgtgtaagtaaagtatctgatgctcatcacagaagcagaccatcagggaagaga

SEQ ID NO: 111252 - DNA, 948 bp, Setaria italica
  Intron number 1 from transcript Si034569m (locus Si034569m .g) derived from phytozome v7.0 (chr-ID scaffold_9; pos 47 867465 to 47868412)
taccctctccgcagaggctgaagacgctttgctctgtaaggaaaccctaccctactcgtttcgttctgcaggaatttccccctttgctgtggcggcccctcagttctttaacttttctttcttggactgattaatccgtccagtttgttgcgaatttccgtttccatgtggaggagagagcagctggtttattattttccaaaattcgctaggggttcagttgaaaccctcctcgcccccacacccccacgtttggtatgcccctttctggcaaaccctctgaatcgggttgtgctgtttgattccggtttgttccatgctgggggtgcagtactttgccgtttataacccagctaaatgcggcatgcgaacagctcccaatttagagattaagggtgttactattgcagaatttacattggtagatacacatttaagaaagcgagattttgcatattttttaggcaagagaaaaccggtcacagtgaaatgcagatggtgtgctgtatgtggtatgactatggctttcatagatggattaggagacaacgacttgtgggcacccgggttagagctgggtgggtggggctctcaatgtttctaccaataaactcatctatacagaagattcaaacaaatttagccaaaggcacataaagagggtattatacagagaaaactggttaacatggaatgcagacagtgtaccatacaaggtattgctttcctggatggataataaggagaaaacgacacttctgtgttgcttgcccgcgacaggagtgcaactctgggaagtaatcttcagacaggattacatatagatgatgttgctatcttcttctctcatcgttttattttgacttcacttctactcatgcaccttttctctgagccaattgctgttttctatccatgcagtttgataaaacgttgctgggttgcagc

SEQ ID NO: 111253 - DNA, 802 bp, Setaria italica
  Intron number 1 from transcript Si000517m (locus Si000517m .g) derived from phytozome v7.0 (chr-ID scaffold_5; pos 40 432409 to 40433210)
ggcgtccggtgccgtggccgctcagccgtgacgtgaggacgctcgctattcttcggtaagcgaggaagcggtttctactgccgtttgtttattcccaaatggttgaggccatgtttagttactcccaacttccaactttgacactatgcaaaaagaagattccccatcacatcaaacttgcggtacatgcatggagtactaaatgtagatgaaattaaaaagtaattgcacagttttgttgtactttgcgagacgaatcttttgagcctaattagtcaatatttggacaataattcacaaatacaaacgaaacgctacagtgtgctacagtgctgtaacagtaatttggcacctcccaaattcgccaactaaacaaggcctgagtagtagtagtggcagcggtaatttaatatgctctgattaggatgcatttttgtattatgtgtccgccggtgcctcgattgtaagatcccagtgagcacatgttttaacgttctggaaactgaatagttgacagaaacgtctgtaaagggtagtaaagaactctgtcagacattctagatcttggatgcatccttattgagctatacataaagtgtgttgcaggttgggaactttgtgcatccatgtggtatgtggtaatatatactgatgcaaaacttttgtttatccatttaatgctcaaattttgaatgtagctagtttaagcttcatgtttaccttggttgaagttgaacaatcagtaaagtataccattgctgattattacatttcacttgctaatttcagatttggtataaca

SEQ ID NO: 111254 - DNA, 830 bp, Setaria italica
  Intron number 2 from transcript Si001031m (locus Si001031m .g) derived from phytozome v7.0 (chr-ID scaffold_5; pos 46 090978 to 46091807 reverse strand)
ggctcccctcgcttcctgggtcactgggtgcgttctgttttgtcattttggtgtatgtgctcatagttggctcagaagtatacattacacacctccaaatcgatgatcaatcttgtaccaactaccaagtataagaaacaaacaatacatcagacaatgatccggttctattttttatcgtgattcttttctaaaaaaattatagcagatatattggaacaaattaggaatctcataggttgtcttatgcttcgacaaatagtacttttttatgacgtggaagagggacggatcaggaagtgagagaattaaaatgattgtagcgatcgtcttgtaagctaaaattttgaactacgatcagtctttatcattgtgcgggttgtcattgtcatgcaatatataacattccttttgtaaaggttatggatgccaaaaagcaaccactgctccaatcatctagcgtgtctaaggttaatccaactaggaagatttctttttgatgttttcaagataaccacatcagcaagagaaaaatgaaactgtctgaaactacccctccaatgcataccatcgtgttactatttcataggcactatttaacatttaatttcaagacacattcagagttggtttccatgtcaagagagtttcatctagatgaacctggttacttctctatcctcttaaattttctaccacgttatcaaattagctgatgtgtcactatatttaatacgcatgaaactaccattaagaataacgtaatgaagttcaatcttgtatcctgcattacaggttcaacatcgtgggacaggtacgctgtccgtggc

SEQ ID NO: 111255 - DNA, 1039 bp, Setaria italica
  Intron number 1 from transcript Si004340m (locus Si004340m .g) derived from phytozome v7.0 (chr-ID scaffold_5; pos 32 587501 to 32588539 reverse strand)
gaggaatccaaatcccgcagccgcccctccgccaggttctgccctccacattctttagcacctgacgaattaactacttttgattcccaactgagttatcatgttacgaaatttttatatcggaatggaagtattggaatttcatgaagatggagattttttttttttgcaagttatcggttagatggagagagagattttgtctgaacatacaagggacttgtagaaacaaaggcagttgatttagaaagtattatgaagtataggcgcttttgagttttgattcgtcgttcccgttccttgagccctggcagttgatttaggaccaagtggtcttgaaatacttactgcacaacacaatttgatttattcgagcttttgagtttagactttagaggtgttttcgttctgtttgaatgatgcatagaaactttctgaatcagtttcacacagctctagttagtcaatagtgagttcaatatacacctatgaggtataatttacattgtaatgaagtattggacaatcccctgaagaagaaaaaatcatattgaatgctatatgaaatttccacatcttaccacatgctccagttttccaagttaaatgaggattctccaaccagagcatcactctgtttgattatgttatgcatgttctccaaccacggcatcactttggttattacattatccattttcccatgccaattcttttcactttgtgctgtatttgaagagagggaaaggatcttgtccgctctttaccgtgaaaatgaggaaacaggtgtcgagcagcggaatcttgtatattagataacttctttctgcagttcgattccttgttttgaatcattaaggttttatttgacatgaatgaaaatataattttgatatttcttgcagaatttgaagtgcagcttgccgctttcttattttgtgctcctgaatgcttcaacctggaatgagtacatagactggcattcgtcgcatctttgatggaagactgcctgggcatttatatttgattcctggagctc

SEQ ID NO: 111256 - DNA, 1003 bp, Setaria italica
  Intron number 2 from transcript Si001738m (locus Si001738m .g) derived from phytozome v7.0 (chr-ID scaffold_5; pos 30 753991 to 30754993)
gctgctggacctcctctgccccggcaacctcgccggtatgtaggttcccattctacctcctccgattccatccttcccctttgaccaaacctccttcgtactgtaatctggttggtggggaaagtattagcgggtatagtagtagaatgcaatttcgagaaggttcggtgcacgggaattttggagatggaaagggaaagatgcgatgcgagtggtgaacgcaaaaagcagagaaacagagttgctgccttgctggataggggtatggcgccaatggaatgaaatcaggtgggggactctctccccttccgtagccattcaaaaaaaaaaaacagagttgctggataggggttcagtttaaacgtttgaagtaaggaacggatattaaatcttactatgtaattccatctgcagctatttggtttatgaaaattagtaaaaaactgaaaatcatgcttcaaaactccaaagagaaaatgaacaattgaatggcgatatagatgaaatgatgccatgcaactagccggctggtccacatcagtcgttgtcgacttgctgtagcaatttcagcaaaagacttgagagaatttttcttcttcattttccatctgtcgactttccagaaagaatcaactttatggtccgaattcagaaatagaataaatctctacaagcagtttcatgtatcaaaactaaaaattaatttttttataactagtcgacatcataattcgtgacttgtttggagtagagtcacaatcagaatttacgatgtcaatgagaaagaaggaaactccattcagccaagtgcttttacttcagctccacaagcctgatgtgcctaagaaatcaattgctgtgctaggaaacagattattaggataaatctgacttttagtaacaccaaaacatggaatgcagtaacttcatcactttctttttcttatgatgatgtgatatctacaattcagtggatcctatttgttgcacaggttgctcaaat

SEQ ID NO: 111257 - DNA, 671 bp, Setaria italica
  Intron number 1 from transcript Si036121m (locus Si036121m .g) derived from phytozome v7.0 (chr-ID scaffold_9; pos 50 876314 to 50876984 reverse strand)
gatcgagtcctacctgcagttcactacagataacggtgcgcctctgcgttatgctttgctcgatgaaacaatgactagatttgtcttaaactccacatctgagactttgtcaatgcagaactttgggtcttgggatacaagtcaacgattttggtatatagcagtgtgaatttatgctgttgcaacgggttgttaattgtgtgacgccagtcacacttcagtcgctagaaacttaagctatccgaagggccttagtgtacaatctcttgaaattaagatttctattgcataattcagtagctgatcatgggtagtttggtacatatgtgaaaattataaggctacttaaaccattcaagcttattgggatgtttgagaaaatatcacgtagacctagtggtaacactataccagtatgcagtacgcagttgattttgtctccgagttcacttatgttttgtgtgtggcagggttaggatgtgcttagatgtgttggctttgggaatcatatgatgtgtggtttatatgtctgagctacctgtgtcattaatagcagtttgttaccatgcttatttgctgaatatttggactcttctttatttgatttttgtcgcagtatgttttgttagcttatggtctaatatcctctgcattcaatctaggctttgaag

SEQ ID NO: 111258 - DNA, 964 bp, Setaria italica
  Intron number 1 from transcript Si002444m (locus Si002444m .g) derived from phytozome v7.0 (chr-ID scaffold_5; pos 32 542964 to 32543927 reverse strand)
tcgccgacgtcgccgaccccgacaagcccgccgtggtgagtccagctcttcctgtgttgggattggttggttgggtgcgctgggatttcaggggttctggctagtttggcggttgaaactggattggcattgtcttgggtagctcactttggtgggaatgggtttgctctgtaggttaatcggacggccaattgcgccaacagtaacttgactgttactatttgcctcgacttgagccagatgtagaatcagaatgtagacgcgaacataaaagtgtgcaatcagtgaacaaacctgcagcacgatcaactgatttagctctgaactgtgcaacagccagtactccctgcttgtaattcggggctgtaaatgttcttcggtgatttgaccactcacatgaatatgttgtaatcagtgtggttaatttctgttgtcaattcagaatctacagttttgataaattatggaactggcttcagtttgtttaattggattgcatcatttcagtaattttggagctgtttctgactttaaaatgtacgtcaacggctgatttcagtagttagctttcatggtccacttttacatcttatatgttagaatctgataggcaagattgaagtcgtcctggattttcaggattgtattgaccaaagcaaatgaaagcaagaactttttcccttttctttttattgttcaccttaaaatttctctgatgcctgtggacttctctaccagaaattgcaagtcaaaatttttgagacttttaaaggatgcaccacacaagtaattaactattactaaactagtagcaatcactgattcagctttgagctgtagtagtgctcgttgtccttgattgatatataaatatatacatttggtcaatcccatgttctcatctaatctatttgattctctttggtcagttgattgaccctgtcgacagaacagttgacagaga

SEQ ID NO: 111259 - DNA, 649 bp, Setaria italica
  Intron number 1 from transcript Si036773m (locus Si036773m .g) derived from phytozome v7.0 (chr-ID scaffold_9; pos 54 916911 to 54917559 reverse strand)
ggagtcctccaccggcgcctcgccgcctcgcctatgtgagcgcttccttcggttattgttgtgattcggttaattctgtctctggttgcggttgtcagaggaatttcctggtcttagttgctgattgcagtgaaggaaagggagattcctgtcgggtcaagttagaaaggaatcaggagaatattagggaatcgtttgagtatttgttagtcagattgcgttatgctagctagattttcatgactaaccgatcagtccaatgcacgatcacaactgctattgctatcgtcccttttttgaaaatttggctggtactggtttattgtgctgatcctcatgacacgtgttccttcaatcaaccagaagcagaaacataatatactgtggtgctctttttttttgtgtgtggaaagaacagagaaaatgtaataaagatgtccattgtggttctaataaacatacaaaatgaagagaatggtcttatgtgtttttggtgatacttatgactaattggtatggtgaagttagaatgggatactgaacattactaatgatagtcatagagctagggttgagcatatcgttcgtagatcttacgcctgttgttcctgtatttttcacgcacggtcatttctttctcccaggaaag

SEQ ID NO: 111260 - DNA, 995 bp, Setaria italica
  Intron number 3 from transcript Si035336m (locus Si035336m .g) derived from phytozome v7.0 (chr-ID scaffold_9; pos 55 839829 to 55840823 reverse strand)
cttgctgaggtatgtttgatttcctttttgattttattatcagttatcactataagtctatgataattcccagggttgttaatatttaataggtcaccttgccgttagctgttaggggctcagggaggtaagcattttcgctttggtagtattattggttgtaagctgtaaggagtgatgtgtcaagaagcataaaaagcttctctaactatcctttctttaaaaatgggcagccacattataccaaactgtgatcgtgtaaccattgcaatagaggaaagtaatgacatatttactagattggtagtggctgcgatgttgttgtttccaatttcctaatagctactccctccgttccaaattgtaggtcattttagcttttttagattcatagatattattatgcatctagatatagtgtatgtctaattgcataataatatctatgaacctagaaaagtcaaaacgacctacaatttggaacggagggagtattgtttatgcaccctcataatatggagcagtttttttttcttgtcctgatacaagccattatttagtgttagcctattcagagtagtgaaagaatgctgtaactctatttgaactactaataatgcctagcatatactacatgccaccagataacacttttagtcaagcacatcgaatgtgctagttctgactacactgaaaagatacaaaaatgtatctgtttccctattgctagaacaaagttggcctttccaagtgtgttttatgttctctaaattagaaaagtctgttcatgtctgatattttattttattgtgtggcatctttttataattgaagcatgttcacaaaatcacaagttgatcggttgctcaaaacatcatgccttcttatgtatggatggtttttagtccatgaacatgtgctgtagttatgaaaactggctgtctttacaactttaagtagtccagtttttacagtggtgaatgccttcttgcagg

SEQ ID NO: 111261 - DNA, 672 bp, Setaria italica
  Intron number 2 from transcript Si005340m (locus Si005340m .g) derived from phytozome v7.0 (chr-ID scaffold_5; pos 33 47901 to 3348572 reverse strand)
ttatcgggtggctttccattggaggcagtggtgaggtcgttgaactcctcagtccccttcccctttcctcgatgtcacagctcggtctttcattgttctgcatacacgtgtgtggttcagtggacaattcgattgttcagaaagtcagaaccatatctacatagtcgatttgagttgctccctgagattctgcatcatgggttggtgccggagcttgtattgtgaatttgtgatccagattattggattcttgtttctgtaacctgtaaatgtcaattgagctggacagaatatttggtttaagtttctatttttctaagtctgaactaattgatgaaaaccagatgttctacgatgctgctagtgttataatacaacctatatgttttcttagacatgtatacactctcgctagtccaattgcaatcctccaatgaaatctcccagtaatgtaggaattataattgttctatattagtgtagaagaaacagacaactcttaccttgccttgtttgtttgttttgttgttttttatcttgcaagtgaatcttcggttcatggatgctgttgccatttgttgatctcgtgaatgacttattaaattctcaaactcatttctcttctgtatgcctgcagattgaagccttaggggctaggtaagaggccgagag

SEQ ID NO: 111262 - DNA, 964 bp, Setaria italica
  Intron number 1 from transcript Si035283m (locus Si034785m .g) derived from phytozome v7.0 (chr-ID scaffold_9; pos 50 734044 to 50735007)
tcaagagcaacgccgtcttcttcaatcccgtgcaggtccctccgtcttccatttttcatgttaactttttttgttttttcacttttatttgggggcgctgttctatccgattcttatctgcgttggcttgaggcttacaagctgtggattggagatacaggcttgaacccttgaatttaacctgtacaatttactgggctgacctgccgacttccagttgataggtctctagagctttgcggtattttggaggattcaaaattgggtgctgttccgtgattggtctgcgattggttctgtaggcttcaaattaatctcattctaccacctgggtgctttttgcccagctaaatctatttagttattgcaattcatttgcatatactacctcttctaaactggaagcatttaagtttgaaatttcttgaagatatgtcaaaaacccaaacagctattttaatttgtatatttgacattctgtcattctgccaaccgagtttgggtgccagccagtgggtgatcaaatatttgcctccgagtttacctaattctgccatccgggtggtttgtgcctagctgaaggaatttatctatgaaacgtttttgcttatagtactgtgtcacagtatatgggatgcagcgtaagcttgaaatttcctagatatatggtggaaccgcgaagggtacattgaatttctatatgtgatattcttgtgtactattgacaaaaaaatgtattcgaatgggttcaaatcggactgcttattttggttttcattaaagaagataatggttacaaactgtgaagtatacatgactatgaataatttttcttttctagtgaaatagttactgcttttgatagtcaagattagttattgtttcgaagctggtatgttgaggagaaattacatatgattcaaaagtttaagtttactgctttgatcaggttcacaaccgagac

SEQ ID NO: 111263 - DNA, 985 bp, Setaria italica
  Intron number 3 from transcript Si001806m (locus Si001806m .g) derived from phytozome v7.0 (chr-ID scaffold_5; pos 42 768127 to 42769111)
gtcaagttcacccgcgacatcgtcaccaagaacgggtacttgctttcctctgttttcatctcccttttgacgcggctacacctaatccatgaaccggattgattgaaaactgactagaaatccggcgagcaatcacctgtcagtagattcttttttcttcttcttcaaaagaacaaagaggaaaatttaatcaaagcagagctatgaattcagaattagcaatgaatcgatgcttagaaacttgaggttaggcaagaattcagagctcggcctgatggcgacagacattccactttgtattgtgccccccaatcccaagtcgctgcaatgcactgttgggtaacgctcgataaacagtacgccagcacaatcactttctgcttttcctgaatatggcgcgagcacttgtttttttacagtgtggggggtgactgcttttacatcatgcatttgccagtggaatatctagctagctttggaacggagtaggcatgaaacctttacacgggtggcctttgggtcactgtgacctgacccctttccccttgccttgcgggtatctatgctattcttgcaagattatcctacctaacacaagcccacgataacaatgtttccgaacgcggttagtacagctagggatcctatcttgagaagataatccctccacggtgctctctttgccacatatgtgtgtgcatgtttgttggagccttttaatacccaattttggatctattatcgagcaaagaagtggtcctttttgagcgatagtcagtattcataattcttttacatgtgagggtggatggtggcctaggagggttttctctttcagtgacaatgactcctgagcctctttcctcgttcctccttgtactgactcttggactccagtattcgaattgctagagcttatagacgactaatggggctcgtgctttgggcaggtcaattgttaagaaggaggtgagccagacggtga

SEQ ID NO: 111264 - DNA, 713 bp, Setaria italica
  Intron number 1 from transcript Si005046m (locus Si005046m .g) derived from phytozome v7.0 (chr-ID scaffold_5; pos 16 256356 to 16257068)
tgtgagcaccgccggtctgtccaaccaaccacgcacaggcgcaagagagaggtggaagacgctgacgcgtgggcccggcaaattttaaaacattcaactttccctactcaaatgacccagctacgggcacataaaactctcctaaaaatactcatttgaaagataaaaccgcaaagaatacaatgccataagaatcacctcaagaactgcttaggtttccacacaattgacaaaggaaaacagccaaaactgaaatttaaatgaatttttaacataaggaaatatcactgaaaaattaagtaaaaaatattgtaaaatcatcaaattgcatctagtatttaaataaaataataggaggcacaattgcataacagaaatcggagttgctcaatcatgtgaacttaaacaatgcatggccaagatgctcaattatgcacaaatgatgctcatgatgctcaattatgaaagttgcttcatttgaaaagatctaccatttttatattagccaaaaattaagttcttacattaagtttgcttttatttgcttcccaattgctttagtacaaaggtgtttaacacttagtcatttagagttagctttgatttattccttaatcactttgatgtttctttgatttagtctcttaattactagggatgtcacactcggtggggtagatcctctggaacggccacgccatcacctccctggg

SEQ ID NO: 111265 - DNA, 959 bp, Setaria italica
  Intron number 1 from transcript Si000803m (locus Si000803m .g) derived from phytozome v7.0 (chr-ID scaffold_5; pos 46 997527 to 46998485)
ctaccacttccagcctcccaagaactggatcaacggtatgagctttgtgctcttctcttctcactattttttcgcctgccgttgactttcttgcaacctcagagccaaacatggtttcctggcaatgaaaaactgtcgacacacaaaagtcgacaactgtccattttcttcttgtttcgggaccttttcatggttcaagaaaaccgctgatctagttttgcccaactggagggagcttccttttctttcaaggggaaaaaacacatcatcaggaggagttaaacgtagcaagtaggtgaccttaatttttgtatgttcatgatatcagaggggaagggtaggtgggcaactcaatacttgtgcagtgctgttgctgaatgctgcctgcaggacaggtgctcacatttatggcactgcagctacattttcagtaatttcgtaatatagtgatagccttgcccaaatcgaagctgttcgttgatgaaaattttacatcctattaccgtattttgaaggaaaagcatttcagttctcaccaatatgtatgccgtacccatctcggctcatctctagatgatttattagacttgctccactggtactactgcctggaagtattcagttaggcgatgcaaccgaaagtatgtgcccggaatattagagacatcatctgttatccttggtcaacgaaagaagttttagcagcttctgaaccctggcatctttgctcttgcttgtactgtcttacatattaataatgcagttgtcacaagtcttttgatatcatctttcttttgtgtccttcaaaaattctgatgaatcggggcgatcttttcaaacctttgacaattcaaaagatccaaatggtatgtatctctcttacacaaaatacttgcatgcaaaaacgtagaataagctgaaacattcctcaactaatgctcccttcatttctaggacca

SEQ ID NO: 111266 - DNA, 508 bp, Setaria italica
  Intron number 1 from transcript Si004151m (locus Si004151m .g) derived from phytozome v7.0 (chr-ID scaffold_5; pos 38 637743 to 38638250 reverse strand)
aagccggagatcttcgtcctcgaagacctcacgttatctcaatttctagtttcttttcggttgtgttgattgatttacgatgtgttcagcctacaatgtcgagatatactaggccagatttttacaagaatacttctatctcatatttggcacagtaaacccaaattatgttcatccaaatcacatccctttcctctcggcatttcttatggattgatcattttttaaaaagaataattatgacatgtatatccatcttacctacaattaagagttaatttcacacctgatctcacagtatgtggggtttcaatgaacattaccgtggccataggttgaacgattacaatgcgtgcgcattgtggattgtacatttctaccgaataaactttctttttgagggggattctaccgaataaactgcttgactcatccatcagatcgagtattttccatccttttgagttccaaaatttcttatgttcgatcttgaccttattcccaggag

SEQ ID NO: 111267 - DNA, 555 bp, Setaria italica
  Intron number 1 from transcript Si040354m (locus Si040354m .g) derived from phytozome v7.0 (chr-ID scaffold_9; pos 50 3220 to 503774)
ggcaccttcaagctgttgatattctggctatattggtatgtgcactcatgactggcttctattttgttaagcttgtcatttttcatggtctttctattatttaaatgtattacatattatcagttgttgccttagtgtattaaatgtattttgctatttttttaaggtaaattacagagaggtaaataaatatcatctgctgctttgttttatcatctctaactcaacagcatgttttctcgagagaatttttttgttagtattggcctccgaactgatttttgtttttcttttcatgaacatggcaggactagatgtgcttcttttttattatattgatatttcacctcttttgtatattctgtttaacattgccattgattcttgcatccataccagctatcttatcttccatgaaacaattactgatttggaaattatgaaaaaaatgatctgctcttatcctgggggcaactaatcagtataacataagttgtcatctattttgatcattttcttttcttactgcagatactttcagagctaaactgggaa

SEQ ID NO: 111268 - DNA, 954 bp, Setaria italica
  Intron number 1 from transcript Si000431m (locus Si000431m .g) derived from phytozome v7.0 (chr-ID scaffold_5; pos 56 66770 to 5667723 reverse strand)
ctccgctgcgcgccagctcgctcgctcctccgcgcgtaagcccccaaactccaaacctcctcctatcctcccgctcaaattcttgtaaatccggcccaatttttttcgcgttcggggtttagatctggtggttgcggttcgagctggtgcgaattgatgcgctaggttcgtcggatctgcaaggggagtaagcgctccgctcagcggtctgggaaatgggcttaaatgtgcgaattttcgcggagtgacttttttttttctcctgggcttgttttttgagtggctcacccggtcgtaaccgtaaggattaaatgtggccaaatgttttgaggagttcgtattaggcatgtcgttcttgttcgtaggacgattgattaccttttctttccattcgtcgagggaatctggggacatgacacgatgctgcagcacgcgtagtagcgggaatagtttgttgggaattcggtagcgttttggtttcgcaaggggattgctactcaggatttgcgtggccgagccattctggactctggatctcggccgccaccaccctcctcctgcaagaagatatctgctcagctccacaaactcggcatccgtgctcccttcctctctctctctcgctccatctcgtttcgctcgtcgcgttgtggtttctttctgccttttgagttcatagatagatctgcgcgtgtttgggctagattccgtcggatttttgtggccccgcgtatcgatacgtgctatattgatatacatgtgtaaagtattgcttgcatctgaatagacctccgtatcgtgaagttatgatctgtttgttatggactcatggtgtgaatacattgattagtttcattaattaacactcttccattgaagtttattgatacatgttttctgattttaccatgctgtatctgacagattcactggttcagctgctagcctatcagc

SEQ ID NO: 111269 - DNA, 424 bp, Setaria italica
  Intron number 3 from transcript Si034864m (locus Si034864m .g) derived from phytozome v7.0 (chr-ID scaffold_9; pos 15 30831 to 1531254)
cattctgtggtaaaattttttcttattagtctggatttagaacgagagtgctgttattttgaacttagttgttgtcgtagatcatggtgtagatctactctctatagtactgccttccatacttcgccatgtggttggtacccaaagtctagcaatgtgggccttgtgtttgtgtggtacatggagtttatcattgatgggctatattgggccccctttgttggagaactttttttttcctttggaagatctgcagaaatgagatactgttggtgccaaactatatcgtgacattacttctttcaccagctagaatgctcttatgacttttgccctgtagggaagggattcggatagttctttattacaaactaattatggtcacaaacatttgtttgatatttgtaagttattttgtaggagg

SEQ ID NO: 111270 - DNA, 903 bp, Setaria italica
  Intron number 1 from transcript Si002660m (locus Si002660m .g) derived from phytozome v7.0 (chr-ID scaffold_5; pos 38 795629 to 38796531)
aacaaggtgcgtatagtttcatcagtaaaaggaagtgtgtatagaatctcttagcacaattgccgacaggcagatgtcaaaaacgcagtttcatacctccgttgacgtgaaatttggtctatttgtctaacgtgagcaatgttgcaaatcgcgggctatagaatttagcggagtgttcccgaaaacctatagacattatagtgtaactatagcggaagctatgacctttagcggtatgcaaaaaactagcaagatttagacctaaatattattaatttcatgaatttcagtttatatttcataagtatatgcaggcataagtgcaaacataagcaaataagtcacaactcacaagacaagtcataaatcacaattcgtaattcataaatcaaagtatataagttggtagatcaaccatagcggtgttagcgatgctagactattgaatttagtggacctatttcacactttaactgagttactgcatatttacaatatcgttgcgacatctgtcttaaaaatctatagcggtgctataacgagctacttgcaacattgaccgtgagataggagtacgcccgggatccggagtccaattgccgaagcagacgagatcccatttgagaaaaaagcagggggaaaaaccagcacattggacaccaaaaccagctggaaaaatctcgccgtcgacgagacgagggtaaaagtaaaacggcgaagaaacagggcagataaattagaaaaaaagggtaagggatcttgagttcttgactgccatttggaggtcaaaccagagccgcaccacgccatcaggccatcactgcctataaatactctctctccactgccccgtaactgacgcccggagcgccaatttcactccaccccaacccctgctcttcc

SEQ ID NO: 111271 - DNA, 870 bp, Setaria italica
  Intron number 1 from transcript Si001506m (locus Si001506m .g) derived from phytozome v7.0 (chr-ID scaffold_5; pos 82 43506 to 8244375 reverse strand)
catattgcctgtcaagttcccgcagttcttcacaggtgagcggctgcacctaaaagcgttatctttatctttgatcctgataaaaatttggaggtgtcaatcactatggtgccgcataggcttttcagatctttatcctgattaaaatggattgggtgatctagggttgatccaattatgcattgttaggtagttaatatcgttagctggcgtcgataactcaatatagattattggatgtcgattgataagggttctacagtttatggttttcatttttagatgatgatttaggctgtcaaacatttttcagagaccacttctagaggctatgtctctgtagcaaagtttgacaaattccatcattaattttttggttgctcaatcttcctcaatcgtctacaccacaatcagttaggagtaaaaccacaacccttttgatattaaaagtgtgcattgaaagatggttttcaattcaagagggatgaaatatgttatttggacaatatgcattcctacgattatcctactatttttgcagcagagttctgattcataattgttcagactactcgattctagaaatgcatgttctgataaatttagtttcaattgtgaactgtttgtttgcttatgtgtcatttgcctttgttcatgcttctttctttgcattttctcggtatctgttctctcaattactgttaactggtgtgtccttgttttttatgatacacgacgatgaaaaaatatcgtatgcatgaagtatgaactcataggtagtatagacatctgtgttgtcaactagtatatactaatgcagaatgctattctgtaggcaagcggaggccttggagggcttttcttttgtat

SEQ ID NO: 111272 - DNA, 978 bp, Setaria italica
  Intron number 1 from transcript Si000598m (locus Si000598m .g) derived from phytozome v7.0 (chr-ID scaffold_5; pos 46 634066 to 46635043)
aaagctttagcattattgactgtttcgccgcagcggtatggtctggtcacaatgagactctgattatttttttctggtgcctggtgcctggtaaaagcaagcattgtcatttttttctgtggatgaacacgcatcagtggagtaggaatgcctctagccgaaatgtagttagttagcaaaacactggaattagtcagtcaagtcttacaaataatcatctcaagactcgagagaaatgtagtatagctactgtcattttctttttgtttaaaaaatatatagaagtacaactcatgtttcatctaaattaagtttgtcaccaactcaccatggaaatcgtagataacatacaagttgacttctagttgttgctactccctccaccggataagataagacaagtacattatatttctaggaaacttcagttttacatatcttatccaacactagctaattctgaagatggaagccaaaagaaaatgcagcccatattgttgaatgggggagaatagtatatgccaagatgtatcgagatttaaaacctttttttgatgccaatgctttgtagggatttgctttggaactaggctgtagatctattctggtatagaatttcagtgagatggccatgcaaccaaccacaaataataaagctttctttccacggattctccaattgtctccccaaatgttggggttatttgcttttattaattatttaattcccaagagcaggaaagaaaagtgcgaagccggacccgccgaccgtttcgctccccggcagcagccacgaaggctccacacgccacgcccctccctccccagcacgcgtcagccggaaccagaagccgagcgccccgcactcccactgcaagcgggccccatctctccgtccccaccggtcagcgcccgtcggcgtcaaacctggagtgataaatagccgcggcggggggaggtggtgctcctcatcggcct

SEQ ID NO: 111273 - DNA, 749 bp, Setaria italica
  Intron number 3 from transcript Si004348m (locus Si004348m .g) derived from phytozome v7.0 (chr-ID scaffold_5; pos 90 98698 to 9099446)
gtgcaggtgggtcgttttttaagtcgtggtggctgcgttagtgatggtttcctgcagtgctgactatgctgggagtttcaatcgttgcaagctgctacagtacgtttgttttgtgatatcgtatttgttagctcgtgatacattgatgtagctgctgcttctgtagagacaaactcgcaattgatgttaatttcacatttcccctaagctttccactgcttgatgtgtgttttctggaatggttgttgcatcacttattcctgtactgttaattgttgcgctcggccactagcatcagctattgttccctacccccaagtgatcggtaaccgcttgcggctaacagaagggcaatggagcagcagtttgctgttattaacggcacttgtctttgaatgatttctgctcagaaagtgtgtacttctatggttgcttacgttttcttattgtgcttgctactgacgccaaatgatctgatatcttctatagccaaacaagtgttcacattatcactacattactggcaattcttgtcctatctgatttgtggcttatggtaaaaccgttggcattgattggcatagtgataattcttacatgattatgtatgtagttgttgttttagaagattatgtatgtagttgttatggctgttgatgtttatgttattattatcaaatgatcataggggtttttatttggtactttgtgtaggtgacaacattgccagagtacccagaagtttacaa

SEQ ID NO: 111274 - DNA, 1016 bp, Setaria italica
  Intron number 1 from transcript Si001035m (locus Si001035m .g) derived from phytozome v7.0 (chr-ID scaffold_5; pos 44 809273 to 44810288 reverse strand)
tcgttcgcggccgtcctagcgcaggtgcgttccatttccagggatcgtcagggctcgagcgatgtttgtgtccttatttttactttcacaagcgttctagtagtacttaattgcgatgctgttaccgacgaggcatagctacaaatcggaaagaggcgcatggtgaactaccgaaatcaatttcgttttcgttgtgattgtagtagtttgtactgagcaatgccgcgtcaaatgagatgtggcagcttggggccggtggctgagaaatggtcatttttttcgcgtttctgtgagcttgggattcgaagctattcgggttcgtttgctagttgccagatagctcccctgacccctgcttgtcattgtttcaggatgttggatattagttagattcctatttaggccagtggatgagttgaatatcaacccaggtcgacagaattaattgttatccccttctgtatgacttgtgccttcttcgatgttagtgatcatgagaattacccttttctgcttcaaaacagtcacatgaatgcagggaagtgccaaaactgagacaattttcatattcactggttatgggttcaaagaggagagaaatggagcataattgttgttatgcctgtatgggctatgcagacctagtgctttcccacaataagtagtattacaaaatcagtatcgcaacatttgctgaccaatttaaagtcaaacatgtttacattgcaaattcatagtgaccactaaaatttttgtgatgccttttctcctacccatcctatgaactatcgttgtgattatctgctcagaatgtgtcatgtgttcatccactcttgagttcacatgcatagctacaccatcaatacacacagagtgaaacaaagcacatcctatatttcaccaattcaccatcatacggcttgatgttagcatgatcacatcatattttatgcactagttaagtcttttttggttcatggcaataaggagatgccttcacttactgcaggttgtca

SEQ ID NO: 111275 - DNA, 948 bp, Setaria italica
  Intron number 3 from transcript Si003096m (locus Si003096m .g) derived from phytozome v7.0 (chr-ID scaffold_5; pos 14 905212 to 14906159)
tcactgatctggtaagcttattttgtgtttctgtcttctgtgctatgtctgcgatgctatgctcactaattgtaaggctatgttgatggaaggaaaaaatgattgatgctttgcatctatgaccctgttttttattattctgtattatgaaatgttattcctgtttcaacatttatgtttattaccttcttgaactccatgctctggtgtcctaagacgacagaccatgcttatagaagcttccagatgtcattacgggctagtatgctttttgagatcttttttgtggtatgcatatgcagcatgcccatttttgtatatatttagaagtcagtgtgtagctgcgtatcgagttttgactctgtgctgcgcccattgtccaatgcctctttatgccacattatatctttcattacaagactttggtaattgctgttatttgtgcattgctttagattggaatttatactagacatgaatttgttcacatcaagtagttggcatcagggctttgtcaaatgattcagaacttttatcatgagttcgtactgattacagagtgaaaatttatctgtcacatgagactctgatttgtccatttggttactttctggacatgcattatgtttattcatgcatgatttggaattatgaaaattatgtgctgtttggttaacagccatgcctttccccatctgccatccacactccgcactccattttgagcaaattgatgtgcttcaaatatatactggtgtgcactatcagggaatgtggttggaaatatcaattatgtagtagatgattactgtgtgcaagtattcctgcgactcggtagatggacaaaatcacagacacatctggcatgtacagtagtttactattgtctgcagcttcatcattcggtggattcataatgtaccttttcccaggtgcacaaggcacaga

SEQ ID NO: 111276 - DNA, 1026 bp, Setaria italica
  Intron number 1 from transcript Si002511m (locus Si002511m .g) derived from phytozome v7.0 (chr-ID scaffold_5; pos 17 36656 to 1737681 reverse strand)
gcagcccatccacaaggccctcggaggaggcaaacgtaaaggctctgcttcatgctctgaatcacgctgtttttttttatggttttgacttgaaatcggtagatcggatctggttgcgggggatctggacgggcttgaagccttgggttgcaggctagatctgataggtttatgctttctcgaatggaagtagggtttatgcaaaatggaaggggcggtttgtttagatcggtgggcgtagagtatcagattggtggtcttatctatcgttaacaaatggagtcgaccagtatgtgctgatgaggcggctctcgcttcgaatttggtcaatgcagcttgattgcatagtggtacacgatctgatctgaacgatttcacactttacactccctcccattgtgaaagcttgtcactgttgagcttgtttgaaactaggcttccaatattttttggattgtctggtcaggtaacatgaatattcatggcgttagttcttgtaacaatagaattctattgcctattgcatttgcaactgcttacatggtctatgaataatattgttaactgcttgattcatatggtctttagtgtgatgggatgatgaggatcccttgcttatgaatgctttgtcgtttgggccagtgcattttggaggtgttatatgttcttgtatgagggtcaatactgttggggtcttttggttgctttgcattaagatgctgacaaattgaagtttcttatgaaaagaatcggtcaactgctttatttcacattgtgtttgtctaaaacataaggccttgcctagagagcttgcgatactatcttattgcactgtgtctttgcacctgattgcatatttacttaaatgacaaccagagcactctttgcttgcaaacatttttctttgtcaagttaattgtctgttgattgaggtgtaatgggaattgtttgacctgatttcctgattatctactattatacctgccacattcatattcattgctgttctttattttgcagctgctg

SEQ ID NO: 111277 - DNA, 859 bp, Setaria italica
  Intron number 1 from transcript Si036942m (locus Si036942m .g) derived from phytozome v7.0 (chr-ID scaffold_9; pos 56 722909 to 56723767)
cctcctgcaaggacgaccaggacgccgtcgcccaggtccccgagactacttctcctccacccctttattattattccatttgcgtccgccttttgttgtgctcagccgctcagggggaataaggcgattatttattgtgtccttggtacctccgattgaagttgctaatttagtactggaagccgcctggatcaattgggaatgtgtgaagcgatgtggactgttgttatatatcctagcgcgcttctcaaatgaagaagcaaaatttgtttatgaatacaattcttaatacagtggggggaaagggtgatgactttatctggctcattaagttggtgatggactgcctgttcattggttcatgcaatttgattcgcgatgcattatgcgtgatctctaaaaagctatgcagtgggttagtttgagacttaaaagaggtattggtctttgtatatccatggtggagatgatcatatatgtattgccttattttgaggtagtagcctgcttcgtaggaatggaagggttttaaaaatttcagtaacttaattttttgcatgttagagtgctcaatttttgttgcagcttactgttattttatgacatttatagcctttcttgttccaatggactagctttatttccttcttgttttcttctgcaagccgtcctcttgacatgtacagttgtttgtggctgttcctcagatccttgcctaattccttaactgtctatttcaaaacaattttacaagtagttacggctgttcctcaaatgaacacagaaatccaatctcatacacttccctggtgccatatttgactcctattccttgtttcatttcaggtggaagctgcct

SEQ ID NO: 111278 - DNA, 452 bp, Setaria italica
  Intron number 2 from transcript Si000078m (locus Si000078m .g) derived from phytozome v7.0 (chr-ID scaffold_5; pos 35 610405 to 35610856 reverse strand)
ggtaacttcagctcgccccactcattatttgtcaccgtacacatgtttttttaattaatgatgaaattttaatggcaattttgcgtcaagaactagcctcatgtatatctgtgagcacaattctcttttccatgtcttaatctatgttaactactcgatcggacatgtgtgtgagaaccaaaagaagacacctttttgtgctagtgcatatcattacaggaactgcccggagagttccctactggaaagcaggatttctgttccctgaacccctgaaccttactgctagaattgaactgcctcctacgaatcaaacttttttttttggcaaatttctcgcaaaattcttacattccaaatgagcctgtctgctaattcttttttcacgtctgtctggcgaataattcctgggtgcagaaggatactgctggagccggacgagcgagcggcag

SEQ ID NO: 111279 - DNA, 559 bp, Setaria italica
  Intron number 1 from transcript Si004208m (locus Si004208m .g) derived from phytozome v7.0 (chr-ID scaffold_5; pos 16 864396 to 16864954 reverse strand)
acaccatcggcgttgacgtctacaaccctccaccggtgagttggattgcacaacgatttgtacgatacttggatcctttatcgcttgtcctttcattaaacgatttgttgtcttaggtcttgccgttaagtaatctttcattgatcgagacgccaaaattggtgatgaattgatcattggggcaactatcactgcacatgatcagtgacttcgtaatgctcattcatcagtagggtccgtaatttttcttcgttaattcggctatggaatatgtcatggatggaaatacctgagaggttgaagaagaacattaacatgcattaagcgttttgaagtattccctaccattggttcctaacaaacccctcctaaagatagctggcgactgaatcaaaaaaactcaggatcatgtacactgttcactgagttaaactacctattagtttcccgtcgtcaatcttagtactaagttcttgggcggtcatgaatacatgaataatgcacgatgatataaacatatgcagctgcactggacgagcctgctggttctagcgtacca

SEQ ID NO: 111280 - DNA, 691 bp, Setaria italica
  Intron number 1 from transcript Si035029m (locus Si035029m .g) derived from phytozome v7.0 (chr-ID scaffold_9; pos 46 76680 to 4677370)
caccctgtctcccaggggctgcttcttcgaatcgagtacggcttgctctgcactcttgcttgatgttctacggttgagtgattggtgatagaggcgtttatttccggtcaggattggggttcttctccgaggtttggctgcattgcattaatggagagcgcgttatgttgttgatatcgaattgtagatttctcggtcacattgtgttctagattgatttctttagtacggtgagtggagggcgcattctgtttttgagatcagagttgtgaatttcttggattattgtgttcggtttcttttgttatggtgaatggaaggcacattgtgttattgagatcagaatcgtgggggtattgggtcacattgtgttgttgttggtatgatgaatggaagacgcatggtgtggtttagatcagaattgtgggtttcatgggtcacattgtgttctggatgtcgttggaggtcactttgcttttcttgcttctgtgtaggaaacttcctgtgaaatttgtttctggtggggttttgtttcatactgtagtgaccttctggggttttccaccaggttgtggttaagaatccgaagattttgggatagatctcgatcgacttatcttggaccaagcttttactgtgatgatcacctggttcttgcttgatttcagggacaatattagggagtacagag

SEQ ID NO: 111281 - DNA, 629 bp, Setaria italica
  Intron number 2 from transcript Si000620m (locus Si000620m .g) derived from phytozome v7.0 (chr-ID scaffold_5; pos 39 257845 to 39258473)
cgcatctcccgctcctgtgccactatcctgtcaaggtagcttctgcaagcacggctctgtttccattttcttttatttttttgctggtttatcctttgcctacgtactaacggtactcctagttgccatgaattgcgatatgaacttgtttctgtcatgttcaagttttcccttcattaaaaaggttgctgagtttacgaaaaggcactgctcgtttgagtatttgtgacgatgtagtccggtacacaatgcaacatgtctcagtgttggcagtctcgctcaagaatcgctacccatgaatgaagcaatcctgagctagcgtgcaaacatcgaccacccgtatggcctgcgcattgaatttccatcgcatgcatgacgtgcgctgcatggttcaagcgggcaagctgtgtaggacagagcttcgaaagtttggtagcgtgaagacgaatcgcacagcatgatgatgatagctagggctatttgggccaattcacggcccagattgtatggttggcctactaagtaggcggggaccaagtttgggccgagatcagcctgggctatttgacgcgggcctattacgtggttgtgcaggcccagcacctgacgcgcgaccccggctacctggg

SEQ ID NO: 111282 - DNA, 853 bp, Setaria italica
  Intron number 2 from transcript Si001032m (locus Si001032m .g) derived from phytozome v7.0 (chr-ID scaffold_5; pos 44 602425 to 44603277)
gaatcccttgtttgccttctgtggcaggtgagacacctattgatactattcatgatccagcattcaaattatataattcaagatagccatgacctgctagatcctttttgtgtctagttttactgatctatatgttttcccctctgaaaaatggtatataagtagttaagtacaaattcataggcctttctactaatgattcgccctgaatcagggtttgttcaggagttacagatgaaccgttgtttttgtttaacatttggtagtttcagtgcttgcccacagcggtattatttgaaattttgtgttaaaatgaaggaaaaaatgttgtcagttcttattttctcatcgaatatggaataattcgggataaaaatctaagataagtttacacaaaaagcatatcaaagctgaagaactaccactaataagcaaaagaacgtgaagtacttgggatatttcttgcatactcatacggacaggtggctctgtgacttagaattgtttcaaagggtgtacttcatcaacatatgaggcttctcttattttagaagttgctcttgttctgtttgggagactattacaaagattagttacttttcttttctcatcattcatgtttgacctattcatttctctataccgagcacttcttaaggggggtttctttctaggctagtgcaaatgtcatatgaaggctaacttaaaacaagtttgcactcctaagctgaatgtatttgtaccttttgtcatcaagctgtcaagcaacattgagctggtttgttgtcttgaaggatttggttttctccttttcataggtagacgtcccacaaaaccgtggcaacaaaaggat

SEQ ID NO: 111283 - DNA, 783 bp, Setaria italica
  Intron number 2 from transcript Si038056m (locus Si038056m .g) derived from phytozome v7.0 (chr-ID scaffold_9; pos 31 816003 to 31816785)
gagattgttctttacttacaacttcaggcatgtttattcgaagcaaataaaaaatattttcttttgagtttctaaaattttcactttgaatatcatatttctgtctgtattttgtctgttatgtttgtcccagcatgttaggtcaaatgcccttgtttttttggttaatgcccaccattttcctgattctttgtcttgagcattgtatgttgataatgagagttactactacagttaacaaacatacaacctgatcaggtcctggtcctagaaaagcaggtcctgtccacatatgtaaataatacacttggtttatgttgataactgttcacttgtgctcactcgatactaatttaatatcttaattaagcatacaaatcaactatgtaattgaacattatggaagaagttgaaaccagattgaatcttttggcttaataatattccatgtggaaatctaacaccaaaccatccatttcgggacaacttccgaatctcctgatagttaacttgcgtgttcctgagccctaggtgtatatattttgaaatatcatggagctagctcagtacacatattgtacacggcaggcattaaatatatatatttatttgaacttacataggtgtagtaggtctctcactggagagcactttggatttttcaatattcacttttcttttgttatttgtggtttccttctttagtagaaatgaaaatgatgacctgattcgttgctatatttcccagtgcttgattttgccactcaggttcttcggaaagga

SEQ ID NO: 111284 - DNA, 371 bp, Setaria italica
  Intron number 1 from transcript Si005510m (locus Si005510m .g) derived from phytozome v7.0 (chr-ID scaffold_5; pos 40 889959 to 40890329)
ggcattgctggcacggaggtatctttcctagtgccttccccccttccctttagtttaacaaacacttggtggaccaactctgatgaaaggaattaagctgactcttttgatgtagaaagaaatatgcttcaggtcttcagtttattttgcatatattccctatatcttgtgggcatcatccattgtaccagaagaaaacctaagttcagaacctcctcgctagccttgactgactgcagtatgctaccagtatttagcgcttaaataatgtgtctcagctattattgtagcttcatagtgcacttcgttacttcatatcactcaaaaatcaaagaaaaaaatatttccaggttgctaaggaagcttctgat

SEQ ID NO: 111285 - DNA, 929 bp, Setaria italica
  Intron number 3 from transcript Si005012m (locus Si005012m .g) derived from phytozome v7.0 (chr-ID scaffold_5; pos 36 827042 to 36827970)
gatagatattcctggaacaactggagccagctttggtatgatctcttgaaaccacttttcccatctagattcttcatttttcagcaggattttgtagattgcaaaatattctcagaagttttaattgactcactatcaacaaaattgacctaccacttgctagcagttacaacctacaatgaataatgtggccataaaacgaatgctatatgaagctaattttctataggatctagagcatgtacatgcaatttcaaatttcccacactctgatccgttatataatgtcagaaaattaaagaagcacaccttcacattccaaagtaaaaaaaaaatgctctagcaagtctccaactttactgcttatccgtaggtcaacaatcgattttggacaagttaacttatatatgcaaggaaatgtaaacctgaaccacaagtctacaagcaaacatcagagcccaacatggaccaccttaagataggaaatactagtaaacctatcatttcaggccaatgcaatgtttgaatctataaaacaaaacaaaagcacttttgatataattaagtggttactgcgttttttaagtttaactatgtacccaccatatgtggtctataatacgagcaacttttgaaatttggctgttcgagaaaaactattgaaatttggcatagtgtgttatatattatgatggtatataatgctcttctttccaattctatctgtacttatatgttaagtaggctggctgacttaatttgcaaaagctatgaaaccagaccctgtatgggtgacattgatttgtctaggatagaagaggaatcgatacatcgtaccaataaagtgaaaattgttttagcattgtgaacaagcgctggattcataattataaatttaataccagagccgttttgcaggtcaggagctc

SEQ ID NO: 111286 - DNA, 946 bp, Setaria italica
  Intron number 1 from transcript Si002065m (locus Si002065m .g) derived from phytozome v7.0 (chr-ID scaffold_5; pos 39 293465 to 39294410 reverse strand)
cgcctgcagcttgctgctcctgtcgtcgtcctcaggtgagctaatctctttaccggtcgatcgcttgattgctgctagattacggtggttttcttacatgggcgtgtgaggttggcttttatttggtccctgattactggtctgtttacgagtttatctttgtttacttgttatacgatgttgattggtatgtatagctgttttcaatttttcattgcatgccgccttcgagatcgttagtccgttaataacccttcacagaaacctaagaacagggcgatggttgttacattacataggctaaatcttttcatagatgatagacctagggtatgtcaggtgttcttatagtttgctttatgtttccctttgaacgggaggaacaggggttctgccgatgcattgaagattactgttttgctttatctaagcctttttgtttcacgggagctgtggcaaagctcctatcctttttgccttccggtttctctggctctgccgttatattttcctccctactatttctgttctgcgtatctgtcagaaaccaaagttataggcatgttcacttcagcttattcagccggcttatcagccaccgaacagtattttcctctcacaacaaatcagccattggaattggaatcggaggtggggttgctatctctctgtttcgtcttcacgttaatgcatacaagttaggcgggattggtttctgtacatggtttcttgatgcagagattttccctgtcagtctgcagagattttctgtcctgtttcatctgtgatgatagtgaagcatcatcgaagtatagaccctcttgaagaggcgacctaatgttaggtcgtaatgtcgtatacgacagtacacgcattaaagtggtgatagttactttagcatcggcgtggtctctacttgcaggagttgaaggcatcggcgtgaact

SEQ ID NO: 111287 - DNA, 748 bp, Setaria italica
  Intron number 1 from transcript Si000541m (locus Si000541m .g) derived from phytozome v7.0 (chr-ID scaffold_5; pos 37 839064 to 37839811 reverse strand)
tgcaacgagaaggaggtgagctggaagagcaaacagaaatttcgattctctgcctgattccgttgttgggatgtgttcaaggtcgcatttgggattgggcgttgagtgccctagccgcattagtggttgcagagatcgaaagattcggttctgaagctgaacttgtgtggactcaacgggtggtggataggttaatttagattggggaatcttggctttagtgccactaacgcaaaatattgtgtctaggtatcatttggggattggagtgatgcttagaaatggaatggaatggtttcgatttctggcaacaactttgaaagcactagacatggttgctaccgacattttggtgaggatcttactgttaagtgtttggtgggttaaacgtcccgtaaaaaaaatgcacttgtgtctttcttgttttgcatcttggcctcccaattcccgaacacatttaggaagttggaaacataaataaatgtcaggacttccagacattgtgctgatcttacgcttggaggaggaagctgttagaattaatggttaatagcattagcatcttttcatgttttaatatacttcagattcagaagaggacaagactagatacattttggacaatcttgaagcagggaattatcggctaatgtgtgcagttatttttggagctctaacaaaatttaccattcctttgatttatatgtttgcaggtgtaccagcaatctattggtgctgtttgcagtct

SEQ ID NO: 111288 - DNA, 568 bp, Setaria italica
  Intron number 1 from transcript Si000744m (locus Si000744m .g) derived from phytozome v7.0 (chr-ID scaffold_5; pos 34 484022 to 34484589 reverse strand)
tcggcgcccatcgatcggttcgcgacgacaagtgagtgccaaatgtttcttgcttctactacatgttcttggtgatccctttatgccgctgtgctttcttgtttcttcggtgtcgcggggggttggcaaagtgcgggcctggctactttggttcatcggttcagttgtaagttgtaactgcgtttattgtattctgagattgctttcttttgccttaaaaagactgtttatttgggttcaatattgaattattgacagtcaagaactcaataaagaactcaaaacaacatacgcgttctcagaattgtatgcttcgattaaagaaactgcgattatgtcttctaaattgatgcccagggtgtgagagttgtgattttaactctggtagtctagtgggtataagttatgaccgcaccttttagttttcttcgacatgccagtgactgcgcaggtttttgttcgttgtgtagcacggtaattttctaattttccaactgattagtatgattgttgtactgatttctatttggtttagagagggaacattgacaatacttgggtgcaggag

SEQ ID NO: 111289 - DNA, 686 bp, Setaria italica
  Intron number 1 from transcript Si000214m (locus Si000214m .g) derived from phytozome v7.0 (chr-ID scaffold_5; pos 38 60622 to 3861307)
ttcttgctctgtcagaggcaggaatcctttaccaggtaagttgatccccatgatctaagaaagaaacagttccagcttattcaaactcaggattctagtcagcttaccactgctattactatgtcatacgggtcatccttgaaactttctcttgaagtgttctagttattatagaacagtggttcattaccttttatttttttaaaaaatcatcccagtccactttgattatctttctggagtgtccttagtgcatacatgtactcaaaacttgagatactgacaaaagaggagcagctgtagtcatcaatagcagataaaatattacaggagttgtacatgagcaaaagtatcggagagttaagagcacaataaaaaataatgaaagtagaagaggagcagaaaatgtccagattagggtcgtacaaccctcgtaatgtcacaaaaaaaacatgattgaccaccaagtaaactgaaaagatgttcggagtattcttttttttcttttaaatttgaagtcatgctatttgcatttctgaaatatcaaatcatgagatggagatgtgatataaatttagaaatattagtcactaaaatgaacacatccaagagaaattgattgccaagatcaattcatttaattgcaatttaactctagtatttctacatttttcagctacagctaa

SEQ ID NO: 111290 - DNA, 733 bp, Setaria italica
  Intron number 1 from transcript Si037920m (locus Si037920m .g) derived from phytozome v7.0 (chr-ID scaffold_9; pos 66 85620 to 6686352)
gccttacccctcagtatgtcttctttttatgcttccattttaagtctcaggacaatgcatgagcatgactcagaagctacagtacgcatgcagtttttatggccaatgaaatccaatgtgagcactagactggttgccatgtcacaggatagttaatagggaatcatacacaaacacatttagcaaatccaatctattcgctaatttgcatattagcatttatatgtgaatcaaaatatgctgaagtctgattgactgttgattaaaggtattattcacctgatttaagttattctgatactttcacgacattatttaatggcattaatgctaagcaacgaaattgaagaaatatgaaatcttcacgcggatataaacataaaaagagttgccatcaatttcacatgggaacttcctatctttacagcaaattggagtgccctgaggtatgcatatattcactacttgtacaaatgagaggatccaaatgttattcttttttcaagttcatggttctaggtgaaacaaacattaattctagggacttacactctactttttttatacatcttcattttatcagatgttttatgcatgacatggcctttatgttctcctgtcacatttacaacagatgtattgaactatccggtccatattttttgaggatgcgaattaactcctcacgtgctcaacaggagactcagaaggtggcactggcggagtcgactgg

SEQ ID NO: 111291 - DNA, 736 bp, Setaria italica
  Intron number 1 from transcript Si037922m (locus Si037920m .g) derived from phytozome v7.0 (chr-ID scaffold_9; pos 66 85620 to 6686355)
gccttacccctcagtatgtcttctttttatgcttccattttaagtctcaggacaatgcatgagcatgactcagaagctacagtacgcatgcagtttttatggccaatgaaatccaatgtgagcactagactggttgccatgtcacaggatagttaatagggaatcatacacaaacacatttagcaaatccaatctattcgctaatttgcatattagcatttatatgtgaatcaaaatatgctgaagtctgattgactgttgattaaaggtattattcacctgatttaagttattctgatactttcacgacattatttaatggcattaatgctaagcaacgaaattgaagaaatatgaaatcttcacgcggatataaacataaaaagagttgccatcaatttcacatgggaacttcctatctttacagcaaattggagtgccctgaggtatgcatatattcactacttgtacaaatgagaggatccaaatgttattcttttttcaagttcatggttctaggtgaaacaaacattaattctagggacttacactctactttttttatacatcttcattttatcagatgttttatgcatgacatggcctttatgttctcctgtcacatttacaacagatgtattgaactatccggtccatattttttgaggatgcgaattaactcctcacgtgctcaacaggagactcagaaggtggcactggcggagtcgactgggct

SEQ ID NO: 111292 - DNA, 559 bp, Setaria italica
  Intron number 2 from transcript Si040035m (locus Si040035m .g) derived from phytozome v7.0 (chr-ID scaffold_9; pos 13 224638 to 13225196 reverse strand)
ctacatttgggttagtactttctcaccatcatgtgctcaattgcagtatatactttagtctccttggaaggtagaaatcgattgttttcatggaatgtttgtaaaaaagggaaaggtaaaattaaacttagatccctcagattgttgagttctcacttgttgagttcaaacactataaaaaaaatatcagttttatgcaaccagtcccttcaaaatatgatcatattgatcttacagaaacaagacctgatcgaagatatcttgtagtgaaacttgtatgaaaataaatatcttgtagagaaacttaagcaatcttctgtacttaataactactcataagtcataacacaagaactcgatgtgaccatttgaaagagtgcatgaatttgctactggaagatcttattagtaaattgtctagatagaatttcttaagaagtataaagtgcaaaaataatgatgcagtgcacattctttgccacatctcttttgagggaaaattattgtcagaattttgagttagcccttcacttctgtctgatgtaggattatccttgca

SEQ ID NO: 111293 - DNA, 913 bp, Setaria italica
  Intron number 1 from transcript Si000629m (locus Si000629m .g) derived from phytozome v7.0 (chr-ID scaffold_5; pos 22 800808 to 22801720 reverse strand)
tgctccgagttcctcgtcctcttcctccttctgttagaacgcaaactattaaaaccatttctagtagtttaactttatatacatgttggatgtgtgtttcctgtttggtttttcggcgattctctggttaaatcccggatgcggtgccattgtctggtgctcaggagctcactacttttccttcagcaattcagtagttcactgatttgttagagttgtcctattttgcatctgattactagcaagattatcaggctgatttacttttgcactaaatgcttgaaatctctagagcactcaattgtttcataaaactttgggaggacattcccaatcaccgagcatcctgatttaatttcacactcaactaatgggacatagccacataggttatgcttgtagccctgtactttcccaatcataaaaaggaataactgaaccaacccttatggtctaaatatccagaaaattctagcgtgcactacttcaaataaatgagaatactgatggtttgtgcatattgatcaaaattatctctatttggtcgaaagtccattacttcacatttatcctagaataaggttttaatttcgtggcataatttctgcacccatactgtttcaagtgactttctaaaagatgttattcaaatgaaattcatcaagtgcataagctatgtatctttatatctttatatctctttaatctatgtccaacactctgttttgttataacgtaacctcaatgcagcactgtggaatatgatgcaatgctattgtgaaagtatgaaaaactacaagttagaaagcttcaggatttgatccattgtaaccaaggatacacataagtgaagaaaatgactactacttctgttttttcatgcatgtaaatttcaggggtacttctgaggcaa

SEQ ID NO: 111294 - DNA, 599 bp, Setaria italica
  Intron number 3 from transcript Si000309m (locus Si000309m .g) derived from phytozome v7.0 (chr-ID scaffold_5; pos 38 622657 to 38623255)
ttccatcaagctctgggacttagaggaagctaaaggtgtggttcatgcttatataaggctcccacaatttggttttactctaaaagcgtgcatatttctctcatttcttgctatgcttgtttaaaacatggctgttttatgttgtgttcttcacaaattccttttagattttgatacagtcatacagatgaaaacactttgtgaggataatcttctattgcattatggacttctttttgttttttagtggctgttttggaaccatgattatagattttcaagccccccagtcttttccaaatgtcttggatggccacattcaaatccgcgtgctttggtggttccatgctaaaggattctgctgaactaattagaaagcagtgcctgaactgtcatcttagcaatctgctgagtgtgctccaatttgtctcagtttgcccagcatcatagtttaagcttgcaaatcaactacatcaagtttgaccatgtgtggtaactttaagcttcttgtggatggataggggaaaagaaatatctgattaatgtttttcaattgacatgtagttgtgcggtctcttactgggcatagattgagttgc

SEQ ID NO: 111295 - DNA, 683 bp, Setaria italica
  Intron number 1 from transcript Si035123m (locus Si035123m .g) derived from phytozome v7.0 (chr-ID scaffold_9; pos 53 100474 to 53101156 reverse strand)
gaggaggtatgacccctgatgccccataatgtgtaggtatttgtttccatcaacatttctcgtttttatgctgtatagaccagcttaggtagtatggtattggttttatttgactcagattagatgcattacattacgggttccatagtgtttgatgaataggcctttcttctggtttgttgttagcattttctactatccttaagctatatcagagagagaaaactagtattcataatcaatttatttcttaatgcaagggtttggaaattttagagtgagggaagtgaacattatgtgaggcatctgttcctctgatcatttcttaaacttgccgagaggctatgaaaaaagagtacggtgaaaaatattttttgatgcatacgtggtcacttcaacacatggtgttatttgttaactttattttgtcccgagccttttagcaacttgtttttgatcctttgcacactttatcgatgatacctcagtgatggactgatggttttactcgattgtgctttgcaaatcctcatattgattgattagtcaaggggttcaatgtagcacaattgatgggtgcaggctttatctaaagtggctggcagtattatgaaatatgattcttctgtctgcttctatcttgtataggtcgagggacaatccgaggaagttatatttgatca

SEQ ID NO: 111296 - DNA, 614 bp, Setaria italica
  Intron number 1 from transcript Si034856m (locus Si034856m .g) derived from phytozome v7.0 (chr-ID scaffold_9; pos 11 848451 to 11849064 reverse strand)
ttcacttgttccctgcccccttatcatcgtatcaggtaatctctcgacatagtgaatttacttctttgtattccaattatcagcgtgaatgcttatgaaagatgccgtttcccccgtacggtcgctgcaacctgcggtgtggtaggtgatattaggaatttaggatccagaattgtccttttgtttattctgggacttgcagtgtggctctgtcctctgattcacggacctgaatgtttggtcaattcatttgggttgtgttcgcatggaaatctcagattggtgtacagattagtggacaggcaagaaaaatgacggagattacagatctcattgttcatatcctgctttatttctgatgcattgcctcaatagcatttgctataataccaaaaaaaaagcatttgctatacatgtagtgttcatactgaaatgtctgtctcagaacagccggtttatattattaaaatattctttcttcgtttttaaacaaaacatgagctaatccctttgaatttgtaaagttataaatggcgtacttgtagggtgcactcctataatctggtgacttgtttgcaggggtcaaatacattacaagacagatattttgggga

SEQ ID NO: 111297 - DNA, 1010 bp, Setaria italica
  Intron number 1 from transcript Si000367m (locus Si000367m .g) derived from phytozome v7.0 (chr-ID scaffold_5; pos 31 847535 to 31848544 reverse strand)
accggcctctccgcggcctcgcccgtgagtaccctccctcctcatccaatcatcactcgctgctgcttctctcaggttgggtgcgtgggtgtgcggctctgtgcctgagagctgcgggtgtggtcgttttgtttgtgtcggattgggtcggtggattggatttggattcggctgttgggttgtagtgctcgctcgctttgaataattttcctggtaagttcgtggtggagttattagtgtatgtgtgcgctgtggttgcaaggtgcgtgatttgctttggcgagtgcattattgtgctgttcccgtggatttgatggtgcttgtggagctgagcgtgttgcagaaaggagcgatatgccttggttccggtttggttaggtttcgtcacagcttcgggatgactggatcatttgtgtgtgatagttaatggcagttgcgatgtttacactcagcgtcgtgtcttgtttgtgactctgttttatgggcatttgctttagacaaatgtttgttagcatcttcattgacatgaagcgcccggtactccggtgcacaggtagcttctgtagtcgcaggaaggatttttatggtgtgtttgaatattgtattaattgctatgctcttccctacattttttcttattaattctgttgattggaattctccggttggagtcactgatcttgtattcgttttaagatatatgggggaactgctgcatggtctcgtaatatatgttgaagaaaaaaaggttctgacacttgtaattttgtttcagtgctcattttatgtacaagcctgcaactttgtatattgtcaaattccttttgtgaagtgatcaggaaatttgatcttgcggtcaacacaaaatatgtttattctagatagtcattgcaaagagctcataccacagagatcctgcgtctttttttctcatttgttaccaactttgctaacatcatgttttatttttttcaggtggatacaattctggacaaagaaaattttacgtt

SEQ ID NO: 111298 - DNA, 588 bp, Setaria italica
  Intron number 2 from transcript Si034664m (locus Si034664m .g) derived from phytozome v7.0 (chr-ID scaffold_9; pos 45 609989 to 45610576 reverse strand)
ctacccctgcggacggcgatcaggttacagtgtccacctgcaatcttcccttcctatgtcgcccgataccattgcgaaaatacaatacatgaatgtgtgtttgtatctgcagccgagcaccgttttgattatccctatgctcttctgtttttgtaatttaagtttcccttgtaatgttgatgatcaaagacgttttgagctttagctatacttgattgattaaatcatccaacaatttgtgcaattggctgttgattcttaaataggaatgacccttctgttgtaattattttgggtaatgccgagagcatccataaactatcatttcctactgtgtcctgtaaatgctataacgaaacttagcctgatggttaaatgaaattcttcttgtacagcttatatataatctttttttcttcattcaagactagtgagtttacattgttcatgactgcacttttttctggccctcgtaatggttttaagacagtcctgtttttgcattgtaggcatatggaattttaggctgtcaaatattgctcatctgtaataattgtgcaggttataattcattgcactactcggaca

SEQ ID NO: 111299 - DNA, 993 bp, Setaria italica
  Intron number 1 from transcript Si003403m (locus Si003403m .g) derived from phytozome v7.0 (chr-ID scaffold_5; pos 33 491285 to 33492277)
aacctcgtcagcaacgtcaaatccataaactacaggttcctttcgtcctctctccctgataaatttgggttacctaatctgatccggtcagaagccatgtctaggtttcctttgacctcgattccgatttgggcgacctaatgatctcttcataaaaccaagtactttcttcttcgcgttgcaagttcgtagcttagattcgcagcgtaggatcaaaatatgttgctaattgacagtgcaagggatgaaattttgtcagtagaggtagagttatgcttaaagctgcgtgagtcactagatttggtagcgtaagtggaggaagagtcaatgagatagtgcgagtaggatttctcaaccaactattaaaatggagcaacttggaatgttaagctggcaaaattttgagcacttttctctgtcaccatttcagcaattcttccgagtcaaatcactttacgggcatcagaacaaactcacagctctctgttggtaaatagctgtagttcattgttttgtgactgagtctctgaccatcgcttcacccaaaatattaagcaaagaagggcagtttgagtgttgccacttatttaggttgaattgagaaatagataaaagaaatgagcaagaaggaggagttaagtggtaccatgtgtccaagtgtgtttcaatgtgaccgctaagacattttgctttggcaccctgcctaagcatagggtcaaatgcatagttgttcaattaatgttgaattttcttatgcttatgatctactggacatgctggaacacccttaactggacatgcttttcttattcctgctcaactagacattgagttaataaatatccatgatcacccatattctcataggctcgtctgccgtttgatagttcctttaaatttttcacccatctacaccagtgtaccaagctgacttctggaacctttctgtatctttcagccggacattcttgtcaatcattagtggagttgttg

SEQ ID NO: 111300 - DNA, 717 bp, Setaria italica
  Intron number 2 from transcript Si005032m (locus Si005032m .g) derived from phytozome v7.0 (chr-ID scaffold_5; pos 35 602317 to 35603033)
cgtaggcacgcacaggttgatatactggatcagtctgatgtaggaatgaaaatagtctagtcttaaggaaataattagatcaattcatactggtcatttaggtgtgtgcattttgcctactctctagtgcacatggagtcagcttgatattgtaatggtcttagataactttgttttgcaagtttacaagtctaactttaagtttagaatcatattacgtatgatctacaggaaattgttgttgctagagaatattattgcccaaaagaattatttcttcacatcacttcaaaatcccctagcttcaatttttcatcatactccatatttgtttttcgtaaggcataattcgaccattgacaagtatcgagaaaagattgagaaagttaacaaaaaggatgactaatacctttcattaagtgatttggaaagagagatatgacaggttttgtatgtgggcatgcataactttttaggcaagagaaatgaataaattatgaaaaacatagaaacaagtatggtatctacctgcatgttttatgatctcatcaaatagccaattatgccttatagaatgaaacaaaatgagtacctttttcgttcactaaggagcatgcattttaaaattttgattagtaccttgtaatgttgtctccttaactgatagttttgtatataactcctagacagttaccacacaaagaagcactcaagggg

SEQ ID NO: 111301 - DNA, 817 bp, Setaria italica
  Intron number 1 from transcript Si004181m (locus Si004181m .g) derived from phytozome v7.0 (chr-ID scaffold_5; pos 24 364010 to 24364826 reverse strand)
aactggccattcacagagaaggatttgaaaaacatgtaggtccctctgtgctcaatccaaaaaaaatcccaaaaaaaaggaaacaaaacctcatgtagcataactaaaaatatcctaataactgcaaaaaataatgtatttatttctttttatgttccaagaatgctgagcaagcaagggagggtagggatggtaatctggacaacctttttcattgtttagagagtgcaaggcgagcaacaagtacttttattttattgggatgtggattttgatatctggagccacgggagccaaagagctgagtgcaagggtttcggtgatgtgatcacgtttgacacgactcacaaaataaatagaaaaaacatgccgctaggcatgtttgtgggggccaataacaacccgaagaatgtcagttttggacaagctgcctcgggacgaaacaattaaatcattcaaatggctgtttgaaactttcaagaactgcatggggggcactagccctatgtgatcctaacaggtatgacttttacttcaattgcgcatataatgtattcctggttacaaacttgataattgaacaaatataataaaatagagtctgcctgttgcaaactaggtgttgtatggggttgcaactctattgtattgttggttcttttggaaactgttgtttgatatttctttatggctaccacagatgaggatgcagcaatgagaaaagagataaagatagtgttcgacaaatcacaacataggagctgcagatggcatataacaagggtctgggagtacgagctcaaccaactgtacacac

SEQ ID NO: 111302 - DNA, 689 bp, Setaria italica
  Intron number 3 from transcript Si034216m (locus Si034216m .g) derived from phytozome v7.0 (chr-ID scaffold_9; pos 58 119051 to 58119739)
actagtaacaaagaggcaggctaccatttctagcattgtgaactataacatttatcaagcatgactttcctttcttatgttttcctaagacacttttggatgttgcacaactcattcatttctattgaaattatgctcgttgaattaaaaaaatgcgattattctgtaaaaatattttctgtatgtttagcagttagaaatgctggttctgtgatcttcaacatcttttgaaagtcatagttactgtgaatactgaatactcaaatgcagtgcaggatgttccttattgtacattctgaatagccttctagcccttaagatatttaaggcaacggcaatctgtttccttcattttgtactttgatatgctagcaccaacatgtactgtggtagaaactgaatatgtattcttgaccagaagcaatggcttttctctccttaagaacactaatatacttatatgttagttcactctttgttccatgcagaaagtggattttcagaactcagttaatcttatcttctagtagtatatttatttaacttagagctgaaatatcaaaagtatgttctaaattttactactgacgctttgttacttcttattaggcacatttctctaattgcatatgaaccttgagcttttgatttgtgtgatcatgcttgccaatttctgcagttgagcttat

SEQ ID NO: 111303 - DNA, 643 bp, Setaria italica
  Intron number 4 from transcript Si002469m (locus Si002469m .g) derived from phytozome v7.0 (chr-ID scaffold_5; pos 12 893027 to 12893669)
ttaaggtattgagtatgttgcaagtgtatgcacataaatgtagaagagtactgcagatgtttctatcactttttaataaatactatgaaataccatgtgcaccacattttggtgttggctattttgacattgtcacgtgaaattggtgaaagaatttcttttacaggatcagtaaaacaaattctatggtgcactgtttttccagttaagtgataaaaaatattatatggcagttcttttggaatgttctacttcggaaatgacacaaacaattgacccatagttaggcacaagctatccaagttagaatatcaaataagatttatgtaagaccctttgtcattatgggcaactttgctggcttatctatttgatttaagaacttttgtcattatggacaaatttcctggcttatctttttgagcttttgttttgaaaacaaggaggatcattatatttcattttttaaatcagaagtgaattgatagtttgagaacttaagtacagtagaacgaatggacctcaagttagaagaaagatatgcgcagcgcattgatcagcaggattagtcctgtactcctgtttaatgatgttattcttgatattctggtttcattttgcagattgtcaataccattcagaa

SEQ ID NO: 111304 - DNA, 953 bp, Setaria italica
  Intron number 4 from transcript Si003072m (locus Si003072m .g) derived from phytozome v7.0 (chr-ID scaffold_5; pos 12 899097 to 12900049)
tttggtatccaggagcacattgatcttggcatcaagtaagattatataatatttctgctctctagtaattttaatgtggtgtgctgtgtcagtgaatggatgctttttcatggttttgttgcttgtagtaagtagaggaatgaaatgtaattttagattcatgtgtgcagcatgtgggtcgctactcactatgacaacttaacacagtttgagaatccgctgtagcctgatctatttgctgatgtactaatgtgactggatcgcacaccatggaatttccttttatgctaagaacatgatgttttgttatctaatacagtatccaagatatttttgcaagtcatgttgaattgatgacatccaaattttttctatgtaggagtagccattaatgcaaaacactatttcctatattctgttcacttgagttcaattgtatgctttttcagaaactgccacacccgtgtataatattgcattaagttttagtctattgtgatcttgtaccaggattgtcctgagcaagtcaaaatgccattctttgggtgcatctgtgatttttatctctgatttattgcatggttagcatgcttgtccaggcctatggtcaaatttgtagtactgtggtgcaacagacatatttgctgtgttgttattattgacaagttatttgtatcctggacctggagtaccaccttgatttaaactgtgcatataattccatccccacttgatttcagtttgcataacgctatactgttgttgcctttactgtctgcatatgtgggcattgtgtgtttgtggctagtttctcctcccttagagatttggaatttcagagtacttattgtgcatttgctggggatagttcctgcctgcctagttcctgcttagtgaagtgctgcattttgttgatgattaatagccgttctctttattgcattatctcaggt

SEQ ID NO: 111305 - DNA, 930 bp, Setaria italica
  Intron number 1 from transcript Si000093m (locus Si000093m .g) derived from phytozome v7.0 (chr-ID scaffold_5; pos 47 165220 to 47166149 reverse strand)
cttctgccgccgccgaggcctcgcgaacgctccgggtacgtggatcggctctcaaccattatattatattacatcatagtgccaaaccatcccatcccatcccatgctgtatctggggagttatttaccagcgttattatgtgtatgcacgagctacatttccatactctactacgcgcatgtacaaaagagaaatcgtacgcataggttccgctccacttgggtgcgcaaactccgcatgctttcatttatctccaaacgtctaggaccagaattaggtgtttattgatatttaacacccttgctttgtcgacacgccatttgcttttgtgaaccccactatcgcgtgccagctgttcttcatctcttcgctcctcgtgtaatgcttgcgtgtattgaatcacacaagtttgtacatatgctcagtagttaaaaaggagagcaaacttacttcaaaattgtgagtatggatggcctcacagcacaacttatcacaagaattctgagactctttgttatatcctggcagtcatggtctcaggattaacaaaggatcactgacgtgtaggacaacataatgtagagacaacattgcatggcctgcaccatttgtcctgttgaatcttttgaaacggcaacatatgcttttgtcctggtgtgggtattttgttttcttgatttcctggtatatctgccatcattgataactgatagtgatgactgtacagcacacctagcttctctgctttgcgtgttactgctcttgatgatattgatgccagagttggttgcaaaggaagttatctaatgcagcaggattctcttattttttttttatcacctcaagcacttccttcgtatttatgccatttctcaatggatgtgattatatgctggcaggattatatagccaacccttcaaccatcgat

SEQ ID NO: 111306 - DNA, 1037 bp, Setaria italica
  Intron number 1 from transcript Si037761m (locus Si037761m .g) derived from phytozome v7.0 (chr-ID scaffold_9; pos 55 290278 to 55291314)
catccgcgctcgccagctctgacaaccgcgcccaggtatttctagaggagttggattctccattacgtcgatcgctccacctgatctatatatcataggggtagacggaccattcctgcaggctgcagcttcccccttcgattccaagctatttccctcccgttcatgaatggcacctccctttcctctcgtagtattctttgttttacagttagaactgcaaagttggcctaacctagtaaccttctcgacatggatgcatgaatgcatcttctgtctgctcatgtgctaatgttgaaatgctccaatttttatttaggggatatacagaaccatttgaagggattggcctcattatagtttccatctttgagaggaaggagttggccttgttggcaagtagttttggtaatatatgctctagaagactctttaggcaaagtgttctattctgaatttacactgcttattttgtgtcatatgtgttgtggtgcttttgcttttctcatggtcccttgccaatgaacaaagaaacaactattaagagggaattttagagccttattcacttttcatatctcttaacatgtgcatcatttatctttctcctttttctttcagaaagtcaacattcagaaagagctttccccttccaatttgttacattttgtgaagtctaaacaaacactttgatttgtcattaaaataggtgccaatatcttagtaaacgcaagctccactatactgcgtaaaacactatgctcttcgctgccatgatgtatggtttttggtttgtacgtttgctttcatatcctctttccttctgtcagactgtaactctatagttcatccctgagtgataaattatgaagaatttaggtgttgactcagcttcaactcatgttaagatcatttttgtgcttataatttctgatctatagttgtgcctgaaataatcttcttgatgttttgctaccctgttgtgaaacatatccatttcaggctgcattagctcgtcttgaagctcttgagagtga

SEQ ID NO: 111307 - DNA, 959 bp, Setaria italica
  Intron number 1 from transcript Si000755m (locus Si000755m .g) derived from phytozome v7.0 (chr-ID scaffold_5; pos 36 309140 to 36310098)
cctgacgacgcagaagtgctggtacgcatcgcgctttatgacccttctctgtattctatataatactgctcgtttggaggtgtcattgtaaacacagataaaattattgcgatcgttatatttggcgtactgtgagatgcaccatgtttacactgacattgcagaaaacttaactgcaagattgctgccttgttgttttgattaatgcagctgttcgtttaaggtaattgactgattataaatcatgttttgccattttgaatgggttgtgtttccatattctgaataaaaataattggagtggcagatcctgaaaaacacgtctgcatgaagggagtacgtatttcaggtagatcaacaccagtcttactagagatctctttcacaaagatgcaagtagttctaggaaaatccaggttacaactatgtacatcctctagttggcttgtagttatggctttgatttttgtaattgatgtgtattggttacctgagttaattcatctgcttgtgctatatactgttgagttctggtgttatttggctttgagttgttcaattcttcatggcgacgtaagttcaggtatgtttgtaatgttgtccattgtttgttaacatgcccttggtaatgcacatccttacaaatatctttacgctaaaagaaggtttgtgtttctgattgtgggtcctagtaatatctccttggcccttaatcaatagcctggcaaaatgtaggtaatagctgggtgtagctgtagttgatttgtcgttctggttttggtttcagtaatgggcagttgggcacctgttacttaacttcggctgtcaatgttgtgttctagtgtgatattgctttttcagtggtctatttcccttatggtgatgaattgttcagatatgttagtgaaaaatctgtcaacatgtgtttgtgcagaacattgtagaacttctaaagctaa

SEQ ID NO: 111308 - DNA, 681 bp, Setaria italica
  Intron number 1 from transcript Si002592m (locus Si002592m .g) derived from phytozome v7.0 (chr-ID scaffold_5; pos 26 582906 to 26583586 reverse strand)
aactctccatttcctgatcagttcaaggaagatcggtaagacgcgtgcatatccgatgctttacacgcttatgcttttcttttactcgaatggtgatgttgggtgctgtcaatagtttcttaaaggaggctgttcttgttaatcagaagttagttggcataggttgttcttgttcactgcgttagatctcctcacctactgctattttgcctaagtatggtcttttctcttcactgccaacaagcttcgtcacattttgtttggattttttctcttggatttctgtagcaatgagctggttgatatcccgagggttggacaatcagtatcatgctctagaaagccatgcatgattcaccatgtccctttgtgccaaacaccatgaattacaagttcagaactccgaagttattacatagaaacagccgtgtttgattgccgtcccagaataacttctgtgttattctgtgctgattgctgaagcaaacaattactggatgtctggatcatgcgtgcttttcagaataacttctgaggcagaagatgctgacatcgcagattgcttcctcaaaattagctgaagtttgcatttaggttccttgaatcttctatggtagattgcttaagcttcttccttgcatgtatatgattatcgcagtgtaagaggaggaacagaacaag

SEQ ID NO: 111309 - DNA, 958 bp, Setaria italica
  Intron number 1 from transcript Si034238m (locus Si034238m .g) derived from phytozome v7.0 (chr-ID scaffold_9; pos 14 877029 to 14877986)
gccaccaagcgagcctataagctacgtatcctgtaaattgccggtttaggaattctggatcggaattttccaaatcggatagctcttgcctgcttgtttcaatcggtgtagcgctaggtttcggttgggttgtgtacttgggttcgctcgcagtgatcgaattcgtgcctgcttctgggtgactgggtctcgggttgttctggtgttcactgttcatgttggttttgtacttttgttcttgcaacttgcgagcctgtgatttgaggagttgcgatggcagctaggaacctattcaagaccatccgagctgccttgctattgctacttgtgaagttggggatagaatgaaatttcaaaacagtatcgtgaagtttcagacctagaataatacagttttctgcataagatcaaagctaaactaatttcggtggtctgggttagccagagacaggagccttgttctattgtctgccaggaaaatgtgacttccgtgctctgtaatttggcatttgtctgatgggttgtaccagttgctgtaaacggtatcatgctgtatgttctgattcctcacacctatcaaatgaaagttgggtagatcgattcagaatgtcatacttgttatcctatccatcgagaacttaggtcctaggtgctagcacggaatgaatggttcaggcgttcagctattgacttaagattatgacacttatgtgttgtactgttggaagaagtaggtggtagcatagcatggacagtgagttgggaagatcagttcaggatgtccagatgtcatacttgttatttgtttccattgagaacttaggtcttatgtgcttgcatggaatgaatggttcagctacagaaataaaatcatgacaccactaaaataattttgtggtaggatgtaatcgtctatatatcttgtttctttgataatgatcagaggagtttgttgcgc

SEQ ID NO: 111310 - DNA, 1021 bp, Setaria italica
  Intron number 1 from transcript Si003284m (locus Si003284m .g) derived from phytozome v7.0 (chr-ID scaffold_5; pos 44 157220 to 44158240)
gcctgacgaagctcgcgctgcacccgcccaaatccgtgagtctcctccaccttagatcctatctaccttagccgattcctgcgagtttgaactgctcgcgtggtgattgctggttagtgttctgtttggttttggtgtgatctagagtagtactgtctactgtcccctcggctgaaaggaggccaaattcacgacagcgctcggcggctcggggccgccgtgttgtgctgtccgacttcacctgattgtttgtcacagctgctcaaatgttatgtgcagatttgttcttcggttgccatgcgtacaagcaaaaggaaatgttccttattgtccgcccgtgagtgctagatagcgaaatattagtaaggactaaggtgctattctggacatgtgaccaagctgtgccgtgtgataagatagcgaaaataaacccccatttgtgctgaaattttgtgctaagctatgccgtgtggtcaaggcagagcccccaatcaatgtcagggaaacagatccctagtgtcgttgttgaggttctggtcttaattccttgtcttaggatgtttccaaatttgaccttatcacatccttgttttaggaccacatgcatcttatctcgaagaaatgggcatgtacgccttcttagttgacacttactctagctagcaactgctgcccaattgatggattgatcatcagtatcgtagcattacatgagattatttgctgatgaatgtatatatatcttgactgtctacacttaaccatctccgccacaaatttcatgggtatgtgtcattttctgaacatgataaccatcccatgaacagtactcttgttgataagtttgcatatttgtcttaaaatcaaaagggtccttttttatgaatgactactcttgcgagcttgctgtgaattttactctgccattggtggaatggtgcatactttggggtatggtttgtgcatatattcgggattgaactaatttctgcttcattccaggtggaggttgaatttgcag

SEQ ID NO: 111311 - DNA, 542 bp, Setaria italica
  Intron number 2 from transcript Si034488m (locus Si034488m .g) derived from phytozome v7.0 (chr-ID scaffold_9; pos 39 262064 to 39262605)
tggacagctacctgaatcagtgctcaaggaaaaaggtgcaagatattacttttgtatttgtttaattgtactgtaaaagcttatgtggaaaggtgcattacacagtccaatctcatggacagtactcatgatatatattatgtgaaaaaaaatgaaggaaaaaaagaatgaagtacctagtaactctaggctttgatttaattgtcatatactgatcgaatgtaaatacacagctttacattgactaaatagctaaacatacaaattagaaataataggcagtagctaccaaatcaagtatgaacttgggtgtgattgaatcccgcattttgatatgttgaaatttattcttatctgagctcatccagaaaacacatgcatcttgatgactaaaagtaagtaccaatgtacaatttaagtactaatctgtgtaaagagcacacacatagagcaataaccacagtttctgtttaacagcaagtaaattctcttttctgccctggtcaggttagagctgagaaacgggtgtttctattcaacaa

SEQ ID NO: 111312 - DNA, 659 bp, Setaria italica
  Intron number 1 from transcript Si001058m (locus Si001058m .g) derived from phytozome v7.0 (chr-ID scaffold_5; pos 44 231446 to 44232104 reverse strand)
tctctagcacctcagccatcgccatccagatccaggtgagcccccgccccctgcgctccgcattgtggctggattgtgggcggcggcgcggaattgttctgttctctgtgtgtacctttcgagggataattttggccggcggagaatatttcaattttgttctccaaccaataggaaattaccagtgtgttttgtaacggcgcaactgtattctggatgttggaagatactggggaaactagttaactgtgcttttggattgttgtaattgtgagatggggtgatggacaagtttgattacttaagtctgaaaagccaggaaatgtttccacacaaattatataccggctattggtgtatatgcttggagatttgtcggttttgttccgacaagctttgtcgatctcagtttgtctcctttcatatgctatgcgctaccaattgtaggctatttgacctttctggtccattctgaatttccacgagtatatggcatgtaatagtcatgtagactcatttaaagtttggaattatttgagttttttacatcattttttttgtgcttcccatttactagcatactataacttactccttgtttctatgctggttatcccatttgtgtagggttgcgtgatctgtttagtacttgctcttgg

SEQ ID NO: 111313 - DNA, 557 bp, Setaria italica
  Intron number 2 from transcript Si003270m (locus Si003270m .g) derived from phytozome v7.0 (chr-ID scaffold_5; pos 41 270242 to 41270798)
agcctctacaggtttgaaattcaatcttatatcattaattatgattgtaggttgaaaattagttactttagataaggccttttttcaatggaacaaaatgggaaactaatatatcctagtttttaggggaaattgtttttgctatccgttggtgttgtgatgtgattagcatagtaattggacctggtcccagacataaagattttttttacattataaatttgtgaagaaaaaacatgcaaatggtcacgaggaaaattttaatcttttttagagggcatattaaactagataggctttgaatatttaaatctttttataaaagtactagtctcaagaactgcagtaaaaaattctgatatttaggattctagcttgtgagttttctatacggatagtttatcaatgctgtgaaaacaagttggatagttagtattgcaaactagctttgtcttatttcgagttaattgacttatttgctgaagatggcagcttctttgcttctgagaaaataactcaaaactgtctaatctttcttttttgacctattacaggcc

SEQ ID NO: 111314 - DNA, 632 bp, Setaria italica
  Intron number 2 from transcript Si036822m (locus Si036822m .g) derived from phytozome v7.0 (chr-ID scaffold_9; pos 40 900806 to 40901437 reverse strand)
ccaacttcagaatcaaggtgaatatgggccttttgagttttgatatcacatttactaatgtcttgttagttcagtgtgtggtagttttcttagaacgatgatatggtggcatgattgcgatggaatggactgaagatatttcctcatggtgtgactgacctgttccttgtttcttcattaaatgcttaattcatttatattattttctggaacatggtttaccttagatgcgtaagttgtttgctctgaaacgtatagatatgaatgcttacatgttcaaattttaggatatgcataagttcactaccacctcagtcgaagacatgtaaattcaagtggattcaaatcaatgattgtgctttctcatcatagctataggaatataatgtagctttcaagcttccaagtgttagcacaaggagcccctatctactccgttccattggaagatattgactacagtctacaggtgtctcatttaattgggctcacctgggattcgctatcttccaatctgtatttctcttgtaactatttctgataccattctactgaaataaaatatctgaccaatatctaccgatttttaccatgcaggttccagtctgtagcttacctccagcaaatctggt

SEQ ID NO: 111315 - DNA, 318 bp, Setaria italica
  Intron number 3 from transcript Si000172m (locus Si000172m .g) derived from phytozome v7.0 (chr-ID scaffold_5; pos 19 683897 to 19684214 reverse strand)
agccatacagcagggcatcgagggctttgctttctgtaagtattagtgtttattctagctgtcgtatctttcattattataaataatctcttccaacaatgacaatattatcagaactactatgcgtttatcatggtttgttggtgttcttttcttgaaccaagtagctctgcctgccatttgacattcttactagctagtcgaacttttcaagattcaatcgcctgattattttttttcttttgcagctgcttatgcgtacatgtctgtttaataatacattatttgattgtaatatatgcttacaggatattgagc

SEQ ID NO: 111316 - DNA, 485 bp, Setaria italica
  Intron number 2 from transcript Si039437m (locus Si039437m .g) derived from phytozome v7.0 (chr-ID scaffold_9; pos 20 83684 to 2084168 reverse strand)
atcaggtatgtctttgtttacacttgtttttttaatctcatcaaatcaatcatgcaggcctttcagccttatctgagctaaacttccttttattttaaaaaaatagtagttgtaagtctttacataaacaattattttgttgaagatagtgccttataggaggaaatataacgtttctgagcgatgaaagactatgaaatgatgttcttcatgctgtttccttttctccttttggaaaatttgcatgcttgtttgtttagagttctgtcttcaatatctctcagcatatgttattgcagcttgcataattctcagaattcatatttgccatgaatgtaaattgtctctgttgatttgattgtcaggctattcttaagtacacattcaaatacaatccatgcacatttactgctgaaagtatattcctaatgcttttgtttcacatgtcaggttaaaattgtcaaagtttgccagcagcttggtgt

SEQ ID NO: 111317 - DNA, 1045 bp, Setaria italica
  Intron number 1 from transcript Si039138m (locus Si039138m .g) derived from phytozome v7.0 (chr-ID scaffold_9; pos 32 619781 to 32620825 reverse strand)
ggataaaggagggccaaaggtaattcttggagctggtatagtttgtcgaccagcagctgagtttttaacatcttacccaaatatatgtagttatgctgttgatgccaataagacagatcagattcatgttattgtggcaatgatgcagaagaggttattcttgcaatgatgcattccccagctcttgaatttttttttctgtcttttggttggttgcattacttgctattaacatgctctatggacatcaataagcattaccaaattgaaaatattgtacttggtctgtaagaaaaaacctttatgcaaaaaaaattaaccaggattaagcactgggtacctgctcccttatcatatactgggttcaaccttttaatccctttatcctctaatgtagattaagcactgttattagtacaaaatatgtgttgttatgttttggttttgattgtgtatgtgaatatgtagtcaagtgtcttgttgtgtcatatattctacagatgttctccatctatttatatttcataaagggttgcattaaacaccacctttcatgaattgtcgtgtcctcttaaatcttaatgtttcctttcatgaataaacatctgctcataaatagatatccattccttcatacacacatgctatgctatgtagtttttacttttgaaagggggagaagagggtaattaaaagttaataatttcaaatcctttagcaaccgtcatgctaggctttgatttttggaattgatcgaatgggaagtctttactgccatcgggtccgttatgtaagttttagatgagtctttaccgatcgaatggtcagcactacgcttcgctagcttcgcaaagactttcgctgtgcagatctgcaacggcccacggtgggaatggcgcatcctagcggcgacgggaggatgattgcgcaacctagcggccatgggaagatgaggagccacgatgagatcaccctttggtttaagctgctactttcccctattgtcctagggaaggggatttggggatctgggttgaacatacta

SEQ ID NO: 111318 - DNA, 986 bp, Setaria italica
  Intron number 2 from transcript Si038458m (locus Si038458m .g) derived from phytozome v7.0 (chr-ID scaffold_9; pos 17 015625 to 17016610)
ctagtttgtcaggccagaggaaatcgggtaaacaggtacgattcatgattccccattccccataaccgttgatctgtagaaatttttaatggttcggcacatatatgcgaatcaaaactcaaaagtgatgcttatggcctattttttggggcaaatatctgtgagaagtgcgtgcatctttactttggattgcactgattttgtccaagttcataggactatacgagtgcgcagaaattgctatacacctttactcttaattgggaggaaaaaacgatatggtgagttagtgctgagatgtgtagtttaaattaaaatgaaacctcaagttaatgttttttaatatgtttagtgctggaaatttcaatgtaattaagattaaacaaacgcaaacaggtaactgagaatgtaaaagcacaaaaagtgatactcccaagtaaaagaatggattagaactacaccccttcacaaatggtccaatcaagtataggaaaatggattaaaaatctgttcctgaggaatcagtagttttcgacgataaaacattatgaatcaagtaaattgagtggacatgagttagaaaaaagcaaagaaatgagacaggagaaaatgagtaaatatgctaaattgttctcagttttgttgtacatttaggagtttaagaggggtagttgccacatttccacaaggctaggaatatttccgaacacttactaaggccttaagatttggtaagaagtagcaaataatataatctcttgttcctcggtgagggagctatgtcttaatgcctcaagatagttaagaagtagcaaatcaagttggaatataatcatgaacgataatcaattgttcctaggctatgaatcaagtacagtctctgtcatagatgttgctagactgacgcaagaccaagtacagtctgttgtcatctttccgcacaatggttctctcatgcatttttttgccaacaatttcagaactac

SEQ ID NO: 111319 - DNA, 528 bp, Setaria italica
  Intron number 3 from transcript Si002133m (locus Si002133m .g) derived from phytozome v7.0 (chr-ID scaffold_5; pos 31 615944 to 31616471 reverse strand)
atagctttggccgcctcaacgttcttgacctccaggtcagcgtcagacgcgctgctttaacaaatttgtgtacaaatatacttaattacttctggggtacaatttttccccgtaggacaagctttgtgctcgttttataaaacaatcatgttcaaatggcgcgggtcttctatcaatggtttatttacacgcaatgcagttgttctgcccaacttttatagttgatttctttagtgtgtgttgaactgacctacatcgttcagcttcaactcaagatatgatgatcacatgataggtttgactagaattcctgattaatgctagtatatgtttatgtactgattagtaaatctgtaggagcggggtttttttggtcctgttggtgcttctagtattagtatgttatgcagtatgaaattatttaaccttttagtttgaaatgcattataaactattgttagccttgtgaaaatcaaatacataatttcttcaggtgcaaatccgccgtcttcccaagcctgttattgc

SEQ ID NO: 111320 - DNA, 1062 bp, Setaria italica
  Intron number 1 from transcript Si034835m (locus Si034835m .g) derived from phytozome v7.0 (chr-ID scaffold_9; pos 47 917079 to 47918140)
gccaagcgctcccgcatcatcgagctctcgcgcaggtgaggcgcgccgcccccgccccgtctcgccatctccctatccatcggctccctctgtgtctgtacgcgcagcgagcgggggcggcgggtgcttgcgcccgcgtgagggagagggtggcggaaatttggtggcggatttgggcgggttgagagaacgtattttactttcggcgaaatgggaacgttctggattatctggccatttgtagctgtccacttgtcgatttgatttagattaacagtttgtcatgaatctgcgcaagctgaaatgaatcaacgataccaggcaatacagtcaaacctgaaaaatagtataatgctagtctccgaggatttaggaatgggctgtggcccctgacaggctctgatctttgtgaagtgccccgatcgagtgatgcggtatctatgttgtgtgcttgtgtgaacaatttggaagatcagattctgggtgtgaagacttctaggttttggttggtagtgcttgtggcatggatgttttggtttgtgacaagaattaaaattttaaatgaaattgctgggttaccctaaaattatttctcattgccaacgggtgatgcaacacatttggcatggcagaagagaaagaaaagagaacaagattgcctagaagttccacggtggcttatgatcagagaaaaattgaaaagtttaaatcaatttatagaagcaatcagagtgagtagaatttatgacttatgagcaagttcttcatctttaaggaacacacaattgttgaatcaaagagttacaatttcttgaattaacataatcttctactagaaataacctgttgaacacaaattagtgtcttctttcagaattcagaaccaagagccagatgtttctttgctgtagtgtataatttctctgtagcttttttttgggcactttgttctttggaagacatagtgcatggtgcatcttataaatagcttatgcactctctcaaatgaaatttataatttttgtaggttacggcaccgaggacctgattggagcggtttac

SEQ ID NO: 111321 - DNA, 575 bp, Setaria italica
  Intron number 1 from transcript Si001963m (locus Si001963m .g) derived from phytozome v7.0 (chr-ID scaffold_5; pos 46 953788 to 46954362 reverse strand)
ctccgatcccgcgccgcagcccctggggccctagggtttgttcctcttctcgtcctcgttgcctttaacaccagaatctacacgcatgctctcgcacttcttggttgggccttgcttcggccaactcatttttgctgcttattcctcggtttggccactgggtttatacataggatcctaataatgtgatgtaggatcaggagggattggtcacttgtgttctggtggattactcctacttttgtcatctgaaaaattccactagtctattggctgctacttttagcatctggattacttgactatattgccactccatttctctgcgtgattacgttgggtcttggctgctagtagattctttgtaaaactcaagattcagtggcaaaatacgatgtgtgatgtgtctgaaatagcagtatcaggaagttaagtggctatgtactagtttgactttctcggtttaggtggcttgatctgtaacctcctatttgggcgcccctttcctatcttcttacttctgtttgttttctgtcaaaacaatgtttctgaagggatcaggagccaacagagaa

SEQ ID NO: 111322 - DNA, 802 bp, Setaria italica
  Intron number 2 from transcript Si005610m (locus Si005610m .g) derived from phytozome v7.0 (chr-ID scaffold_5; pos 32 707118 to 32707919)
aggcccaacgtctaaaaaatccatccagtgtaagtggccattttatttatgtagttcttttgaattcagggtttgactggttccttaccgttactgctgcttttgccaccaagcacctcttggtactactgctaagctacacaggatgtacctcccctcgtatttgtgcattatgtgatgttttcagttttgattcagtagtagcacggaagctcagactttcagtactgtttgggaaaagaaacatcttcactttcgagcgctgtattggtagagcataatgacagaggtaaattgggcactgtgactaagagaaaactaaagaatatctatgacttggtggcaccaagtggaaatattcatatttcattagcagtttgtggacttcaggttcagctgattagttacaacctgtgttgagcttgagagggctgcaaccataaaattgctcaaaaaacaaccctatcaatttccattacttgtaacgagaatatcagagtttagttacattgccagataaaggaaacagaggaaagagcagacaccccctaggagttctaacctaattcaagctaaaatcctaggtgcaattctgcatttttattggttcgttgagcttgtaatccaagcattagtgttaaaaggaattagattaataggtgtgcatgtgtcatacactcaaatgctatatgttacacccttttccttttctccttttggttacgatcaattaaaatacacatatattttgtaacaaaccttccaagtttaactcagaaagttctttgccaggtactgtata

SEQ ID NO: 111323 - DNA, 897 bp, Setaria italica
  Intron number 1 from transcript Si004272m (locus Si004272m .g) derived from phytozome v7.0 (chr-ID scaffold_5; pos 10 42629 to 1043525 reverse strand)
ctaccgctccaaacgctcttctcctgcataagttttttgcaacctttttcttcatgcatatgtcgtccatacgttattttgattcgtggatcagatatgcctgcaaggagattgacaacagcatggtgtgatgtgttttgacagcgcaacaagtgccgccgataatgccaccgatggcagtgccggtgcctgccaatcctccagcgtcaccaatcaggtgatttaccttctttgacacaccttattctgaatgatttgttgcagtttgtgttgtaatcgccacctaaaatatccttttcttcttgtcttcaggtaatatatgtcatagcagtagcaactaccaagaggatcagagcacggatggtttgcgtcaacgttagcactaggggtagtgggtacagtcttgttagttttaagttgctcttaggataatagcattgtttaggtagaggggaattgtacgttagcactaggggtagtgaggtacagtcttgttagttttaagttgctcttaggataatagcattgttcaggtggaggggaactgtacttattggtacgatcatgtaatgatttcgttgatggatgcaaccgtcaactgcggatatatattagtagatgttaaataaatataatggtgatctatgttatgacatcttggatctgacgattctgatatttacttctcaatttactagcaagatgctcgtgcgttgttacagtgaaacgacgttgcttagtgcacgatattttttatcgtgtcgtgtagcacaacatattttttaacgtgttgtgtaacttttttatcaccttgctccggcggaccgcgcggttgggatatggacacgctcatgcggcgcagccgaggcggctcgggcgcggccgggtagggctgcc

SEQ ID NO: 111324 - DNA, 618 bp, Setaria italica
  Intron number 1 from transcript Si000162m (locus Si000162m .g) derived from phytozome v7.0 (chr-ID scaffold_5; pos 59 0623 to 591240)
tttaaggtaatttagatgcatatttagggtcactttaggttattttgataatccgagatgtgggtaatagtttagatactaatctagggtgctaattttgattattttctttatgacataagtgggtaattgaaagaagcgtacatggttaatttatgttatatttttttttcataatgagcgatttttaaagatataatttagatccaataggtattattatcgatgatgagtagagtccacgggttgatggctagatcttctttaataatttctaaaatttatcttttcttttttaagcgcatcccgtgagggtttcagttagtaaagaagttgtcatttgaatactagagtatggcaaggttttcttatagaagttgaaaactccggacaatcttggaacatgtgtggctgaattagtcaataggaacatgcgttgagaatggaaggtaataaccggccggcctcgtgaaaaaggacgtcatgtccatttcgtttctccggctgatcaaccaatgcgaaacctgacaacttgctcctccagagtcgtttgagttaccaatgccgttgctttgtctcttaggaaaagcgcccggcgtcgccaccgtcgttgtccaa

SEQ ID NO: 111325 - DNA, 820 bp, Setaria italica
  Intron number 1 from transcript Si000416m (locus Si000416m .g) derived from phytozome v7.0 (chr-ID scaffold_5; pos 13 593278 to 13594097 reverse strand)
gcggggaggccgctgcccccgattcccaggaaaaggtgatgctccgctgacgcttctcttccacgtggtggggggacttccccctttttttctgcttgatctgcccggtgctggtgctccctttgtgtagaactcactttgattttagagttcgtactactggagtattgatgccaccggcttgtagttttagaattgcaacactttcactgcattggtagatttcgcagtggaatgtttggctgttatgccaggtgggagcttggaggtgtgtgctagatgcaaataaatttggcgtgcaagagactgtcggatgtcattttggaccacttgtttcatagatactgaaattaagctaagttcaaattttggatggattattgttctgacgtctgtcttaatgtgcttcagcctggttgagttaatgtcaattgtcaaacttcacaacctcgatccatttatcctattccaaatgcaattctggtttgtgcttactatgttttaattctctgcgattagttatcattctttttgtggagaggatgtcaaaatttagatgccatcagtcagttcagtttcaattcatgtaaaggcacgtttagtgatcctagatttaccgttgtccgttggtgttattttacagtcccatgctgttgtacgaaacggcattgtggaggttgtgcttgttgctcagtaaaccctggtgttttttgtgatgggttgctgtttccctgcgcgctgataaatgtgcatttatctttttggtgccatgctggtccttgtagagggctggtacagatatcaagacactagctacaag

SEQ ID NO: 111326 - DNA, 685 bp, Setaria italica
  Intron number 1 from transcript Si000373m (locus Si000373m .g) derived from phytozome v7.0 (chr-ID scaffold_5; pos 36 270748 to 36271432)
cattagcgcttggattgattgctacgttttgttcggtaagaatccctagctttgctttggatagattcccgtgttctaaaagggtttgtttcaccttttattcgttcaattaattccaaatctctacttctccaatccatccccgttgctgcgatttctatggtacaacagtcttgttctccgaatagttttgagcgggttcaaactccactataagcccaccgttaaaccccttcagcttcagtatgtcaatatttacgtatatatactgggaagacggaaagagggttccatgcgccattgcccttccttgacgtttttttcttatctaaggataaacagttcgtaatccgtccgtatgcttgtttttttttcatgaagtcgatggtgattgttatagatgtggtcatgtggtgtgatttgattaacttctcagtcgcaaagcaatttctaggcacaaaggtcagagttcgatggggaaacatgagagtaaacaggtgtttcctgttataggttaggtgtctagggaaataattctctgacaaagattagggatgaatgcatgttctttatacatgtcttgttcggtaccagctgatctgttgcgcttttggtgccagtcatgaatcatctatgttgtcttccctgctgatttcgtgatgttgataacacagggctaggggcc

SEQ ID NO: 111327 - DNA, 763 bp, Setaria italica
  Intron number 1 from transcript Si002859m (locus Si002859m .g) derived from phytozome v7.0 (chr-ID scaffold_5; pos 84 58352 to 8459114)
cgacaccgcaactccatcgtcccagccctccccaggttacccctctcccatctcttccgacatacatgccatgcgcgcatcaggtctgctctgtacacccaggtttagatcttatcggagtctaatctcttagttccctggagttgatcggtcatgtgatgcgatttggtaggattttaatccgaggctatttgtctgatctagattggtctaagttagctggagtttgtatcgctgcagtttggtactgatttgggcgggttgatcctttctaccgcggaagttattgctttgcactgtgctaaaatttaagtatcagctgggggtagttgttatgatggttttgagccttgaaaatgtttggaatttggttccaatttcaacgggaagcttccctctgataatctagtgttgctaatatttgcctgggtttgatcattatgtatcataattgtgtcaggcgtcctgaaattatggatcgttatccatatgagatcgtgtggccagatcatgactgcatttttattctgtattgatcgctggttagcagaaaaccaattgatgccatgtttctggaagaactacttaatctaaatatatgttggcaatatctccttttgggtatctaataaatcgagtagaatcaacatgcctttttttttctttgcaatttgaatccttaactacctctgtgatgtttttgtgagttccatagttgaacatgccatgctgactaaaatactcattgtaggccaagactcaa

SEQ ID NO: 111328 - DNA, 922 bp, Setaria italica
  Intron number 2 from transcript Si000726m (locus Si000726m .g) derived from phytozome v7.0 (chr-ID scaffold_5; pos 33 236103 to 33237024)
gagcccaagggcgagctgggccagaagcgtatccttccttgtcatttcgcgctccgtccggcgaggggaggtggatccaacggatgggttcgtggcgttcatgtgtttgctgttggtgcttttgcgagctttctgttggatcaataaaatttctggaactattttgatgcggagtgctggtgaatttttgtcgttcccgttgctactgaactccattgctgtcctcctagaaagcttttgtgttaatccggcttctgggaaacaaaaaatagtcttccgatccggggggtgcctattggatcactgtttgcaggaacttattgctgaatcgtatgtgcagttttttctttttctttttctttttgacctggctgtgtacaatttgatcaaaattttgatccgttttaaatttgatactgacagttgacattattgagcctttccgttccatcatgttatctttggtattagcaattcagtaatatatactattattaggtgcccttcattattggggtttgagagatagtgagagctgagccaactcccatttatttgacaggtacaccaataatatggtgcctgcactgaacggttccagtatattggttgggttagtgttgcatatatcggtccctcaaatctagctcaatcggagttccttggctgcccttgtttgtgaaatataaattaaattgtctgtactttaatcaaatgatctgtatattttttttagatctgcccacatgatgagttgatgaaggacaattattatctgcacaatatcagcctggtgttatgtttgttgatcattttggtgtggttggcttattttattggtcactcatgtacagtgacccttagaagtatatattctgtttgcaacccttgacttctctatcaaccagctattgaagaagca

SEQ ID NO: 111329 - DNA, 1002 bp, Setaria italica
  Intron number 3 from transcript Si001410m (locus Si001410m .g) derived from phytozome v7.0 (chr-ID scaffold_5; pos 27 5576 to 276577 reverse strand)
gaggtaataacctacttctcaagtagcttttatattgttcactgtgtttgcacaatatttcttgcctcttgagtagatggttcaatcaaatcaaaaacttatatcaatatatcatacaagtacacactactagcttacggtatcgtgactttctagtttctagtgtgggccttattttttatactaatcagagattgtattcctgagtttatttgtgtcttataactgtcaactgcttctagtgaactctgtcgtattcttcccctgcatagacaaccttccagtcctctggttcagtgacattttagtaatgctatttaggtgtacttacaaaatgaaatatagacctgcaacgtttccctgcatttgtttgtaatggcagttaagcaatatttgcactttcttgccaagagacggtaaaatggcctttagcatgcagtcaatggtaattgccttctgtcactcatttgtggacactactgcaattctgtcatgtaagatacaattttcaggagttgacacatagaaaagtaatgtataatgtgaatgcccgagagcaaacaaagcattgtcactgccagttagaaggcctagaacttgtttagcatacagtaggtgacttgtgcacacccaaaaaaacataattatatgttggtctgagttatcaacatagagttagaaaagttattccacattgtgatatatttacaaatagtaccatgcttgttgtagccatggtatgcaattctgcaacctgattttttattcaaccattccttaattgttgaacatggctcatcctgttcattatgtttcatattttacacttaactgtagaacattgttcaccctctgcattactttcatattttacataaaaaaagaatcatgatttacctttatctaccaatccacttgaaacttggataatacgtggtaaaatctaatctttctgttttcttggcagatattcgcctttgggacattgctgcgaggtactgc

SEQ ID NO: 111330 - DNA, 676 bp, Setaria italica
  Intron number 1 from transcript Si001410m (locus Si001410m .g) derived from phytozome v7.0 (chr-ID scaffold_5; pos 27 6858 to 277533 reverse strand)
acgagttcacgcgcgaccgcagccaggacctgcaggtaggcaacactgcaccgtcgctttatatctaatataaaaattgtaggagcatcgaattcgttcttctgcttcttcaccctatgagtgagtgacccagtcaactcggtttatgaatgaaatctagttgctgaagagtttctctggcatctattttgtttttggtccttgttcctgactagtgaaagtatggtagcatcaatttttgaggggacagtttgccctcaaaaaaaaatgaggggcagtttaatccctttttgtcaaaattatgttccccccacaagatgcccgtagctttttaaccaatttgacatttaggttgccctcttggaacttccattgaggggtaaaggcttgcattctgtacacttctgagtttcaggatgaagtgtgtactaataagtgtcgagttcctgtttcatcatgatagcaatataatttgaaaccttttcagcatgcaccatcaaatgtaaaaaagggtgtacatgattacaaaatagtgatctttctgttttatcggatgcaagtctttaaaatatagcccaattgcatgtcaatcatttaggcactgaaattttactttcctctaccactgacattcccaactgcacttattggtctcaacagaaagtattccgcaact

SEQ ID NO: 111331 - DNA, 620 bp, Setaria italica
  Intron number 1 from transcript Si001739m (locus Si001739m .g) derived from phytozome v7.0 (chr-ID scaffold_5; pos 40 496630 to 40497249 reverse strand)
gcgcgcttcttgtcaccatcggcgacattgcgcaggtacttgcgtgcaaatctttcagtttgactaacgcgaaaatcataggatatccaatgaacattacaacagaaaattgcaacggcatcttaaaaagacaaacagtagcagagattacataagcactgttgctattcttcttgatttggtcaaaatttagtgctctagtacacgataggggtggtagtgccactgcaacagaacgtacaagaaccagaggcagagatggagagcatccatttttgtttatgcaacggcatcaatttctaaagtaggtcgcgcatcagcaattcagggtcaccactcaattttgatttttgacccgttaggcgatcaggccccatgtctccatcagctggtgtatcactcactgatcagtgatcaccactcagtttggagcacttagacacaaaaattagtcaaacatcttcgcttttcagacgcaaaagtgaccatcatgtatcatatgagctgttcttcaaatcttcactcttcaggctgcagcagcactcatctttttgttgccatgattccttttggctcgcgtgccaggtgtggagcaacggcaagttgaggaaagtgagagg

SEQ ID NO: 111332 - DNA, 482 bp, Setaria italica
  Intron number 2 from transcript Si001471m (locus Si001471m .g) derived from phytozome v7.0 (chr-ID scaffold_5; pos 44 328222 to 44328703 reverse strand)
gccttgagtcagcctgcagatctttggaagaggaagtatgtgcttgcttctggatcttttttgtcagattatttgagttcaattgaattatgtgctttagcttgcttttatccattgtattggctgtccaggaattatatctttggtaatctcttcagacgtgtttatatttgttgttcttgttcatagaatattgggtaccctccagtcgttattgatagataaagttatgctcttgtagacttatggatactttccagtctgtttaaaatagcttatgaccattatctgttacatgtttcttctatagtgcatttaagatttagacttatggattacttttaagatagccaagttgttgttgcaaataaacaaaattgcaataaacatacccttcttgcagattcctgtaatgactcacagccctttcgttttcatctttcgtagacttctactctggagcaagaggcatatccagcatt

SEQ ID NO: 111333 - DNA, 447 bp, Setaria italica
  Intron number 3 from transcript Si001076m (locus Si001076m .g) derived from phytozome v7.0 (chr-ID scaffold_5; pos 40 688932 to 40689378 reverse strand)
ccttgcagcctctataatatcaaaatctggaaaaggtaagctggctaagaattggctgagaattgcccatttattaaatttgattattaatgtattattgttgattcataaatgatatatctttgttcctcaaacacttgccttttttgtaacttttgtacctgtagcatatgtcttcatccttgaacatttagcctatttacttttggtagcatatttgcgtttatatgtagtcatgagtctgtagttgtgtcaacacttaatggcctttccccgataggctccgtttagtagatttatgggtttcctcttatgcatttaatttttatcaagctaccgccaacaaatttctctgtactatttgcctgatgaaattcttaatagaaaataatgtgttgtttctgtttttcttcaactgcagcacttgtttcgagacaatttgttgat

SEQ ID NO: 111334 - DNA, 956 bp, Setaria italica
  Intron number 1 from transcript Si001076m (locus Si001076m .g) derived from phytozome v7.0 (chr-ID scaffold_5; pos 40 689572 to 40690527 reverse strand)
tcgccgtcgccgaacgcgactcccatcagatccaggtatccttcgaccgcaaccgctcctctctcctgtgtcttcgtttcccccgaccagcgtggggtggagatctaaccgggctcgggtcgattccttcttctctcagttaggatcagacctactagcttggacgaatcgctcgttccttttgttctgcgaaattctaatgtgtttgatgggacgaacgagcccatccagattgttgcggatttgtttgcggcgtctgaatattgtttgttttccgtaatttccgtgggttgtcctggaccacagtgccaccacgtttaagtccgcggatgatcctgaagcctgagctttttgttatcagttggttcagaatttggacctgggcattccagcattttgacttgtgcgcgcagaatttagctcgagttttgcagttgttatttggatctgacttttttttatatcaaaatgaaattgtatttagagcctgtggccaactaaaaccttaagttaggttcatggtaaaaccagcataacatggcaatgggttttgctattggttagggtacaataaaaaacctgtgaaacaagaagaaaaatcagttatgctaaactcaaattattgaccatgtaaaactactcttacaagtcctcattgttttgactttttgagatatacgtctatgggttattatcatattattataattgagatttctaaaaacttcatatgtcctgccctttgacttgtcttgttgcattttaccaacttatgatagcatggaaattgcatgaatttttttttgtgactaagttctctgagtagtctgaatggtgtgcttctgcagttcttattagtcgctttgttatatattgtacatgactttttgtttgtggaactaattaccctcttttttgcagatcaattactccattcagcttttgttattcctggg

SEQ ID NO: 111335 - DNA, 890 bp, Setaria italica
  Intron number 2 from transcript Si002947m (locus Si002947m .g) derived from phytozome v7.0 (chr-ID scaffold_5; pos 26 937568 to 26938457)
aaggatcttttcgagataagggagtttgaaacaaggtatggtccaaagattcggttttccttgtacattattgtgcctcccggaatatgtattgtcttcatgtttattaatgttggaatggtccattgtcaattatcatacgtttaaatgaatataaatctgtctcctactaattctgaatccaaatttaagtaatcggtagaagagcaaaaaaacaccatatatccattgttttgcatttttgtgcgatctagaaaccatcccatgaggtaaaatgcatcgtcaaagtttgcagtaagaagcctaccacaaagttcagtattatctttttatggagtaggggtagcctctgcgataaacctagaacttagaagattctttcttatagagtcaaacatctagtaaagctatctacacataccttaaaaagtaaaggcacttctacacagtaaaatttaacttatgctttcaattgctctatatatcaaacatgttatagtgcctgcagcttactccggttgtagtttgttgaagaagcattttgcaccatcaaatgatgtaaatacatgtgttgttctgtttcagtggggtttaatacctattccattacttgttaagcactaggtgcatctttgcttgatttgtactcattaattgttaaaagagctctctcctttctaactgattctttgtttgtatggtgaaagtgtctggtcacttctactatttccaaactgttaagtttacaaaacttgttagttttaagtttcatccttcatctcaacattggtgtgacaaatgcatacataccttatgtattcatgtgttctactagcgctttgttttacttgtaacatattctgattacagagatttgcaatttggcagtg

SEQ ID NO: 111336 - DNA, 712 bp, Setaria italica
  Intron number 2 from transcript Si004196m (locus Si004196m .g) derived from phytozome v7.0 (chr-ID scaffold_5; pos 31 066936 to 31067647 reverse strand)
catacattcaaacacattcagaggtacacccttaaccttctaagagtatctcagcaatctgagctaaaaaaatggctataaatattctttatagtactttattcttgcacaaaccttctgaatggaataaactgagatattgaaaaataatcaatgtttgtttgatagcatcttttaatctcttttgctgggctagcataaattgatttttttgggggttttggcggaccatcaactttgtcttgaagcttgtattagaaaatttgaagaaagttaatacttccactgagaaaaccaaaagaaaagaatgaaggtaagttaagttccaataacttttgtgcttgtattttgtgtaaccaatactataagaaagaaattagaataattaggacagttcaatttagttgaaatatacgcgtgtttgatacaatgattgatgctcacccaattgaattgtctagattttactattgtattgtaaagcctgaaaaccctttcagaccttggtttaaaaccgtgaccatagttgaatgcatttatactcaatgtcattttatattggtatctttgcacaggcaattgaccattcgtttcatgatcttttgaccagcattagttatatgccgtaatctgtttttagtattgcatgactttttgttttttcaatcttgtatgacagtcttaaacttcatgcagatcatgcaggtgccct

SEQ ID NO: 111337 - DNA, 696 bp, Setaria italica
  Intron number 1 from transcript Si005429m (locus Si005429m .g) derived from phytozome v7.0 (chr-ID scaffold_5; pos 25 87907 to 2588602)
aggtcggtggaaaaggaggcagacaaatttttgaaagtacttatcatactccctccgccccaaaatatagctacatttaggaactttcagacattaagaagactgaagaaaatactaaattacccttgattgatttctacagctgcttatgcactaattacgtgctgatttattgtccgctctagccgctttgcatgcctgtacatatgacgctatgtttctgcctacgttccttttaatttccgttacactggcactagatatgcatcaggctaacaattagctcttgccaattctggttcatttgttgccagattcaacgccaactaaattgtgaggtccatgcaaaaaggcgactgacatgcattttttttttgtcaccgtgtaaaaacttgcagccaaattagttgtggaacaaaattaacgcccatcacctaatccattttaagtgatgcgggaagatggatttagggggtggaagggtatttttgtctgttcacatgtaaaagatgggttgggaactcaaaatgcagctatatttgagacaagttttgaatgcttaatgatgggatggagggagtatttgttttgttaattacttaagatgtgttcttttattagcttaacacattcactatcagataatttaaaataaattctatttgatttgatagaattcagagaagaggcttcaag

SEQ ID NO: 111338 - DNA, 650 bp, Setaria italica
  Intron number 1 from transcript Si034739m (locus Si034739m .g) derived from phytozome v7.0 (chr-ID scaffold_9; pos 18 99093 to 1899742)
cagggcgagcacggcgccgccgcgggtggcggaaggtaagacaagagcctgctgctcccgaaatgaatctctgcggcgttttggttagtgtttaccaacttgatttcgaacggttgggggtcgcatgtgatcgtcgtttctcgttgatttcgcatgctaggtagtgcttgcttccttgcttcctccttcctccgtccagcagtggtagcgtgtgccgcggaagcgagggagggttgcctaatttgcttgcaccgttgggttacttatttgtgcgttgctccgaacaaacaaaaattaagggagatcatgctagaagtagtccaacagagaatcttaccatttattttccattttcccaatgttttcgtgattgcctgaggagaaaaaagaagggcataaactcatggaaaaattcaaacagcacaatttgactggaaaacaattggtcgtaccatgtgattcaaacagcacaattctttcctttagggacagataagaactgcaatgctgtctttttgtcggtttttgattaaggtggcctgtgatgtaacatgttcgaatggttcccatcgtgcgactaaggtaaaggtctaaatgatttggagttgacccgttcttgttctcttactgacttcactcagggtttgccc

SEQ ID NO: 111339 - DNA, 793 bp, Setaria italica
  Intron number 4 from transcript Si002520m (locus Si002520m .g) derived from phytozome v7.0 (chr-ID scaffold_5; pos 45 798873 to 45799665)
tcactggttatcgtgatccacctgctggtgtttcggtagcactctttcccataaataatttgccattttttttgtgtgctgatggactttggtggttctcatatgtgtgctttcctgctgtttactttcctagatgcgtagaaaatatggactatcttgtgctcacgctatggctttgtatcaacttgtatatggatacattggtctgacattgccacatgatattgcttcactcgtgtgtaaccttttattaaactcactggggtttcaactttaatccatgacaattagtctccaattaggcagatcttcctgttgatgcatacaagtttttctgtaactaatcaagcatccggatgtttgtttaaaagctctgttcttttccttttagtgctgctaaagagcccttttatgtgtgggtcatcctataggtagggtctagtaacccacaagatatctgcacagcacctttgcattttcctcctcttttctgctgttagttttgaatgttgaacacagcaaaacatacttaattaagtctggagtttgtaactgaacctttttagaacatattttgcttgtaagttaaagaattattagaatttttctgcagataaatgttgaaaggattatgtttctagtgtatatgcatgagattgttagcaagtggcttgtgttggtcactgttaattgatactgtatttcgacagttaacttatttttgcgacataaccttctgttgttgatttaaaatttagattcgtgaaggcttgcattacaatccctactttcc

SEQ ID NO: 111340 - DNA, 369 bp, Setaria italica
  Intron number 1 from transcript Si004875m (locus Si004875m .g) derived from phytozome v7.0 (chr-ID scaffold_5; pos 43 485988 to 43486356)
gtggcttttgctttgcctggacggtggatcatctggtgagttttttgctacacctatcttgtccatacactagtatgaagaattatatatcagttgagcatctagtcagtcctcgttagtattacttttggaagacgaatcaaaaaattattacaattttactttgaggcagcgaggtgcctctctgttatcttgtcttatatgcctattctcactagttttcagcaagtgacacaggagttgggaagctgcaattggctgagaaaactgtttgttttcatgccatgtctaagatagctgatgatatcaagtttgccctttggttgctgctgttgagcggctcatcatcgtgttttggttctgatcctg

SEQ ID NO: 111341 - DNA, 545 bp, Setaria italica
  Intron number 2 from transcript Si034172m (locus Si034172m .g) derived from phytozome v7.0 (chr-ID scaffold_9; pos 57 075425 to 57075969)
tcccggtgagtcttccttgtaccagtactgctctgtcagagtaattccttcaatcttctgttccccacaagtaggcactgttctgtttcagaaaagaacatgtcttgttcctctgacgcatagttcgttgtgtgcgtgaaaaaactttgatcgttcttgggcgatgaggtacctactctggtaactttgttgctagctccaatctgtacttgcaactgactgtagttacctgacacgacataacagaaactgcattaataatgtcaagtggtagaccttcatctgctgtttctttagacgtggcccccatcttcttccatctactgttgctgcatctactgactagtctttgcctcattgtcatctttccattcaatgagcaaacttttcattaggcacatcaagtatttttcttcttttagatgaagcaacgtccagttactatttggaaagtttgtattattttttattgtgcaaaaggtgacgaacaagaaactacgatgatctgattgagtttcttgtgaatttaacagtattcctgcaat

SEQ ID NO: 111342 - DNA, 1010 bp, Setaria italica
  Intron number 1 from transcript Si039204m (locus Si039204m .g) derived from phytozome v7.0 (chr-ID scaffold_9; pos 15 150694 to 15151703)
agccgtaatcggcggcgcggtcggcggagccgttggtaaccccctgcctcccttaaaccttaaaaaccctagccctgtatcaatccgcgcgaactggtcagttttcgcccatggttttgcggttggttgaagtggagtagtgtgagatttaagggatcttggcgcgatagctgctgatccgtggtttgtcttgttagttggggccttggggggctccgcagcttcgggaggtggaagtaataggttggttcaagtctagggagactagatcgatgctctagttgggagtttctttgcccaatcgcgtgtgctgcaagggttgttgcgtttggtgaatttgtctgtaagggttgttaggagttgggatgaaaaatgtaagattttcaatttgacttctagtgtcaaaagcctttcaatgcctccgtgcccgtggaatgtaccaatttgtatatttggattttggttttgatagctgatttggacctcataaaggaaagatgacagtgatttgagattgtttgtatgcctacttattggtatttgctgttgaaaagttatagttccacttggtggttttgtgctttgcccatgcagagaatactaacctcggttgaaaagggttggatgtggtcgttgttgtattaggctaacgctagtctctggcagtctgacttgtatagtcattgcttttgggtagggtattgtatataaggtagaaaagatgctctacttttaccgcgtgtgttagacaaccagtgcttctaccattggtagctaacatgattggcttctttgcttcttctaggcatcaactcttgtacaattgttgatctcaagatgtagctctaacagaaagttgcttgtaactagttctcgagcctacgtgcttcctaggatactaacatcacgaaaataaatggcatattgtttaattctttctgcttccataggatatgagtaccgagttaataattggcttgtttttccttctttctgtgtaggtgcttgct

SEQ ID NO: 111343 - DNA, 909 bp, Setaria italica
  Intron number 2 from transcript Si002525m (locus Si002525m .g) derived from phytozome v7.0 (chr-ID scaffold_5; pos 37 909618 to 37910526)
tgcaaggtatgaaattccccctcttacctgttgatacttgacattcatgatcagcctacctttgaattaatatgctcacacggttcttgtgtttaaatggggtcagaagattactataagtttggtatatccctttttataaaaaagaacactataggtaaatcggggactgtggaggagcatagagagaaaaaaattatagatggtagtgaattaaactgtcgatgtgcctgagattggttgaaagttgaaactatttgctattttaactgcatgagtatatgccattatgcccattgtggtaagttgccaaattactgttgtaaaataggtttaacagttgcccggacttctaacaatcagttttatcatgagttgtttagattccgtttattcgtggtaagttaatctcagtaaatgctattgaagacaagtgcattatgtgtaaacataaattaacatgaatgattaattgcccctttttttggcagaaccagaactagaacttgcatcacgagctattgtgtgactcatatgtttaatctctgttgttctctgtttactgaagtttatcatattaggccaaatcttggtttagtccttttcgttagaataatttagttgactctagaatgtctaagaaaatttgaattattgataacacggacgatgtgtcagttctgcctagccaatatttggtgtggtgatccatagcaaattaggaagtgtactgcaatttgtgtagataacaacatgctagcaatgattatagtttctgttacttccagccttgaactcttgcatggaactttttgtgatcaatctctgtgtgtcagaactctagtaactttcttttgaaataagttctgcccatatcttagctaattttacgttttgtttcacaggcct

SEQ ID NO: 111344 - DNA, 498 bp, Setaria italica
  Intron number 2 from transcript Si034849m (locus Si034849m .g) derived from phytozome v7.0 (chr-ID scaffold_9; pos 11 066272 to 11066769 reverse strand)
actgtaagagacgatactgggactattcaggtaggttcttgaaactgacttgccttattttgtatttttgttagccaacttatttttcagtcagcttaatgtttgcaatcaacactcgtaattgtataatgtgatcttgtgtaggattctcttgtattcatcatggttaccatttcaccttagaatttgatatcaggtggatatgctacctgatattgttgcacttgtaaggcatttttacatagcagctgagttaggcaccaacgctattaggtaatgacataatcttcattctgccagtatgattcttttttctcgaacgattcagccactatgtaaatgaggtagatcatattctgcagttttaattgaatttattgttattagtagctagagaaatatgataacttgtatggcactgattgtgtgtttctgagcattttttttcttttggctatgatagctttactgtgagaaagacagccttacggaggacca

SEQ ID NO: 111345 - DNA, 871 bp, Setaria italica
  Intron number 2 from transcript Si001727m (locus Si001727m .g) derived from phytozome v7.0 (chr-ID scaffold_5; pos 46 14296 to 4615166)
gagagaccgccaagaaaggggttggattcctcgaggtaccaatgccatgaatcactccctttccgcaatttaatttcgctgcaactgcaatgctgtgcattcagaaatgcaccttccagctacatgcgctgcacaatgccacaaaagattatctctagcaaaataacatgcggcagctcagaggattcttccacaaatcccacagcgacaatttatagttccaaatgcagtactgtaaataagcccgagacttcagattaagggcactggtgggataatttaagataggactcactgtggacctgttttttaaaaaaaagctcaattgcatgggtccttggatgtttctctgagtcctggccatgcttattgatgagtgtatcaaaaatagagatcagcaccaaatctctgttgaaaagctatcatgcatggttcaagcggatctacacttaatgatacaatcaacagcccttatttaacatcatatgtactgtgctcagtcctgtattaatattcttttcatgaagcctttgatttcatatagttatttgaacacagctttaaagattatagcctagtctctagatttccgatttaatgttatagtgaagtagttattatggaatctaaacatgggtgctaatgatctattcaaatcagagatcctaatccttgagatgggcataaattgtgtgcataaaacctttttttcttcttggattaataagcttgtaattcttttgtagaattagctagttttctatttcttttcataggtcatactagaagttggtctttagataacagtgttatctgatacatctgtaatcatgtaggctattgcagacattggaaaagaggagggtcttaa

SEQ ID NO: 111346 - DNA, 595 bp, Setaria italica
  Intron number 2 from transcript Si000730m (locus Si000730m .g) derived from phytozome v7.0 (chr-ID scaffold_5; pos 37 552556 to 37553150 reverse strand)
tttgaagttgtaagttggattctatccttaccttgagaagaatgcaatattgcgatgggtgctttctcatgacatgctgcaaaagaggcaaggggctggaagttgtttggatagtcatatatttatatttatatggctgggggaatcttattactgaagtttcatcatgatttcaaaaggatctaaagttctcatagatggtgcttagatactgttataagctatgtaacacactgaaagatgaatatcacaaacttcttgtgttgttttgcttatttattatgtagggatgtacatgcatagatgtaggttagatgagtaacattaattataatttataatacaaataatttgggaaatattgtcatcatcccttcagtccttcatatcacctccaaatgcctaatttttgattctctgcagacaggcaaacctataccagtgtggcattgttttgaccttcatatttaaagtcagcccttcttttttgaaatatgaagaatatacctctgttttgatacctttttcagcgcatcttgtgtgtaatgatgctatccatctgaaatcttttaatggtttcttacaggtactgtga

SEQ ID NO: 111347 - DNA, 424 bp, Setaria italica
  Intron number 1 from transcript Si000730m (locus Si000730m .g) derived from phytozome v7.0 (chr-ID scaffold_5; pos 37 553212 to 37553635 reverse strand)
cagccagtgcagcggcccccggtcgccgttcccttgtgagtgttcccgttctgagcttttacatgtagtgttggagtttctaaatttccgcctctctgtttcgtacgtggctcatttctctcgatgagtgagtccgttgtcgtcttgattcatatgaagatcatctctgattttctgagcgtcaccacgagtccagtttccaaattttgacttgtcatttcttggaaatgaagatacatatttgtgttagatgatcttatttatctttaactaacatttctagcaattttttggtacattctccctgttgatatttctagttttccccttcgaaatttgcatcatactcctgcaatgttctaattatgctttggggccttgtactgtaggaagccagagtcaccaaaaccacggccaagactct

SEQ ID NO: 111348 - DNA, 453 bp, Setaria italica
  Intron number 4 from transcript Si003166m (locus Si003166m .g) derived from phytozome v7.0 (chr-ID scaffold_5; pos 39 814731 to 39815183)
tacaggaagcagcacaagaaggtattttattttagttgtatactcctatgtacatgctgtgatccattcgtgtaatatgcattcaatggatccaactagttttatactgctaaaatatcattaagattatggttttgtggtgatttttgttcttcgatgtgtgaagcagtaacaagcttcataagcaatgcaatcagcattttgaaatacctctggcatttgtcatttggcattttcccttgttggagttttcagttgatcaccacatgcatttgattgccaaaatgaggtgttgtcaattttatttgatggctgtgcgacaatgctgagttagcagcaattggtgactacaaatgctattggtttctgccatgttgttttattccttatgatgctgttattaaatgtgtaactacaggacattcacgctgaagctgtcaagaagaggcgccg

SEQ ID NO: 111349 - DNA, 853 bp, Setaria italica
  Intron number 4 from transcript Si033941m (locus Si033941m .g) derived from phytozome v7.0 (chr-ID scaffold_9; pos 39 276614 to 39277466)
cattctgggcctttgggaggcttggctacttgcaggtgaattgtatgacaatttacttgaatgactgttacttgaagtaagcatgccaatagtatgcgtcattaaagaggtcccgactaggtggtatgtttatgaatcttaaggcttcattttggattgagtccgaatcccaccattccaaaaccattcaagctctgcccaaagagattggttaaggtgcactccggctcgcaataatcagttacattgacggtggttatgtagaaactgatgaaaaccgttgaaattcaactgaatctagccccttcagtacttaaccatagcaatttcttcaattcctcgatgatgtttcctgcaattcatgcagatagggtgtgttcacatcccatccaccatggcattgatatgaccaccccacaatacctttactcaaatgctagtggatattaattgaattatgtgcctatgatttcgagttatctgagggaggaaagtgagattgtgcaggataacaggaggcagttgatcaattgctatcagtatatctttattgagttaaactcttaatcatgctgtttttgaaaatttttacgggtctaggctagcagcaatctctcttaggatattcaatttgttgcatccacctttgattttctttaaaatgcccaaaaggtttttcctcctctctgcagcaaggagctacttcgtgctccatcatacagatagtttttttttttgttaatattgttattgtgatttgcttttttagacgtaggatttgcttgtatctgtgataaggcataagtaagatgtattgacatgagttggtgaaaggttaggttcatcagaggaa

SEQ ID NO: 111350 - DNA, 567 bp, Setaria italica
  Intron number 1 from transcript Si001725m (locus Si001725m .g) derived from phytozome v7.0 (chr-ID scaffold_5; pos 40 42037 to 4042603 reverse strand)
acggcgctatcacctccatcgtcgtgcgcagcgaggtcagtcatcggatccgcctcactgattaggtcattaacatccatatgtgcaaaaaacaaaagagggagagaagtttttgcacggatttagatagaagaaggaattgggattcaaatatgctggagcggaataatttcggtaccacaaggaatggttggtttataagacattattgttgttcaataaaaaaacatcatttttcaaatcaaaaccttaaaacttccttgtgcacctaaattcagcacgaagcttctcgcgttggcttacaagtcgtatagtgaaattgaccgtaaccgaactttgtttgtcttatagggtgtcatgtgtatgtgtatctatcaacttctcattttggaattgatcctcaatttactcgatgggctttctacatgatcaccaggagcattacattcatacaaacaaatgaaaagaaatctctcaatctcctaactaactaacaatctctcgggtggatctcgaattggtgtacgtgcaggtccacatcctgacgaagcagatactgaacctggg

SEQ ID NO: 111351 - DNA, 375 bp, Setaria italica
  Intron number 2 from transcript Si001989m (locus Si001989m .g) derived from phytozome v7.0 (chr-ID scaffold_5; pos 42 307191 to 42307565)
ccgcgtctacaagatcgaggttcacatccccacttctgttgctcctttttgtttcgtagaactgagctgtgttgcaaattatgctggctaatggggagacgattgaacagtcgccgattagagtgttcggaggtggtttctgtaatctcatgaccccttagaatggttgctgtggtgctagctgttaggattgaagctcaatgcatttaactttggaatttgagttcctgaaatttgtgtgattttctatttgcttgttggagtgcgttgcatattagtgagggaacaagaggatgtagcccatttcataaattttgacacgatgggtttctgaacttgttttttcctctcttctcttggagccgaaagataagc

SEQ ID NO: 111352 - DNA, 722 bp, Setaria italica
  Intron number 1 from transcript Si003179m (locus Si003179m .g) derived from phytozome v7.0 (chr-ID scaffold_5; pos 43 087126 to 43087847)
tgatctgctctttcacggtgccgactcgcctgacggtaagtaggggtcgctaactataaataaagccgcctgctacatatatctttttttcggtatagtaaggaacgtatatactaggagattttattactgcatggcttggtaaggccgcagggtgaagcttctttctaaaattaaagctacttgaggatgttcttagacgctcccctcttcgaatcttttctagctccatccctggtctgattagcaacaatcttaaatatacttatattgcggattagggtgaaagttcagttaaaaatgtttacgaggtcagaggctcgaccccgaatggacatatttatccacaatggatctaaccaactaagctatactctattcatgagatttttggaagatgagtttttgattatatgctatggtaggatcaaataatatacttactagcaaatgtgaaatttcagttaaaaatatttacgagaggttacagactcgaacctgaatggacatatttatctacaatggacctgattaaccaactaagctgagatttttggaagatgagccttaattaacttgttgattctatatcatctttatcgtttcagaaaaaaaaactttattagctgtattcagtactttagttttgtctaatcaatgatacatgtccgtaaatttgactatgcactcacgtcaaatccgagaaggacgggagcaagcgc

SEQ ID NO: 111353 - DNA, 881 bp, Setaria italica
  Intron number 1 from transcript Si040801m (locus Si040801m .g) derived from phytozome v7.0 (chr-ID scaffold_9; pos 45 996306 to 45997186)
tcggctgtccccgccgtctccacctgcgcgcactggttcgtggccgccccccgtttccgatttttgccccccttttgctccgtccctcgcggctcccggtgtcttggcgggtgcacgtgtgtcatgtgtcggtgatgcggttggtctcgtgggctcggatctggacttgggaggagtccgattggatcgaggggaagggaatttacgtggtggcgggaggagctgtcggcgtatcgcgtgatcaggatgttaattatattggtgtttcagctgttaatgatattggtgttccaggtgataggaacatgaaatttagaggcgtcctactcgtagcgacatacttagatatgcgcatatgcttttgcatttcaagcaagcaaaacaataacaaattggaatgaaaaatgacttgtttgattattagcaaatatgtatctttacacaaattgtagaatttaacagaagagatggcattgtgttttttatcatcaattaccagggcactttttatgcatttacgtaaggttaggacaaactgcattttacatgtttattctttttgggctcatttgttgattattaggttgaatcagatgtgggagagattcagtctctgaacaggcttaaatcacttagccattctttcacctgggatcagctatttttcattctacaatgcaaccaaagaccatcgctagtcaaatttatgcaatttgtgactactttttccattgtagtttgatgagcaccgtgtttcatgcgcttatgcagttatgctctatttgtgaaatcagatgtcagccatcattcgttataagtttctttatctttgttttcatcagtcagcgcgagatcccatcttccaacatcgacttgcattc

SEQ ID NO: 111354 - DNA, 837 bp, Setaria italica
  Intron number 1 from transcript Si001685m (locus Si001685m .g) derived from phytozome v7.0 (chr-ID scaffold_5; pos 35 597665 to 35598501)
aacgacgacatcgagctgcgctccatctcctggaggtcaaacagccttccccgtcccttctctcctagcatagtgttgttttttcttcagtatagctttggcataggaatttttcgttgggttcacaattggggcccgaatctagccaaggaatccttgatacagattccttgggaagtttgtcaagactagaattacacacagacaaaatagcacaatatgacattttaccctccagactcacgaatgatgtttgggggaaacatggaggaaattctcgcagtcagtgggaaaatagtttaaatatatacgtcaccagttggtgggcagtgctgagtcaatcctggcacgattcacaattagcttaccagtactcaaatctgtacctttgaggttaatggaacaagaaaagatggctattgaaagcgaagccgtacacagatctaagatgcatgttatgtttgattgggataacaaaagctcgctacagtaaacccagtgatgtggactatgtgcgtggaacctttaagtctttcacagctaacagaaaactaccataaggtccgatttatgattacttgtacttagatgattgtttcatcaacagacctatattttaaagtgaatcattcttgtagagtaaaaatcggatttgttcttatattttaaagtgaatcattcaaatgttcatagcttaggaacttgtagagtaaaaattggatttgttcttttggatgattttgaatgtcctggctcaacagcaatattttgttttagaaaattaaaccaagcttccctcacattcaaactttggtaccattttcaggacatttgctg

SEQ ID NO: 111355 - DNA, 704 bp, Setaria italica
  Intron number 2 from transcript Si034011m (locus Si034011m .g) derived from phytozome v7.0 (chr-ID scaffold_9; pos 87 76868 to 8777571)
cttcaagattatcttgaatagcataaactcaaagggtatgtcttttttaatactactacttttgctttgacctttctgtttgttgacttgattgtttgcggttaatactgaggaacgtaatctttgtattgctcaaagcctcaaaccctgtgcaagatggctgaatacttgaaataagttacccactttaagagaaatatacaaaagcgtagcagggtgaaaacacatcgagtggtatttcccaccttggcaatcctctttatggtactgagtaatatctttgatataatttactatcagacaatcagttcctttggtgctgactttatttgattatattattcaaatcaattgaattcagtgctttaaattaagatttattccaagctttggttgtacgaagaaatgggtctaaccagtcacaatatgaccttgttgatggtagctcaacaacagacgcatgataagcttgaaaacatccacactatgagtattcaaatattagtatgtgatactggggaatttgatgtccaccacaatagttttgttttgctatacgatagattaagctatgcgccaaaagtttaacttcattatatttagtcctacagcagaacaccaaattgttggggcaggttccttatgcttatttattctgatcagtgcgcattccttttcaactgacttgtatcttttctctgtag

SEQ ID NO: 111356 - DNA, 869 bp, Setaria italica
  Intron number 1 from transcript Si000576m (locus Si000576m .g) derived from phytozome v7.0 (chr-ID scaffold_5; pos 25 524618 to 25525486)
caacgccacggcgggcgctggctcgggctcttcaggtacgacgattcaaatccatgcaccacacattattcaatggtttggctgctctgctctgctctgctacggtatgcttggaattgctcctgcctaggggatactttcctcaccttttgacgcccgagagttgcctaattcaattagatgctgctcaattttgactttatttagcagctgatcacgttattctttatgtcccgttgaaataaattgaaggaatgcctgttcaaatcatggttagtcaacctcactttgttgactgcatgtttaggaatgaataaaccaaagacgtttcactattggcatctactagaatgtactagggaatgttatcaaaaccagcaactaacaagcctgttttggattggctttgaccaaagcatttgctggttttttcaacggtatcctgaaggcattaagcaatgtctctgttgaaacaattgtttaggtggttataaactgagctagaaagaaagccaacaaagttaccacaacgtcactgcacatgtattgaatagtctagttacttttccttgaattgtctgtccattgtccaacgtgaagccctcatttcttttcatgacgaaaaaatggacagtttctcacccatgaatgcttcttgtttattttgtcactacttagtttttttctacattttcttgatttgactaaagacattaatatcatgctgctcctttcattttccctcctaagtcctaaccttaatatcatgctgctcctttcatttgctttagctctttttttttcctctgaaaattacctctctgtaatatgcaggaaacaagggtgttgtttggatattggtaggttca

SEQ ID NO: 111357 - DNA, 888 bp, Setaria italica
  Intron number 3 from transcript Si002752m (locus Si002752m .g) derived from phytozome v7.0 (chr-ID scaffold_5; pos 13 352515 to 13353402 reverse strand)
actcccccaccgatttacgagacagcgagaatccggtaaacaaataaatccacttttgaggatactacaaatggaatagatccaccgatttatcactcgtcactctactgatctttagctttcagaagggaatctagtggtcaaccgtagaaaaatcaaatcattgggtgcctttcgtatactgattcccattagtttccttttttgctgtgatgcttatatgctattcctgcattcagccatggatgcaagttgtatgcggtgaactgcatctttccagattgctgcttacagtaagcgaaaacgtgctcagcatttactgctaatcatcacaccgatatacgaacctgcaaaaatctgtctagaaatagccaccacttgtttatctgtagctagtgcgcctagcttttgcgacaagaatctatcgagtaaccgttgatttgtgtgaatcacaccgatgaatgatgatgtcttctcaaccatagatagctgttgcacatgggccattcctgttgcatctcctcacaacaaacatgtcttttaacactatacttcagagcctctctgtacatgctaattttgatgatcgtggcttgaggggagaaaaaacgggaaatgctgagttacatcagaccagactacgaggtttatttagggcaggacatgcttattttggacttacatacatttgtcaaagagtcccatgagatacgattctttggatgttgcctgtattttccattcaaggcacgtgcattctatgtgttgggattgtctctgtctttctaggcatgtcctgctaactgattttccgcaaaatgcaccgttactaaagtagatttcaagcatccacactgattatccctgtcttcttatgcagagacattt

SEQ ID NO: 111358 - DNA, 983 bp, Setaria italica
  Intron number 1 from transcript Si000149m (locus Si000149m .g) derived from phytozome v7.0 (chr-ID scaffold_5; pos 61 7331 to 618313 reverse strand)
aggtaatcttttctatattctgatggctgcatttatttcatattgactgttccatgcatctctagcagtatagcactgttttgtggccgggcatacaaggttaatcatatttctgcataagcataatattcttcttgtacagtcatctattatttgtgcaagcacacgcatcatcacaagtagacattgtgacacactgatcaatatccataggtacatttggtttgatgtgtcagcagatccattgattcgaatgcacattatttatgctatttgttttgattttctttgtgtctatcttcatttgctatatatattgtgtcttcactatgcacagccacacacacacacacacacacacacacacactgtgcacacacacaaaagtgatttttgtgagaattttaaggtgttcagtcttgcatatgtcgttgaatgagcatgatttagagatctgccttctttttttctcacttggagagttttcccaactggatttaactctaatgctccttatcaaattgatgtaggtcgaacccacagatgtaaagcataaatagggttagccctaagttgttagtactgccatgctagcttttttaaaaagcttttttggttaagattagcaacacagtatgtttacttggagtgctggttttcctttgatttgattcaagttactgaatgcagcagcatattgttcacttgttagtttgagatttcttcagaggtcagaacaaagactgtaaaatgttgctttagttgacagtgctgcacatgtctggcattatatttgatcattttagtattatagtcctctgttcagtttaataccagctaagtagaaatgaatgcaaatgtttctttctttatgtattagacactcacaaaatgagaggacacatgcatgtttggtttgtgggaaaattctcttatgcatatattgtgagtcttattaatgatttatacttttggcagggggt

SEQ ID NO: 111359 - DNA, 628 bp, Setaria italica
  Intron number 1 from transcript Si037617m (locus Si037617m .g) derived from phytozome v7.0 (chr-ID scaffold_9; pos 44 225303 to 44225930 reverse strand)
gtgcacgtcagcttctaccgcaactgtaagcgacatcctgcttcactattgccatgctctgtttgatctcatagcgttgagcggtaggacatgatcttgatgagtggctatgttcttatttccttgtccatttgaacctgaaagaccgtaactcgagatccctcgctgtatttgtattctggaagcgtatgctcgatgcccaccaagagatttagccttttactgtcgttgaggcatattaacctgcgttaaagtcagatttagtttcgtaagctgagttcttcgtcgtggtagattataagctgtacggtcgattatcatcatcaacgctgaaacttcaaaatcaagttccattatactgattcgattttacaatggttgccaactgttaggaaaaagagcagtcaaatctgcagccaccaaacatttagcgtttatcgaacagatttgcttgttaggatgttgaaccctgaactgcattcatgattaggaatctttagtggttgatgaatgaacatgaatattttgattgtatgctattgctacagagctcaatgcacatgttgctgatgcctagaatgtggttgttgtttgtcctgctcattctgacaatgtttgtgtaatgcag

SEQ ID NO: 111360 - DNA, 749 bp, Setaria italica
  Intron number 1 from transcript Si013472m (locus Si013472m .g) derived from phytozome v7.0 (chr-ID scaffold_6; pos 24 851416 to 24852164 reverse strand)
cctggtgttcctctgcttcatcagatcatctcaaggtacatttcgcctattcctgcttctgctcttcttagagacttagacgctactgaatgatctcccttcgatactttgctcagctctggttttctgaaaggatcgtagtgatcaaaggttccccctcagcgatgttggagtttgataattgacagctttctttcattctttctgcctgtatgtctgtcagccttttctgtttccgaatgtttaacttgcattttggcttcactcagaagtttgggataaagtactgtcagacttgtacagttctaaccatgcaccctggcagcagtactgtctagtgtcgaattttactatagttttcaactcaaaaatcccgctgtagcttcttagtccttaaagtggcctgtttatagcatcttcattaaaatagcgcgacaaacagaagtgttaagtaaataaacctataattctcgcacaaagaaagtaaaaataaaagaaagttggagacgggaaagaggagagggggggcacctttttttgaaactgtagggggggcacctttttggcttctgcaacaatgtataataaccagacaaacctgatgaatagttataatcagattgaggtatctggtaacagttcagagaataaagagattgaaatcttactctgcaaccaagcggcttcagagaataacctggaacacttctgcaggaagagatcatttcaccaaactgaatctccctacc

SEQ ID NO: 111361 - DNA, 872 bp, Setaria italica
  Intron number 1 from transcript Si035090m (locus Si035090m .g) derived from phytozome v7.0 (chr-ID scaffold_9; pos 53 871453 to 53872324)
ccatccgcgaggcgcaacagccccggacgctgcaggtttgtttgtgattcacgctcaccatctgtttgttctaatgctctagtgcagatatggacatacatagatgcataagcatgctttcctcaagcaattaggattgtgtaggtaatactgttgtttctgaaatggaagtttgcaatgtctcagatttgatttcttggaaattgggtgttgtgtgagtcagttcaaatcatctagtagcttcaattctgaaagacatgctgcatcctagcatattgaaataaccgaccaaaatcaccaagctaatttagtgttcagtactgagtattcagtatcctgtatccccttttagccatcaaataaagcattttctcaatgctctggttgatcattaacgttgatgaatgttcatttgcatttgcatttcttctctaatcaaactgatagttgctaccgcttgacttggtgtcttggtcacatcatgtgtgacctgaaattgtagctaatggcctaatacaaactaatctaactttaaccatgttgggggtacctgaattcagctgaaacggcattaaatatacttcatcattgacaaatgactgaaccaaatgctaagtctactttggatagtgttacacaaacaatatttgttgactagagctgattcaccttctattcactgcatagccaggaaatctctatgctagcaatcttccgcagaaatagattagaaacacatcaaaatacttggaatatctgaaacttggtgtaccactttcatctaacactacttttatcaatcagtactgattcatctcctgtttactccgtgaccaggaaatctctactgctagcaatcttcctcagaaaga

SEQ ID NO: 111362 - DNA, 329 bp, Setaria italica
  Intron number 1 from transcript Si036738m (locus Si036005m .g) derived from phytozome v7.0 (chr-ID scaffold_9; pos 56 729950 to 56730278 reverse strand)
agcacgaactcgacagggagttcttagggaaaaaggtgaggcccttttcttctccctcctcatccgtccaccattgccaaactgtccgtcgcgtagtcttagctccgattggtaagcttcaattgttgcttcttgatctgttttttgttgcttacgctggacgacgcttgatgcatacgagatgatgagttcgatgcagtttcttgatccctgcatacgatccaccagctcaggcgcatagaaattattgacttttaactcgctttgattgcgtctgttgtttcggttgcacaggggaagaagaggctgaaagggcggtgaagttagga

SEQ ID NO: 111363 - DNA, 1007 bp, Setaria italica
  Intron number 3 from transcript Si018070m (locus Si018070m .g) derived from phytozome v7.0 (chr-ID scaffold_1; pos 29 26929 to 2927935)
agaagattgagaagcgccggctgttcctcaaggtaaagatgcagccttgtatttagtttctgctactgtcagcgagtttagttgccgtcgaatcgtataggatgaatggatggtgttacactgatatgtactgtattgtcgtatcagctcaactgcagtttcgctgttgcaacttttggagtgtgaatagttcttatcaactggttttggggggaattcacggtaggatgtgggggcgcagttgaaagatgtgtagcttcaattcaagtcatttagcaagtagtttcagttcacccattgaattgctgcaatgtggatgtggtctgcttctgtctctgatttatgttgccttaggttggggttgcaaataaatttgttagagtgtgacgaaaattcatggattctttatgctgagtgcaaacatgaattgctagtgtatgctaccaaagagtgctgctagtttattcagaattatgtcaggctgtttctcaaaataaggatatgcatttgaatgtttggtggttttccttgcttacttctgtcagaaagattgtgcaccgcaattatttaatagtatatcttctattcggatgagtctcttttgttttaagaagagggctgctcactgctttctattgttctacaaacttgtggtctcaagtctcagttgtcctaactgttgtttgtgtaacatattgtatagccttcatgaaagtttatgagggtattcagtagttgaatccaaataaaacttaaagacatctggcattaacttatgccatgcttatgcaattcttactttgctttattgatcgctaagaaacaagtagcattccacatactttgatctgatctgttatgtctgtaacccaaactaattcattcaccaacaggtgttttctttatatgcctttgttcttgtatttattgtgctcacttgcatgcccttgactgttatgatctcacaccacctattgatatcacgttgcagctctttggttttgcat

SEQ ID NO: 111364 - DNA, 760 bp, Setaria italica
  Intron number 2 from transcript Si016085m (locus Si016085m .g) derived from phytozome v7.0 (chr-ID scaffold_1; pos 39 604857 to 39605616)
agatatatgtaagtggtttattggcgctgttttatttactatggtaattttcatttgaacctaattgaaatgtagacaaattgcttacccagaaactaactttttctctgcaaatttacgaacttgaatagttccggtcacattgtttaagtttccgtgtcatattgattttatggagcaccttttcattggcacattcccggattctgattttcagctgtcctaatcatatttcagcttttgtagaatttctgccgaatatgttggaatcgaataaaaacgtctgcaattgaaaatacgatcctctgtggcaaaatcatttgccgatgagaacacaataacgatgcactcatctaatggttttcagcttcaattaagtcatggcattataattatccttttgcagtttattgaactgaatgacaaacaattgtagttcttttaaatttgatatgatctatggaaataatcaatgccatttgtaatatcatgactgttcttttcgtattgttgtttctttcagtatattattactttccaattttgtgttgtcaacgtgagtatggaatgagttcttttgtgtaagattttaactacctcgctaataatcaatgatgatcttattgcaccgttgattggcatggattaatggatacatgtaatttagtctttgcattttagttctggactactttttttaacggttgtcacctttattgagacagacgtacaccggaagcatcttgattgctgttaatcc

SEQ ID NO: 111365 - DNA, 686 bp, Setaria italica
  Intron number 2 from transcript Si019091m (locus Si019091m .g) derived from phytozome v7.0 (chr-ID scaffold_1; pos 96 86496 to 9687181 reverse strand)
ttgcttctggaggctctggccttcttgattccactgtatgtccacccgcatatttgtttcatctctcattgctcattctatgtttttgagacttgatcttatcctcaacagataccttaagtgacatcatgctataatttatgattaatcaaaatctcaattaacttggtttagttgtctaggaggctttagcttttttaggcttattttttttagataaaggaacaaacaaggttccagccttttacattgttatgtagcaacctccaaaattattacatcgtagcaaacttaggcttacggtacgcttcaagcactatatgtgtgatgactggacacactttttggtagtaatgactggacgcactttttggtacataaatctttaatggtaactgtacatcaagtgaactttttggtacataaatctttaatggtaactgtacatcaagtgattcaatactacctaaagatgaaaagattggtcacaaaagttcaaccgaaatagcatcttttgtactcagctcatgaatttggtgaaacgcatatgtgattgtcaagaatttttctcccttacaaattaaattgctagtacaatcaacattacctagtaccataattactccgaagaaaaccactaacaccaaaattccaaatggtcaatacaacagggatctacaatcagc

SEQ ID NO: 111366 - DNA, 520 bp, Setaria italica
  Intron number 1 from transcript Si039713m (locus Si039713m .g) derived from phytozome v7.0 (chr-ID scaffold_9; pos 19 294702 to 19295221)
cgattggatctaatctgtttccatttagttagtacctcagtaagtacgacgtgaaaggtgaaacatgatcaatgtgctgttttgggctgtattctgtttttaattcttacaagcttttgtcaaaagatgctgaattactgcaatcaaaacctgttggcacaatgctgaaatcattttgagttttcaaaagaaattgttttaacaaaatgtttaatatcctggccactaaactattagttcatctattgataaagtaacatcttggatcgatcctttggtggccatgagtgtggtgtgatgccatggaaagttaaaaccatgttatatttttactgttacacagttttctttgacaaatagcagttatgattgttatctttttttgtgaaatacattcttgtcataattgattgcacgtgcatgaaatagaagttatgattatcatcttttgctagccattgctttcctaacccatacttgaagtttatgctcactgcagattgtctcctttgttccaggt

SEQ ID NO: 111367 - DNA, 699 bp, Setaria italica
  Intron number 1 from transcript Si037308m (locus Si037303m .g) derived from phytozome v7.0 (chr-ID scaffold_9; pos 54 501521 to 54502219 reverse strand)
ttgactggagatccatccggacgtggattgatttggtatgtgatccttcccatgagtcgcgggttcgcatgctccatccttcgctagaaatccgatccacccatccatcgtgcaattaggttcgcagtgggtaagattaatatatccaggcgtgggtggagtttatgttggaaaaaaaaaaggatgttcagctgaacctcagtggcccttcgttaagtccgcccctgccccaacttatgctcaggatcatgcacgcttcgtctccttttttgacgatttgactggattggccatgttatttttgtaatatttgtaatgctaatacatgatagtagaaagttaccactgccgcacatggcatctggaatgaactcacctgtctagtatagcacatctaggcaattgatggtataagtgatggcctccagagaagatgtctgtatctgctagcaatcatggcattacctataaattataatggacaaaattcagcgtgctagatatgaaatgaaatgactgtttttttacgatgaaataagtgctgaatactactgttatgttatttgcatcagaatctatttagacattcactttgatgtaacccaaattataagggttcaaacatttcagatcgcatcactgatcagtttaatgattgccatgtaaccttctctctatcagtgcagatttctctataca

SEQ ID NO: 111368 - DNA, 817 bp, Setaria italica
  Intron number 2 from transcript Si015862m (locus Si015942m .g) derived from phytozome v7.0 (chr-ID scaffold_6; pos 14 519608 to 14520424 reverse strand)
ggcgaccgggtgctggtcggcgacgtcccttgggagtaagtctgaacgggatcaaaatcagctagcatgtctgtccgcatcagtcacgatgtcgatttcatggaattctaggctgatggtcatagtcaaagtaatatgacagtatcttagttgccatcattttcgttgtgttttactcattactcccagagataaaaggatgagtgttctgtgcaacaaatcagtctgtacccaacacattttttgaaggcaatgtttattgttttcagtcacaccaatacaattacggtgactgcatatcaatttgtattgtcaaatcaagcctgtcattatcctgaatccttcgcacttgataaatcacctgccacagtttgggcactagacatttaattatggtaaatagccgttgtcctgatgcctggttgtagtaaatcacttcataactatcgtccatatactgttgaattatgtaaaattctaccattttgcattgctaaatcgtgtcttcaagcatcattttgcttgcttgtggtaaatcacctgtcacattatcattgctagatgtttatttatagtaatcacaattatcgtaaatcggttcctcaatgctataatttgtgtaaattgggcacttcactgtagtaagtatgaaacaacacgtgctatcgcttgcattctcgtaaataaccctctgtccattttttttaactgtgtccagaatatacaagaaaacatatagcacatgctagtttagtttctcgtaagtgaatcactgattgcagattagtagcgtgaggaattgggagttacgattgca

SEQ ID NO: 111369 - DNA, 834 bp, Setaria italica
  Intron number 1 from transcript Si013190m (locus Si013190m .g) derived from phytozome v7.0 (chr-ID scaffold_6; pos 15 80466 to 1581299 reverse strand)
ttctggcacgagatctccaccagcgtctcctccatgtgagttccccccccctcctctcctcctcccctcgccccgcgccttctctctgattgcccgctctactgccggcggcgggcggtgggtggcgcgggccgccgtcgccgcgcgggtcgtttggtttaggcggatttcggttaggttagggttcgagaggagagaccgggctagatggcgtcagcggcgccgcgtcgggttggattccgagcctgtttcagggaaccctaggttcgatctgttcggatggaggtttcgggagggcttaatgtgctgtagttggtaactagaaacctagaattcacagcgccaaggtgcgccctttcgtagttgctatgattcatgcgatccaattcatggatggcattgtgaaaaaaaaagttgaactttagcactagagtttctcgtttgattatgctgacaaatctcaagaaaaattgtgtttgaactgtgatggtagggtgtgaattaaatgttactgtctaggtttttgaagagttgcagaacttgtcactaaataatatggagtactgtttcatgtgtttactggttgctgtgaattctccattggcttactcagttgctcttcatttcaaatagaagctagagaattaaagagttgcaaaacttgtcactgaatagtacagtttcattgtttactgggttactgtgaattttcattggcttatttcttgctttttgtttcaaatagaagttagatagttagttacagaactgtaaaacttgtcaccgaacgggagctctaatgtggtaatctgtctttttgcagtgagagtttgt

SEQ ID NO: 111370 - DNA, 849 bp, Setaria italica
  Intron number 3 from transcript Si016757m (locus Si016757m .g) derived from phytozome v7.0 (chr-ID scaffold_1; pos 14 762325 to 14763173)
gaggagctcgcggtatgcgctctcgtctctctagattcctgtatgcaaagcagcatggttaatctgtgtaaccgccagactgccagttgagagcgaacacactagcagccactagcgttcatgtgttaaggtggttcgctgttctgagcgaactagaaaagctggttccaggtgtttaggcaactttggacaactgaatttctaaaaggtctaattttttctgcatactttacttattttagcttacattggaattttttctgccattacttatattagctcaggtgtacatacacagagagcacagtctgcatttgaaattgtctcacccttccccaaactgattcttaaccagcaaagctgaatatttgttacagtcttttgtcttactgcaaaatagtaaattttagatctgaccaatatgtgaaacaaaaaaagggaccttttgagttattagggagcatctttgagttatgtctgaatactggaacatgaacagtgcaatctagtggtgacatcacatcgaatgtaccaaccgtgaatgagtgatgttcacctgtttcactgtgatcataggagacttaatgcttcaatgctgtatatacatttgcaatctgtcatgttctttcatgtttgtccttgattattaaacatgaaactcaagagtttaactggtttattttggaatattgtatttgacaatctcaaatatctgcatacagaagtagttatgctcttctttgattttgttagtattgcttgcatttgttaaaagcgaagcatttgcatgctttaacacgtttcttcgatgcagataagaatacaagctattcgggggtttccacttct

SEQ ID NO: 111371 - DNA, 474 bp, Setaria italica
  Intron number 2 from transcript Si018914m (locus Si018863m .g) derived from phytozome v7.0 (chr-ID scaffold_1; pos 63 17702 to 6318175 reverse strand)
gctgctgctgagtggggcttcaagttattgcagaggtatgttcaccttccctgcttgatacaaccttcttttctctggatttggtggagagcagtgaaatagatgaatgtttgataggtggtgatggatttggtttggttagtcctttgtgctgtttgaataatgtgtaagctgaataatagctttttctttttgctgaatgagacacagtgttaacccaatcatcagtctctggttttagtttttgttcgctgttaccctattttctatcgggggttcaggacataacgttaaaacaaattgagtttacctccggtatcctgaagttatcaaataaaggaataccttatgttattgacatttgttttgcaatcatttaaatatttgtgaggtacagttagtgcttattggtgcctttgttgggtattcactaacatattactgcgcctttttggcctaggtcattgctggagc

SEQ ID NO: 111372 - DNA, 1003 bp, Setaria italica
  Intron number 1 from transcript Si017735m (locus Si017735m .g) derived from phytozome v7.0 (chr-ID scaffold_1; pos 30 820525 to 30821527 reverse strand)
cgccgggctcttcgccgccgacgagcaccaaccaggtatgcccgccccccctctcttctctttctgctgttggaaacggagcgccccgatcccctaaacctgtttgtattcggatctggacccaattacaggtattatacctactaagtacgattttcttttcgaaggtgtacatgtgtgcacccatttctgatacttggtctgcccctgggttcaactgaaccccatgcctccacgctgctactccgattcatcaacatgccgttagttttcaaaggctataaaattgcagatctagcaagagcagatagcggggtgtttatggatagttggcactgatatctatcgataccatttgttaagcttgtctagtaatttgatgatgtttctcctatcatctctgatcctcactgcttgatacttacacattacgtgtatttctgtaattctttgagtgtgttctttaaaatttccctttttgcattcactaagggggtgtttggatacgaggtgttaaactttaacagtgtcacatcggatgttcggatgctaattagaagaactaaatatgagctaattataaaactaattgcagaaccctgtgctaattcgcgagacgaatctattaagcctaattaatccatcattagcaaatggttactgtagcaccacattgtcaaatcatggactaattaggcttaatagattcgtctcgcgaattacactccatctatgcaattagttttgtaattagcctatatttaatactcttaattagcatccaaacatccgatgtgacgggtgttaaactttaacacttggttgccaaacaggccctaatttatggagaagttctgttaagtccatagttttcatgtatttcattgtatttgatgccacctgttcatttatgagtgcaaatgtcagcatgttgtcaaactgactttaaattgcaattcgtgtggaaggtggattgtggatctgatacttagaaaattgggtt

SEQ ID NO: 111373 - DNA, 1025 bp, Setaria italica
  Intron number 1 from transcript Si013414m (locus Si013414m .g) derived from phytozome v7.0 (chr-ID scaffold_6; pos 35 405995 to 35407019 reverse strand)
ggtggcagctccccgcgcacacgctccaggtgcagtgcaatccccctcccctcctcttccatcttccttgggaattttaccgcaggaattgtctgtctcaaaaaaaaaaacaatccaacttattcagtctcttcagtttcgagattttatttgctagtggttttcactcacccgcgtaatccgtcacaaattcagttcttttgtgctacggagagagatacgcctaatgcggtgttatgaattttacatacatgcggggtgcgatactcaaagaatgctgctggctgctgctattgtttccccaccaagaagatgaagtcatgaacagtgattcactgattctggcctctatcgttaggactttgacttctactgaaacaactggtcttcagatatagtagtagcagagagcaagctactgttagctgtaatggcctgtttacgtcgtcgttagtttggagattatgctgttgcctgttgcctcaacaaggcctaggtcatgtcttacccggtgacggtgaactttttgtatattcaacgattatggaaccattgtgctctgatgggcaactctatatctacagttttatacaattattaaaaattctcaatgctgcgattgcatttatgctgcttacaaatcttcagactgttaattttccaagcagcaacctggcagaaaataaaacgaggaatggaattactaatttattccccaaaggccttatcatcatgcaacaaagttacaactatgcacatatgttgaatagcctaccgtgttcccttaaattaactatgtactgcccattcaaaaaaaaaattaatcttgcacagttactttcacctctacagaaacattatgttctctgcccacctttttttttgggatcattgtactctgataaaaaaagatcccaaagctgtccaagatattccaatttcattttttcaacagtggaatgacaaatttcctaatatatcatggaacagattgttgcaataacagttttcttccttctggtggt

SEQ ID NO: 111374 - DNA, 842 bp, Setaria italica
  Intron number 1 from transcript Si034781m (locus Si034781m .g) derived from phytozome v7.0 (chr-ID scaffold_9; pos 12 184406 to 12185247)
agctcgagctaaaaaaggaggcgcccaaggagagggtatgccatgcctgccccgccccgccatacctgccttccatgattccatctgctgttatcgttggtgatatgcatgctgttagtttgtgtcaggacccaacaatagtatacattcagtattacagccgaattcatcctccagttggtttgatttcttggtgcaaatagatgcttccctagattggtagttggtttgcaatgtgaatatggcaatcgctatcttcagtttgggttcgacaatttcatcagattcattggtgaataaattttgttgtgcagttttggatagcaccaactcagatgtggactcagggcacacaaatgtagacagtgtatcattcagtagatggcctgctatggttggtgtctgtcttgatagtttcagttctaagttttgtcatctgttacaaaaagaaaaagaaaagaaaaaactagtggaaaccaagactgctctctttataaatgtattttggtttgtgaaattttgaccattgttttagtggttgggtctgcatggtactgagtactgtaggatggcgctaaatgtattgcctgtaaaacttttgcattcactctgttaggaccatgaacttgccttatgctggattgagcaatgatcaaatattgccaccctttgcgaggctagggagatgaattctgtgtggtttcttcctttaaggttcatttatgttctttgttcaatattacagataaatatatttctttttccttgtggttattgaacgatgatacacttcatgcgctccttttttcaggctcggaagaggaagctcggattgcttgagg

SEQ ID NO: 111375 - DNA, 886 bp, Setaria italica
  Intron number 1 from transcript Si034672m (locus Si034672m .g) derived from phytozome v7.0 (chr-ID scaffold_9; pos 51 625881 to 51626766 reverse strand)
cggcgcggtcccggcagctggatccgataaaggtgagacgggatctcttggtgtgatatcgtgctcttcttttctttgtttggtggtagtgtagtgtttgttctgttgctagttgttactcacgaggtcgcttttccctcctctgttgggttgggccacaaaacggtacgatccatccaacgcatttgtggtattgctttgatttacttgtttgccaatcggttctcacgtcttcaaggcattgagccaatgatatgcctgttgccaaaatgctgatctccatttgtagatggtggtgtgatcatcccaagttgctgaagcctagttgcttctgacttgtatctgttttaataaaagaaaaacaaatgtggaggccttaaaaggcaagcttttagcgccctgtgatatgtagttctgtaccaattgccaattggggaggccctaaagttactgataatgttatccagaaatagcttttcagtgtaagatatgtaggggcacgtgcaaaattatgacagctgttcatctatgtggaaactgttctttctgagcatttcatagttctgatcattctgtaatggggtgggtttgtgtgttcttctgttggcttggagttgtgatttatgtaaaggtggcatatttggatcttacaataaagcatttgcatgggatggtcaacttctgcttaaactgtagccgttcccttcatgatagtacagttaccattttattttactcatttaatgcattatgttccctttttgcatgtaccattgagaaaaagtggtaaattcatgagtaattagtttttttaataaaataccctctcatgtgcccttgactctttctaggacgtgatattcacaatcacaaggaaggaaaggtg

SEQ ID NO: 111376 - DNA, 846 bp, Setaria italica
  Intron number 1 from transcript Si017188m (locus Si017188m .g) derived from phytozome v7.0 (chr-ID scaffold_1; pos 11 07314 to 1108159 reverse strand)
gacccggagaacaccacgttgatcatcattgacaagtgaggacttaaaatcttggttaatgactgcaatgattgttcggtgtccttacttccgattagtccatggttggagtccgtatcataatttaagaaaccaattttgctgcatttcgtagaaaagatcaagttaacaaattgctgtattgtttaagtcctcagtgcagacacgtctatcaaattttcaatcagaatttaaagaaccaattttgcaaagtaagcacaggcattctggcgtgtcaatatttcaaaagttaatttaacttgaaaatttgatctgtttgggggatcaaagattgtcattaaaaatcctcttgattatcgatcaggatgtgcatatgtctcatttatacatgctctttgcttatggaaaattggattgccacagcacatggttgatgcttctgaaccgtgtcaaacacaataattctgtaatatattgacaaattattaagattctgtaatatattgacaaattattaagattctgtaatatattgacaaattattaagattttgcatatagaaaagagcataagaaagttatgagagcataccagaaatgatgccttacatctagataacctagcatttcttgtctactgcgttaatgcagtattctagatagctcctgaacacactgacttattggattgtacttaaaggctggacttgtgagttacatgcttgtgttttcacattaaaattgcaaatacttgttagcttgtcattattctgtcaggactacaatgcacacaattttttcttcttctgaacatttacatgaaaaacattgtggaagtcagatttg

SEQ ID NO: 111377 - DNA, 1067 bp, Setaria italica
  Intron number 1 from transcript Si037375m (locus Si037375m .g) derived from phytozome v7.0 (chr-ID scaffold_9; pos 19 128217 to 19129283)
gccaggcacccgtccggcatcgtccccgccctccagtgagtcctgttgtgtcacccacggtttgcccacctcgaacgatctaaaacctgaacgcgcggcgcggtagctcatgaatctgacggggttgatcgggctgctgctcggataaaacctgaattcgcggctcctgcatcggacggggtagacacaaagatccctgcagtcggtttttaacgatccagacggagtcggtagatccgggcagccggttcttggctgaccctgttgcgggtttcgccggccgggacggctttgatttgggtaggatggctttgatctggaaggagggagggcgcgtgggagatttgtggaaccgattggggtctttatctattgggatgtcaagttgggttcggatccatctatatatgtatatttcttgcccaagggtctggacctaaatatattccccccctggtagtatatgggtcgaatcttgagatggtgtcctagtgaatctacctgaagcagtgaagatgcaaagatctttgattcccggatacgatttgaattcttggggaactatcattttaatttttgcggtaattgatggaactataaaggagttgattgcagattaacataataaattatcctctaactggaaaatattgaaggacctttagtgcctctctgtcaggtctttatactagtgattctaaaggggaatagagtcagtatctaacagcattgtcttctccatcgtttgtttttcttgtgtaacgccgttacggggtttggtaatatataaggagtggacacatggatacccaagttacttcttcctttcgtgttcttccttttccttaggcatagaaccctagctacttccctgcctttatctactacaatattttatactgcttatatatttcagtcctgttagttcgggtcttgacactctaccccattgcgagtgagtgactgacagatgactagtgcctctgcccaattttagatgagatctgaccaaccttttattcgatatcaaaggaacattgtctcaacagtcaatttggactgtcagt

SEQ ID NO: 111378 - DNA, 818 bp, Setaria italica
  Intron number 1 from transcript Si018663m (locus Si018663m .g) derived from phytozome v7.0 (chr-ID scaffold_1; pos 40 838028 to 40838845 reverse strand)
ccctccttcaccgccgacgaccgcgaggagctccggttcgcccctaaatcttcttcgccttccttttgtttttttcctccacggctagtccagatttgttaaatcttatccggtcctcaacataaaaggaaggaatcaaatcatctttgttcaaacttctgatcaccggtgattggtggataaattgatccatgtgttgagttcctaacgccttcgtcgtagaatgcgtcggtagtttcagtagagttgtgtcctattcatgggctttaggaagtcatggattgagacgggctcccaaaaactgattaaacccaacaacctcctcttggtgaacaattcaggcaattgacttaaccaaatccagacattagaggaaacaaaaacgaactgttgggtgctagcaagtatttttgtttccttcgatgtctgaacttgggatcaactgatggatggagttgactgctctgcttcttagcagagaaaagaaattggatacacatagattaggttgtgcagccctgtttacgcggtccattctcctcaatcaatggcttatttgtggtgaagttaagccaggtgtgatcttgttcttccacacctagcaacttctttattatatgagcattttcatggctaccattcatgtctttagctttcgaaaagagcaacaatgagcaattatcttttgctggtttatgttaacttaagcttctgcttcgcatcttttcttatgcattttttgtacatttatttatttgtttgtttattttgctgcatcaaccctcaggaggcaatttgaacaagcaaacctagaagca

SEQ ID NO: 111379 - DNA, 736 bp, Setaria italica
  Intron number 1 from transcript Si036578m (locus Si034980m .g) derived from phytozome v7.0 (chr-ID scaffold_9; pos 10 77202 to 1077937 reverse strand)
catttgtgagctccttcgtcagtggtttcttcttgttcttccaatcttgttttgtgaacgattaaatatacagccgtatttgggtgttttcttgatatcgtttgtcaatattagaaaaattgaacattatttctgctcaaattattgtgccctttgtagttagatctgatgcttctgtagtaatttacagattttgtttatcagattcagatagtccaagcatgctttatcccacaagtcctctgtttctgtttgcataactccaggattaaactaccatttcaaagcttgagaaatgacgagcctgttacttagtttgcatgttgggtcaaaatttcctagtcggcttgcatttgatagcctagatgaccatatttcattcatcaacccagatgatttgtcaggtgctacccccttcgtattcaaacacaaaataatgtgggctgaagtaataatttggtatggatggcatcacagttttcccgtacataactctagcatgcatagtattcacccaaccaagatgtgtcaggattggaaaatttgaaaattgtccatggggtaaaatgtagaaggtgcagtaagggatcaaatgctttacaatgggcaatgagatactatgctacgaacttgcagctatgtgattggatttttttgttctggatgagaaagaaagctactctatttattcccactagatttctgctctaatgtaatatccttctgtagggtcttg

SEQ ID NO: 111380 - DNA, 542 bp, Setaria italica
  Intron number 2 from transcript Si013226m (locus Si013226m .g) derived from phytozome v7.0 (chr-ID scaffold_6; pos 20 24525 to 2025066)
gctttggtcttcggcgcaaaagaaggtccaaagatgtatggcactcctttcctaaagttctttgcacaaattctgcttaaaatatccccttgtggtactgactgcatggagaaaacaagtatagttttcagagatcttacagaaatgaagtatatgctattagatcaaagttctgttggagttcaatggagaaaacaagcattatttatggtttgtgactggtgcttccgtttttgggttttcccccatggcaatcgcaccagattagcatttcgatacttcgaaaatttctgagaactgaatgctgttgaatcaagtgtattccctttcattgctagcttcatttgaggatatattagctgtttcactggaaaacagttattatgtggattaacagcaattgatgtatcatatgttgtgtccaatgcagacgatttgttttttagctatcatatttgttagcattaacaaatcggtaatttttcttgttctctgtcatttcatcagggcaagaaaaggggaagaaagaaaggaacaaagaa

SEQ ID NO: 111381 - DNA, 630 bp, Setaria italica
  Intron number 2 from transcript Si035041m (locus Si035041m .g) derived from phytozome v7.0 (chr-ID scaffold_9; pos 35 423736 to 35424365)
ggcggcttcaggcatcaagattttaacaattacatgtatgtatctttcccgatcatattgcattgtaccactcaatatttctcttcacagcaaatttaatttgtcgctatctatctatctatctatctatctatctatctatctatctagtaatatgaaggatcaaaatgaattagttcatgtctgcaaaaggcagaggagattctactcatttatgtaggtttgcagaactgcaaccagaaagatacatcttaaccttacatactgtaacctggaactagtcaccattcctgcactggatatcatattctggtactgtattatttcaggatccagttgagcaacctgcagcctctagtaaataacattttgattattgtgaagtttctagccagtccaactggtgatagcatcatgatcctctggattatgtgattgcacacgaaacacatgctagacaaggaattagatttgattacatccatgcaagacctggttggtttatccttttgcccttgctgtctatatttccatttctgaaaaaaataaaattggaacttcgctaatatggttttcatttggttttcttctctagttggtggctggtttgcttcactcgcggtcgcaggg

SEQ ID NO: 111382 - DNA, 678 bp, Setaria italica
  Intron number 1 from transcript Si016522m (locus Si016522m .g) derived from phytozome v7.0 (chr-ID scaffold_1; pos 40 217555 to 40218232)
aggtgctcgacttcgagcgcaccaacagcgacctggtacgcgctacatcatttcctcccgactgcttccgtctcattcactgaacgatgctgcgtcgccgaatgagcatggcatcgatttaacggggtacatatcatatatgtgtgcgtgcactggattatctgcggacgcatgaactggtagtggtcggaaaccgcatggcattgttgccctccacgcacattttgattttcctgtttggagctatatattttgatcagtgatgttcagaagaatgactcgggtggattccttgttttttttggtgaagataatgatcctgtgtattatagctgaaaaatgaaaatgatactgattccacaacatatttgccccctcgcacattttgattttgattttgggaactatttggaccagtggtgttcagaagaatggcttgggtgaattcgtttttctgaagaaaatgatcctacgtatcatatatagctgagaatggcactgaccctgcaaataatgaaataagtgaatatttatttggtggatgctggttaaatctgaaatgtaagggtgtcgatagtttgcatattcttacagttgcacgtcattgcattttttactgtcttggatctctttctagtgtctgaataactaattgaatattcaacgcagaacaacatc

SEQ ID NO: 111383 - DNA, 846 bp, Setaria italica
  Intron number 3 from transcript Si036653m (locus Si036653m .g) derived from phytozome v7.0 (chr-ID scaffold_9; pos 58 461788 to 58462633)
gctcccacgggattgttaggtggccatatcgaaaggtgaacattttcctacacctcgtgcttcactttatactatcccattgcattataccatgctcttaagttatgataaacataccctctctctgggcagtaacaagagtcaagaggaaaacgctatttgcctgtaatttttttggtgcacttttctacttgcactacatgcgttgcccatatatatgtaccgtcccaatatgcaattggcaagttctggatctggattaaccagctttctccaacaatattaacagctgatctgtcttcacaaaagcactaccctttaatttatctttaccaaaccccaatccaagtatcttcaccaagtccctccattccatcctacctgtatacgatcctagaagagcaattagttgagataaatttaaggagctagcaggtgctcaggagtcagagccctaagccaactcttccacttctcaaaaaaatcttcctgtttgaggcaaccaaggattccacttctcagtcatggttgacaagtgtttgatctctatttctgaaacatatgtggcacgtgcatagaacaacaccatacccgttcctcatgtacaagattcactgccgcatatgatagtctcatctgaggataagttgaaatcccatgtacattaatgtgtaacttctctacaaaaatttgtctcgctccttacaacttttaataagtattaagggatatctcctaacattgttttgtttgtgtttcggactccgtcttgtcatttgtaaatttacttgaaaaatcatcatacttgcagcttgtttctgggaaagctggtgacgacacaaaagg

SEQ ID NO: 111384 - DNA, 455 bp, Setaria italica
  Intron number 3 from transcript Si016731m (locus Si016362m .g) derived from phytozome v7.0 (chr-ID scaffold_1; pos 95 75297 to 9575751)
tgtcgatcctccagttccaagaaaattaagatcaggtaccaattaaccactgtatttcttcttttacatgactggagaaaagggattttgccttccttatctgtctttgtttatttacaagtatcaacgacaaaaaatactattacttttggttgaacgaattttgaagtttaagtgaacacacattgttaatatgttaattgctttctaccatgtattgtcaggcagggaataattactagtgattacctaaacttaacctaggaggttatgtgttcgtggtacttaaatattcgactaatgtctctttcaatgtgttatggtgcaattggttgcaaactgtgacaatgccatgcgtagtttcatttggggtttttaagctcaaagataatatttcaacttttaccctcctactttcagccataaagaagcaagtcggtcgatttgtttctgca

SEQ ID NO: 111385 - DNA, 775 bp, Setaria italica
  Intron number 1 from transcript Si016153m (locus Si016153m .g) derived from phytozome v7.0 (chr-ID scaffold_1; pos 37 367312 to 37368086)
cttatttgtcacagacaaagttccttttgtttcaggtttgtttcctgtacaatacacctttcttggagattttcactgcattttttttaggttctaccttcttaatcctctgaaagatacataactaagtgatgcaagcataactgactacaagaatgagttattcttatgtctttcttatcttatacatcttcatattttctttgtataagtctataaattgtgaaccttttcatttaggcaaacttttcctttttatggctatatctttttagcatactaggcaatccagtcacataagttttttttatcctctgaaagatacagaaataattgatgcaagcattactgactacaagaatgggttatttcttactaatgtctttcttgtcttttctttttttttcgatcttctttgtattttgtctatggtgcacctttttcatttcggcaaccttttctttttatggctctgtcctttctagtatactgggaaatccagtcacataagattatgttaaatgactttagcatactttttagtttagtgaaatggaaatgacatgttggctataaataatttccaatatgacatgagtttagcatatttctaatttctaacattatacccatccaatcagtgatccaccacagtagtcagttatcaattttcagctacttagaaatgctgctatttggtgaaagttttgagctttagagttcagataaactcaaaactttgtaatgtttcaggttcaggcagctcctaaaattt

SEQ ID NO: 111386 - DNA, 892 bp, Setaria italica
  Intron number 1 from transcript Si036300m (locus Si036300m .g) derived from phytozome v7.0 (chr-ID scaffold_9; pos 11 941608 to 11942499)
agaagtacatctacaccatcgacgacgattgcttcgtatgcactcttctctcttctcttactgttctcgtttaattctcgttgaattgacgcttggatccgatcgaaaggcgggatcttggcgccggatctggggccaattcgctcgaattcgcccagatccggccggatcagatctggatctcggcacgcgcggtcaattccgttgatccgtagcttgggtggtggtttggcattgcggatctcgatccgtgacatcatgctgtgctcagtaactgtagtggcttcgttccgagggaacagagccagcagccacccctcctctgcccgtggttgttatgattttgccgcttagtactggtagctagtgcctttgtcgttagaggggtccttttcatttggtcaggggcccttgtttatgtgatcccgtcgcggatcacaacttggcatgcattagccaaaacttattgtaatgctctgctgtcattggatctagtactaggatactcgaatcagatctgatccgagcagtaagcacaattcaggtcaacttaggttagctctttataattcacacctgggtgaaatttttttcaccttttaccaggttcaactcttagacattgtttgaaattttcacctttcaccttgtaagatccacaccactagatcataatgttgagggtggaactcaacatcgtgatctgtctgaaacattggcagtaatatcgagcaatgcactcaaattgcgagtttttgtcatcctataagtagcaacatcgtgattttacaacaagcaacataattgcacttatgctattttgtcacattaaccatatgtctttgtttgtcattcaggttgccaaggacccatcgggcaaggacatcaacgc

SEQ ID NO: 111387 - DNA, 817 bp, Setaria italica
  Intron number 1 from transcript Si035233m (locus Si035233m .g) derived from phytozome v7.0 (chr-ID scaffold_9; pos 13 896128 to 13896944 reverse strand)
gaccaaaccctcgaccacttcaaccccacggtatccactgcgaatcgatgcgttctctccgaatttatgttgaaggtcgttttacgggacttggggggactattgggatcgtacgaaggtctctcctatctgggactgtaggccggtagcagagcaccgtaccagtacgagaacgttccaaattagggaaccttcagagaatttctgctggcacatcacagtgtacagctttgattttttttttcaaattgaaatgctaaaaccttcctagattttgtgaatcatcttgaatgccttcgattataccattttttcttgctcacgtgcacgtcatgccaccttagaattagagtttagaacaaccaatggatcttcctttccttgtacgtgatgatgtattaatcgataagtgttgggataagatgcacaatcttatctatttcatgctttttcttaaagcattatgtgggttctctgatctgtgaaatttgtgagtagagatgtacttgctatacgaattgaattttagtccacctttttacctatcacatttttatccaatgaagcattaattactgggagactcttgtctgctgcaaagcacgtggttattttgcaattccctgtttctcagctgattcagtttcgagtcacaatgtttcatgttgtgaagctttgattgtaacctggtattgctatctcagcagtattttacccagaagaaaacacggatgttgtttgttgtatccatggaatggaccagggatttatatgcttttttatgtgcaggaccatcggcaattcaagcagcgttact

SEQ ID NO: 111388 - DNA, 1015 bp, Setaria italica
  Intron number 3 from transcript Si040047m (locus Si040047m .g) derived from phytozome v7.0 (chr-ID scaffold_9; pos 94 06810 to 9407824)
cttccggtagcccgctcgggcggtggcgaggcggggtagagggtggggcgcaaccggtggcggcgcgggatggaaagccgcccgtgtcacccgcctatactcctagcaaagagtttgactgctgcaaacttctgaccagccctatacagaggcaattcgctagagaatctagcggcactcgcaatcaaattgtgaatcaaaccaagagtcacatttttggaaatgtttattaaaggtgagggaagatttttcgggatatggtaccttcaagataaaagatggatcacaaaccagattttgagaggatacttaagtggctctaacctttgaaagagcaattttctggattgtataacattgtctataatcccataaaatagtggcaaatgtgataaatcaaatggcattgaatatcttttttcggagagcgttagggataaactagtagcttagcataacctagtagctaaaattactatttatcggctttctaatcggagggacatttttacatgggacctacatagtcgcggctattttacagtacggtctatgtatcaatatcttttaaaccaggtaccccctccatcaataaattcatacggaagctggagatttcactaaaaaataaagattttcctttggtacctccagcgaggtgtgattttaacaaaggataatttagcaaagcgaagatggtctgggagtaaaaattttatttcagcaattgtaatgaaacaattaaacatctcttttttgactgtcagcatgctaagattatttggaggattgttcatatacctactagattaactgcatctaaatcagtatctcatgtgcttcgaaactggttaaatgtcataagaaagaaagaaaaaactactgatttttgtgagggtcgtagcttttatgtaggctatttggtgtacgcgtaacaatttagtttttgagaaaaacggtttatctcttgctgtttttagggagtacattggttgcgattttggtctctattgca

SEQ ID NO: 111389 - DNA, 846 bp, Setaria italica
  Intron number 1 from transcript Si018493m (locus Si018493m .g) derived from phytozome v7.0 (chr-ID scaffold_1; pos 14 015435 to 14016280 reverse strand)
gaagggtggaaactctgagttcggaggtcaaaaaggtatgttcagagcctcttacacgtgcccttggatttgcattttacaactcttacttgtgcatatgatcattgttaactgttgttacgggagcattagagatgctaaaatgtttgagaactatttggaaaagtagaaaatcatcttcatgagtttgatggtggtgattgtcttaaaaagcagccaaatattgtggtttgttggagctaggtacaaaagttatccggtacacatcatggaagcgaaagaaaatcctaggatttttccactgagttctgcaatgtactatgaaagggaaatgcttattccttccatatggccagttttcaatcttctttccctccatgccgttgctatcatctctgtctgtgtattccattttctctcttcatttcacccctggaaaaatcgattacgttatccttgccatgagttcctacattttgatccttaattgaccatggagttgttcccagtaatactaaaaaaagtatgaccctctacctatcttattcacagacccctacatcaaattcattgcaatgtaaagcacaacctaattactggaaattggcagctcaaatgacatggaaaactcacacgaaatatgtcaattgattgccatactcttgacaatccagaaaataacagtttttttctcttgaaacaactgcttgacattaaacagacatacagcactactgattgaactcattgttcttttgtgccactagacttcatgaagatatcgtataaaatagaatactattttaattttggaacttcccagatagaggatataattgcggagca

SEQ ID NO: 111390 - DNA, 781 bp, Setaria italica
  Intron number 3 from transcript Si037758m (locus Si037758m .g) derived from phytozome v7.0 (chr-ID scaffold_9; pos 35 335732 to 35336512)
cgcacctcaaggtacattcagactaagctagtgaccatgctttcttcatcaattgcagcaacacttctagaatgctgttttgacttgtatggactgccatgtactgtgaaccaaaccaaactgaacactgcgatctgcaatccttagaatttgccccccatgaaactaaatcgtcattttactgaagcagaaccttttagcgagtgctctagattttcaattccagctagtagagtgcctcgttaaacaatgtaagccctgctctcggataggtattctgtacaggataatttgaaaaatagccatattcccgtatttgatggaatcatgggatatatatttgccctagtacatactgcagtatcattggtttctagtgaaatcaagttaagcattccaggaaatggctttgccttgggccctgtccctgcatgcaaattagaaacaacaacctgcaaaaatgttgagaaagttaatctacttatgcttgcattcttctttctcttgtagactgtttaaattagaatcatgctcatttccagtctttcgagattcttctttcctgtagtaaaaatcatgaaaaaaaatccacaatatcttgacacgtccatgtaggactggctatcatattttacagatagatagtgttgcctattttacacgtccatgtaggctttcaccagtgatgcatttgtacattgtaacattacttgtatttgatattcttatgaattatggcattgcagtctaagcaagcaaaacgaagacttcggaagcctgc

SEQ ID NO: 111391 - DNA, 834 bp, Setaria italica
  Intron number 2 from transcript Si040178m (locus Si040178m .g) derived from phytozome v7.0 (chr-ID scaffold_9; pos 51 768295 to 51769128)
ggaagccgaaaactggagcatacaactggacttgagtagtactctattctgagatgttatcgtttatccttatataaatacatttacttatatttgcgtttccatataaatttagtttattcattcatttgtgtagatgaccatttaatattgttttaaagtcatatatgaaactttgcaaagaaaaagatctctgcaagcttggtgagattctaggatggtacaaattgatgttgaaatctatagaaaactaacatttccatctgctttgatttactcatactgatgagctttgcgttttgtattatactagtatttcatccgggaacacttcaagcttttcttgacctggtttttagttgtatttgattggatattccttgtttttcttttctttaattaatatgaatattttacaaataaaatccttttgcttgattcctgaaagctcaactttattaagtaccgaactgttcacataggtatgttaaaattgtttgcagaacctttattgtgttataccatactgaaatcttgttttatgtgatctgaatatatgaatgttggccactaatattacaatagcttcaggaaattgtttctaatcttctccaaagaactgttgcttgtgagaccctaagttctgtttgtgattactcatcactagattcaatgcgcctttcttcaatacaaagtctgcaaaaaggtactcgttcagcttcagtatttaggaaagctgaaagtgaaatcaactgtatctcttcaattagcaaggtactgatattgttttctctctcaggttctttgataaggctgcaattgtgacaacctctg

SEQ ID NO: 111392 - DNA, 1022 bp, Setaria italica
  Intron number 1 from transcript Si017920m (locus Si017870m .g) derived from phytozome v7.0 (chr-ID scaffold_1; pos 58 69507 to 5870528 reverse strand)
actgcctcaagatacaccggctcgtcgatttctcggtaagcctcgaggccctcaactgtcggctcaattttgctcccctttaatccggggcaaggttatctaaccgttccggtcccatccgatccccgcagcaggccctttaccgcgcttgaattagatcagtagttctcaggaagttgtgcctggcaaagttcgtcgtcttgtcaactgtcttcttgttcgtatgtgctagcaatctagcccctttgcgcgctaggagtggtaaaagatgcgtctttttagtagttactggaaggctgctaggttagcagccgtcactgtctattgctaaagtaacctgttcaattttcgttcaagttgggcgctatgcggaaagccgaatcaatatactgtaccatgccgctatgccagtgagtattaggaccttgaagtttgctttgcgcctttacccagacacggagtactcccttcgttccaaattgtaggttgttttttgacttttctagtattactatgcacctagacatacactatatctagatgcataataatatccatgaattaaaaaagctaaaacaacctacaatttggaacggagggagtacatggttatcaattctattggacttttattccaaaaaattccactggacttatagctgactatatcttggatataatttttctacatccataattggttgtcatcatgttcacgagcattttgcaaacatgttatctccttactgtgagtgttaattctttggtgtgatgttgtgtcttcttagcctcagtcaaggcaaggactgaccaagacttacactgatattgtctctcctttcttggttgtcacactgatcacaagtgtgagtgcaattatttttgtagccgtgatttatgctcaagacttcgagtgcctgcttttatatctctgctatgtctgcaactctgcatcatttaatttattttctgtttctgatattctagggagcagaaggggataaccttcgtgttggaaacaa

SEQ ID NO: 111393 - DNA, 677 bp, Setaria italica
  Intron number 3 from transcript Si018485m (locus Si018485m .g) derived from phytozome v7.0 (chr-ID scaffold_1; pos 20 255071 to 20255747)
tggactttcatacctgtcctaaacaaaagatacaggtaatgttttttcacaataatggtcgacacatttttctttgctttagtgattctgtttttagcacctttactgttagacgtcccttcccttagtgattgcttctgcccccattctctttgttcattgttcaaatactatcatgtggccctccacatggtagcagggaagctatttttaatgtttttatgcaacatcaaatgcaagatatggcaatcgcgtctagctgttgtcatgtagagctaatatatcctgaaaattcattttcgagtgtgtgctttgactgatttgttaccgacgagatgcttattgccgatctctagaacctaatcatacacggtgtcaagtgttgaactgatcaatacgttggctactgaaatttatagatccatgtacacagattccatgatttacttacctgtatttttgttacttcctattatccatacgaaatacagtccacaaacatcttatgttatcaaagaaccatgacccataaaaattaaacttatgcagcgtagtgcacttatctgcctagtgagtaataatccatggtaattccttgttggcaactgtacgtggtggtaatttcattccacggcctgtgctgaaccattgaactgttgcttgttgtgcaggtggcg

SEQ ID NO: 111394 - DNA, 770 bp, Setaria italica
  Intron number 5 from transcript Si018485m (locus Si018485m .g) derived from phytozome v7.0 (chr-ID scaffold_1; pos 20 256340 to 20257109)
actgggtatgctttttagatgaaagattattttatcatggtggtcatgaatagtattttctgagactcagttgcattattaggcatgtgatttgcttttgcttttgttgaatttagaattcagcgtcaacatctgttacctttcaacgtgtgtcaggcctaaccataagccttgtgctcatactcatgcactgagggagaaagcgttttactgatccatatgtgatgttcagatcaatttggcatcttggttcattttatcagtttggtgcaattagtatttgaattgaagtgcttaggatttcctgctgtttgaggtgattagtaattcaactcatgtattgtacatgccatccttttgactgatgaaagaaagaaaaaagtgcttttgttgttgacgtgcaatctaagaagtttaggaagaatagaacacatgaacattgattctgaacttctggatacaagagcaagtcaaagttttgttccatggtaattatacactatggtcgtgcagactaaatttgagtacttatagcaaacacagagtagtccattagctacagattttatccaagtgatatgttaggtggatggtttttgggccatcaggctgcagttttgtgtggcttgtgaaagttctcaggatgatgtttttttctcactgttgtgcatctgttgatttcttgtacattattaatccaacaatatgttttgccttatgtatggaagagactcagacctttgcattgcaggtctatcacaatagcagcg

SEQ ID NO: 111395 - DNA, 1038 bp, Setaria italica
  Intron number 1 from transcript Si018028m (locus Si017869m .g) derived from phytozome v7.0 (chr-ID scaffold_1; pos 41 637390 to 41638427)
ccgcggagaagcaaccgcccctcccctcctcgctggtacgtacggctgctgagccctcctcaccctcccgatcccctctccggcagcgctccgatcccccgcctccctcccctccccttccccatgcatcaaccaactgtgggatcccctctcctgcagcgctccgatcccccgcctcccttccctccccttcccccatgcatcaaccaactgtggaatcccgccgcctccttcatcggttgtttgttggcttggattcatacgcgcccccagtctcttttgattctctcgaccagtcggcgtcgttctggtgctcgcagtctccttttatttgctgctaataatcaatcgcctgtgctgcttgctgcatagtggggaagtatatggttgacttactgcttgcctcgcccgtatcgtcgtcgtgctgctactacctttactcgatttccattctgccgtggcggtgcaagtaaatctgtaccaaccagtggtctgtacacactgtgcacatacttttatcctaactcataaactgttgcgacgacctatggttgatgggcaaatagacgtcaatggcgtgtcagaatctgcccttttgctacatgacaccattccagactcatcagctactaccaccagcaatgacgaaatctacaagttttcattttctgaataccttagggtgcctgaatggactgcatgtactctgctgctagatatccgcatttctaccaagtggctattttgttggagcagtaagagaaattcggtccgttgcccaccactttccttctatcaagattcaacttcaaattccaattcaagttctaattctgcaggcaaaccttgcctaacctttcttctttttgaaacattattactgcttccgctacttgccccagcttctattttatagagatctgcactgcaaaggatgtgcatgttgcattctctaagactctaacctaatttccttttcacatgtatagccttctactaattggattccctgatttgatcacagagaagaagaagaag

SEQ ID NO: 111396 - DNA, 837 bp, Setaria italica
  Intron number 3 from transcript Si016740m (locus Si016740m .g) derived from phytozome v7.0 (chr-ID scaffold_1; pos 36 347280 to 36348116 reverse strand)
gagatctgccatcctgctgctaggtaaaacttactgtttttatctaaaaaaatcgctgcgaaacatctcatgtgtttcaaaaataagttgtgtaaacagctacaaaatatcggtgaaagagcttgtttgctgatgcctaattgcttactctgtagtccgtaaatgattgatacttcctccatttcaaattgtaagtcattccaactttttgaaaaaaagtcaaagtatcttaagtttgaccaaattatacaataaagtactaatatttatgataccaaataagtattattagattttttattaaatatattttcatagtatatctattcggtgctataaatctttgtagtcctctctataattttgactctccaagaaagttggaacaatgatctgcaatttggaaacggagggaatggagggagtagttactgatttcaatttgtaaagtgctctagaaccggactatccagaagtgtaaatccatcgatgtacaatttaccatttgatagaaaaggtccgtttgcctgcccatgttgagtgcagttcagaatccaaactggactcttcaggttctgcactacgtttggccctctcgtcgatttactccgccacgagcagtaaactctgtttatattctgaagtctaaactcggatgttttggttgctgggaactatttttaagctttgtggtgaactacaaacaaaccacatgaacctctgccttattctgtcagaaaactgcggatcagatagatgattgaaactgactcgagatcacatctcttttgcttgtgtgcagctaactacggcctggtcacgtgcgccttcttcggc

SEQ ID NO: 111397 - DNA, 899 bp, Setaria italica
  Intron number 3 from transcript Si017204m (locus Si017204m .g) derived from phytozome v7.0 (chr-ID scaffold_1; pos 35 998770 to 35999668)
gttggtgaagttgttttcaacacgtcattgacagggtaaatcctctaggacttgcttttacttttgtctgagtgatggcatgttttgcatgtcctagttgattactgcttgttttctcagtcaagatgacggtttactcatgatggaagttaagtagtagatacttcttgaaaaactaagtagatatttgatgggtcagttgacagttactcctaccagagctaacttatctcatatagccatataggtgcacgggtattgcatatatgttgcagcctagtcactgttatatcaaagaaatgagctgaaatattaaaaaacctgttccatcctcttttcaatccattttgtttgaaattttcagttctacgatattaagagtacatcggagtttggtgcggcataaccattagggatgaattgctggatcctggtattccttacattaaaaaaaaatatgtgcctttttgaggccagataattcggggaatggtacttttgttcatcacatttggtagagctactcaggcatcgatatactgaggatgataagttcttttagaaaatacacagaagatgattttagctaggcatatttgtctggatggttgacccagggattctactaatctggcactcagatttcagagtgctaccattcctcaataaacttctttgtattatcgcacaagagttttcatttttacattgtgaatgctgcaaggctgtcttgccacagtattactctagcatgagtgattgtttgttttaaattcatgcatgacccagcagccttggttatcttggtgatgcgagcaccattttatgttagactaagaatcgtcctttatgtgtcattcgtggttgcagctatcaggagattttgactgacccgagct

SEQ ID NO: 111398 - DNA, 760 bp, Setaria italica
  Intron number 1 from transcript Si018509m (locus Si018508m .g) derived from phytozome v7.0 (chr-ID scaffold_1; pos 48 44801 to 4845560)
acgcctcctccgcctccgcggccggctcgcgcagggttagggtttgctctgctccccatctcgccctgtgctgtttttctttcctgtgagatttggtagggaaggcttgatctgtttcttccggggcctgattcggcgtcccttgatcgttctgcgcgtttttcttgtgattttttggggtgtcgattcgttggtgcgggggattccacgggccgtggaatcgcgaagggaacgggcgcttcttgattcggtcttcgattggtggtttcttctgttcaggtggaagtccttttgggtggggaaatgaaaacgcgttcttgtttttttttcttattatttttttaaataaaaattgtatgaaggttgtttcacttggccaaatgattaggctttacctgtctttttttgtctgattttttaaagttcgtagcgctgctaaatgttactagtgattcaagtaattttttccgtggaaatcgtgcgtatttagttgcaagctgtggattagttaaattacttggcagatttggtttatactgtcctcgatttacatcaccatggtttttttacagagatttgaattgatataccctaattcgtttaggaataccgttttgatttgtattacacagcgtgttttgtgatagtgacttccgcgatgctctccctaaatattaggatcttgttttgtgatatttgctgaagtgacaaatcgtgtggttatttacatcgattgtttaatgtgcagcttatagtagtc

SEQ ID NO: 111399 - DNA, 536 bp, Setaria italica
  Intron number 4 from transcript Si020423m (locus Si020423m .g) derived from phytozome v7.0 (chr-ID scaffold_1; pos 33 258516 to 33259051 reverse strand)
gttgagttccttgtcatagtaagtgagggtatctggtaagtcctcagcaaaatatttcagaagtggttagcttattgtttttgatcctaggttcaaagacagtgcaaaatattcaactctatgtggcatttagtagctttcgatcttgtttcttctaagatactagtatttatccagaggggatctgtacattttcctccgattaaattgtgcgcggcttgaattaaattttgttattcttcattaagctgtttacatgtaattgccctggagtgttctaagttgccacatagaaaaatgctcaatccctaggttaactggtgcttctaaatgtcattcatttctgataaagtagtaagctcaactttaccgcaatctgctatatagatcctgcagactcatccaccactacccgccggtataatttgataacacacttcaccccctaaatttgttgcctttatctccatgctaacattgtgtcttgttttctttcggcaggacctttctgacaagtcagggtgtggttgatttta

SEQ ID NO: 111400 - DNA, 814 bp, Setaria italica
  Intron number 2 from transcript Si035678m (locus Si035678m .g) derived from phytozome v7.0 (chr-ID scaffold_9; pos 58 067453 to 58068266 reverse strand)
aagtccacgattaagttaaatgtaatgcatgcactttagaaccttatatgttcctagttactaatgctctatttttcactcatgtatgttagttacagatgtgttgtgcacaaacttctaaaatatttgaacctaaacatcttaaacttctcaaaatcgaaccttgagtttggtgaagcaaatgattacaccattcccatgcaatttctagtgatactgatgctacaaagttaaaacatgttgctgcttgtacggatgcatgctattttggtgaagtgcctatgtttttgtatggttcaaatttttagtacccaaccctgaacagcagcatgcaactttaaaggcatcttgctttggctatggctcaatgttcttgcatcctacaatctctagccgaaaatagccagaatatgatgtttggttcttgaaatcttgaatcatgaataggaatgtatttataaacatatgaactatgtagcatcagagattggccatataggatcaaaggagatccgattcttggctttcaaccttcacattaccatgtatgacatccagttgtggttgtaaacttgtagtcgaaggcattaataagaaacaatcatatcatgcaatggattttttaagtggcataaatcgtaggaagtcattctgttgcactcaaaattctgaaattcatgagctccttcagctctcaaagagaaaatgttggatgctccttctgcaatgtattccttatgatatgtttttttttaaaaaaaatcagcgcatcatacatctaaatggaattcaactattatatatgatgcaggag

SEQ ID NO: 111401 - DNA, 837 bp, Setaria italica
  Intron number 3 from transcript Si034573m (locus Si034573m .g) derived from phytozome v7.0 (chr-ID scaffold_9; pos 30 269421 to 30270257)
caccaacgcgacctcccacaagtgggctttcggaggttagtgcctcaacgctgtttctctctcctcttccgtgattctatgggttttgctgctgtggtgttgaagtggtagcccaggtcgttggggttttcacagtatagggatgattcaattgttaggtctaaaggggggtgggggggatattatatgcaactggaatactcatcccctgattgatgtgggtactatacggcactgttgttgctgcgtactaatcgtatttgatgaagggatggaaaaaaagttaggtgattatctaactgtaatacttattaatagtttgagtctgttgtgtcaaatgacatataaaacctaagtttgttagagtgaagaggagaaaaaaaaacttgtaaggtaattgaaagagtagtcccttgattgatggaaacactgcagtggttcccgttagtataatttttctgattatgttatggaagaagcttttatttaactgcccctgagtatggaacttattctcagtgtgatgtgtattggttgtgctcaaactgatagatgtgatgctaattgtgctctaattttcttctctcgctctgatgagcatatctgattaactaacaccagtttcttcaatcatcttttgtacttctatgagagttctggcaatttagcatcttccagtaacagattcgtccctaaatggaagaaaattagatgattcagtaatcatgctggcattcttcatcttttatgttcaagatttctgcgtgactgctcaatattcaattacattttgtttcttcttcttttctgttgcagctatagccgaacttcttgaca

SEQ ID NO: 111402 - DNA, 960 bp, Setaria italica
  Intron number 2 from transcript Si035909m (locus Si035909m .g) derived from phytozome v7.0 (chr-ID scaffold_9; pos 55 951224 to 55952183 reverse strand)
gacaagatcagggagcagcatctgcaggcccagaggtacgttgttacccgtcctagcccttgttcaccccaactcccaactttgacactatgcaaaaagaagattttccatcacatcaaacttgcgatacatgcatggagtactaatttagacgaaattaaaactaattgcatagttttgttgtactttgcgagacgaatcttttgagcctaacactagtagagaattgactttcgatgcgcccccttttgtcccggtttaaagttggcccgggataaaaggtttaccaaccgggactaaagctctgtcattggtggggggctcaccaaccggaaccttttatccccgttgcaaaggctagtgtgaaaaaaagatcctgagaggcattttatcccggtttgaaacaccaaccgggataaaaggctctcgagccttttatcccagtttgtaataccaaccgggataaaaggagatcatttatcccggttggtgtttcaaaccgggataaaagggtccccaacgaggtcattggaataggactagatccctcgaacccttttatcccggttagtaataccaaccgggataaaagggggtcatttatcccggttggtatttcaaaccgggataaaagggtcctcaacgaggtcactggaacaggactaaatccctcgaactcaataccaactgggataaaagggggtcttttatcccggtcgatgttacaaaccgggagcagcacctgcaggcccagaggtacgttgttacccgtcctatatatctctatatatgcatctccaatctctatttccgacgggcttgccttgctgctggtttcttcgtctccgatgtgcctgcatcgctgattgcctgctccgacgcttgcaacgctgagtccagtgctcccttgctgaatgttctacaggttgcgcgtcatctcttccgccaccggagagatcg

SEQ ID NO: 111403 - DNA, 1004 bp, Setaria italica
  Intron number 1 from transcript Si017993m (locus Si017993m .g) derived from phytozome v7.0 (chr-ID scaffold_1; pos 39 153847 to 39154850)
caggacaccaagaagggcaacctccgatactacccgtaaggacttttgaaccgggaaaattggataagaaatttggagttcttgacttacggtttattttgtccttttagaaaaaaaaatatcgcctcttttgttctaattggaactaaaacatgaaaatcgagggcgtgatggtattcaattacatgataacgtatagtagaaaagttgacattttaaaaggttttcgctctcttgatccaatctgatggattctcgttttttctaccttttgggttggctatgcaacaccacctgtggtctatattgtagtgggaaagttctgtagcctgtaggttactaaaattgttttgatgggaactgaaattgctagtctggcttcttagtttggtgcaattcagcaattcagatttgatgttagtctttatgtgaagtaatcctaatcttttcagtttggcatgtaaggtcatggaaacaatgaagtggctaaatagttcattcaaactgctctggtcgaatgcttgtggctgtcactgttgtcaatatacccattacagtatatcctataaaggatgaaaaggggtatttagcttggtgtttgtatttcaagtgacaaggttcccatcatctttggttcttttgttaatgagtagattgagaagaaaaaacttttacagagatatcctcaaggagaatggtagttgtaatcatgctagaaacttatgattcagtaaggtacattgatgaaatgaacaaggggaatttgttctcgattaaaagtctgatgctgctctgttatgctttgacttgatttctttatttttgggataatacaatattcaatgaagtttcttgtttttatgttgttatcaggcttcaactgtgaaacatacatgcttgttggagatgcaattgagtttacactgttattggcctcacaacgcatttttgcacagctttctttgacattacttgttacatcaggtacaatattaattggaact

SEQ ID NO: 111404 - DNA, 633 bp, Setaria italica
  Intron number 2 from transcript Si014073m (locus Si014073m .g) derived from phytozome v7.0 (chr-ID scaffold_6; pos 34 847858 to 34848490)
agttcctttcaaaggtaatcacttgtcctgtcaaattcagaatctgtttctattttgaaaggtggaaccttggggtttctgttgatttgctactatgcagattgtttttgagtggagaatggaaatgtggaaattttgtgcagattatttactgcttttcctgctttgttggactttatcactgaagttctgatattgggagattgactatgacaaacactgagcaaattgtggatttttggaagatagggagttgtctgtatgggattttgataatctttcagggggaagaaagggtaatgtgcttaatgtacacatgtaaatgtagtcgcatttgtgtcttgaaattaaagtacatttcccagcgatagtgccatatgtgtatgaccaaatttaactttgtgtgtataggaaaattatgtgtagaagactcgtttgatgtacttgcttccttcttattaatatataagccggtttaaccggatctttcaaaaaaaaattatgtgtagaagttcatatccatattctcatacgtattgcctgcagaaaccttataactttgttctacgctgctctaagttttcatctttgtttctctgcaacatcaggtgccgattcctgcggaccaagttt

SEQ ID NO: 111405 - DNA, 948 bp, Setaria italica
  Intron number 3 from transcript Si037015m (locus Si037015m .g) derived from phytozome v7.0 (chr-ID scaffold_9; pos 43 990035 to 43990982 reverse strand)
cctccgccgccccagctgcatctcgtgatcgtcaggttcgctacttttggatctgcattctatggggagtggagcattgtttggcgttcctcttctgtagcgggtactccttgtttatgctgcagatagttccttttgtttcacgtggcatgtcggtactaccgcattaggatcaatgaagcatccctgtcagattggttgcataaagttttgggatcggtatccggttttgtccatgttcagtaatgctatagatcttagctgcattttactagaagtagagtttgcagtgttggcaagccctgttattgccttagtggattgtttattcgacaaagtggaatgcaattcaggatctagagattcagcattgtcaccacatgactgtttgattggaaattcagttaacctcttatgttctgtgttcttcttaaaaatgttggtctcttttgaatcaaaatgtgtgtaaagcagaagtcttaattatgttgttcttggttcttcaagttttatgtaggtgtcaggttcgtgaaaaaaaatatgtttgtctcattgtgaaacagaacatgtaaagcatcggcagcagttccaacaatcatactgtgtggtgatcaaatcatttttttttcatgaaagattgatcaactttcttaattagcctttccatgtaacatactacaaactcatggtcagcagttcacttctgcaatcctttggtgcctatgccgtaatttggtgatttggtggttgactgtctgccaaagaaacaggaaaaacaacaaatatttcccttctacatggcctacatattacttaagaaatcaagaaaaagtaatcagaccatgctgcgtgatatggcgagattaaatcagcttttataatctttttataatcaaattttgttaatctacaggcaagtcagatcacttttgctcaggaaggcagcat

SEQ ID NO: 111406 - DNA, 818 bp, Setaria italica
  Intron number 1 from transcript Si013156m (locus Si013156m .g) derived from phytozome v7.0 (chr-ID scaffold_6; pos 15 33460 to 1534277 reverse strand)
cgcatcaccgattgcggtcgatccgtcctcacctggtcgacttatgcgatcgcgacgactggccgtaagacctgggactacttgtcatacgcagttttattccccaacagcaacgaggtacgttaccatctctgctcctcgtgttctgctaccatgctggtgtagttttggtgaaaatgtactaggtatcttgtgccctcgtatcagatcacagctgctagcgttctagcaccagtttattatatcgcagtgctaaaccctttaggaaatcaaatcactttttcttttcttttcttttttgcacgtgctagtacaccttatatgcccttcaattcatgggatatacgcgtggccacagtgcacgctccttggccttactgctgtcctccatgtcaccaaatgattcggtgcctttgctaatgattgccatatgaattggtgggatgtgtcggtgcacatttctagcaggattcgcttcaagtcgtcacgtgtctttatctcggcttcattaccatcgtttgtaaaccttagaatataacattgcatagaattcatctttagatgccatagaattcttctaagtctttcttttttctaccatttggatgacatagaattcttctggttttgtaattcatccttgtaacctataaaacacctacaaaggtatatcttgcaaacaccaaattcaccaaaattattatggcctagggccattttccaaacggcgaccattcatattttcacgtgctgacggatctggtccttctattcatcttgaagtttcaactttgttcaattggtttcctaatatcaca

SEQ ID NO: 111407 - DNA, 850 bp, Setaria italica
  Intron number 3 from transcript Si019557m (locus Si019557m .g) derived from phytozome v7.0 (chr-ID scaffold_1; pos 11 991103 to 11991952 reverse strand)
agacaggaaattaaggtgctctccttgttttccggttagttcttttttagggtattttccggttagtttattcagtgcagcattacttgccttgtttagagtgtgctaggctgatagagctttttacttggtggtgctattctatttatagtgagggatcttgatgcttgaattgttttcacttgcaattggcataaatggtcccatgcgtcaaggagctgtgcctacaatcaccttttatctgttgcagttctgaagtttaaactctgaacccatgaaagggattaaattcagttgattgaaataattattctgagtttactagggactaaccaactataattgatattgattatgtcttggactgaaggtatgtttgattcgttgatatgctggcactatatttctgaagtgatttgtaatttgtactgccctccatatcttgagccaaagttaactccattgcacttcagtcttgactgctggatccgcttccatatttatccttctgtattcatatgacctgactacgatacatcatgattctttgtgcccaatttatcccatcgatgagtactaaggagaacatacgatgcttgttgattgaagatgcgcatgccttgaagttgtattgtctggcacccaagagttgaaacacatactgtttataatgatacacccaagattgtttattttctcttaatgtttataaaaccttcagtattaactggaattctgtttttttgttttttttcatctgtgaatcttgttgtataatgggagttgtattgtatattatctactgctctcttctgacagtgaagttttatgcagaatttgtacaacatca

SEQ ID NO: 111408 - DNA, 710 bp, Setaria italica
  Intron number 1 from transcript Si014016m (locus Si013827m .g) derived from phytozome v7.0 (chr-ID scaffold_6; pos 73 24727 to 7325436)
gattggcattgtcaaccagaagaccaaaacaagtattgttaatactagtcgccattttttgatttaaaatttatgcaatttaaacatttctccagaagtaaagcataatttttatgcaaatttcaagaattatcttacaagttcgaataccagtacaagtgggagccgatcaaaccctcatggaagcggcaatgccactcgttcgactgcaatgttgtggatgatataccctgcacttctagttttagcacctataatctttttttttctccgtcactgatcacaaatacttgatggctgctcatttatccaaatcatttcagtaaaaaatgacattttattccaaaaaatttcaagaatgacatcaaatccaacagaaagtgaacgaagaaccgagaaagaagatcaataactatccaaatagtttgtaaacaaactctagaaagtccttttcttgaccaactttgctttgtcatcttcctgaacggcccacgagtcgtccacatctccccgctcccacccacaaaaccaggccgaaaccaaacccctcctggccccacctgtcatcctccctcccccaaccctagcaccggcattccgatccctccctccccggccccacatgtcatccacccatcacccacctcccgtataaatacccgtccgtgcccccaggcccaagcccaccacgcgccccccgacctcccaaa

SEQ ID NO: 111409 - DNA, 853 bp, Setaria italica
  Intron number 2 from transcript Si017150m (locus Si017150m .g) derived from phytozome v7.0 (chr-ID scaffold_1; pos 78 38419 to 7839271)
ttggcatcggcaaaaggactactgaacagggtgaggtgaggactctgctctctgcactagtctctgttgggtagattggtagaaaattgaattgatgttcttcataatcatagaatcatagtaagcataccacaggctcattcatcgaaaatcatagagattgttaaataaagtgtgacagtatggctgcatttagtcctatagataacttcactagtgggacaaagacaagttgattaagcttgcgcagttgattatcctaatgatttctcaagctcagagataaaccattttccaccagcacttaaactcttcctcactgagatgcgtagagatgaaaggttcagaaaagagaaaagtgaaaagtcttgctgagctttccattatgcttgttaaaacaaagttgcataatagacatgatgttgtttacaagcttctcaaattggtgctagtacttccagtagcaacagctagtgttgaaagaatcttttccgctatgaactatgtgaagaataaattgagaaacaagatgggggatcaatacttgaatgattgcttggtcaaatttattgagtgtgagttctttttgaaagtcaaggatggtgatattataaaccactttcaagtcatgaaggaacgcaaagttaaagctactcttccaagtcatgaaggaatcaaaataaaaagttagagctactatgtaatttcttttatgtattttataactttgcttagtttcttctatgttatcttagacttgaacaatttgtacctttatttctttgattatcggatgtcggtattgacacactgtgaactatggatttttttactgtgaacttttttttgttag

SEQ ID NO: 111410 - DNA, 672 bp, Setaria italica
  Intron number 1 from transcript Si033974m (locus Si033974m .g) derived from phytozome v7.0 (chr-ID scaffold_9; pos 35 465101 to 35465772 reverse strand)
ctcaggattccagctgccgttatcagtccttacaggtgacctttttatcatcttgcatttcatatcttattactcccacatgccaacagttttgcttacctgaaagaatatacatacacaccgttaccaatgaattcgtaacaaagaatagaacaacgcaagtgctgtagccattttgcttatccaccataaagagaatagcttagccattttgcatgcaactggacataatttaatttgcaggatacaatgtaggtcgttgtgctccgttgtgctccccaaaaaactattgttttactactcccttcgttccaaaatgtaggtcgttttggcttttccagataaatagattttgctatgtatctcgacataaccctatatttaggtacataacaaaatctatgtatctagaaaccccaaacgacatacattttagaaaggagggagtatatatctatgcttatactaaaataatttgagagataaaaacaaaaagtccaaaattgcatggtgttagatatttgaattatattgctgcatgtataaaaacacatcagctgtttctgctgctacattgccactttatagcatcgaatcttctttgtcttgctgttcacctattgttcctcccatgcaggctcctcgtcttaatccgattggtcgcactggcct

SEQ ID NO: 111411 - DNA, 886 bp, Setaria italica
  Intron number 1 from transcript Si034383m (locus Si034383m .g) derived from phytozome v7.0 (chr-ID scaffold_9; pos 58 57136 to 5858021 reverse strand)
gcgagcgcgagctcgagtctgaccaggtttgtgaatttataatgtgatccttaggacgctgaatagtgcgaatctgggccaattgatgcgaacgctcagcactctagtatgaatataatctgatgctgcaacagccacttgtcattacgtttaaaacctgctctgggggatctatcaaacatgtaaattctaattctggtcttgaatttgaataatggtaggttgttaacatgctagtttgtttttttaactctttatgtaaacttggaaattcagcaagtactccgtttgcaatcagtaaatgcaggggcaatgtaatctttggttcacttttgtcttacagtggttttgctctagttgttatgtgcggtagtactactactgaaatagtgaaatggacattgtgcatagcaacttgacatggcttggtttctaaaattcttcttgacttggatgctttattcctgcaattttgcttttctataggagcgcagcgtcttggtgttctaaggtgctagttgttgctggatgtataattggagcatgtctgatctgtaggatagtgactctttcaaattcttgtgctcacatatagtgtttgggaaaatgtggaaatttgtaaactgcatatccggagaatactttccattatctaaacccattgtgtcatggaagctttaagtttggttcagatttcctcttgctatgttgcttctgctcaaagttgtcttgtaaatttttgttcacttgtattttgaacttcttcaagtttggtgatctgcatttgtgatcgcttgcgctgttgaaattcttgtggttgctatctcaaaggccttctttttatatttcagatacaagaacttctaggtgtccaccgttcacgata

SEQ ID NO: 111412 - DNA, 956 bp, Setaria italica
  Intron number 1 from transcript Si035867m (locus Si035867m .g) derived from phytozome v7.0 (chr-ID scaffold_9; pos 10 573449 to 10574404)
tcggctcggcggagaagcccaacgttacctacaatgtgagttcctgctgctggaatttctctcatctgcatcaaatggttgttgaatttatggttgctttgttgtttgttttgaatcctagacatgtcgtgcaattattataatccgtctgcttggactctggctttgttgatgccattgccatgccattaatctagagcagtacaatgcttagtagtttcagtgccaacttttgtcggctagttgtggcaaagtgtggcaagccataaatttatggccacaggacaactcaagttttcctaacatgattcgagtatttgacaagcacatgaacctaacactaacttaacattgatatattagaatttagatgcttcagatagataattgtttactgtcttgctgcatagtggattctgtgtctaatgctgggataaatcttcgaactctgttgctgtagaagtagtaataattaagactgttaatagtgagtactttctgaagcaattcttttctagttcataaagtgctgcccccaacatagtatcattttttccctttaatgtgcaccaccaataaattgaaattgttcgcataatcttatgagttggaaaataatcaaaacattggataaagatatggccttaatttttatattatatgcttttaatttgaacaaattctcaatgagctcctacaattgattacaatgtgaggtatttacatcatgatcagaagttactaaataatatttgataaaatatttaaaattagacatgaatcatcttcaaaatcagttaaatttcgaattttaatttttgctagtttcttccaaattttcttgagactgcatgctggatgttgtaaaacatgacatattctggaacctgtagtgttgtcgcttattctaaacatcacaacttactgctctcttactctgttcaggatattggagg

SEQ ID NO: 111413 - DNA, 663 bp, Setaria italica
  Intron number 4 from transcript Si017383m (locus Si017383m .g) derived from phytozome v7.0 (chr-ID scaffold_1; pos 50 44224 to 5044886 reverse strand)
agatctttgacattggtatagctaggtgggatttccatgagactgtcacttgttgttcataaggctcttggatttgagattgcccagtagattgtgttgctataatctatagatattcaatccaaaagtgttgcctactttccttataatggacatcagggtggttatcttttggggaaaatatatatttcttctgtgcttgattgtcgtacagaacaagagtcaatggtagtgcagaaaattgatggcattgttatactgaatcagtttgcattattgttctttttttaatttgcataaacttgaatcagacgttcgcgaagataccatgatcaactgctaatttgatacatgctccccaatgtagacagacagagataattcattttagtttctagtgaacaaacctaaaataataaatttcttgtaggcttttgttcctatttatttagatatagcatgcctcggttagccatgccattatcttatgtgtgatgcaacacgcagaattttttttacttgtcatggtttcagctttacctctctttcgttagttatgagttggttttaatacttgattaatgcatatgaatggatggaatttctaatattcatttttccctctcagaaaagcaaagcctctggagaagttggaagctgtat

SEQ ID NO: 111414 - DNA, 1060 bp, Setaria italica
  Intron number 2 from transcript Si039838m (locus Si039838m .g) derived from phytozome v7.0 (chr-ID scaffold_9; pos 37 28659 to 3729718 reverse strand)
ttgggagttccgtggcggtgggtgcgtcccggtcggttaggctggggcgccgctgggtgggggtttttggggtcattttgggaacagcttttgaatttgcagcaagcgtcgcatgagctatagggcgaaggaatttcgaaaaaaaaaatgtcaagcttgacggattatttagcttatgatggattgctcctttatttcattgagaaaacaggatgtgattatgagctttagtcttgagtttgtcatgatgccagcatttcgcctcttggtgtttctttgctggatgtaatccatctgaatcatttgggaggaggattcgaggaagggtcaacctgccaagtactagtgtagtactaatctaaaacatagggcaggaagttttgtaggtgtttgttatgttgtcaaaagtcatggatatagggcggctttgcaggatggaagcttgctggtatcttgggtttgatggaactgtaattccaattcatataggtgtgttatgttaacaagctaatctattgtagaaaactgcaattcgtgatgatttgattgcggctcttgttcattcaatccatacagttcataattccagttcctggtgatccatggtttaatgttatctgtccttctatgtattagtcatggacatcaggacatggcacacctgtgagatacgttacctacatgttgtggaactaaaagatagaagtctcaccatggttgttagttttttttgtttttcatgtaggaaataagggatcagggtttgaattagtgcctgctgttttgattgcacagccagtattgtagcattatctttttcgttaaagaaataggaaatttacttggtccccagtctgtattatcatagtcttatgggtaccacttcacatttcttttcaatgtgtgcctagcactgtctttgtttgtcattgtaagcttagcgaaaagttgtccatggatgtgattgccaggtagtaatctgccaccaaagccgtgggaacgtgcgggagcttcatctggtccagcaccttttaagcccccatccggaggtaccactaat

SEQ ID NO: 111415 - DNA, 759 bp, Setaria italica
  Intron number 1 from transcript Si036812m (locus Si036812m .g) derived from phytozome v7.0 (chr-ID scaffold_9; pos 10 903703 to 10904461)
ctcgccgtctggaagtcggccaccgagactacgtattcctaatttgattggtgctacgcaatgctaacttttcttccatttatggcgtcgcgtgtttctaccgtattattcgggtccggcagcgagttcgaccgtgtctggcggtcactcgttgtaggcatgtagcttagtgtgtgtttagggaggaagggagggaggggtagttggtggattttagcaatatgattgttgagaccatgaggtgaagcttgttttgcagcttatatactgaggtcaggagattctaacgaattgtggaacagacctttattgctaaacaggaacattgttctggagtagtgaaaatttaagcataagtttccttaggtgtttagtaagaatgcattttttttacaacttgacaatattcagtaacctatttttgctttactatgatgacagacaaatgagctttgatttctgaacacttaccgtataaacagactaagcattaaagtgagttctgagctctccatggtgaattgacattcgagtaatgagtatatttgtttgctagacaaaaaaaacaaaaaattaagacttaagagacaaacaggcccagttatatttataatgcagatatataatactaccttttacatcctctcagagtaaaaagtgacggaatgttttggtaatacatgctttgtagtaattactgttaaaaatttattgtttaatgcgggtgattatactacagggtgactctacagttttggg

SEQ ID NO: 111416 - DNA, 630 bp, Setaria italica
  Intron number 3 from transcript Si018596m (locus Si018596m .g) derived from phytozome v7.0 (chr-ID scaffold_1; pos 36 931960 to 36932589 reverse strand)
ttccgtcgaaagaggtgggttctcattttccatgtttttaggcttgattattctgcaatgttatggtttgaaaaaatctcttaactgccatgtaaggtattatgagaggacagtcactactgcctgcccatgtaatcaaataatgctaaaaattggttatcaggtgaccaacacacacaaatttcttgaactttaagtggaaattatgtcatcttcctggtaggtgtactgagtcgtttttctgtctgtggtcatatgctaccaagtagcaccacctgtagtcttgtcatttgatataattattctaaattaattatgagaagacatggaagttatcatttcttttcttggttggtttcactagtgatgtaaataataaacaccttaccttaaattttcccttccccatcagcaaaatttgtcataatctccagcatatgtgaagattaccagtagacaaaatagtgacatggagaaacaagccatgctgagtttgtaatttgtgtatatgtcagtttgtgattttggactggatgtttaagatagaagacatggtcttgagatttattgacttcttgtggttgcccctctgcaggatcttgcgaccgcgggaaccaccaagagacctac

SEQ ID NO: 111417 - DNA, 614 bp, Setaria italica
  Intron number 3 from transcript Si018350m (locus Si018350m .g) derived from phytozome v7.0 (chr-ID scaffold_1; pos 21 601394 to 21602007 reverse strand)
actggtgagccttttttaaatttatgtcttaaaattattaggtgtttcacttgtttgttctgatttcataattttcttttgtgtcttcaagttatttctatactgtttcaattgtgaagaaattagttatgttttgtaatagtgcatctcgtactttcagaacttagaaatcatggtgttattcatggcttcatatgatgtgcttttacatagtggatatggtccaacgtaacatttctactgaacaactggacaaactacagactaaggagggtccaatctcatatttccacagaataaacattttgtattatcctgaaataagatatataatccagaatattttatgatgacttcctttcctgggacattgttgatgctaaatattttgaactctgacctcatgagaggtgttgctgcttgtaaactaattattttgttatctttttaagatagtttgttttattaatcgatataccgaataagaagtaaatattttgttatattttatattcaaccttgataatatgtttcagccttaaatgactaatgtaaccacacacttcctggattgtataggtttggatattacaaaagatcggattttggagatt

SEQ ID NO: 111418 - DNA, 568 bp, Setaria italica
  Intron number 2 from transcript Si018350m (locus Si018350m .g) derived from phytozome v7.0 (chr-ID scaffold_1; pos 21 602100 to 21602667 reverse strand)
ttccagcgcagaagaaactgcttccagggaacgaggttagtactgctgtaaccattttggtctttgaatggagtttgtggataacaagcgattaagtttcctttctttgttctgcatggcgaattgcctatctagcttatggggtctcctcaatggaaaaacagtaccaaccagaaatttaccagtgacataatagatattcttcttgaaatgatttggtagtgcagcaatttgccaaggttcttgagcccttgttatctttagcctgaattttatctgaaaaggaaaggactggccactagaagagtctctgatgtttgagataaattagtccatgcactgttagataaaattttggtactgccattataggctaaccctttttgctgtagtaacagaagaaaattaatctgcttattttggtacaagacactcagtttgtacttctgactacacggatttaacgtctttgattaggcccacatgctgatggtatttattccagagcttcaatttgtctcaaatgatttcactggaaatttcattccctatgcagataaaacgcaga

SEQ ID NO: 111419 - DNA, 585 bp, Setaria italica
  Intron number 1 from transcript Si013947m (locus Si013947m .g) derived from phytozome v7.0 (chr-ID scaffold_6; pos 35 599415 to 35599999 reverse strand)
ccaccgaggacttggattgatttcttcttccctcggtaaggaaccccaatcagcttgctaggaaggatggattcccttgttccaatagtttgctttgttctgtggatcttcccttatcctttccctccgggagggtcagcaatcgaatccaaatctttcatttttttccccgccgtgttaagtgcggatttgttcgtggttccaccaggttcttcccccactggactatccaaggtgcgtggccgcgggggcacttattccagcttatttttgcccaagaaatcgactgggcactcattccagcttatttttgccaaagaaatcgactgaaaccccattacccatgctcaatttttgtcccacatagagctgaatttccaatatagttgtcatcgttgctgcaaaaacttcaatctttctagtcgaatttcatctgccggagtgtttcccttagcgaatttacacggcgattaacaaagaagaacgaatcaagctttatatattttagctatcctgattcttgctgttgtttattgttttgacttggtaggtggaagatacttgggttagtcagagcatagaaca

SEQ ID NO: 111420 - DNA, 672 bp, Setaria italica
  Intron number 1 from transcript Si034433m (locus Si034428m .g) derived from phytozome v7.0 (chr-ID scaffold_9; pos 17 001321 to 17001992)
agcttggcgagctgggctttctctaggtgggaaaggtgagcgacttgacgggttctttaactgattttgcggtttattttagccttgcctggctggctctttcgctacttttcccctttcgctttattctttgcaatatttgattcacccttttgctttcctttgttttccttgtgcctcttgggttttaaagacacggagcggttgcgaagtctaaatcttgcattcagttggggaattggataggtcgggggtggataggctttgtcggtaggtcctttccggggaaaattccattaagtttcttggaataaatgaggatttacgatccgtagattccgtgtttcgtaaactgctgatgtggagactgattatcttctcgttcttcgtcgtcatgggtaagctggttcgtcttggtggctattgatgcgatgtttgagtttggtaaagttctcttggtttttcttaaaccactgagcccatgtcgcaaactcgcaagtgtgtatcgatgtgttttgtgctgaattgggtgcgagtttgctatctatttgtttgctcatgggtttgttgtagatgaaaagactgatctttgatgtgattgttgtggttagctaccagaaaatggccactaatcttgtatactttatgattggtaggtaatttgaagggggg

SEQ ID NO: 111421 - DNA, 359 bp, Setaria italica
  Intron number 4 from transcript Si019921m (locus Si019921m .g) derived from phytozome v7.0 (chr-ID scaffold_1; pos 80 53945 to 8054303)
tgagacactatcagtatatcacaccgagcaaatttgttatgcaggatttgggccaactttaatttactaagaagacggaatcagtcatgctaatgtacctagcgttgagacaggctatatcatgttgtaaaaattttcaaactctgtttcctaatggcactttgcatatacattaatttgattcgtgcaaatacttcaagccacttaaatttatatatttgacaaatatatgtaggcattaattttgcaatgcttcgcacaattttgattttaaaaattcgagccatgcataaaagaacttacatactacattaagtattcatgttttgaatttaaaaaatgcagaacgaagacagtgg

SEQ ID NO: 111422 - DNA, 1023 bp, Setaria italica
  Intron number 1 from transcript Si037692m (locus Si037692m .g) derived from phytozome v7.0 (chr-ID scaffold_9; pos 54 460830 to 54461852 reverse strand)
cgctgctccgcctgctccgtccgctcccagcacacgtacgtgcatccacccacccacccaccactctccccccaatcaattcctcctcatttaggtagtgacgaacatgtccgtacgtgcgaccgatccctaattcgatttgcacttgcggtagcatggataggtactcgaatagattaaagtccatcgctctctttcttcttgcgcatctgggatttaatcgctttatttgcgtgttagttttttatacttgcatcgaattaggtccagattcatgtgtttcgatcctttggttttctttggcatatatgactattccatttagttttagaatttctccaaaatgaaaagatgcgcggttctccttcgcattctcaatccgcagattttacaagaaaaagaaaaggcatgatgcatcttgctgctttgaatccagaaattcccaccacacgatcgaactgatagttcatgagttgatgtcaacccgcacaacgtaacctttttcttttttttcccctgaagaacacgttaaactttctcatcgtctgttctagctattccctgaatttgtcgcccccataaaaaacaatccgtcgtcgcgtgcgtgcatttgatgcatgtcaataagtttatttgtcaaattatttcttctccgaatataaatccttttgatcacccgtccttctagtttattccggacatgcacttttcgcacgtcgtcgccaaaattgtcaaacgagacggggcctatatccacattcgctcgacgttgatttcttagctacagctgatttgtacccgaatccaactgcatcactgcttaccagcagttcctccggctctttataatgttttcatcagctatcccacgtgaacacacgtacatcttcaccaccagttcacctcataatttttgcatgcaataacatttacacgagcctgcaggctaattctgtgcacgtatgtatatacgtgattcgtgtaccagatactgcacggatcggtacccgaaggtggagtcgt

SEQ ID NO: 111423 - DNA, 894 bp, Setaria italica
  Intron number 1 from transcript Si018478m (locus Si018478m .g) derived from phytozome v7.0 (chr-ID scaffold_1; pos 89 63290 to 8964183)
catcctcgtcgagggcatcgcgctcgccgcctctggtaatttatacagtagtaatttggtctcaaacttacaatgccgcatttgctttgcttattggtgaatggtgatggtgaattcagtttggcagtgtactctgcttgcacctgccagggcgtgtccccgtgtggtgaaatgcagtgttagttggtgtagtgctggagcagaattgtagcttgtaggcaatagtatggaacatcatcagatgagaaactatagtgttgaactccgtgagtacataacaccattgatagatgattacaagctttcgttgtggcattttttgatgagttgaagaaaattgtcatgatggtggcattttggttgcttctcacgccatcattctgtgtgtgtcacatggccaaagtttttaacccatcctagaacatcctagagtagatcacacacacatacaaacgcggaaacacctaaatgaaatcacattctaatactcatgccttgagaattttcaaatggaagatgttggtgcaggaatcatcgtaactccgaaattgccagatgtgatttcccatagatccataccatgatctgaggaagtgtaggatgacgcacaaaactactgaagaaagcatttaactttgctcatctaaatgagagagtgtcaagcaacagaagcgataatttagttttttgaaacgaaccgggcaggagagctgccgattatatagaggcgataatttagttacattcaggccacctaactagtaactactagttgtgttgtgggtttgactcatccagtaattatgtgccaaggattttgatactgcagaactgttgaaccaagttaatcatgttttaaaattatatgtcttgcaggttttctgccagaggagt

SEQ ID NO: 111424 - DNA, 1006 bp, Setaria italica
  Intron number 1 from transcript Si015849m (locus Si015849m .g) derived from phytozome v7.0 (chr-ID scaffold_6; pos 14 517001 to 14518006 reverse strand)
cgctcactaacgagcagctaataggtacggttgaaatctgatttcaatatctctggccaactagctgcaacaaaacgagagaagctccaaataaatgattttctcaaattctgggtgtagacatatgtatctatgagccttctaaattattggacagtgtttaagccaagtcgttcttcaatgaagtatgtcccaccaaaatagctgtgttcaaatttaaaccttccctctatgttaatgtatcatcgtaatccaccaaatagattccagtacacaagccatgcattatcgtaattcataccgctaaaatagtagatatattcaaattaaatcatctttcctaactaattatagtaaaccatcagataacttctggtaactagtattgtcgtaaaaattgaatcataataatctagtaccgtgatccacacattcttgtaaaagaattctttatttctttacagaaaacagccaacccaagtattctcgtaagtttttgaacgtgtagacaaaaccaagcccaagtattctcgtaaccagtgtatgatacgcttgcatgatgcagttctgataaggagaattttttttgaacgtcaatgtagctttgattacgtagtaatggctaataactgtcgtttcttctagcattgattacacaatgaccggctccgtcgctcaggcgcctcagctcgcttgtcccgtaggagcccggatcagcagggaggtggaccctcgtagtaattccaatcatggactctgccaagtgccctggctatagaataattattttatggttggctttagagtatactcaccctacacacacacttctccgtttcaaattgtatgcttttttaggttcatagatattattatgcatctagatacgtctagatgcataataatatctattaacctagaaaagccaaaacgatctataatgtggaacggagggagtatcattttattctgaatgggtcttaacctttattcacactcaggttca

SEQ ID NO: 111425 - DNA, 693 bp, Setaria italica
  Intron number 1 from transcript Si038111m (locus Si038111m .g) derived from phytozome v7.0 (chr-ID scaffold_9; pos 24 644588 to 24645280)
ggaggtgtactaactaggtaaatttaagggatatcatctgccagcatgacagtaccaccttagaataaatacctccagtaaaaaaatatgtgacattttgggcattgacagtctccaaaacacaacttttactaatacttcttttttaatatgtttataaaacataacaaaaatataatattagttttatggaactacttgtcaaggaaaatttaattatcattttcaaatattaaaactcaacacactaatagaaatgtaaccaaatatcaaaatgatttgtttgtgacggggtggagtatttgttaacagctttgtttgcacatgttttgatggtccaggcttggttctcactttccgatgtgtgtgtaggcttctagttgatcttctatagtttaaatcttcagtatgcaatttgggaattaagactgtggaaaagttggtgacaccacaccagccagtctctggttctggccttgatttgagtacatgagctggtcgagggtgctattcaatttatgcaatggttttgggtgaagggatgggtctttgcgagttgagtggcaatactgactttttccttttgttactgaataatttatatgtatttgtgtatttactcagctacaagatgaactgatggttttcttttgaccagctaccttgtcgccgcagccattttgcagtgcttgt

SEQ ID NO: 111426 - DNA, 317 bp, Setaria italica
  Intron number 3 from transcript Si020654m (locus Si020293m .g) derived from phytozome v7.0 (chr-ID scaffold_1; pos 31 35740 to 3136056 reverse strand)
ctgtccagaagaattacctgcagattgtaagagctttatttattgctagttgttcttgtgcatcctgtagtttttgttgtcatggcttctacttctagcattaaaatcacaagcacccaatgttaccagaaattacagttatgtggctgcccatgttgttttcaaagttaatttttgagctattagtggcaaggtaccattttctatgagcttttctattctattctatatattcctgcttttggttttcttcacaaacttatgtgaaatgtgcatgctcttagttataaaatacatactatttattttgtagaaaa

SEQ ID NO: 111427 - DNA, 741 bp, Setaria italica
  Intron number 1 from transcript Si037174m (locus Si037174m .g) derived from phytozome v7.0 (chr-ID scaffold_9; pos 56 280746 to 56281486)
gccttcagtgagtgccctcctcacaacacgcgtcctcatcttgcttactagtcctcactcagtatcttgatatcttccactcactcgcacaatactgactagaacataataacatagataatctgattagttagtctgtacggtaaatcagggatgcactagcacaaaattaagttcatggtcgttctctgatgagttcatcactgaaatgaagaaaagatgaggtccttttctttggcagaaccttttttgtttagcacaaggtgttactagaagctcagagaagttcttttttaaaaaagtcaaaagtgaggggaagggaagtcttttaggtgacatgattagtgcaaatggcatgtttagccctgtgatcatgcagtagagcagtagaggaatcctgggcagaatcagtaccttctattcagtctttgcagagcctccatgtgctgcttctgccaagaactagcataatcctctactgacacgttctgcatcccgaaaaagaaacatacttattagtaaacaggctagtgtaaaaagtgaaagtagtaaataaaaccactcaaatcaagcataaggcagtgaaaaaaaatcctgagcagtttttacttgcttgtcagtatctgagcgtgttacgtggtggacgagtcacctggtggtcagatctgacttgtgttactaatcaccccgtgctcccctctcgcaggcaagctgtccccaggcggctcgacccccacgggc

SEQ ID NO: 111428 - DNA, 894 bp, Setaria italica
  Intron number 1 from transcript Si035894m (locus Si035894m .g) derived from phytozome v7.0 (chr-ID scaffold_9; pos 67 30638 to 6731531 reverse strand)
cgaagcaagaaccgcggtttcaaggatcctctcaggtgagcttattcccggccccgttctatcccaaagttggaatcatttctgtgtacggtggccttgcactgcgggttcttgagctccttggagccctttgggtttccctgagttcaaacatccgctgtttcatgtctgtgccgctgagattggggtttcttgtctattaaatcccagtagtggagtgaaaatttattgtggactgaaattgttttctttgataatcgtgtgtttgcagcatagattgggtggttagatgtttggctgtatgattggaatcctcacctgatgtatggcctttttctctggtttagctaatgcgattgggggctatgtgttcttttctgcatgaactgatggttttaactcgttgcttaggatgcctcagccttaatttaagcttcttgtatgggttgtacgttgtagaaatgtagctgcacgcttcgctcttgttctgttttcagttatcctaagtgggttgtcctagatatctgcacacagcttcaatagaggtacctactacctagtaggagatgttgaaagccttggaggtagttcagatatcaaatgcatagtttgtattgatatgattggcacgattgtacacatatggcatctttttttttggcttttctctgatgtcgtagacaagtaaattgaagcaaatgatcttagtgttactatttggttctttcaagtattccatcttccctgtttaccggtacccttggtcaattgtatcaagaaggctgcttatacgttagtgacgtcttatttcaggaaccaccaactgttcaagtgcaagtattgggagtaaaaaagaaggattttagaggttgctgttttacctctgtcctaaca

SEQ ID NO: 111429 - DNA, 933 bp, Setaria italica
  Intron number 1 from transcript Si016408m (locus Si016408m .g) derived from phytozome v7.0 (chr-ID scaffold_1; pos 32 049157 to 32050089)
ttccgcaaacaggtgccgcccccctcccccctgcctcccttctctgcccacgcgtacgcgggttccctgatccggtcccttcatggcattatttcgtgtttcttcgaatctcggtcggttctatgtcgtcagttggatttggattgattcgaatatgcggaatggaaggattcgagtcattttcggagtttgggtagctgcgacagagctgaggcggatttggatcattttgtgtgcgggagatctcgactaggtagtgtgatccagtgtgcgtcgatcggtttggattaggaaggctggaaatttctgatcaggatcgaattttcacgttatgtttattgttgtaattccgtgtttggacgcattgtcaggtgttgatttcgctgaatgagtaaagcatcctccgatattccacattgtttcgaaggggttaggagttaggacgctctggtggcaattgtgccattttgaagatcaaattttgctgttgtgttgcatcacatgtctggatagaacgggagggtcctgtttgaattgagctcatggatttggtaaaaatggcgaggttttgcttggtccaggtcgttgtgttggtttgccgtttattttcttctttgaatagaacgggtggatcctgtttgaattgatcaggttttgctttcggtaagttaaggtatacattacttgcttttataatgaatattggaccgtcttcgaaacatccatgttagtctatttcttaaaagtcaaaatataaagaagtctgggcattggtcttgactcttaacaattttgctgaataatttggattgctagtttctctccacaatcatcaattcatctctatctatatgcactttaaataaacctctacatgcgtgtccctgacttatttccaacatcttcaggtcaattctttggaacaacttactg

SEQ ID NO: 111430 - DNA, 646 bp, Setaria italica
  Intron number 1 from transcript Si038860m (locus Si038860m .g) derived from phytozome v7.0 (chr-ID scaffold_9; pos 37 941652 to 37942297)
tactcaaaactgatttttcaaaaactactaagggggtgtttggatacgaggtgttaaactttaacagtgtcacatcggatgttcggatactaattaggtgcactaaacatgagctaattataaaactaattgcagaaccctgtgctaatttgcgagacgaatctattaagcctaattaatccatcattagcaaatggttactgtagcaccacattgtcaaatcatggactaattaggcttaatagattcgtctcgcgaattatactccatctgtgcaattagttttgtaattaacctatgtttaatactcctaattagcatccaaacatccgatgtgataggtgttaaactttaacagggtgttcccaaacaccccctaaggcatgtacacattgggatgacattagctgtctaggagaggtgccatgtaggttttttatatgacgtggaggggagaggaagaggagagaaaaagttgtcatctagtaattaatgaatgggctggatgaaccgagctgtatctcactggtaaggacgtaaagttcctcgtggtggaacctgtccactcagatttgagtcttccactcgctacagtgtttgtatttttttagatttattttaggatttaatcgttattattctttca

SEQ ID NO: 111431 - DNA, 684 bp, Setaria italica
  Intron number 2 from transcript Si040283m (locus Si040283m .g) derived from phytozome v7.0 (chr-ID scaffold_9; pos 20 304628 to 20305311 reverse strand)
atttctgagcaagctgtggaacttattcaccaaaagtatgatcttactttggctaacatacagacatcacaatgatattgctttagaataatatgaactgctttttaatatttagttgcttcagtggtgatatacaattttgagcttttgcatataatagttattctggatacatttaatgggtatatcttaaagcatctctgaaacagaaaatgttgggttggtgtgggtggctttgatttgttgaaacattagttgctgattaatggaaacttacaagttcaacaggtcaaatatctagaaaaggctttagtagaaataccacgtccagttattaaaaataaagaagtcatctcatgcaattagcttttgtcaataatttatttatcttctgatgcaaagaagcttttttttttgcataagcaaccattgcaattactttgcttgctcgagagtaatacaccagaggaatatttgcctttcaatataagcattatataggtttgatgggccaatatctgaagcacaatggttttgagtcttaattattctgccaactagtttcggaggttctctatagatacaaaaagtaccagctgaaatatatttcttgcttactgaaatgctaattgtttattgtttgccacagtgaggtaatcctaactctaggccgttctagaactg

SEQ ID NO: 111432 - DNA, 939 bp, Setaria italica
  Intron number 1 from transcript Si037527m (locus Si037527m .g) derived from phytozome v7.0 (chr-ID scaffold_9; pos 53 580515 to 53581453)
gatcacaggactcagtggttcaggtatattttcagtagattgttgccttgatctacatgctgctggccatagtttccttttccacattcttggttaggtttctatgagggaatttcctgttctttttatcaaaaatagtttctggatgctattgttgccataagttttgaagttaatttggtagcctttgtgatagaaagcaagaattagtcatttgctttgggcattcaatctcaactaatatgctcatgcaggtttagagctgtttcccagttacttttacatacgttatttccttgccatctgaatctgattatgttgaactaaattagacttcagattgaacatgcatataacataaatacttctttcataggcttcctacatgagttaaatccacatattagtttgatatctgctctacaggcaactgagtgctggcatcttgattaccattagctactcagcatgtaatgttgccctgttgtcgcataaacttttcattggctggtacgctgctaaattaatatctccacgataagtaccaaatctggtgtggtgtattggcatcagtacgggaaaaagtcttgcactctcactctgatgattcttctactaggttcattttgaaatctattttctttatcttttagcacttccctctgctacacagtgattgtttgatagtggtaacacatcacctggtgattgtctttgcaatgttgttcatacagactgtttttccttctctcttgcatgccattctaagttagcccctgccgcatcctgagcattattcctaccattacatttatatttcagtttattttggctagcatgagtcaaagcttatgttttctccattctcttgtatctacgaaagtatacgacacaaaggaaattatcatctttttatgtttcagggaaaagtactcttgc

SEQ ID NO: 111433 - DNA, 972 bp, Setaria italica
  Intron number 1 from transcript Si034903m (locus Si034903m .g) derived from phytozome v7.0 (chr-ID scaffold_9; pos 45 891618 to 45892589)
gaccagctggtcaatttcatcatccgcccgcccaggtgagagctccctccccgtgccctgccgccttccgtttccgccgtgccgccgcgattcgggtgttgtgggtttggatctgggccgcgccggctcggaggttctccggtggggcgggtggatgggtggctcgggccctcccggggttggtttgagcggtcggagttgtacagcccagggagtcgaatcgaattcgctggtggcagtcctccggttggcttcgaggccgcgcaattgagttgtgatctgtggttggtcttaggtttacgtgtgatagtggtagtactatgcgtgtgtatgagggactagcaattcggttattcaggcctcagggtggtcgtagcttcgtattgctcctagtgtgagttaccaaattaggatgttctggtaaacgtgagtgtttttgcatctgttcagcccactaatggttcgctgagctagtaggatatctgtgctcttatgattatattgtttgcaatttttggaaatgggagggagtgcctgctgttttggtgagtttggtaaagttaaaacattatatacatcgaacatgctgtgagttggtctaatgtgtattttctgttgagaacatacgtgtgaggttccagtagactgacctcttaaagtgcttattactatggtcagaatttaatgttgcaaatgttactaaacacattcctgtctttatgacatttctttcgtgtccttattggcctgttgacttcttcatcagtacttaaatttcaaaaacataaactgctgtactcaaattgaagggcttctggaagttctgtttaccactaatacagaagttattcttgttttgtaattttcaatagcagacaagatacttttacgatcctttgagtatcttattgttactgggatcactgactgctctgctattttcgttggatgacagagctgactacagtccaa

SEQ ID NO: 111434 - DNA, 503 bp, Setaria italica
  Intron number 1 from transcript Si015156m (locus Si015156m .g) derived from phytozome v7.0 (chr-ID scaffold_6; pos 35 825559 to 35826061 reverse strand)
gctgtgttgctcacatcttttctctgcaacaacaggtaagaagattctacattagcactcatttaaaaaaacaaagttctgcgtaaatgaggtgttcagttcacaatcactgagaaaggggaaatgccactctagttgcagcctcataaaaatgccactataatttggaaaatgctgaaaactcttaggcctcgcagtgaaataacgcataaaacaaacttaactagctagcattaaaaatggttgtttggatgtatcataagaagaacaattgtaaatacacaaaatgcagctaaccattaagtgtgatactatcatagtcatagcttgctatcttgtgagaattcttgttcactactttgataatgcatagtcttcttagttgtttaaaaatctctctatataaaaataactcacactgcatggaaatcaagactgacagagtgcattacttgtaaattttcataggtggtcagtctgcaagcagaactagagtcattcaa

SEQ ID NO: 111435 - DNA, 929 bp, Setaria italica
  Intron number 2 from transcript Si016890m (locus Si016798m .g) derived from phytozome v7.0 (chr-ID scaffold_1; pos 27 203465 to 27204393 reverse strand)
atagatcgcagagtatgctccgatcattcagtatgcttttgcctatgtttagcatttctattacaatgtttattatagactaaatatgtagagcactactgataaaattaatggacttattatctcccatttttctaaagatagttcaatctgaggttcagacgttcagtgcttgagtgatatttcttaaataatgtaaggtttgaactattctggttatgatttgtgtgcttcctgtgccccgtattctggatacaaataaataaccattcgataaggctgaaagcctgaaacgtgacactgcggaacactattttatgggtagtataagtagctgtttgttttattttgtgttgtggagttcataatccagttgtccagtaaagtaatgacatgagcccaggttatttatttttgtggtaattagtcaaacttcaattgtttgaacttgtgcagtgctgtattgtggttgtttttggttgaccatcatattagtgtttgtcaaaaaactaacaaatgtaatggcaccatacgtccatacacaccctcccctgctcccttctttgagcatgaactagactacaacagacgcatgaaacgggattattttgtttggcttttaattgttggtggagcctagtcctgctataacatctcgtgaacagccttgcattgcagatacacatgaagatatatcttatatgtgtgtatggaaatatggcatatagaataatatccatttcactgtatatcttttgtgaagatatttattaatcatattcgtcttccttgttgctggctttggacatattcatgccaatatttaaattacttatggacataagtgctgaattgcttagtttgaaatgccagttgatttgtaactgagcttacatgttctttgttattgttaatcttgtagggtgtct

SEQ ID NO: 111436 - DNA, 801 bp, Setaria italica
  Intron number 1 from transcript Si016155m (locus Si016154m .g) derived from phytozome v7.0 (chr-ID scaffold_1; pos 39 992405 to 39993205)
tgctcgagctcccgtagccccggatcgctggacaggtgttgtacccccgcgctcttcactctcttcgtggtttctctggattgttttttctgtttgattgttttgctttgctttgcttgcgcgtttgctcgtcttacccgtccctttacttcggaggaaaataaggaggccaggaggggttgttttggtacggtggtggtggtttgagattttgcgggaggggcgagagattcgcgggcgaatcgtgacgccttctcgaagcatgcagtttcgcagctccgcccgaggggctcaagcgaaattgctggagctctttcgatgattttggaacctaacctcaggcctttgattttcagcatgcgtcaggcttgtgttttcctatgaaaggttccgcatgcgtcgactttgtttcttttgtatctgaaataggaaattaggtcgtgagtgaaggttcaccctctgtggatcggaggtgcgggctttcccttttcaacagcagatgacttctgcatttttagagtcctccatcggttgccctttttttttgtggaaaaacgttggagaactgggtctctcgtagttgtaggattatcgaaggtactaacggatttggatggacatgccaaatctgggaattgcgcaatttggtattgaagtttcatgtagatcagttattcagttatctgtgatgggatatgagtccttttttgctgccttcctttaatgccttcataattgtgttcttatctctcctttttttcaacaggaaggggctcattggtgctgtgaatagaacttgct

SEQ ID NO: 111437 - DNA, 626 bp, Setaria italica
  Intron number 3 from transcript Si019492m (locus Si019492m .g) derived from phytozome v7.0 (chr-ID scaffold_1; pos 38 66780 to 3867405 reverse strand)
ccaagtccagtacggtcctgaaagttcgaccaaatgtgagatatttatataatctatatatatgtatgtgcagagaaagctaataataacttagtgtttattatgaagtgatatataaatgctgaaaaaacatatattgggtatactaatgcaagcttttttctcaaaaaaggaaaggaaagtgggaacacagctaaaatatactcccttcgtcccaacttataggttgttttgggttttctagattcatattttttctatatattttttctatgtatttagacgtatgtatatctaagtacatagcaaaatctatgaataaaaaagaaagccaacgacctataatttgggatgaagggagtattattggatttatcctaactgctattcctaactgaaaaaagtctgaacagatgcaagatgcactcaaggattgtttgattggcgagagagttcggcagtcatgaacaaagaattgtatagaggttacaaagaagacaaaatcaaagaaaggatagagaataataatgatgttgtttcaggtgttaccatcccattagtatttttctacccataatttatatctctaattgattatgtaacttacattcttctgtttacagcat

SEQ ID NO: 111438 - DNA, 1026 bp, Setaria italica
  Intron number 1 from transcript Si037237m (locus Si037241m .g) derived from phytozome v7.0 (chr-ID scaffold_9; pos 57 766910 to 57767935)
cgcagggcccttttccggcgacgagcacccaccaggtatgccctccccttcacttcccttcctgctgtgcgaaacggagcaccccaaaccctaatataagctatttgtattcggatcccacccagttagattcttctaatagcttcgattttgtctgcaaaaattatcgacactgaatgtgataattctatgcgatactgaatgtgatacatttcttggtttatctgtggtataagtacaaggtacatgttttgcagtgattcttctgttagacgagttgcattatttagcagagattcctcctttatggttgtttatctggtgttgtttgagctggtcataatggagaatattaggctgctcaatgtttttgcatcttgtgctgttgtgccatcgtgtgatctgtagacactggtaatctggtaacaacaagaagtgacagacgctttagcgagtagttcttgctatacagtttatatttcattgtttctgactgagttgtgtgcatccatacccatgtaacttctccacattatgtatttggataacatttgtctcaccttaattaaccatttctgagcctgatgtgctaaaatttaattgttaagaaaatgttagttctttgttactgaaatttttgcataggcaaatagaaaaatacagtgaatagcctgtactgttagattatatatggcagtttgctgtagaaacttgctcttttactgttagtagtcatttgatccattccgttaattatgatgaccctgtttttttttatctggctctgctttgattcacactctccccctccctctgttgcatttttactacagcttggcagaacaaatattcatgtataggctgtattgtcagttttatgggtaatgcatgtatctatgtaggctttcaaatttgtagttgtatatagtttgttatatcgtgattcgtgaatgaaacaacctaattataaatataattttttcatagcactgtgctggtttcagttattggatcctgcattgtgaa

SEQ ID NO: 111439 - DNA, 487 bp, Setaria italica
  Intron number 2 from transcript Si037237m (locus Si037241m .g) derived from phytozome v7.0 (chr-ID scaffold_9; pos 57 768528 to 57769014)
tggtgagtttatgcctaatgtctttttttttctttcaggttctgttttctctctctgtataatagactaatagcgtcacatagaaatacaactcaattaatatagtatcacaagtatgaagattagtgaattttaggtgctgatacctacagtatatatttgtattgaagtaacagtcagactaggattaggattatatgattgatttttgtgttttacatgagtgatcacctaattctgtgtgaacatttgattatctacttgcctttctcattggactggcatcagtcatgtgtcttatataaatagaaaatgtacagttgttttccttttaaatcataattctcgtgcagttctcttgttggaaacctcctttacatattcatataagtctagttcagcctccttcatagtagattaatctgggaatatctgttcgtgtgtttgcaccttctacaggttgaggaattgcagatctcgattgaag

SEQ ID NO: 111440 - DNA, 1011 bp, Setaria italica
  Intron number 1 from transcript Si035389m (locus Si035389m .g) derived from phytozome v7.0 (chr-ID scaffold_9; pos 50 282651 to 50283661)
ccctccgccgccgagttcgtcaagtccatcaagaggtcagctccaaccccactcccgctccccctgaatcccatgggtgaaattgggttcatgtgcgattcagttcgctggtggtgagatccgaggcgaacatattgctaggcggcgcgaatgggactaagttgcacgagatgggagatcgttcaagcgtagtggaaattcgggggcgctctgagcagcatagtagaagatttcgttgctgcgcccttcgaaatgtcagcccaggtgttagagagcttgtaggggggtttcgtgcatggcaacctaggtttgctatgtccgagatgtatcatgtgtagaggaaacttgcttgattttgtgtattgtttagctaaggtagacagccactagctttgagtagaatatactggagtatctatattgaactcatgtactgagtttaatgtgcttatttaattagtgattttcaggataaatatttgttgcatgtatggcctggacttatccatagtgcctgctacagctacaaaaccgaacttgagctgtgccattgccatcatatttgagtgcttcctccgatcataaatacaagtccatctatgtttgtcctaagataaacttcttttaactttgaaagatacttccacaacatttaactttttctaagataacatatttctttatagcttttgctacccaaaatttaaaaggtttgacttaggacaaacctagatgagcatattttgtgattggaggaagtatatattactaattgagcatacgatactaatgacactagaagcccagagtcgtgaataaatgctacttgaactattgggcgtacttgattatttaaatatatgcagtggatgtaccacatttttcttactagacttgtagcaattaacacctggcaattatgtagaaatttttgttaaatgtttgacaataacttagttatgtttcgtgtctacagttttattgtgacattctcaaacagagctcctgatc

SEQ ID NO: 111441 - DNA, 494 bp, Setaria italica
  Intron number 2 from transcript Si015439m (locus Si015439m .g) derived from phytozome v7.0 (chr-ID scaffold_6; pos 90 44355 to 9044848)
tggcgcatactgttttggaaaaaggtaccctccagaatcttggtctataacaatcaaatgcatttgaaattactaatgatgaaagttcaatacatatgtggagcaagcctctatttgtcgatttgaaatctagaggatcatgcttgggtggttactcctgcatattattttttggtgcatgttatttttagacaagcttgggggtgaagaagtgtgtgccaaggcttgttcttttcttttgtcaccactgctatcttctagcatccaaaatcttcttggactcatttgggcccttgaaatgttttgccttcagttctgttaaattcctagaaatttttttaagcaattatttcccctttaggcataaggaaacttatgttagtttggtcaatatttgactagttccttgagacaacacagcgactaacaattgcttgtttcattttactattgctgtagaccaagagcgcctggatattggtagcaagaaactg

SEQ ID NO: 111442 - DNA, 991 bp, Setaria italica
  Intron number 4 from transcript Si015089m (locus Si015089m .g) derived from phytozome v7.0 (chr-ID scaffold_6; pos 32 310760 to 32311750 reverse strand)
taggagagtgagcattttcagtgtgaacgatactggtaagaagctaagtgcatgttgtttctaaggttaatactccctccgtcccaaattataggtcgttttgactttattagattcataaactttgttatgcacttagatataccctatgtctagatgcataataatatctatgtatctataaaagccaaaacgacctataatttggaacggagggagtagaatttattggtcttcaattagtcatagacatagatagtatataattaagtttgttaggagatcatacataactttagaagaatggtgattgatgagaagatttttgacatagcataagagccagggaaagagaaggccctagaatctttagctactttattaattagcttgttggactttcttacatcaggattcctttttcatataatatctcatgcatatttctcagaatagtcctattctttttgtttgtatgtgaagatgtatttattgatgtccatacattagtcagaggaggagccaagttaaaaactactccctccatttatctttataaggcacgatataacttgacacggtctcccaaattacactttgaccgttcatttatcttgtattatatttttttatggttataaacttatgatcattggagagtacatttgattatgaatctaaccattccaagtttatgttataaaaattaaaaaaatattggttaaattattggtcaaagattgtaaagtttgaatcttgatatgcatgtgtgacttacaaacaaaaacggagggagtacacttcatgtagagtagattcattgttatcttatagtgctaattatatttgccatgtaagtgttaggtttaggaaagcgacattggcatattggccatgaaaatgtcatgtgtgttctggtgcctactgacacttctgaaaactacaagctcatctttgtattgcaattgaatagtggaagctaaagagaaat

SEQ ID NO: 111443 - DNA, 580 bp, Setaria italica
  Intron number 1 from transcript Si018618m (locus Si018618m .g) derived from phytozome v7.0 (chr-ID scaffold_1; pos 32 396131 to 32396710)
cacccggcattgaggcattagccgcaggtgattctgtttttattttgttcctgtctcttattattacccactttcttatccttttcactcccgactatttttgtttttttttctatgaaagaatcatatgcccggtgcattgcatctcttctagattcatcattcataactctagttaaatgagtataatctagtgttggtatgggtatcaggtcattgtagcactgcatccgactaggtaatggaaaactgctctataccttcatattccctttagataaaaggaacaacattatcccagatgatgtatcaaccaaggttatatcccttgatattctattatggatgttgaaaaatgtgtgaacctgcatagaatatctttcttggtttggatttttggagcgtgctacggcatgcattgcactaattcatgttttaaatgcagaggcattggcttttgatggaggaagcaatgaggaggtaagaactcgtatcttgattttagatagatgtcagatgtgtgaaattatggagacaaaactgaatttgaaattgcttcattcgcctttgcagtcaattg

SEQ ID NO: 111444 - DNA, 840 bp, Setaria italica
  Intron number 2 from transcript Si035564m (locus Si035558m .g) derived from phytozome v7.0 (chr-ID scaffold_9; pos 50 569818 to 50570657 reverse strand)
taccgaggttcgacataaagttctatcctgggaaggtaaaagttgaacaaatcttgaagatacagtttgaattctcatgttactatgaaagttatgtctcactgtcggtatggatgtgttacttgctagcatggtttactgcttgctgcaaaccaaaactcccagtttttattcctttcttttctttttggagattccaattacctcctttctaacacacaaaaaggaaaaaaaaaatctatgcccaggcccagagagactatgatgtagtttgtttttgaatagtttattcatcctgtacattaaatgcttgaatggctagaaaatttgtgggggtggagcgcagagtagaatgcgaactagggcactgacttgagcttatgaagagaggagggaactaaaatcactaaggcctcgttcgtttcaccaggattggattccagctaggattacttccaggtccggtttgagtgattccacccttgtcactcaatccggtcaggattcattccaggggtgaggaggtatggtttcaatccgggccatctaatgtagaaggattccaatccaggctggttttcgttccaggccagactaaaacgaacaacactttcaatgcaagtctggtttcaaaccgggtcacttcaaaccatccggaatggacctcattccgggccaatccggtgaaaacgaacgaggcctaatgtgagagttgtttatctaggaagagcatcaattgagctgtacaggtaatgttctttatcttgagataatcgataaactaacttgtgatgtccatatgcagttttcaactgagaaaaggagcattctacctgttgg

SEQ ID NO: 111445 - DNA, 888 bp, Setaria italica
  Intron number 1 from transcript Si018163m (locus Si018163m .g) derived from phytozome v7.0 (chr-ID scaffold_1; pos 90 23873 to 9024760)
agatcacccccgccgtccagacccacctcaagctcgtacgtctcccggggccattgccctccctccctctccctctcttccgaccctctgattttctttcctcccggattttttgtcctttgtccgtgggctgcgtgctgggatggtgccaccgggtgatccctagggcttcgcggggtggaatgcggcaacggattcgggagtccgtgtggttttggggtgttgatctgacggtttggcggttgttttggggaaatttggggggatttggttctgatggggctcgattcttcgtgggtgtctagtccgcttgctcttccgttccaggctggcttggcgccccctggtttgatttccgcgcccgatggtttagacggtccagtctacgcctcccggttcgatttgtccagatgaatgaatttgtcggaatgtgaatgcgatgagcgccgcagttaaacgtttcagatcgaattgttggactggaatgtgtgcgattcacgcaatcggccttcattttccgttgttggtttcgtggggatccctagtggaactcatttgtgaacctttttttttaatcggaacttgcagtttgcgtcttgttattcttcttcgcataagctattgacaatttgggatgcgcactgattcatgcgtttactcgttgggttgataactgcagaatagcaccgcttgatctgtcattaattaagaaaatatataattcgattagttgcatttcggttacttgtttatgcgccttcatgtttcgtgcgattgtgtgatgtcagacagactgttctaacttctaacggtggttagctgctcgagtatcttaattctgaatttctgacggtggctggttggttgcctgcaggtttacctcaccct

SEQ ID NO: 111446 - DNA, 889 bp, Setaria italica
  Intron number 1 from transcript Si017313m (locus Si017313m .g) derived from phytozome v7.0 (chr-ID scaffold_1; pos 41 95056 to 4195944)
cctcgaggcccagcgcaacgacctcaactcccgaggtgacctttcttctcgatttcgctcgctcgctcgcccctaaccctaggatcgatgtgccctctaggcgcgcgggtctggtgttgttgctacccgttcgcgttagtcgaaaccctagctttagctgggtgtgggtcgtagctaaaggcacgatttttagttactaataaggttcattgagctgatttttttaaattatttgatatgtgaaagatggcctgttaatttactaattggtgtgttagatggactgaagcttagctccaaatgggcgcgcttagatgttaaacttcttgagcagcaggctgaccagtagtgttaagtttggatcgtggatatcatgtggatggtagtggtagctgatgtttatctgtgtttggatatggattttgattataaactgtccataagatgtgctattgtctgtatttgttttgtatattgcctctcaatgtcgttctatcacatttacttctagggttgttaggagaatatttcacaccggctttttattcctgagattatccattaattttcaatgcttgcctttctttgacatgaagctgtggtatttgaacatggtaacataaactaaatcacctctagttgaacaatggctatgcaaaattaatgtaacgatagccctgtgcccccatttagtcatttttgaactctgtataactgcaagtataggaatactggcttgcatggttgtaccatgacgcttttgattaggattttttgatctcctgctgtctctgtttcaggagcagcacatccttctgcataagtgcatatattgtgtctgtttacggttctctaaatttggccttgcaattgaaattttgcagttaga

SEQ ID NO: 111447 - DNA, 339 bp, Setaria italica
  Intron number 1 from transcript Si036947m (locus Si036947m .g) derived from phytozome v7.0 (chr-ID scaffold_9; pos 47 506537 to 47506875)
ccgcgtcccggaccctcgtcgcgtcgccggtgcaggtgaatatagatttagacgtagttattatatatgcgttcccttttaatctcttttttctctgtttttccgtagttttttcttctattttttgctgttaatttagttttcgctccctccttaaattgtttttagtttttgaattgtttcttaggtttacttttagaagtttcgaggtcatactatcttctagtccgtttgaccatttccctccgattttctgatatttgatttagaaagaaaaataaactggaacgataaggacttgaacacttttatgatctgctttttttttcttccacacag

SEQ ID NO: 111448 - DNA, 813 bp, Setaria italica
  Intron number 3 from transcript Si018088m (locus Si018088m .g) derived from phytozome v7.0 (chr-ID scaffold_1; pos 35 742301 to 35743113 reverse strand)
ctcagtcaaagtaatttccgttcacaattaaaccaatccacactgaagtttatctcctgccatagaaatgcttcagtttgtctataaatcacattaaatacacaagttactattcataagatgtgaattcaggctaaaatggactatttgctagctaatataaactacattgccacaattgttcgaaagagtaatgttattttggataattagatgcagtatgtaagtgaaccatgctgactaagcaggccacacacgatagtaaactctactcatccttgacttgagtttgctagaatgttcatggcaaatgattcctccatgctcatgaaaatctcccccagaaattttgcctggtttaatattgactgttttcatttgactagctgctgcagcatttgcatacaaattcagtcgtttatcatctattttttactgtggcatttaaatggagcagctcttcttccggccttttgctcttttgtttctccagaaaaatcgtgtatggagaaattccactgtaatccacacatatggttttgcagatggttataagtgggccttcgtttttcttctgtatcacgaccctattattgacttgtgatctacttgatgcttcacttagtgttatccaaacttgataatttcaattgtgctgttttgattgggttgtatgctaatcttctggatgttattgtggtcattccgatgcagctactacagatgacagaagtgattttaattgttctgttttgattgggttatctgctaatcatctgaatgttgttgtggtcattgcgatgcagctatact

SEQ ID NO: 111449 - DNA, 899 bp, Setaria italica
  Intron number 4 from transcript Si018049m (locus Si018049m .g) derived from phytozome v7.0 (chr-ID scaffold_1; pos 35 631833 to 35632731)
cctagcattccatctactgccggtaacaatacggggtgagtagcagtcaccatcctatccggcacgcttcctttaacatcagtgtctcagtgcctagattcatgcatgtctgctttttggcacggccatgatgtgaagaacatgcatctatcgtctccctcgagcagcaataattcaaggacaaaaacctattttgatgatgtgcatcagtagaactgaactgtcgctgccaaaacgccatgatgaccatgaagtagcatagaacgaattagcagcggtttttgttggcagtgtctgaaataagatgccttttgatcgtaatatcttcgtccaaaacaaaggatataggtcgtactattagtgattcaaatatacatggtctactctgatagaagagaaatatcatcctcacaacgtgcttactcaaatagcaccggacggtcaatgattgggcagatgaagtcacacgaaagggacgttgatgtgtcaaggtatagggctttatcgaagcctacaatttaggcgttgtttaataaattgcataactgaatttagagtctcatcacacttgttaattgtttaaaaaaagtaaacgaaaaataacgtattatatgattgatgaagtgatgcaaattatatgcctgggttgggattcagaatagctatacctttgtcaatcaattgatgcaagtagcaatgtatgaatcgggagctggattaatcatctactcgaacaaaaagaattaaaatttgccaagcaacctgcattccgtacagtcattttctggagtctgaattactagttccagttttagcatttttttcatcacagttttcatggtcttgtttctgtttggtttaccgtttctgaacatggatcagagaaacgccacttgcgg

SEQ ID NO: 111450 - DNA, 1047 bp, Setaria italica
  Intron number 1 from transcript Si013155m (locus Si013155m .g) derived from phytozome v7.0 (chr-ID scaffold_6; pos 32 960759 to 32961805)
tcgtcgtctacttcccccagggccacagcgagcaggttgcttcctcggttcctccctccccttgcagcgattcttgatcaaagcgaacgatttccccccactcccgatgagcgaaattgctctctttcaattttgttcgttttgttcttgcgattttttgtggtgttcttccgcttgtctctttcctgtcgccgactcgtgttgtccggggagatgtgggtgtgtcgcttcatggttggtccgccgtccagcggcaattggttcttgagcttcgccgccaaatgcttggtttccatttgtctcctgagaaggaaaaacgtttcttttctcctccggtggccttttgtgcatcagcgcgagaaagaaactttgactcggattttctcccaacgattgctattgtactgctgcatttcatctaataattcctgcttttctggggcgtcgtatcagagcacaaaagcataatgcttttttgtgcccctttatatgaatgttctacgattggtccttttttctctccttgcagcttgaacaaagtgtgtggccttaatatgtttcagatttctaataggaatgaaccgaatttattttattttcatcagttcgggttgtctacttgttgcttaatcatttgttttgcgaaggctgatacttcaactcacaggatagttctgttgtctgtgatatggagctgtctttgtctacatcaaagccaaataaacatcattgaaaggttacacaagtagtggactttttcttatctgtaaaacctgccttttcctgtctatttgatcatgttctagtgaaaaaaataataaggggctgatcttagttatctacatctgtctttgactgtttgcacagctaagatggaatttcatatgaaatgtccgtgtactgtgtaccagttttatatattaaagtaaaataaaagagaagccagaaaaaattgcttgtttatttgctaataattgtgaaagttgtctggagttccatggtgagcaactctcattccttgatacccattttcaggtagcagcatct

SEQ ID NO: 111451 - DNA, 909 bp, Setaria italica
  Intron number 1 from transcript Si013796m (locus Si013796m .g) derived from phytozome v7.0 (chr-ID scaffold_6; pos 32 246095 to 32247003)
gcagcggcggcgcctgctggctcgaagaaggacaggtgacacttctcttcattccccctcttcggattagggtttggaggatctccgtcctcgtgcggttacaattagatggagtagcttctacgcgaagctaatctcctaaaatctcttggatgtgagttttgttcccttttcagatttgtttggtggattgaagtgggattaactgtaaaagcttacatcttttttgggtggtcacagtgtctgtatcgtggtacggattcgggattgattgtttctggtggactgaaatatttttcaggataggagtgattagtggggtgggatgaagtgcaaggaacttgttgtctagagctcctgttggttcatttgaggaattttgtggtgccatgtctacttgtactagacatttaatgtccatggttccatgattaggggagggaatcacatctagtgtacctgtgaaaacatttgaatgctcccgtagtagtaatggatttcatcatccccatcaaaatgtttgcttttcaagcaaccagtttcaaacaaagaagcttatccgtaactgtcattgtgcttaacagatgaatttgcgcagtgggttctacgtttaggtatctagctggaactagaaaggagcctttctgtttgctatgcttaataacttgaaaggaatttatgacactttacatgtactgaaaccatactacttactattcagcacacatcaaactgtctgcatgtgagaatgttcctgataaatctcgaagggaacttccctcccttggataatacgagatatcgatgtgtcccctgttctcaattgtcagctgtcatttgctggtaacttactgtcctttttgtgttaatgtagcagtgctagtgctggagcaaaacgaagaggtggcc

SEQ ID NO: 111452 - DNA, 929 bp, Setaria italica
  Intron number 1 from transcript Si037118m (locus Si037117m .g) derived from phytozome v7.0 (chr-ID scaffold_9; pos 15 535017 to 15535945 reverse strand)
tcgaggacgcgctcaccgacgagcagctgcgggaggtaggccgccagcggcccccaaatcccagcttccccctcttccgtttgcaaccgctgtgctcaaatctgaagttcagttgctatagcagcttgaaatggtcattctagttgaaccgattgcctgattcctgcgatgacgtgaggtagcggatttgtcaattggtagtccggttgggtactagatttggttgcgtgtgaagtcctcaattgctgcccctatttgtttcaaactactgggagatggtgctatgtttaactagtgcccagtagctgaatagctaggatcttcatggcttacattgatcatacatctaattctctattttggtcggtccttttcatttccttgccaataatgtacaattctcagaatgcaagtggtccagaggtttgttttgtggtttgtttatatcatagcttttatgggagatactaattagttgtctgtttcgttataagtacaaactgaacgcaataaaggctaactatctgctagaaaattatgcatttgtggtatgcaaaactgatttgactaacgctgtacaacttgttctttagaaaatgatgcatatgcatgtgagatatgcaaaactgatatgactggcacagtacaacttgttctcaaaatttgcttaccattccacatttataactatccatttgcaagataacaataacccaaatcttgttattggcatatgcaaaagttcagcagaactagttgggagtaactgactgcacatagtataaatggtgggttgattcattgtcatataggaacatttatgatgctactgcttggatctgattatattgtttaagttgcttgcattagtttgggatcagatcatgattaacctttgtacttgctgcagaaagctagaagccaagcaa

SEQ ID NO: 111453 - DNA, 703 bp, Setaria italica
  Intron number 3 from transcript Si016892m (locus Si016892m .g) derived from phytozome v7.0 (chr-ID scaffold_1; pos 24 665960 to 24666662)
gccagtctgcgaaagctgctgcaaaggctgaacaggtccccctttttcttccattgcattcttgtggattttctgcaaaatgtccacattgtacttggattgcaaaatatgcaagttgctacgagtaattatgaacattaggtggatgagacaattgaatatgatattagtagatgagacaattgaatatcatattgaaaacatgtgacttgttatagtttgtttttgtaccacccaaagtttagctgtttcaaggcttcgagggaatccagtttggatgaactgatgaagtgagtagttgcacatatagggttagcattctaagtattatttgagtagctgaaacagtactggcaaaaaggacaaagcctccggaagatctgtagtgttttgtgcattggcttgctgaaagtactgttgctaagtttaaacatacttgctttggagcagaatttttgttgtcttagatcacctcctaactcttaaccgattgcaacatggcaatggcctccctttttgaagtcattcttagggactctcttgcataacttaaaatatgtttattataaagcactttattttgaattcctttgtttggattgctatgcttgtaatcttcattcttgatggttatactaattagccgttgttaattttgaagatttgtcctttctgatttgtgttactcctttggcagtggctt

SEQ ID NO: 111454 - DNA, 733 bp, Setaria italica
  Intron number 1 from transcript Si036720m (locus Si036720m .g) derived from phytozome v7.0 (chr-ID scaffold_9; pos 44 6904 to 447636 reverse strand)
aggattatcaacagtggcgcgtcatctgccgggtaacttctttgacattgacactgacacatgcatgcactttgttcagttttggttggcgtctgtcaggtccaactgttcaagtgctgaaaatacagtcttgctatgtgagaacaaagtaggccatccagtttgttttagttccaaaaaaaaggagtaggccatccagatacagtaatggtaacaaatctaaaataatgttttttgctcctgtttatttccaccttccttcctctgccggatggtaacttttttagaacaataacttgtttggcattaacatactactttgtttcttttataattgctgtctgtcaggttcggcaattcaagtagttatatgaatagaataaaacattgatgagtaagcgcaaagttggccatcgaatgatggtaactacctagcagaatagtagttcttttttcttctcttcactgccctattcaccaacttgaccaacttgcttctagatagtctataaatagcttatcacatggtgactatttagagactacattttgctccatccaaatgtccattttgaatcaaataatgcttcagtggttaacttgtttgctttctgttttgatggttctcttcagttgcatccccacataatgtgtgtcatctcttatctgtttatctcagtgtaactctagttagtttctgttgctgagataaagctttgttgttttcaggttc

SEQ ID NO: 111455 - DNA, 902 bp, Setaria italica
  Intron number 3 from transcript Si038862m (locus Si038862m .g) derived from phytozome v7.0 (chr-ID scaffold_9; pos 58 844572 to 58845473 reverse strand)
gacaaggtatgccagctattttgagattctggcctggagataaatacatattctagtttgtactgtgattttaatcagtcatgcttgttaacatcaggcaaacatctgaaacttgcatcagggcttaaataattggttgcttagatggcttctcaataaagcattcatattgacatttcaaatgagacgaacatgtagtaaatagtttggtgaggtttattatttccttgttctgcaattttaggctcctgattaaacacaagcgacgaatagaggtctctactattcaacttacaagtccatcttttttgtcgaggaggaaaccaaatacatacgtttgaggttatctgattagctaccgaagtgatgtgatcatgctaaagtttcattgcctatttcagctaatttgtactttagatgtactcccaatgaaaacaagttcttgtcttgtgtatttgaccaaaatatatcttttagagtatttatattggttatatgaaaacgatgagtagatgcatcgtaaaaaaatactttttataatcttatattgttaggcttgtagaaatatattgtgttaagatctaattgtcatatttgcatctccgagaccatagaaattaaggttccttgagaagtgggagtattactatttcagatcatgagtttatgagttcttaattgataaattgtttattttatgcctgtttgcatgcacatatgcggccgggccatctatgctatacagttgttattcacccaattgactttatttgttgctttgttttcttttcttgataggcatggtatttttgtcagactggcctagcatgtctgccaagtattctcatatctgctgttaaaaattatatcatgactattttttttgttttttatagtttggc

SEQ ID NO: 111456 - DNA, 861 bp, Setaria italica
  Intron number 2 from transcript Si017872m (locus Si017872m .g) derived from phytozome v7.0 (chr-ID scaffold_1; pos 41 822056 to 41822916)
gggagcccagggcattcgtgtaccacaacttcctggtaacaaatgccgcgattgctcttatgtttcagttcaacagtctctgattctcacgatccagatggattatcatcatgccatgtgaagtatacaaagtcttttttctgaactgatagcgctgggtggtagtgctgctaaagttggatctggaaataacaatgcttacctagtcaccttatgactgacgaatgggtttgaggatgaatttgacacccgtactgcattgagttcaatcgcatatcaatgaaacagaaaggctagagttctggtactaggccttcatttctgctagcacacctctattttgtggtgtgggttattagctgacacatgggagaacttgcgtgtaaattatgcaaactagtacttaaaatgcaggggaaggcttgtctgatcccatgcgtggatttaggcagggagcaagttgcttcggatggaagaactcatgtatcatctcatctgtgttgatatattcttttgcttgttgttgtacatcagcactattgaaatgcaagtacatttgacttagggattctaattgataccttcttttaggttgaccttgctggttgtgcaattctatatcttatcgtctactaagggaaaacatctcagttgttctctctattaaattgtccatatttatgcatatcgtgcaatttgtagctagtgtttattaagtattaactgcttttttgcccatcttttttttggtaacttgtcagttcatcacccaatgttgatgattatttgactatgaggatttctgatagtttgttctgttcattagtctaaggaagagtgcgagtacctaattggattagc

SEQ ID NO: 111457 - DNA, 972 bp, Setaria italica
  Intron number 2 from transcript Si017015m (locus Si017015m .g) derived from phytozome v7.0 (chr-ID scaffold_1; pos 41 130085 to 41131056)
gcggttctcgcaccgcagcctccttcggagctaaggtttggttattccccccccttcagttattcatctgttaatttcgttgagctcggctatgcctcctcgccgtgagcccatccgcgctgctccctccctccgccgcgtggttgccaccgtttgttccccttccggcccccatcggtcgctactcgcaactcctatggccggcggctggcacaggttgggtgctgctgcccgcatatatctattagatggctgctaccagttggattccgtggccgcacgtcgtatggcatgattgtgttcattctatttttaaacggttgagaaatggatgcagatgttatgccatcatcgtctcagagtgaggtcggttggtacttgcatggtgttcacaatttgcatcccattcaattaacttttgtgccatgatccagaaaacaaagctgacttccaaaacccttccttcatggaaatattcacaattactgctttgggaaatttggagaaatgaatggtgttgtcttcaagcaaccatggcctacttttcatctgtggaaatcatgctttgctgatgatgtaaatctgcacctttattatttaatgaaacccacaattggcctcagtatttgttctgggtccacctctgatgttttgatcttccctttctttcttttttggcctgttttgaaaggttgtttggcttgtacaatttcctttcacttttgtttggttctctaatcatatccatcctcccttttttatagtaacatattaggacagtaggggttttacatttctgtattccctttagaacaattgtaacctcgcccttcagtaaaaatcctttgttatcatatcatgtctcatcatgtgagtttgtgtattatagtcaagtttatcgctcgtggaatttgattggttgtaagatttgtggcaggttgcgatttgtgagctcccatttcaccccatcag

SEQ ID NO: 111458 - DNA, 1018 bp, Setaria italica
  Intron number 1 from transcript Si034529m (locus Si034107m .g) derived from phytozome v7.0 (chr-ID scaffold_9; pos 85 54074 to 8555091 reverse strand)
acctggacgccgtcctcaaggaggccgtcgacctggtaacttccgtctctctcttggggcgattctttgggttgtagtggaaggtcctgacaaggctgcctttgggcgtatcttggttcttggattaactgtagcacgggcagtttcgtttgtggggatcgtagtggaattggcatgtgggttgtggtttgattacttgccaagaacgtggtggccttagcattgcaggctggggagaattcgtctgctcattcttcatcttctgggtgatatgcaggagtggacgtctgtttgtttttgtctttcttctttgtttctttttctttggttcacgttgcgacgttgtagaaacggcaaatctttccgttctatgtttttggattcacgcattagtatttcgttgcaaattcatcttgtgcttggagatgtgaagaggcttccagcttgctaattcttgttcggctggtgcggtgggtggcagaactgggatggtttcttttttaatgtttgtaaaattcagaattccaggtgacgtccctgtactacagttctttctttattgcgcttactaattttagagttccgtggttttgctactctttctgatcatgacatccctttgcttgtaaacttgtatgcataagttgacgtctttcttactactctttgtgattatgatatccctatgcttgtacgaatatgttgattgttgacatcttgccttaacttcgtgatgtcccttttttatttctctctctattttttactaaatttggttaaatgatctatgtgcaagttttgttctgttggaaatgtgccttagacgcatagaccctgggtttggttggtagcaatagtagggtgcacactggcaagttgaaactagcattatattttgtcttttattttgatgttcatcatggcaattaaattgctcgcttttgtatggcctgtaaaaaggtgttgttacaattatttttcaggagaacatcccacttgaggaagtgtttgagaatct

SEQ ID NO: 111459 - DNA, 704 bp, Setaria italica
  Intron number 4 from transcript Si034670m (locus Si034443m .g) derived from phytozome v7.0 (chr-ID scaffold_9; pos 14 8006 to 148709 reverse strand)
cacccaaaacctccattactcgccgctggttcgtaacttaccaactcccagcaattgaattaccgttgcatctgtttctgcttctgctcatgtaaaccaattgtaaactcaatcctcccagttcctaacatgtcaaaaacgggcacctttcatgcttttttccttccttgtaggtgcgagaggcaccaatatgtcgtggttaggattttgataagagcaacctaatgcaacttaatctgtggcatgaagaccaatttgccaataactgtgtcacaaaaacaaaccaaccttcctaatggctagtactactaacctcttgtggaaaatcggcaggctagaatggttttcatacaattgagttgaaacttcctccaactagcacataaatatacgggttcattgccagaagaatcacggaaattagtaaaccatattcgcatttaaaaatggcagggggcctcaaagacctggcactgctgttctgttcacctgaaatcaaagtgtaggttcgattaaagtaggaagtactgcagtaggtatagatggataattcagaagccccctaggcctataacattaatgatttggtgtctctgtctgagttggcagtcataatactgttgacctgcttgatactaattttcttgcaattcattaccctccaattaggactaaatcaagctggaggaagtgtgccgctcaaa

SEQ ID NO: 111460 - DNA, 707 bp, Setaria italica
  Intron number 5 from transcript Si016930m (locus Si016930m .g) derived from phytozome v7.0 (chr-ID scaffold_1; pos 30 022993 to 30023699)
aatccgtgtaagttactctcaaaaagtctctctccaactgaacttccctgaggttaataatgctatctgattattacatagcttttggtgtagaaaaaatatttaattttgtttggaaataaagaaccaacagttgactgtattgatgtctttttatatttttataaactttttcccttcttgttgttgttggtggctggctcattttgtgtttcatctctagcctgccctaacttgcctgggactaaaaggctttgttgttgctatttggaaataaagaaccatattctgtttcttctttattgtttacccagcttgttggaagttggaacatgcaaagttccaaaatttttctctctgtcaagagttgttcaacttctcagcagaatagttctctaccactttccacccttgtttctctgcattgctctttcaccgaggctgatgaaaagtaaagcaaaatgctgtttacatattcaagtagatcattcctttgaaagtccatacagtagtctgtagttttttgcctcttctagaagcactcaaactgtgcggcatcaatttttcacacgtaactaagaaagataaccaaggccgatgccctaatttggagttttatcatactaccttatgttaccccgttcttgtgcagctgtgctaaaatttgtgatatcaataatcaattcatgttgtactttcagcttcac

SEQ ID NO: 111461 - DNA, 905 bp, Setaria italica
  Intron number 2 from transcript Si036564m (locus Si036564m .g) derived from phytozome v7.0 (chr-ID scaffold_9; pos 46 149125 to 46150029)
catctggtcctccagcgctgccctgagacagccatgtatgttgccaagcttgcttgcaaatctctccctgataagataatgatgtattctttacctgttgtctgtcatgtatacacctttccttttgtgtttcgtagaccatattccaacattagatcacaatcactattgtaccacaccattagtgtacttcaaggatctttctgccagcacttgatgctcggatgaatgcaagagcaatgaaattacagtcaattacacatgcagatgtctatttcttaacatgactttccaattgtatatctgtatccaaagtccctgtgtaggaagatggtctatttgaatttattaaaaaaactcgacccgttgggggaagccctccctgaaggcattgtgtgagaggtaaaagacaaccttgaccacggttgagaaaacccctgaacttcggctgttgttggcgaggggattttttttttaactccagccccgtaaatttgctccatctaggactcgaacctgggcctgctcaggtgctctaaccactaggctagttccaacataatcacttccatggtttagagtatctttatctcattctgttcctcggagtgctggggctgaaataaaactgtctgtcacttggatctatgaagattcttttgggtaccatgctatcatgagccaattcaatggcagcttgtaaccttagcatattatgtgttgctttcattgtgttggaattgccttttttgttgttcttgcctgcttttttctttctatattatttttatctagaaaactatgccgtgtatcattgatcgagtaaatcctcagcagttgttcttttacccttaggttgaattagttgtcttgttcgttgcagtccatccgtccttgttagtgat

SEQ ID NO: 111462 - DNA, 928 bp, Setaria italica
  Intron number 2 from transcript Si036477m (locus Si036477m .g) derived from phytozome v7.0 (chr-ID scaffold_9; pos 35 188814 to 35189741 reverse strand)
tggaggcaaacctcctgcaccaggtgggtttcccttcctctcaatccatctatcgcaattaattggatttattattaagtggttcggtcaacaagagccacgtgatcgatatgattatggagatcagtactgataattagtaaggaacgtcactgtccaattactagctctcttgtttgaccaacaccatgatcagggagtacatacactgatagtgaacatcactgatgatgacaaaggaaaaatctagctagtaacatcaacctagccatatgatcattgctgatctgagtgtgcaaagaatatcattgccagtgtaagcaaggtttgcgcacgggataattgtagattgattatgcagcgagggtacagggtacaatcatatataggcaaggattatatcctagctaggtttggtttatagaaattaatatgactaaggtggagacgatcctttcctaatcaccaaccacactacagtgtggcaatattccagcctaatgcaaaggctcatctcacgcctaacattagcatagcagcctaacatatccttttgcaatcctagtcttgcatatttgcaaactctaacgaacctatgagttttttagacagaataccactttcatcagaacatcattgccactgatagatagaacagtctgactgcgtgcatttgattttttttttattggctaacttaattgatgtacaggttgatgctattccaattgggttttagtatctgtaccgtagtggttctctatttaattacccggccgtgtgctacagttcacgggaagtcagaaacggctcgttccgagcgatgataggaccagcaagagatggtaccgctgagataagaatgcatatgatgaccattcgatgttttgtaggtgtcattgccgttcctgatcgtacacggcggggc

SEQ ID NO: 111463 - DNA, 913 bp, Setaria italica
  Intron number 2 from transcript Si038815m (locus Si038815m .g) derived from phytozome v7.0 (chr-ID scaffold_9; pos 31 016694 to 31017606 reverse strand)
gtttccagcctattgcaccgacacagttcttggaggtcagcttaccttcattacaatattgcattccaatctactgaagtttctctaagttggggagtagaagattttattctgctgctgttctgtcctagttttatgtgccagatagagggaacctattcaaatttagatgtgcacttgcatttgtctgtaaaacagttgaaagtcgaccattaatatacagaaaagtatctagactagtgagacaccaatagttttgtgatgaaaatagagtgctactttgtaactaatgaatgatggttagaccctcctattaaatctcatgataattctaatagctacttattcaaaatcatgaaaattctgacagctacttattgaagattatataaaaattataactagtactgtttcaaaatgtagggaatagtagcttactgtttcaggttattttatttgtcatatttttgctataaaaaggctagataataaccattatgtttttccagtattgttaccgtattgatagttataattaaaaaaaggttgaaagaaatttactcagtttaggtagtcatgatttgagctgattcaatatgttattacttgttttattaagccctaccttattgaatttgtttcttacttcagttgaatggaagattttagggggccctgttggggtcacatgacactggaatttctgtgttgaacatgtgtatcagagtttgtggcttttgtagtttgaagcatagctccatcattgatttggttttcttgtatttgatacaatgttatgatgatagattatgtgttgctgagttcatctctaaaaattcatttgtatttggaaaaatgcagaagcctaagatcaaatatacctaacgtctgtttcttttctaattttgagcag

SEQ ID NO: 111464 - DNA, 445 bp, Setaria italica
  Intron number 2 from transcript Si019371m (locus Si019371m .g) derived from phytozome v7.0 (chr-ID scaffold_1; pos 31 43649 to 3144093 reverse strand)
ttatctcatacagaggttattgtgctcgtaaaggggtaagtgccaattgaatactactccctccattccaatttgtaggtcgttttgacttttctaagtttgtagatattattatgcatctagacctacactatatctagatacataataatatctatgaatctagaaaagccaaaacgacctacaatttggaacgaagggagtaccttttactactgtggtaagtgttaggctgagttcataactgaagagtatttatctagaacataaacatcaccctaactatatgctagttaataactgataaatacctaacatggaattttggcatcaaaagttttaatgttagaataacaggagctattcaattctggaagaacaaaatatccaaatggaaggaattactgtagaaaatacttacgctaatgccatctgtaaatcacag

SEQ ID NO: 111465 - DNA, 712 bp, Setaria italica
  Intron number 2 from transcript Si035981m (locus Si035981m .g) derived from phytozome v7.0 (chr-ID scaffold_9; pos 11 090951 to 11091662 reverse strand)
gatcgaggtatttctcgcaatggtacattaagataatgtgatgcttcactagttgcttgtgccccttgacataatcttaccttccaatcagcacaaacttatttgttatttttcgtttcaaaatactattaagcataaacacactgcatgtcacactaatggggtgaatgacaatttaggacgatacgtctgataatcaggaggaaaaccatcctgatacattagtcatcagatgtattagacttggttccgttgcagtagcttgttggtctctcatatacaaggagaaaaaaacaactctggattctagggtagggctagggttagagtttggaaaatgtttgaagaagcaccatttgctctgaaaacatgttatggctgcaaactcatatatatcaaaggctacctgggtgagatatatattatataatgagccagtattcaaataaggctatatacatgagggtaatacttagaagcctatacgtctcatagtatagaattatcctgactggatatgcaacatggatcgattgtcttgtctggttatctgagccttatcctactctgtgatgtagaatcttattatcagatttctctccattttctctggttaagcgtgatttctctccattttctctggttaagcgtttccgttctgtaatttttatgtttgtggttgcaccactgccttctgtagggtctgtgctgg

SEQ ID NO: 111466 - DNA, 494 bp, Setaria italica
  Intron number 3 from transcript Si017522m (locus Si017528m .g) derived from phytozome v7.0 (chr-ID scaffold_1; pos 68 87197 to 6887690 reverse strand)
tgtctgcgttgctgacgtgcagttcaaagggagaggtgcgtgtgatagtgaaattactggttgttattcccgttgttgttctattcgtgatgaatctgtagctttggttagcaagctcttgagttttaggctgattgacgcttttttattctgcatctgatatgattggttagattgacgagtcgacactaactgttatctgctgcatattctctaggattacttgttagggaaaaaaacagtctgagtgaacaaatatagaacctgtttgtagcttgacacctcttttatcaaaagattgaatctgattgtagattgattcctcttgcaatcatcaaaattgtcaggctatatgtatccaagactaaagctgcgcatcatagcattttgatgttttctatctttttaagttacataattatattatgcaccttgcggcatagtgagataaataatttaatcttccttcacaaattgtgcaggacgttcgaaga

SEQ ID NO: 111467 - DNA, 906 bp, Setaria italica
  Intron number 2 from transcript Si037183m (locus Si037183m .g) derived from phytozome v7.0 (chr-ID scaffold_9; pos 87 27128 to 8728033)
tgcttttcagcgctccagactcgcctgcagccaaggttcatgtggacacacattttaaatacagttaggcaatatttatacttgtgacgctactaggaacctaggaagaagttgttcgccttgggggaccacgataacgcttgaatgttaaaaagatgctatgtttgaaatcagcttagccctttcatatttttcttttgaaaaagtgtgttatccttttccgaatatttggtatgatgatagatacagtacataaatgacccccatgcacttttctcacatttttttaaaattcttcaaataatcctctaatttcctaaatttataaaaaaggatattccactaacaatcacttgggcatatctgattaaccatgattgatttaaaggtaaccgaatgtaaacgaggaaaagcaaagataaaattaaccgaagagtggcagacttaagaaggtggtaaaggcaaagcactgagatctagccgcgaaagcagaatttctacttaaaagcatatagcaagtaacagtaattttagcaacaaggccttcatcatgtattgctaaagggactttttttgctcatcaagaactcaacttcaagcaatacaagtgttattaaaacacatgcttcgttgaggtgtgtagatttccagcacagtaaaatggcattgtttacatactacttacacttagccttccatttgagacgattcgagatttcagaaacttgaagcaccctcttacagcaaatcaaatgctcctgaattcatctatgataatcaatattagcatttcaactgattcgcgacttgcgactgtacaaacatgtatctactcttatgacgaaccaaaagttcttgtgcttcatctatactaacacaggtggtaaaaacttgcagaaatacaat

SEQ ID NO: 111468 - DNA, 771 bp, Setaria italica
  Intron number 2 from transcript Si016150m (locus Si016150m .g) derived from phytozome v7.0 (chr-ID scaffold_1; pos 16 98187 to 1698957 reverse strand)
ctattcgttggccattgtttctacttgctaaaaaggtaagctgatctattctatggtacatgacatcttgtggtttcgttaaaatgtactctattttgcaacaccttcatagtgctgaagttggtataatctatttatttttataaattatttttcctgtttccacagacctttgacagaatataatgtgtctctcacaactagcacattattatgcaaatgcagctttcttaaatataatattatttggaattatgcagaataaagcctggtgatgatagaccttaatcacttaaaaagttattaattttaaagttagaaaacattactttatgaggacacatgttttcagtaacgctagctgcatgcttgtaagaagcatcactaaagttttcctttaccttatatggggatatgtctattgcaaactgtcatttacacacacacaccacaaaatgaaaaaaaaaggaaacagtctacggatcataaacaaatctttacaatttgaagttataaacacagaacaagttaggggaaacaaaaaaaaatcatcaaaaactgactttctttttgagtccttgaatagtattagaatagttattctttcttctccctttccaagacattcttttaagctgtacttcagtaacggatttttcgtgacttctgcagtctggcatatgtctgtaccctttctatctctgccagcatatatttatctatattctcatatttgtttctattacattctagttttcagaagcagtagat

SEQ ID NO: 111469 - DNA, 724 bp, Setaria italica
  Intron number 2 from transcript Si017868m (locus Si017868m .g) derived from phytozome v7.0 (chr-ID scaffold_1; pos 41 102493 to 41103216)
gaccgctagccttccgggatccaggtgggtgccaaatgatattcttcctttttttcgcaatttgttacttgcctcataagtagcttacccggcgcggcaccaaccaacgatccacactgctgctctagctatagatattagaatatttgattgaaaaggttaacttcatgaattctagtatttaatagttgataaaattatatacataatgtataaatgttatcagaatatattcgtgtctaatttcaaggtcatttaatgtggcgttgaattagtagaaattgatgatgcattgtagaaaattttatatttaaagtatacatctaaagacttttataatctcaatactgcaactaaaaacaaaatagagacagtagtttttttaatcaaacattatgttgaccgaataatttagagaatccttcttcaattcaaacattatgttgccacctgcggttttgcacacacgacacgcacgtgtcaccgtgcatgcctgcacacccgtcttcatgcatgccgcacgtgctctaaagctcccgacaattattgcaacacacgtcgttggcgtcgcaaaaggctagctcgatcggcaagcaacaacaggatagcttaccctgcatgcttgcatcacaactacagaccatcacgagctagatcgactaaactttccatgcccacgctgtgatcaggtttcctgaggtcgccgagctcgtcgacgtgtgct

SEQ ID NO: 111470 - DNA, 679 bp, Setaria italica
  Intron number 3 from transcript Si034328m (locus Si034328m .g) derived from phytozome v7.0 (chr-ID scaffold_9; pos 52 994671 to 52995349 reverse strand)
ctcaggggcatcaattaactgtagcagatcttcaggtacatcaaggatcctaataagtgatagcaactccgaaaaaatctcgatatgcatactaatgtaactcatttgatcatttcgaacatgttaccttgttgatgaatttctttctaagctgtcgttggataaggcaaaacaagccatatcagccagttgttaacactttaactaaggctgcaacataagattgatgagtgttgttataacagtgctaatttgactgtttttgttcagtggctgcaacatcagattgatgagtgttgttataatagtgctgatttgactgtttttgttcaattgttttccttcaaattagtgttttgtgccttaaatatacctgtgtgtgttagattgtatactttttatgcttcgcttaagtacctttgctacaattcttagtttcctccttttgtttggtaactcattttagtttctccttctgcctttatgaaatcagcttgattgctttttccttcgttattaaaagaaaaaagaagactgcacagaacagaaagacattttgtcatttaagttcagtgcatatattatcatggacaggagtacattgaattaatttgtttttcctgttcctaaattttcttttacagcattttgtcataacattggtactccggaaacaggt

SEQ ID NO: 111471 - DNA, 662 bp, Setaria italica
  Intron number 1 from transcript Si034328m (locus Si034328m .g) derived from phytozome v7.0 (chr-ID scaffold_9; pos 52 996420 to 52997081 reverse strand)
aacagtgccccctctcagtacaaacaagatccaaggtatatgtaggtccctttctgcttactgaaattcgtgcttgcattttgcacaagagatttgtaaatgagttcatttggcccaaagtaaaatgagaactgtgaatgaaccatatttagatgtttgaagttcaacatgatttgtatatggcaagatacataattgatatctggtctgtgatgtgcttggagatgttgctttgttagaatgagattttgatatgaaagtatttttcggattagttgcattacacttacatgtttctatttttcttttttgcttcaaaactctggctgaaacagattccttctttttctggaagatgtattgacatgtggtatactagcttgatccatcttttatgcattccaatcttctctaaaactggaggtattcgttacactgtaccacgatatttgaatttgggcatccttgcatcatttaagctacgcatacattgtttgacaaggctcttggcagattattaagacagttgttggcctgaattgtgtaaaaagaccatgcatttctttgtgctaaatctcaattttttatgttgattctaacgatattgatttgctaattgataatgattttttattttaaatacagacttaatcaaattcgtc

SEQ ID NO: 111472 - DNA, 813 bp, Setaria italica
  Intron number 1 from transcript Si034711m (locus Si034711m .g) derived from phytozome v7.0 (chr-ID scaffold_9; pos 10 723063 to 10723875)
cgggtaaataggtgttacctgggggcctggtgctgaaagcccctcacctttagatccactagctacaaaatcacacggttaaatagtgcttgatgctgaaaagtgccacctttagacagaaaagaaagtagcttggcattggtagtgtaaagaattttggcttttctttgtgttcctctggttcaaactcttgcacaaaacatgcacggttagtgttcatgtgggtggtttcagattgtagtatgtatttttgagatagcaccaaaccacctccattacagtaaaaaaaatttaatagtttcgcaatcttagagcattaataagttgcccctgcatataccttgcacaaatacacgtgttctcatgtgatttccttcatgcaaaaaatgactactgtacacccatattataagatactcatttcttaatcaagttttcttgagccttgagtttctaattaggtttcacacctgcaggactcacctgtctttgatttcatcaatagtctatcccctatagcaacaccaaagcctctagattcggcacaaaatgggcagctattcaagtcatctgatttagtacctgtttcatcaatcttcacatcaccccaagttaatccacaaaaggaatccaaacctggaatcaggtaatattctattttttatttatgtgtttttatcatttgaccttagaccttagtatacatcttttcatgtggaccagggatggctacattcaactttctcaaggactcagtcccaactgccaaaggaatcagatagggagttctagctgcattgaactgtctggatc

SEQ ID NO: 111473 - DNA, 543 bp, Setaria italica
  Intron number 4 from transcript Si037851m (locus Si037857m .g) derived from phytozome v7.0 (chr-ID scaffold_9; pos 48 8491 to 489033 reverse strand)
ggtggtcagtggatctccacagacgaaaagtaatgctcaccctctgttaaattttattgaacagtcatttaatcacacccagagcaatgatatctttttagataagtggatgttcttcccttgtgatggattgtgcaagagaaacagtcacattagatgcctagctaagttgagaatccaaaatccattttagtttttacacctgcacacatccacacttgattagcctgaatacaattgagccagcgtttttatttttaccacaccatcagaagtgataggcataatctcattgcatcaagcacctgtgaggatctctgtaattttagcactatctttagtttattttaagagcatatttttattcatccagtcactatctcggtgcgttctgctcctgttaggtgtggttttgaagatgcttacatggtttaaagatggttttaagcatttgacttgtgtttcatctgctatatagaaaaggctcggtgatgttgacttgctaaaattgttgtttattgtgtaacctgacagagctacaag

SEQ ID NO: 111474 - DNA, 940 bp, Setaria italica
  Intron number 1 from transcript Si016247m (locus Si016247m .g) derived from phytozome v7.0 (chr-ID scaffold_1; pos 37 488307 to 37489246)
tccacttcgagaagttcccctccgccatcgaccaggttggttcgtgagcattcgcctttcttctccaccattgcctccgctgctgctgctgtatcaaatcgtttagcagcggcggcggatccctgagatcctagaaattgttcctcctgtctctcgcttttttttttaaggatgagaaaaaaaaagttaggatgcctcgtggtttgttgacgcttacagtcgttgcggcactagtcgtttagcgcgacatgattgctctggtgggttgggacaggtgctgttcatcatctcagaaaaaaaaggtccattcctgcggcggttggagggtttttttttttgtgcttagagacgtcgctgaactgaactattaggtgggtggcgcattgttttgttagtaatagagtggttagtgtgttcgttaggaaaccatctgggctctcttttgacaaccatttggttgctttttctacaaccttttgattccttagtttatgcttagaatttagaaaggtcactgtcgcatagatgaattataatatgcagtggtctctgccttttcttttcttgattggatcattgatccttaaaggcgtctcttcattttacagctcgttcctccccccttttgttggtttgcctatggtttaggtgtgccgcacaatggtttttgaagacatgttttcgtatgaaagtaatggccttgactaatctggttccgggtcacagctgtattccttttgtgaaaaccataccaattatgggcgcttttacttttgttgcggtcagtcatattctgtcggttcttacaaaataaaatgtggtgcatttttccgttgattcttacagcatgtatcatattactgctcagtgttttattttggctcccttgataatgttcattacaggaaacttttgcaaaatacacgggaaggacatcatt

SEQ ID NO: 111475 - DNA, 944 bp, Setaria italica
  Intron number 3 from transcript Si017784m (locus Si017784m .g) derived from phytozome v7.0 (chr-ID scaffold_1; pos 38 562715 to 38563658)
ccctgcgacccgctcctctcgttcataggagaccggtaagtttgaattctggcgatgctctctgctcctttccgtcttcatttccccattttgattttgtcgcggtttcctgtgggtagtgaacatttctgcaaaattcttgaaattactactttccccaacggaccattagattagaaatccatgctcttcataatgcatcccgaattttagagtctacattctacactgagatggattcagaaggtatccccatcatcggagttcagactgtcagttatcttagccgcgtgagctgtgatgggacgtttgattgcagagaacaggcagatcactttgtcaaatttaaatttgtgatatgcaaattcaggtccatttataaatctagtgattagtataaggctagttgtcaatctttgccatttgcaatatataggtgcaatataggatctctagtttaaaccactggttgtcagttcattgcatggatcggttttgggaacgaaaatgtagatagggagcttgcagtctgatgcatccgagccatcctttggtcttgaatccaacttgtaggatgtggattcacttccaagttgatcacttgatatgtattatttctgaattatctgcatggtgaactaggattagatcttttattctgaattgagcgatacaaattattagattcgcaagtacaaacacaagtactgcttgcacatgcgtacagtcatatacactgaggctctcacaattacccgtcctcctactggctagtggttggttggtcacaagctttgccgttcagctggtccacataatgtaataactgtcataatttccagagttacagtctcccagaattggtcactgatccttctgcataatgttctccatcttcctgttcactagcgcgcgagctcttcgggccctggagattccacgga

SEQ ID NO: 111476 - DNA, 919 bp, Setaria italica
  Intron number 2 from transcript Si035287m (locus Si035287m .g) derived from phytozome v7.0 (chr-ID scaffold_9; pos 17 48634 to 1749552 reverse strand)
cctccgttggcctcctcggcacctacagggtccaggtgtgctcgctcgcccatgcctgtttctgtagtgatttcgttgtggtgtttgttctgcttgtggttggaggaaggccgatagcaatgccatgagagttaaagtgaaaggtgagaggcaagcaaacctctaatggaaaatttaaaacaaattattctgcaaataatggcataattggatagcatatatgcctaagcataaatcatgtgttctttgaaacggatagaaacattgctatgatagttaacaaatacgtactctttattgaagagatcgtaagcaggatagtaaactgtatccaatgcagaagcacctaatctgggtaagttgcgatagtaaattgtccttaactattaatttgcttaattagcacctaaggatgtagcttaatgttcctatgaaaaatttagaaatgttaacaatcagtttactgcattatagtagacctgtaaacactgaagcattccagcagcttacgacataaatataaggatatttgtagaattgacaattgacacatgatgtttatgaaccttagttttgctagttatatgctgttagggctgtttattaatcctgatgaaaacaatagagtaaggaattatcatataactattaaaatcaagccagcacaaaatattttctatccatcatgctctcacacataatatttaatggatcaggaataatgttgaaaagaaatggcccaattttcttagataatttttttgatgcatcacttatattctcagcttcaattcatttgacctataatttgagttattttaatttctaaatgcatggaattgaattgtatatataatggttatatgaatttctaccaaattatatcttatactgacatcagtgctactactcaaggatt

SEQ ID NO: 111477 - DNA, 469 bp, Setaria italica
  Intron number 2 from transcript Si036849m (locus Si036849m .g) derived from phytozome v7.0 (chr-ID scaffold_9; pos 68 70962 to 6871430 reverse strand)
tcaactcaagtgatactgagcagcgagaagcaaaggtaattattacaattgtcttcatattatttattttttttacattgaggttttccctaagcctgctattgaaatttatgttacgcggaagcccaaagtgtttgatcagtagatgagcactttgttcactttgttcttctacttgtgctatgactatgatgcatttctttgtagcaaatgaaacaccgcagcatccttgtgcgtcagaacctgcataccttttgatgtttgcatattaataccggttcacacgaaccctccacttaacggtctgagtatctatgcatagttgcaagtgttttcacagagaattgcacttggggcttttatatctgtataaaacaaacaagcttgacaaacggttcccgtttgttattcagacatctctgtaaggttttgttgatttctcacacagatctctcctatgagcagataa

SEQ ID NO: 111478 - DNA, 1001 bp, Setaria italica
  Intron number 1 from transcript Si036849m (locus Si036849m .g) derived from phytozome v7.0 (chr-ID scaffold_9; pos 68 71460 to 6872460 reverse strand)
cgcgaatcgcagcttcttcctggtgggaattcctggtacggaggcgaggagcctttcttgatctatttgtcttcttctctttgctttcgtgttcttgccatttgcgtggattgcgagatggtgtggtggattcctattccttgccggcttgtgttctgatgggtgaataggtgatgatacgcagatgaagtccctgttctgatgcaatcctgcttttctgttctttttttggtacttctttatacgtagacaggatcatattttgaggggaaagatgtgctggttcaccgtagagctcgtatgaattcagagatctcgatgcctacctgttcaattgatgttattattcgtatctatcatgttgatctatcagatctaatatacttctccaattcgagttcatggaaataaggcaaagagcaacagacttatctctttacctcgaagttatagaaactgggggaaaattcaatggtgccatcccagttaatcattataattaagttcgtcgttttcggtgtgcttgtacattcctatcagaagaacatagaaaattgcacatgggagtcaaggggacataaagtatgtagtaggggctgctttcacctgcccattcccatattccaattggattgtagtgctaatcaattgttgcctttcttgtcattgcaagactctggcctacagaataaaggaatcaatacttagtagcaaatagtttcttcctggatagaaagaattgaatatgtctgtgttatttgcaaattcagaatggggcccaaattctggttgtattcttttcttcatttcttttaaaaaaggaagcataaaattcatccagactccagagtatataaatattctgaaaacaaatattactccacagtgtcttgctttgccattgagttggtgtgttgttattttgtattgcttaatatttatatatcttaccattaggatcatcagggttgagcattactgagattgggagtggaagaaat

SEQ ID NO: 111479 - DNA, 754 bp, Setaria italica
  Intron number 1 from transcript Si018508m (locus Si018508m .g) derived from phytozome v7.0 (chr-ID scaffold_1; pos 48 44807 to 4845560)
cctccgcctccgcggccggctcgcgcagggttagggtttgctctgctccccatctcgccctgtgctgtttttctttcctgtgagatttggtagggaaggcttgatctgtttcttccggggcctgattcggcgtcccttgatcgttctgcgcgtttttcttgtgattttttggggtgtcgattcgttggtgcgggggattccacgggccgtggaatcgcgaagggaacgggcgcttcttgattcggtcttcgattggtggtttcttctgttcaggtggaagtccttttgggtggggaaatgaaaacgcgttcttgtttttttttcttattatttttttaaataaaaattgtatgaaggttgtttcacttggccaaatgattaggctttacctgtctttttttgtctgattttttaaagttcgtagcgctgctaaatgttactagtgattcaagtaattttttccgtggaaatcgtgcgtatttagttgcaagctgtggattagttaaattacttggcagatttggtttatactgtcctcgatttacatcaccatggtttttttacagagatttgaattgatataccctaattcgtttaggaataccgttttgatttgtattacacagcgtgttttgtgatagtgacttccgcgatgctctccctaaatattaggatcttgttttgtgatatttgctgaagtgacaaatcgtgtggttatttacatcgattgtttaatgtgcagcttatagtagtc

SEQ ID NO: 111480 - DNA, 1019 bp, Setaria italica
  Intron number 2 from transcript Si014382m (locus Si014037m .g) derived from phytozome v7.0 (chr-ID scaffold_6; pos 33 986404 to 33987422 reverse strand)
tgtcctctaatatctgtcaggtgtcatcgaaaaatgtaagtcttcttcccctttttccgtacttaaaaggatgcctggtgtgcagctgtgcctatccagcacatgtggcaagttcactgtagttacagtgtcaactatgtattcttctcatgtcggccatgtgataaaaataagtattattagtcatgatgtgaaggcatcacttatctcatacttgatgcattttttccccttcatatcgctatagccctaaatgcggaggagcaaagtcaaaggaaacaaatacttttctgattaaatatgccattcttatagatgagcagtcatcctttaatttgtaccatgactttgccctctcaagaaactcttagctagcttccatgataaaatcctatgggttgagttaaggatatttttgtttgtcaagcaaagcttcaagatcaacaaattactgaaaatcagctgtttgaagatttcagtgaacttctaaaaacaagtttatgtttacaggagacaacaaatcgcacatgtttgatagcttgatgcactacttgccgctcgaattgactgcataaccgagcttttgctgatgttgatgcactacttactgttgaatgtgttcaggcagtcatgctcatcattagataagatcttatcttgtaacgggctattcatgaaaaagtgggctcaatggtcccatatggtatgaacatgtcgagctgttttcagtcaccaggatagttatgggccaccatacatatgcttgttgcgtcctcctctggtccacaagttatgggaggcatcttgtttctttatcaaacattaaagtctgattttgtcacctccaaaaaatccctaccacgtgcttttggttttgcataattgtagagaagtagaagtctgtatttgtagctaactagctatgcagtaaaattttcagcatttccaagctgctgatatgtatctgaattttcctcttctcaggtgagtactgggagcaacaaaaggaaggtgagccc

SEQ ID NO: 111481 - DNA, 677 bp, Setaria italica
  Intron number 1 from transcript Si016743m (locus Si016743m .g) derived from phytozome v7.0 (chr-ID scaffold_1; pos 30 739014 to 30739690 reverse strand)
gcttcggcggcggcggcacgctggtctccggttaggtgagaattcggcgactggtgtgactgtgtggtgctgactctgatgtttgtgcgggacttgctgggtgagggggtggttgggcactgtgactttcccctcaattaggttctaaccttttgcacttttggtgtgactatccatcctcggattgtttgggattttttttctttttacctccgaaggactgaccgattgatcgtgatcggtgaggtttcgggaggttccttccatccgatctctgttcggtgggatttgagcaggattgcttcggtgttttgttttatgtcttcaggttttctggtgatgctactcggccggggcttctgtatttgggggtgtgcgggagcaggactgttcgatccgtagacgatagttgccaatatatactatcgtaaaatcgtgatgtttttttttgggtaatttctccctgtttcgatttgtttgtggctgtctgttttggtctgttaggataaggttgcatgcttggccgacaaatttttatctactcgtttggttagtgttatctggaagcagagcactcaaagttaaaaacagcacagcactgaaatgttaatgttgcgtctggtgggaggtgggttttgagccaccgttgattcctctaatgatgctcatgttgcaga

SEQ ID NO: 111482 - DNA, 632 bp, Setaria italica
  Intron number 2 from transcript Si018264m (locus Si018264m .g) derived from phytozome v7.0 (chr-ID scaffold_1; pos 68 4878 to 685509)
actcggtttgtgtcttgctccattcattttttctaaggctggagatgtgtagccggttctttaattttattgcacgtttcgttatgattacatgaagtaatctaatctaagcacaagtggcactgctgatataaactttcgtcaacataagctagagaagagtttgctgtaacatgctaacagcttcgaaatatctgggtttgtttaggattatattcatgatatttctttatgccacttggtttcatgtttgttcatctcagtagctaaattcaattttcttgccgagtccctaggaattatttttcatgtagtatgttccttgagataactgatgctaactatagactgcaagagaatgctgtgtcctcctttttccatatccacacactaagtagcctattcagttatacataatttgactttctgaatttcaatatgtggtcttccttttatagactgtaagatagcatagcagtgttttcaacattgttttgcaaactgtataaattcaagaatgcattatgcctgtcctttgctactgtgtattccgtttatgtcttctctttttggagcatgaatattaactactatgtaaaaaatattgcagccatctgtccgtaagcaacaca

SEQ ID NO: 111483 - DNA, 647 bp, Setaria italica
  Intron number 2 from transcript Si019011m (locus Si019011m .g) derived from phytozome v7.0 (chr-ID scaffold_1; pos 10 088762 to 10089408 reverse strand)
aattgcagttgagctggcttcttgcaggactttaggtaagacaatagcaaatctggagacagaactctctgctgcaagaactctacaagattattttggggtgaatccaaatccgttgttttgctatgctgccaaagtttctgtggttctttctattgcttatagtacatctaagagaacaaattttctttgaggtaaaaataaggaaatcagttgcctgaactcttttgagttcatttggagctggtctccttctggttgtgttttaaacaaaatcgatgcctgtcttttctttgcagaaaaggatcatggatgatggcgtgatgctgcagcttccggtggatttgatcgataagatcctgtctcacatcaccaatcctgcctccctagcatgcttcaacctgcaagttttggcgtaatatcataaaggggagaagcttctttcttgattgcctcaggaagcatgcattgcattgagtgaagaagcaacaaaatggcatacatagatcatatttatccctaatcaccttgatttgaatgaattaaataacttgcagacaacttaaaagataaatcattgtacaagctgtcggtttcactatctatatgtgacttacagacgtctaaactgttgaacataccctaaa

SEQ ID NO: 111484 - DNA, 950 bp, Setaria italica
  Intron number 2 from transcript Si018394m (locus Si018394m .g) derived from phytozome v7.0 (chr-ID scaffold_1; pos 41 753124 to 41754073 reverse strand)
tgattattattcaaccaggagaggtaagttagaattatcagtaactgatgcctattgtttccaaaagtagttttgtttgctctgtctgttgattatgtcctagtgttcagtgggacctgtttccttgtgtcacgagtgatgcttgtttgcatcggacgctgcagattaccttcaaactgttttttttttgtttacccagtatgcatatccattcaatttccttatgtaataatgttaatcttatatatgaggtgtctgaataggcaatggcatatgaacctatatgtattgtagcaaactctctttggtgatcagtacagtttgttgtgtttaaattcactggtggcatttattggcttctattaccgctatgcattaagctacaggcattttgctagctgtcaaatgagcaatatcattgatacatgaacaggttgtaacatgggatggtcgcagctgcattagcatcattgttacattgcgcaagctaactgctctagatggttatacgcgctgatgatgcattactagcattgtgccctcaaaagttacttgatgtggcactagaatagattttattatcgtggcaattaatactcctaatgacttaatccaagtaaatcctctatccttgcgaaccgatgcgcttatgcttttcttttcaaaaacgaaaaacttttgcgcttacaaggttccggctcaagcttgcttgccgaactcaaattgaaagggaagtttgactttctgggttttctaattgagaataatctttttcatattgtttttgttgtgacctggtcagaacaatgccacttgttacctttggtaaattccaaccttggggggcgccaactactcgacaggcaaaattagagcttggctgtttcaggaaatactaaatagtttattattgttgaatagcccaattatagctttcttatctgtgcagg

SEQ ID NO: 111485 - DNA, 704 bp, Setaria italica
  Intron number 4 from transcript Si017944m (locus Si017945m .g) derived from phytozome v7.0 (chr-ID scaffold_1; pos 41 519481 to 41520184 reverse strand)
gtcccagttcctgtgagtctactgatcctttgaagtcaggttaagaaatagcgttttcagcttcatttgcataataaatagatccgcttcctcaactaccagaagaaagaaagtcttgcttctaaggaagcttgccaagatcatcagcaaagatgcctgcatctgtttgttgtgtagccaaaatcttattggggaaaaaagaacatgaatatcactttcgattggaccactaaccttaaatgccaattgactttaataatgatgtgacaacaattcctctaaaagtctttaaataactgaatggacaattaactttgcatgttctttggtcttaatgtgtgtcttggaaaagttatcctaggcggacgcgaaaattgtgtctacctagttttattggtaagttttggaagaaagatataggttttgacctttcttagtatgatttgtagtgctactcgtagtttcactacccccagataatgttgtcaaaactcctataagttactgcttttaaaacttagaatgatactatccaataatcttaataactgcatagcaatctgtccttttctttcccattatcctcgttgctatgaaggaaatgaacttgttgtgagtggctgtgctgtatctgtttttctttttctgtgtctctgactccatttccaactgtggtccaataatctgtgtctgctttgtccagc

SEQ ID NO: 111486 - DNA, 170 bp, Setaria italica
  Intron number 4 from transcript Si017637m (locus Si017637m .g) derived from phytozome v7.0 (chr-ID scaffold_1; pos 87 85047 to 8785216 reverse strand)
tggggagctcaggtgacctctacatctgtaactttgtgctacccccatccccactccctctcttctccgtcaatctctactgttgttgtcaatctgtattaatatgtttatagtgcaagacatttgatttttgtttgtgaatcaaagtcaattttccataattgcagccc

SEQ ID NO: 111487 - DNA, 601 bp, Setaria italica
  Intron number 2 from transcript Si017637m (locus Si017637m .g) derived from phytozome v7.0 (chr-ID scaffold_1; pos 87 85449 to 8786049 reverse strand)
gcacaccctccaaggctccaaaggcatcagaacaagtaataaacactttgaccttttgaaatggcattttcagtgtttaattttttctctagtttcctaaagggttttttttttgctagtgcaataatcttatggtacttactggctcggatgattatatcgaatatgtgtgattgtgctgcacccaaattagggaaacatgccaaacaagtcatatgaattggtgcttttgtggactaatgcatagaagtacacattctagttttttcagattatgtagctgaagaactattttaagtcaatgccttctatgctaatatattcttggtatcaaagttacagtgtggaattgtatagatttttctaagtagcattttaataatgccacggactgcactaactgcagtatgttctgccatatcctgttttatttacataggctagatccttccactggcaaaaggaaatatctatctaagtcaaaacacaacccccatgtttctactgtgaatacataatatgcttgcttacccttccttgtgtgtttcttacctgtctgttctcaggatcaacctccagccactacgtctggtgcaacagc

SEQ ID NO: 111488 - DNA, 519 bp, Setaria italica
  Intron number 1 from transcript Si040285m (locus Si040285m .g) derived from phytozome v7.0 (chr-ID scaffold_9; pos 58 630939 to 58631457 reverse strand)
atgtgtctactagcaattcaattcaggggcaggcagctaggctcccaaaaaatactttggccatgtatggatcggcatcgcatggtggaaaggaaacaaacaaaacatttgcatgcggcattatttggtttgcttttgggttcagtcgagtcggcatggagtctttgagctttagcttgcatcggtaaaaggtaaagtcgtttggaatttgttgcaatgcaatgtgcagggcatgttatctgttcttgtcactgcaactactgcatatatatgctttagtttctgggaaagtcaagtcagggcttgcttcacgtgcctagctgctcacgcatcaatcaatcaatccactgactgctgccgaatgctcttgctgttgagtactaattacatacattgttagaatgctagttagtgtaatttatgttttcattattaatttatagtaagtttacacaacgtaacatgaatgatgcatggtatataggttccttgagcgggcggcgatcttggagccatcgc

SEQ ID NO: 111489 - DNA, 328 bp, Setaria italica
  Intron number 1 from transcript Si036982m (locus Si036973m .g) derived from phytozome v7.0 (chr-ID scaffold_9; pos 79 03777 to 7904104)
gcgcgccctgcgtatcaaaggagtgccctcctgatgtatgcatactgtgtggcaccttcccttcgaattatgctgttgctgattgtcagtttttttttcatatggaaattggcactatcttacacagttatcagttacagggcatggtagattaaccttatcgtgtgatacttgctaatttattaactgttttcagataagaagaaacacaatatagctaatattcattttaatgtattcacatgtgttgtccagcttacagttgtatacttcttgtgattttattgtttctgaatttgattttgtgatgcagctatccaatcggctg

SEQ ID NO: 111490 - DNA, 1043 bp, Setaria italica
  Intron number 2 from transcript Si039551m (locus Si039551m .g) derived from phytozome v7.0 (chr-ID scaffold_9; pos 23 007430 to 23008472)
gggcgcatcggccgcggctacctcttcgatcgcgtgtacgtactgcttcttctcccgctccccgatctgttcattcttggcccgtcgagttagtctcgcgtcatgtaatgtggatcacgtttccattccccacttttcctgtgttccttttcattagctgaatgagctgtgaatcgcatctggattaccggaataaaattggttgctgatcgtaggatgctgtgcatacttgtgcagagggtcgtacattggttgtgaggattgggagggacttcgttaagtggcgaaaatcttggtccctgtggtctcctgccctggcacatattttctactgggttcttgaatctctaggaatcgtgtcgagttccctcgaatcttgtggcgtgcaaacacatacgcgttattcctctgagctgctgtactttggtcgatccaatagatgggcaatgacctccgaaacaaaaacagcaaccctgtagaagggaggagtgggggtggcttaggtagatgcattagtaggtgatgaagttgatttcagatgcatatcaatggtagagcagaaggtttttgggtattcatcagaacagtgaatggtgttcaagttgctcttgaattataggtagtgataagagaaatcaatggaatggctgttgctgtttgcctatttcttcgcggtgaattctaggtaaaaacaacagctgttttcctccctgtgtaaatttagttagattcttttccaagccattcaactgttcaattaattatcgacacactacaaaatatcataacaaactatatagtgccacaaacaattggccttattctttcagcttccttctgtattcatgtgaagtatttcctctgtttcaagtctgaactgattactgttttccaaaatcactggatagatgaactgatctgtttgcttgatggacttttgagtcgttaccattttgttccgtttatttctccattctatgttttgtgatgtgtactgccacatttcagggtgaacataaccctgggccctaacgaggatcggg

SEQ ID NO: 111491 - DNA, 1005 bp, Setaria italica
  Intron number 2 from transcript Si014693m (locus Si014693m .g) derived from phytozome v7.0 (chr-ID scaffold_6; pos 34 005716 to 34006720)
caggaggatagctcctgtgggttcctcaaagggtaatacattctgcaactgcttgatgttaattaattttattgtcataacatctcatttttgtgtgtcagtgtgcactgtgctatactgagcaaaaattcacatttttagttagaattaagataggacttattaatttttgctttggtctatttgagtcttctttttttcttaaataaaaaaggaacaagcaggagttctgctgttcatatattaataaagaagaggagcaaagttcagaccaaggtctatttgagtcttgaatagttgaatgcatattactagtatgttgaatttaagaggaggtccatgtttactcgaaatagtagatattactgctgattctggcttatattgcaattcaccctgtgagttggatgagaacttggtctatgcagctgatggagagctcatcagggtgatgcttattgcttattctggttttaagttagctgtttctagtgtcttgcagaggggagagcaagatgcttgtaacattatttatcttttggtccctgtaccattgtttgcgtgtctgtttaagagctaatatagagattgctgttaggcatgttgccagtttacattttctatcaaggacatgtctttttatcaaatgctgttgctatatctgttgaattcaaaaaaatgtggaactcaagagtgaatgagaaagtttgaaagatgctgcacatatacaaatgtaatcttttgcatgatgcaataagattattcgctttgctaaccattaaaaattatgtcataagaaatttagagttataagaaataggcagtatattctgtaatagttggcgttcattcagttataacatgagtttcagcatatctatgtacatcacttgcggcatcatttgctttgcctgatgtcatgtgtcctgcttaattacttggtctcattttgatctgtgttcctctccagtttggccgcgctctgctgctgctgcgtgctggagg

SEQ ID NO: 111492 - DNA, 583 bp, Setaria italica
  Intron number 3 from transcript Si036691m (locus Si036691m .g) derived from phytozome v7.0 (chr-ID scaffold_9; pos 45 208647 to 45209229)
gctatgtgagtacacttctgttcttccagagcattgcacattgttaattcttactctctctgttccaaaatgtaacatgctttagttttgtactaagtcaaacttatctagctttgcttaagtttattgagaaatacaccaacatctacaatatcaaattagttttattaaatccattttgacatatgtcttgataccgcagtgatttgttattgtagatgtttatattttttttttataaacttggtcaaagttataggaactaaaatgccttacattttgaaacggggagtaccatattttactgccgtacaatattctccaaatatgtgtaatgccataactttacctagaattatgatctttgcagtaggttttgttgatttcttgatgttcctgatttcctacttgatcctacactgactaagccaagtgctttattaagtacacttgtggcatcggatagtctaatatttacctgtttcccccaactccggcttggtggagtacattgtgttacaaactgctttatagctgttcccttgttatcttgctgacatcatctctgaaaaataggtacttg

SEQ ID NO: 111493 - DNA, 401 bp, Setaria italica
  Intron number 1 from transcript Si034908m (locus Si034906m .g) derived from phytozome v7.0 (chr-ID scaffold_9; pos 34 076488 to 34076888)
ccaccactaccaagtgtcgaccatcctcgtaaccggtactttgctgaatcttcctgtcatgattgatgttagtttccttcaactttgatttaggattgatggtatccgcaggaatatcttgtaggcagctgttttcacttttcagtacctttgttggaagacaacagtaataagctcctgttcagatctttgttctcctcatatattgtcctgaaataactgtttatttttgtttctaagttaatcttcttcttgtcatctctacgttaatgctctcgacgttatgttgctttcttcttcttgcaaagtattgtgctgggaaattttgttaaagcctcctttctcggcatctcacagagtaactgatagagtagctttctggaacaccacaggaggctgct

SEQ ID NO: 111494 - DNA, 711 bp, Setaria italica
  Intron number 1 from transcript Si018299m (locus Si018224m .g) derived from phytozome v7.0 (chr-ID scaffold_1; pos 37 139800 to 37140510 reverse strand)
gaagtcgcgggggattccaaggtatggagaagtttctagatgctactgtttttttttttttttttaccctcgtaagatcttgtagagagatctcgatgccattttctgctcagatgtcttgttttgagcggtgatcgcggctggtgcatgtgtgatagatccggggtttggctctctggtgtaatggttattttccgagtggatttcacgagtaggttggggcgggcttgagagggatgttcttagctgcaagttattcgaaggatattccagattcgtagttaattagatggctagagatatatcagtttcgtgattgattagacaggagcccagtttcctatctggatttcgaattgacttgttcctgatatgcttcatttttggtttctttttacgctgggaaagttagctgctccagtgcacggtctgatttttttttaactcgtactatggtgatctgacagtatacgtagctaatgatacaatgcccatgatattttagcttatttagagccaatttaaacatctgaaaaaacatgatttggggtaagctgatttttggtattcgaatgattcagcgatgatactgcattatgttttcggtttaatgtcagcatacatttctcaaacaatttaacattggttgctgagtgttctgacatttgtttacttgtgcttgagtagcttttggcgtaattggcgtactgc

SEQ ID NO: 111495 - DNA, 393 bp, Setaria italica
  Intron number 1 from transcript Si035906m (locus Si035906m .g) derived from phytozome v7.0 (chr-ID scaffold_9; pos 71 60473 to 7160865 reverse strand)
tcgaccggaggcgcggcttcgccttcggctccaaggtagggaggagcttctggttccctgttacggtgaaagctttgtgtctaaacgggtgtagacttctattattagaatgatgaaaaataagttggatcttatctctaacttctttgtggcgggcttatccatttcctgttttttttttgtatccttgcttgcggaggaaggatttcaccctgcttggttttgatgtgattatcatgcaatctgttcattttatatcttctcgagattcggcttgtcatgtatgattcgtttgagcatggaaatggggtggttgcctgatgcttttgctcgttacgcgcatggtctcgagcggcagcagctcaactctaggaccaagaggcgaagtagtgt

SEQ ID NO: 111496 - DNA, 791 bp, Setaria italica
  Intron number 1 from transcript Si018504m (locus Si018504m .g) derived from phytozome v7.0 (chr-ID scaffold_1; pos 48 26989 to 4827779)
ccccgcacgtctcctccgcctccgcctcgcgcagggttagggtttgctctgctccccatcttgtcgcttttgtttttttcctgtgagatttggtagggaaggcctgatctgtgtcttccggtgcctgattcagcgtctcttgatcgatctgcgcggttttcttgtgatttttttggggtgttgattcgttggtgcggggaattccacgggccgtggaatcgcgaaggggacgggcgcttcgaggttcgtgtgttgattcggtcttcggttgggggtttcttctgttcaggttgagtcttttgggtggggaaatgaaaacgcgttcttgtttttttcttcttcttattttttttaaaaattgtatgaaggttgtttctcttgtccaaacgattaggctttacctgtcttttttttgtctgattttttagagttcgtagcgctgctaaatgttactagtgattcaagtgttttattccatggaaatcgtgcgtatctagttgtaagcggtggattagttaaattacttggcagatttggtgcatattgtcctcgatttgcatcaccatggtttttttttacaaagattggaattgatataccctgatttgtttaggaatgtcgttttgatttgtattacacaacgtattttgtgatagtggcttccgcgatgctctccctaaaaattaggatctcgtttcatcaagtacaacatctgcatgacttatatttgctgaagtgacaaatcgtgtggttatttacatcgattgtttaatgtgcagcttatagtagtc

SEQ ID NO: 111497 - DNA, 707 bp, Setaria italica
  Intron number 2 from transcript Si035450m (locus Si035450m .g) derived from phytozome v7.0 (chr-ID scaffold_9; pos 10 752148 to 10752854 reverse strand)
gaagaaggtaaggatttgcccctcttcatgtttccatttcacaagccttggcttctcaggataaacaggaataagattaactcatttctgataggcaggaaattggttcattttcccactaattcaaatgtattggatctaatcgcctatgtccaaataaaccaatgcaattttgacaatggtggtggtactggaatcggcttttccttatgtgacctctgattgggatcaggtcgctgagtcgacaaatcaatgagccatttcggttagcgatctgatgctgtgaggcagcacagattgaaaaaataaaagacaaacagaattttcttcgctttcttctcacttccacctctgtctctttttcttctctcctttctacttgtaaataataaaaaaccaagtgggatgctacataagcagccagccttgcatatcaactttgataaccatcaccactaaatagggatttgtaccttctcaaagttgaggggatattaaataactggtttcacagttttgagtagagggtatagtttggatgaattatgattgtattatgttgaacttagaaaggtttaaattggactttcctcttttttagtgtgattcttttctctgtttgatttcctacatctcaagagtaaacgaaacaaaccctgcaccttttttcaggactgttttattgctttcaactctgcttactagtg

SEQ ID NO: 111498 - DNA, 638 bp, Setaria italica
  Intron number 2 from transcript Si035775m (locus Si035775m .g) derived from phytozome v7.0 (chr-ID scaffold_9; pos 57 238204 to 57238841)
cgccctcgtcccctcctggaagccgcagctccctggttcgaccccgttcccttcccatctcgcggttcctaattttggttggttgtgataaaaatggcaatactgtattgggcaaactagggtttctgtgctgatcttagtgtctccctggaggttttggcttgtgtaatttgattataactggagctcgagatgctatgtttaaggcaccaattagggttttagaagaagcctggcatgttaaacagggcctcttgagtgtggtttggtgttgtgtcaggggtctatgagctgctttaaggtgatttggtcatataaatttttgtgaaatagctagtttgtggcggctttgtttactaagtattgacgttggttgctagcagagttttctatttatacatgagtgtagtttctgtaaaaaaaccattggctcgctcttgggctgctttcttttgtgctttatcagatagatgcattgcccttcaactagtaaattaatgactttgttaacattagtttatctgtatgaacatgaacatgcagtcttaagaaatcacctccttgctggcaagaaattaaaatttgcattttcctacattgcagtcactacagtgctaggacttgaagaaggaaaagat

SEQ ID NO: 111499 - DNA, 836 bp, Setaria italica
  Intron number 1 from transcript Si019992m (locus Si019992m .g) derived from phytozome v7.0 (chr-ID scaffold_1; pos 90 55102 to 9055937 reverse strand)
ctgccgctccaaacgctcttctcctgcaacagtaagtttttcgcaacctttttcttcatgcatatgtcgtccgtacgttattttgatccgtggatcagatatggctgcaaggagattgacaacagcatggtgtgatgtgttttgacagcgcaacaagtgccgccgataatgccaccgatggcggtgccggcgcctgccaatcctctagcgtcaccaataaggtgatttatcttctttgacacaccttattctgactgatttgttaaagtttgtgttgtaatcgccacccaatatcctttcctttttgtctccaggtaatatatgtcatagcagtagcaactaccaagaggatcagagcacggatggtttgcgtcaacgttagcactaggggtagtggggtacagtcatgttagttttaagttgctcttaggataatagcattgtttaggtagaggggaattgtacttattggtacgatcatgtaatgcttccgttgatggatgcaaccgtcaactgccgatatatattagtagatgttaaataaatataatggtggtctatgctatgacaccttggatctgacgatctgatatatttgcttctgaatttactagcaagatgcccgtgcgttgctacggtgaaacgacgttgcttagtgcacgatgttttttatcatgtcgtgtagcgcaccacattttttatcgtgttgtgtaacatttttatcaccatgctccggcggtttgttgtgcgtgcggtctccgtgcggttgggatacggacacgctcacgcggcgcggccgaggcggctcgggcgcggccgggtggggctgctgtggt

SEQ ID NO: 111500 - DNA, 804 bp, Setaria italica
  Intron number 3 from transcript Si018691m (locus Si018691m .g) derived from phytozome v7.0 (chr-ID scaffold_1; pos 41 786370 to 41787173)
caggaagaaaacaaattatcttattgtcgataacagtaattcctcgaacttgttgatatgtgaagtcttttaagttgtccattgatatatggtagtttgaacttgcctaacttttacatgataatgctgttaactgtgacacaatatcatacgcatcatgtccactgttccatattactgatatagaggtaaatgttcaacctgatgaatcttgaaagctctttgatatagtgagctcacaggaaaatggcgtgtcactcaatttatcatagtatcagtttgctggcagatgtgctttaggaatccacattcctgcttagtaaggttttatgtggtggatttgtgccaataaattaggctgaaacatttgcattatcgtttgtgaattccaatgcccgtttatctaacctttcagacctaaattatgtcaacgagctgaaaattatgttctggaagatatccaaacttgcaaactggtttattaatatttttgagctttgatttttaacattgcttggacaatagaccaatggacacctctgtttttctttggcatctagtatacctttttgaatgatgaaagttttacctttgggacaactgatttttattcgtcagctcaccattttgtgattgtttcatgaatttattcgaaatgctgatttcatagcaataacttttgctttatttatactcttattttgttagatggtaacaacctgtgcgcttactaattagtatttgagtaacccttggagtttatgtcattatatgctacagaaacaacagttaaacaaattgaag

SEQ ID NO: 111501 - DNA, 543 bp, Setaria italica
  Intron number 1 from transcript Si015243m (locus Si015243m .g) derived from phytozome v7.0 (chr-ID scaffold_6; pos 33 079806 to 33080348 reverse strand)
gagctccgccgcgccaccgccgattcgcggaggaggtgaggctttggctcttgttcatggtgcccatcgcccatgtgcttgtttgggtgtttttgtcgtcaagaatctgttctctctctctctctctctctctctctctctctttttccggctccaaatcttgttatgccgttcgtttgctttctagggttggttatcgtgttgtggggtgttgttttcatcctccaatgattgagatgagaaaaaattgtctttccttaaggaaacaattcaatgactaagagttaatgcctgcaatttgattacgttttgaagaaataactcgtaaaaatttggtatatcttgctttatggttgtttgattgtgcacatggctatgaattttgatgagagaaatttccgcggaactggtcatctacgtattatatataaatataattggactggttccttctccctgctgaagttgtcatctttgtatgattggagcactcgttctttctacttatgaagatgtattggtttcttttattttcttgtagat

SEQ ID NO: 111502 - DNA, 570 bp, Setaria italica
  Intron number 1 from transcript Si036210m (locus Si036206m .g) derived from phytozome v7.0 (chr-ID scaffold_9; pos 15 976508 to 15977077)
ttgaggtaccgcggccgcgatcccccacccaacctctcttctcttcgcttctccctcctcgacctgccgtgtagaaaggcaaggagagtctcgattccggtgggcacacggttgtgggcccgtcgtgtggcttcgatcttggatcggccgtggcccgtggtgctggtggttcttgtggtgttgttggattggtggggttagggtttctttccccgatctttgttcgtttgtttgcggtactcgctgccgtcttagcataaaaatcatgtttagatcttgctaaattgcgttaggaggattggaaaaattctcccttttttatgcatcgcaactaaatcaagttatttggtcatcttggagagatggcgtagattatcaagaagacaattgattcagtgtttttgactcggatttgcatagtggaggaacctggattcataagtaatcattctctatttcttgtgctgtgtgcaggtggctgatggttttcgatcatcattgaccgtttgcaggacaaaatccgtgatttgatcttaataatttcattttgcagttggatctcattgattt

SEQ ID NO: 111503 - DNA, 951 bp, Setaria italica
  Intron number 1 from transcript Si017596m (locus Si017596m .g) derived from phytozome v7.0 (chr-ID scaffold_1; pos 32 288069 to 32289019)
ctccaccatcttctacgacacccccgccactctcggtacgcacgcgctcgcgctccccctcttctccgactttgagtgcttgtagggacgtttgcgcgcgcgcttgtttgcggtaaattagtaggtgcctgttgtgcctgtacctgtatgaaaggtgttcgtcccattgcctctgtcgcgcgctctaagctggggtcgcggggatgtgatggcccgccggcataatgtgattatgcgatcgatagatgtaggcgaaaagggtgcagattcgcacaagaggctgcatctatggtcttgtgatggaacgcgcctgaccgagagatgtaggagctcagagtggagactagcaccgcctcttttagctcattagagtcgaaatttgatcactaatgtcagcattaaggcttccttgacttcaaaagtatggaagttctatttgccacatttcaatggaggatctttaagcagcacacacatactaaagtttaaggtcaaagtttaactaagctagcaggcagtagaggaagttttggtgtgggcatatatgtcattttttttaagcttattgtttgcttcagttgttgaaagaaactgccgccagtgtgatctacatgaaatgcttttttcccctactaagccaaataaaagttttcaaaagcaaaagatgcattgcagttacactatcgagttttgctgttgtagtatgcagtgttctggccactgtgccaagttccatacgttcgtcacatccaatcaatgcaattgcctgggagaggaacaggaatggatgatttttctgcttttacctgcatatcagcatacgatgaagtattgtactaatattgttgggaagataaagtgtatttcaataaacttatccatatgggtttgttgtcaaatactattttcactacagataaagcagagagattgatagcagaggctgctggg

SEQ ID NO: 111504 - DNA, 980 bp, Setaria italica
  Intron number 3 from transcript Si017255m (locus Si017255m .g) derived from phytozome v7.0 (chr-ID scaffold_1; pos 39 623750 to 39624729 reverse strand)
gcgacttcaaggcctccaacatcctgctcgactcggtgagtgcctctgcatgccttgcctggtcttgcttttactgccaagtctcatctcgagcggcagatgacttattcttcgttagtagctacgaccagttcacggccgggattaactagcttgctttaatcccaaggaattcctgtctctttgccgacgctacctggaactagctagtactagtattacatgccaccacgttttattttcaatcaactagctggtcaatctctgtcgatgtgtcgtacaccccgatggacacatctgcctgagcgagaggatcggagctccataataaagctctgatcttattcttagctgtggccgccaacttaaaaataaaacaagtaaaatatctagaaacccagcaaattaagaaaaataagtgtccttttctgatttctctacttctcctaccgaatctgacaacaaaatcattgctctccttgttattccaagcaggcaagaaacgttcttttcccgttagttggtgcatcccggccggacgatccaaaattggttgttgccttgtcttaggctactacagatagaccttcgtactagctcgaagcccgtagggtactagacgactagtactagcatcggttaaccaaacacccttctctgctcttgacttgagaagaaccacaggaattgggcaattggcgatacagacccgatcgttccgtacttttcccagactagtaaaatgcgcgtgatgatgaatatgcgcacgcgcgcaagcatcaaaatttgacacgaaaacaacgtaagtgtctgctattgttagcaaacacgcatcgacccgacacgtactcctcctatctaggataacggtcgaagcaaaacgatatgcccgtaatcaacattgcggctgaccagaactgagcgaaaatgatatctgcatcgcaggattacacggcgaagctgtcagacttcgggctggc

SEQ ID NO: 111505 - DNA, 694 bp, Setaria italica
  Intron number 4 from transcript Si018624m (locus Si018629m .g) derived from phytozome v7.0 (chr-ID scaffold_1; pos 30 087172 to 30087865)
aagaagccataaaacaaagcacaggttgttaatctgacatctctctttgacgaaattctgttatccactctaatgcaaaaatggacaactaattgctcatggataattaattgctcttcttactatcatccactgcttgtgctaactccttatggttccattggcatgatacagtttatcttctaacctcccttttattttgccataaatccaacaaagtgacacactaaaggagataacataggttcttaaatctcctgtgacgattttttatctgtgaatcagttttacctacctgtaggctgtagtgcagttcttcgacttatttacatttggattcagaaggtattagtacatagaaacatcacctatcatgatctacttgctgtgtatggtatatcaaattcttttcagcatgctcggttttctcttcacttcagtcatgacttcttctaaaccaccgattttcaacaattaactgcatggtgagaagatgtgaagccagtttggtttaacatgacaaattagcgctttttgtgggtaactaacaatggttcggctaactttgattatcacaaatggagaaatttgtcccatatatttttccttttgactattttgtgttcggagcaaggtagaactaacaactcatgtccctttgtagcttttgaggagcaccggaaggttcactacg

SEQ ID NO: 111506 - DNA, 1016 bp, Setaria italica
  Intron number 2 from transcript Si038130m (locus Si038024m .g) derived from phytozome v7.0 (chr-ID scaffold_9; pos 47 748329 to 47749344 reverse strand)
agaaggtattctgtggtatttcttttctctattttcaattagattgaaagcactgcaataattctgttgcctgcttttattgaatacgtgcttatgtttaggacaaggtagtacggaaattactgtactgatatctgataagcatgtgatgtttgcaattgtgagaaggttgttgtcaactagtgttaaaatgctgtacatgcccatgtgttgaatttatatgctcgaaataatagttattgtctatgaatgtagccaagaaattagagatgtaattgggctagcccgcaaaccagcatataggcttaagtaagtgggttgccggctagccacttgcatccctacaaacaatcccttttaacttgcgatatgatgcagtaagaatattctattattaggaggactatgcacatatgctttagaaaatttgatgattgcattttgttaatgaactagagcactaggtaactgataggtccttgctactctgaactcattaagcagcattatctcattgtttgaatctttcagctgcttctgaaactttggagctttaactctttcaaaatagaaatcatgctatgtaaggaaaagctgtgattattatatttacatgttgtttagttctgtgggctttgtcacttctatagaaattagtttatttggatgagaacaagcaacagggttcacagtagccatgcatttgcacagcatatggatgtttaatggtggctcaatatgtcagttgtcatattagctagtatatgtaatgaaattggtctgtggattattttaaggggtcttacagtggtaggggaatcagcattccattttttttaagcaactactgtacagtgaattactaaattacaagtttcgagtgaaccgagtgttcagttgaattctgctctttctcttttgctcaagattgtaaattacttgtttgtaatatctgaactgcatatgatgttttggttacaggtcttggctttcagagacataaaccctcaagcccc

SEQ ID NO: 111507 - DNA, 729 bp, Setaria italica
  Intron number 1 from transcript Si038130m (locus Si038024m .g) derived from phytozome v7.0 (chr-ID scaffold_9; pos 47 749363 to 47750091 reverse strand)
gcgctcgccgccgtgcccaacgacagccccaccatgtgagcccctgccctccttttcactctcgcgaatacgcaagagaagtgctcttcttttgtagtaagaaggggaaattttggtccgattgcaagctattcgacggccccgttagttttggagcccctgctctttctccgcgcttttgttccaagaactcaactgatttttagataccgaagtatttcggtggtgactgcttcatctgtcactcgagacttggttgattgctgatttggaattttggatagtttaaatctcaaatgtcgtgagttctctctccagtttcgaataagttggggcccgtagatttagtctccgtgaacgggatttgatttggtccagagctagtctaacgtataatgaattaaagtataatgatagatatgtctttgaattatgtgaggccagttgtttctctctaggaacattaacctgctgaattgatcaggcttttcttaagaactaaattggtgcaaaaaaggaaatgtcgagttcattgagatacgttgcgtccaattgaaaccagttgctttgcagtagcaaatttgaacccttgctaacaaaaatctagagaatgcaatgaaagggtcgaatatttaaacacattgctgagcaaaggtttttgagtattactttctgaatcttttggcgtctgcagatttgacaagatcatcaaaaaggaaataccatcta

SEQ ID NO: 111508 - DNA, 883 bp, Setaria italica
  Intron number 1 from transcript Si037052m (locus Si037052m .g) derived from phytozome v7.0 (chr-ID scaffold_9; pos 31 18269 to 3119151)
gcgcggagcgattggcgggtagattgatcggcacggtgagaaaaaaaaaacaggagatttggcagaatcattttctaggcagtgattttttttctcccgctcctttcatcacacctcgtatctaagatgggatctctgtgtgaggaaagatagggctgataagaattgttttcaattctctcattctttatagtatagatagatgagttgatttatcgttgcctcgtccgcacaagcacatgattaacgagatcaactcatggttctttaaacaaacaccctataaatgcgatggagtgattacgatatttgtaggtttcggtatattgctactccagatcaagaaatacaaccttctagcttcgccaggattttgtataaggaatatcgtcatgttcataaggcacaaccccaaatattgccaaatttggttttagaaataaacaatctcccaaatgtctaacccatggggaaagttccttccatgagagcacacggtctgatcttctattcttctttctcgttcatctcatgaaggcatgatcgttcacagttgggagaaggttgtggcactcatgttagtacgtgcaaaaccatttttcgcttcaataataaatctatttattcagcgggttttttgagacattattcagcggttttgttctgccgacgctgcaaaggtcgctttaataatcgaaaatggcattaaataagccaattgggcacttaaaaatcaatccccaaacctttccccttctctctctctctctctctctctctcctccattcagatccgcatcacacagcgcccgccgatcgaagaagccaagcagccagcccgaacacagctacgcgagccaccgcaccgatcccaccgcccgag

SEQ ID NO: 111509 - DNA, 941 bp, Setaria italica
  Intron number 2 from transcript Si034590m (locus Si034590m .g) derived from phytozome v7.0 (chr-ID scaffold_9; pos 54 133442 to 54134382)
aacttccggaccagcaccgccgtccccaagctcgggtacgtacggacgcatcccagcctctcgcgcccctcctcgcgctcggtcaaatcctccgtcgagatcagcgagtcggcgttcccatttattggaatcttgcttcgcctgatgacgacccgccgtcgtcgacagttacgcacacacttgcccggccggatgcgtcgaatctcctcgattttgaatttcagtggtgccctgcgttttccgtttttgttttctttctcgcccctttttttttccgggggttattttcgtgcgccgagaccgcgagagggacatggcaaaaggccaattgccttccttgttaatttctcggttggatttacaggaggccagcggaacattgcctggctattgttcaacgttaccggcgaccttttcttctgaacttgcaatttaactgtatttggccttgtttagttggccaatttgggagatgcaaaatcactgtgccagcactgtagcacactgtagcgtttcgtttgtatttgtgaattattgtccaaatattgactaattaggctcaaaagattcgtctcgcaaagtacaacaaaactgtgcaattaatttttaatttcgtctacatttagtactccatgcatgtaccgcaagtttgatgtgatggggaatcttctttttgcatagtgtcaaagttgggagttgggggtaactaaacatggccaagatccagtccagcagggacgatgagcagcagacagagctcatcacctagtatactactggcaagtgtgcgaagaagccagatgctgccagagtgccagctcgaacacttatgttttcttcctgttcttgtacatgtctgctacgtgcaatcgtcctgtcacagtgttagccacttgtccgacagatcgatgctgattcctgttgtgcggtggtgcagggtg

SEQ ID NO: 111510 - DNA, 1055 bp, Setaria italica
  Intron number 3 from transcript Si034963m (locus Si034963m .g) derived from phytozome v7.0 (chr-ID scaffold_9; pos 53 293600 to 53294654)
cctcttggcccagattttctggaatactttgcttggtttgtttcccattctcatacctttgcaagcgatgcctccattcagataatgaaccttcagaacagaacatatgtgaagagggcatgtttttctgcagcctatgcgaagcagaggtattgttaactagtccttttcctattcatagtattgagctcatagtacattgctattgggctgttcagtacaaacaagtcttgttcatgacatgttatcagatgggttttgttttggattctttgtctcagacgtcaatgattaaaatgcgttgcaattgcgcacttcatgctgctctgtttcatcgtatcgagctcatacctgaacgtgctgttctgtttcttcaagttgtactggtctgcgcactgcactactaacttaggtcacctacaaagtatccaaaaatttagtggaatttgtatattaagtttcacatttactttcagcaatttatgcttaccctggcatgtgcttatgtggagggcaggtaggcagtgccttcatgtttagaccttaaattttgctaatattcagtttgattttcagtagagcgttgacagactgcaatgaatctaatgtattaactttgtgagggcaacccgtgaaaaattcagaaattactgtaactaactagactgaattcagagaaacaggacggcaagtagtttgaatcaaatgttcatgtgtttccagtttcgtaaatgaatccatttgtgatgtatatgttgcaacttggaagtgtcttccagtaccattatttgagtgtcttccagttatacaagtaaaattgtcttcccatctgtctaattacgcactgaatttgtaatttggttatagatgaatggaaagtatggtgttctgatgcatttgtgatcttggtttgtgacttagtatcttcaacgtttgtgatattttataaataatagcataagttgtttcctgtttgaatttggatgccattgcgggattttgaagaatagtattatgcaggttttaaagaacagtaagcattgcagagtgtgtga

SEQ ID NO: 111511 - DNA, 942 bp, Setaria italica
  Intron number 1 from transcript Si017733m (locus Si017733m .g) derived from phytozome v7.0 (chr-ID scaffold_1; pos 44 84183 to 4485124 reverse strand)
accaggccaacgtcatccgctacttccccacccaggtccgacggcctccggttcctttttcttttcctactagttgccatcgcttgatgtgtctcgatgcatcatgctcttctcttcctgtcaacctgcatatggctttgatgcgaactgttgatcaaattttcacaaaattaacacgcaatcaaatcatatgtatggattagcaacttcgtgcaaacatttgcgttcaatgccgctgatttctgtatggactcaattgttcacgaccccacctaaaaggaagaaaaggaaaggaaaaggaaaaacgttcacatccttcctcaccacataatgcatttcgcaagcacagttcttagaactaatactaggaagtaaagctggcttgggcgtgtaatctgcccggttatgtgtttattgaggtgttcctactggagtatgtaggagcacttcacatttggactatcatatagatgaatctttataaataaagctaaagtaagccaaattttgtggtgtgcttatggtttgtaaatgatattagaaagactagactcaacatttgcatccatatgtttttgtgcacaatactgctaaggcataaattttcagaaaagagcaaatctacaaccttatggaggttagactcatgctatctttgcagccacttattctaactgtgttgacaataagtactgtaaagattgtatgtcactgccaaggactgaaacttgtgcctccagtttccttcagtttgttgtaataactgtacttaatgttgcattatgaaacctggccctcagaagaaggatgcacatgcacccttaacccttcgagcgatgaatgaatatgatatttcttttccatcaggagaaagattcaaaatcttaatggaacctcaattgtacaggcttttaactttgcattcaagggctactttaaaag

SEQ ID NO: 111512 - DNA, 498 bp, Setaria italica
  Intron number 2 from transcript Si013951m (locus Si013951m .g) derived from phytozome v7.0 (chr-ID scaffold_6; pos 18 330000 to 18330497)
gagtggcccacaggcgcttcccattgatctcagaggtaactcagattgcaagagtatgctgctatagtatttgcttctagttttgtcgtatatgcttattattgagttttttcaaatattgacaatcataatggaagactacagttcaattcttagttgttacctccatggtaccctttggtgattgaaaacctgatttccttgaaacagcttaactttaatgggcatagaatcagaaaccgtttgtggtgctttaatttaaaaaaaaaaacaaaatatgactaccatagatgataatagatatccccttatgccttaaaaagaaccagaaattgcataatataatcatgtcatgtaatttgatttattgaaagaatgaaaacataaaggactttattgtctgtctgatctgtggcaggaagccttctcaagaactacaaattttctcatgtactgttaacgtttcaggcaaaagggcatttattgctggagttgctg

SEQ ID NO: 111513 - DNA, 1028 bp, Setaria italica
  Intron number 1 from transcript Si036084m (locus Si036084m .g) derived from phytozome v7.0 (chr-ID scaffold_9; pos 64 06248 to 6407275 reverse strand)
aatccgtcttctaccgtcgccaaatccccagtaaggttagctcatctccctcctgctttacttcacttggccagacagttggaggtagcttcgcttacctataccgatctagtctgattgacactttgacaacaaatgcccattagtgccatgtttgtacattgacctgtactgtaaactcaacgattttgcacgtgatttggcaagttggttactgagaacctacttccctgtactttaatatattcatttcaaacattgataatgagtcttactatatggagaattactgcaaggaagctttaaatgatgacttaagaatactgtggagaggatacagcttgatccttatgtgtttactgtgtccccggacaatgcaaattttgggtgcttggttcaatgattgaaattgaactgaaagaagtcgatcaaatccaaacagatgttttggctacgaggttgaattttgtgatttgaagctgattagcagcgctgccaaatcatattgctggacctaattcaaaggaaacctttttcagctgattctgcatgtacagttctacaccttaccaatactcaaagagttcacagattggattgctcttttctgtcatcactgcacatttgcgtttaaagtgagatgggcaccaactcattacagaacactgactagtaactactgccattgggaaggttgtgtggttttgttttttgggaagaccgaccattattgtgatattgcattgggtcatggagggcgtgtgttttccagaccaagtggagcacacaccttgattaactgtgtgaaaaccactgcacatagatgtttcttgctggcctcacagctattgacggattggtattctagtactgtgatggtagatgctgtaagccatacaaaccaatttatacatgattgtcgtgtgtagtatcatttgatcatttggatggttattttcttatgtttccctggtattgagataccctgacgtatttgtttgatttgtgttctgatcacaggtcgcaga

SEQ ID NO: 111514 - DNA, 451 bp, Setaria italica
  Intron number 4 from transcript Si036760m (locus Si036539m .g) derived from phytozome v7.0 (chr-ID scaffold_9; pos 43 811441 to 43811891 reverse strand)
ggaggactgcacctgaagtcttggctgagcttaaggtctgcacacatcacctcaatctttcagattccagtgtttgttttccacagtagatatttgtgctacaaatttctggtatggtcctccagattcagtgtttcgatttttgataagtcctctggaaataccaagttgaaacccaaagtataatcaggaccattcctgcacatatctgtaatctttgaaaataaaagactcgatgaatctgaaatcttcttatccaaactaaaagctagaacgatattgcttttgactctgacaggttttttatgtttaatgattgctttggtatgcttcactgtgttggtaatatcatggtccatcgctgaaggattaacttaaagaatgtatgcagttttttatttctttcattgtaatcaccttcatattgtcctgctgctatttcagagacgtt

SEQ ID NO: 111515 - DNA, 992 bp, Setaria italica
  Intron number 2 from transcript Si013943m (locus Si013924m .g) derived from phytozome v7.0 (chr-ID scaffold_6; pos 16 919401 to 16920392 reverse strand)
agatcatttgggacaaggagattgaagtagctgaggtatgcagttgtagcttgctgataataaatatatattagcataaaggcaaatcaagtgcactgtgcacaattatccacggatctactcccctgcctggccactcaaatagtcaaatgacttaggccccgtttggatcattggaattgaattccatcctaataatcataatttagacacaaattaattaagctaatataattgtatgtggaatatagttgtatattatagttggtgatatgggagagatacttgtatgctgcacttctactatagagaagcgagtctaagagcgtgctataagaattgaattccatctaataaccataatctatagaatcaatttccatctcccaccccatgaatttaagataggcttatatctaaactttggaaagttgtggaatgccacattccaacataaattagcctactccattaaatagattccaattccttggacccaaacggggccttagttttttcatcgtacatctgaatcttgttttctcaattgatattagttgtcctatatccacacaacatttggctcttaaagtgcaaagtactgtgcttgcaccatttcttttaatggcaagggctattatgtaatcggtgtaattcaactaaaagatgcttgatgctatgcatgcactgtttcttccagtattaagtgatttgtttctgtgtaactccctgtcactaaacataggtcgcattgataatgctcacattctgtaatcaaaatcttgaccattattttgaataaaaatgtaccaccaataaattaaaaaaatatgcatcgttgaagtatatttcattaaaatataataaagctattttcatatggtcgacctacgtgctcttacatatgcaacagttactatttctgtatttcataagcttgccacatggttctgtatgatggtttacagatggtactggtcttatgcagggtc

SEQ ID NO: 111516 - DNA, 1055 bp, Setaria italica
  Intron number 2 from transcript Si039655m (locus Si039655m .g) derived from phytozome v7.0 (chr-ID scaffold_9; pos 33 40927 to 3341981)
ctcagggacgacctcgagagactcaagaagatcaggcaggtcaccactccactccactccactccctttaatccctgcttgttagttgctactgctactagtaaagtaatctttacatttgttgagaaatgatgctgctataagatgctcaatggcttgtatatggcatttgggtggttgtgagtttcattgcggaacatgctaaatggcaattaacttacctattgatttaatacattacctagcactatgattagtcgtgttgattcttggttgggcttgtgttctactgaattgaaacgtgcaggctaataaagttgtgaaatgcttaatcaagttgtgaaatgcttagtgacaccagtcaggatagcaagaatgttaaacgaggtcaagggtgtttgggtggctatatctctgttgtgttggaattttgggttcaaatgtgaattatccatcattgaattgatgatgtggtgtatcaacaatgtcacctagtaaggcctgctctacaatgaataccggtttgtccagtttcatatgcacattgacctggttttcatcatctgtttttttggtgaaatgagatgggtacctgatatgtgttgttagtttgggcatctgcatcactgcataagtctggttatgggtgctatgaattttattttttcaggttcttgaaatgttatcgttgagctctacttttactagtatcatttagttatgtgtttgattccgcaattagtgtcaagctgtgggtagtgcttggaaatgcacatcatcttgtcaatcctgacactggagggtatcactagttacttggaaatcagtttgtgttatactgttatctcatagaagaaatgagctttgatgttaatttacacatcctttcagtgcgctttcttgtgtcattttatttatttttttatttatatgctgcttgcttgcttaagtacttgtgatatactcctactcctaattatcatttgtcactgtgcgtgctgaaagttatgttttctgcaggaaccaccgtggtcttgattactggggcctccgtg

SEQ ID NO: 111517 - DNA, 990 bp, Setaria italica
  Intron number 2 from transcript Si013439m (locus Si013439m .g) derived from phytozome v7.0 (chr-ID scaffold_6; pos 19 82906 to 1983895 reverse strand)
cggcacgtcgacggcgccggaggcgagcttcagcggtgggattgattcttatgcttgtctctgcaccgtatagggattgattctgatgcttcggtgaattagtgtaaaagaagattcgtgtttatcttttctccgaacgtggcgatcatgtatatgtggtaccaataagcttttctactaaaactagttctgagcaattttgcttgtgcgggctggagctgagtctatgttgcaggtggccaggtactgagcgactggcaagtaggcatgagtttagtttacttaggcttgggctttgcttttttggaaccacttaaacccttccaaaaccctagtatggaagtttttttttaaaaaaagatacaatagtgtcatactacggtaccgccttaccagctcaactcgatgggaagttgctcccgatattttaatcattcaagtgatgcttgcctcatgatgcatactattggtgactttcttcttttattagaaccaagagcaatccgcatttagatttctgttttgtttggatagaaactatgggttgaagaccctcacatgacatcttgatgcattcttaacataagttgattttggtgctccgatgactgaatggtgtatgcaatatatcatattactcaccagggagcaaattacccctttggcggagtagtttaaactttatactcacgtattcattttgtattgggcaaaatggccaattgttctgcattcagatacccttttgttctggttggtcaattcaatattgaggttcatatagatatgtttgattaattaccttgtgtaaattgatttaccttacccaggattcgagtgttttaataaataaacttctgttctcagttatttcattcaaaagttaaaaagacatttcattcatagagtaaaatgtattttctaaacagcatgaactgattataagttcctacagccacaggagtgaagcaagcactgatatcattgtcc

SEQ ID NO: 111518 - DNA, 587 bp, Setaria italica
  Intron number 1 from transcript Si014305m (locus Si014305m .g) derived from phytozome v7.0 (chr-ID scaffold_6; pos 25 910376 to 25910962)
gaatctaggtacaaaacttactcgccatattgtgagactgagatttacctgtctccgtttataaggctctgcagtaatacctataacttttctttgggtctgcaattttttctagggccatggtttgttaatgttagagttagtcaatcctatttcagctcaagctcctcgttcctgttgttgaaccaactggaaaagaattcagaagtttattcacttagtcgggacaaacattttgaattatgtctggctgttcttgcactttgatatgtgaagtgaaaatcttgcaattgaagcctcttttttgccagcacatctagtggagatatgggattagcaatgcttagcctaacttgtaaccttgaatgtatttgttttcgtggctaacagttaaactttttgtagatttttcttcataattgctgtcatttcagttatttatttattttgaatctggtagattctgtcttcagttttgtgtttttgtgctggtggttgttttagtatcagcattagctattgtttctgcagttgacctatttgtgtgtatctgcagagcgagttccagtgtttcctagacaacaatc

SEQ ID NO: 111519 - DNA, 953 bp, Setaria italica
  Intron number 1 from transcript Si036139m (locus Si035446m .g) derived from phytozome v7.0 (chr-ID scaffold_9; pos 10 733246 to 10734198 reverse strand)
gagcagcccatcctccctccccttccggctcaagggtgcgtcgctcctttccccgctcgctcgtcggattacccctttttgcttctaagaatggcgcatccgccgcctgttctcagcttcttccatttcttttcctttctttctttttgtttttttgcttgcacgcctgttctcatctttgccttttgctggtggttgagcgtcggactcgttcttgcagaaaatacatgcttagcttggtgctccagctaccgtccttgatgcggtcttgtcctcaggattggtttagttttctcactgctcttgatgtggaccgacacctcatgtttattcttttcgcttttcccatttctccgggctgcgttgaagaatagaatttggggagaaaaaggaattcagactgggggcgttgtgcctggctagttttgcatactcggtctacgaatcaaatcagtgaaattctttttttttctcttgtttgtgtgtgtgtgaggttaaagttctcgttcagtatccctaatccaatcgattgcaatagtccaaatttctgatcatggataaagaaatcagtaccaggtcaaatagaaggttggcactggattcgtgttagctttccgtggatatccttaatccaatcgattggctcagtcatgatattctttttatctgtcagttagcgcaatccacttcccttcgtgcccttttttttcagtcagaaacgttaactaaaaaatatagctcttggccgtttatgcttcatattccgatcttaaacctcaaccagaggtgaaacataaggatttcatgtgtaatcactacacctatttggttataccgaaggaatcagcgaactctaaaatcattcggatagctcctccaagagttcacgctaaagggtgcttctgacaggatgactgatacttctctgaaattcgcaggtgctgtctgccaac

SEQ ID NO: 111520 - DNA, 1022 bp, Setaria italica
  Intron number 1 from transcript Si017573m (locus Si017573m .g) derived from phytozome v7.0 (chr-ID scaffold_1; pos 48 54174 to 4855195)
ggtttcctcctcgtcgtcggcaggttcatcccaaggttcggccttctggacgcctcgtattttcgaaattggtgtgatgatttgtttcgtgcgcgctgggaggagcgcatctgagcacctgcattgcatgttcacgaggtttgttggagagcttaattggatttattctagatctaccacaattagatgcgttcatccgtggaaaacattgttgttttcgtttccctggatgtctagcctgtggctgctatacttgtatgcgatgaaatgatggtacattatcctgaatttctggcaggctacatgccatcaagtgaagagtgaactgtaaaattctcttctcctggaaatggaacactagctaactagttatccagttctgatatgcctttgttaaatttagccatcatagcatctgttatgggtagttgatatgtccaggagcattatgggtagttgaaatgggtcaatacaagcaaacatgtttcgaattatcaaatgaagaagactcccatttacacaatgttttcctttttacatctagtagtttgaatctctaaaaatgtatcatggtcaggtcatcttcctattaagaaatattcgaattcattttttgtggttggcttagtagttagtattcattaagggttgattggttggtccaatttcagaactcactacttagcttgcccctttggagttctctactctgatcatggtttttgattctacccaaatctggactttgcttttgtagctcactgttctacatatttgttgaatggttacttcgtgttgctatgccctatccaaaattcaaactactggtcttatctgctttgaaatattcttgcttcaaagttatccaaattagtgagcctctactgtgatatgctgcagaccatttttcttctgtgaagtggtccaggtacattgaatctcctacagtatgtttaaacctggattcttgttaattttgtgttgcaggcatatcttgttgcccctgattttaagttatacaa

SEQ ID NO: 111521 - DNA, 957 bp, Setaria italica
  Intron number 1 from transcript Si018380m (locus Si018380m .g) derived from phytozome v7.0 (chr-ID scaffold_1; pos 35 823946 to 35824902 reverse strand)
tagttctagctgtgagcatgtgtttctttgtaccggttatacttgtgaatgattcctatatttgcaaaatgtggtgccgcagttgtttgggtccaatatttaggatactgatgtcatctcctcgtatttgtcttaacttttgactaagatcatggtagcttcgattaatttgttgtgatccttctttctgctgcttacggcttgcatagaacagatgtactaatctaaccgcgtcctgtggcaatcgcataaactaatttcacttggcattgtttagtggcctctttctttgtgctgtttgaagttacttagaaggccactttccgtttggctttttctgtatctgtttgcctttgaacttactcaggagaaagaacttttctgcgttcccaatttgttggctgtccctgctttaaaagttactaagtactcagtccctgttcagacctccattttttctctctacatctttttggatcatgttcaatgtgtttgtaaattatttctgctgacatcagagcaagaagccaagaacgtctgtgttccgttagtcacttggttgttgggatcttgaagtggtggttaattttggcgtaaaattgcatacgtttgctaaagtctggttaggcattgcgttttgatcttcaggcaatagagattggagtgatccttgttctggaaactttaaaattgtgtactcttggacaaagtccactgagatcagtgacagtgggctaaacaggattattgagatgggtaaactggtaaagttgcatgtacacaggaaaacaacgctggtttttgtagtaatgatgcacataatctgactttcttacactattcatggagctcatacttaaccttactttgttatactatttagtttgcctcctattcctattgtccctgatttagattaatttttgaattaatgaaattgttttaaatcatgtagcc

SEQ ID NO: 111522 - DNA, 1020 bp, Setaria italica
  Intron number 1 from transcript Si034127m (locus Si034127m .g) derived from phytozome v7.0 (chr-ID scaffold_9; pos 22 61820 to 2262839)
cgcgacgggctcaagcccgtgcaccgcaggatactgtgagctctcgccttctcctcttcccgttcggcaaaactgctcacaagctggttccctgtgttcctgttcgtttataagctaggtcgaacctgataagtgtttagaaacttgcactcattagttttaacaattttgtgttaacatcacttatagttcggaacagtttgatgttacctttgccacatgtttgaggattgcagagctttgtactccgtaggaactaggagctacatgtgacatataagctgttgggttgtgcagactgcttaaatgctattgtgtttgcttaaagaatggaatactcaacattcaacaacacacatggatgtggaataggaggccaagtagtgttcatagattgctttgagaaagtttgcattacagttacagccatgctatagctgtgaagtgctcctagatatgtatgtgtttttttttcacaattatttcttgttggatagttgtgaaatatctttaattgtccaaaggaagttgctagttagtcatggatgctgccctcacctcatttaggagatgcctctttggccaatgtggtgctatcaacttgtcctatgcctcatttggaatacgggaatcccatggaaacaatattttttcctgtaaaaatctaattcttacttttttccaaaatgtctatttgccatgctatcagtttggcgaataactacttcgtatgatgtttttctggaaagtcttacctggtttaacactgtccttctcaacaatgcagagcagttgttatgacctgcattctggatattaccctcatttgaatcagtctcatgtttgtttactatctaaatgtctttccctaacaattcattgttatctctagagtttattgtcaagaaacttgttcttataactaactagctcttacatttttctgcttagttcccttctagtccttttactgatcttgcttcatcccatttgggtgatttctaaaatctatctgcagct

SEQ ID NO: 111523 - DNA, 846 bp, Setaria italica
  Intron number 2 from transcript Si013462m (locus Si013462m .g) derived from phytozome v7.0 (chr-ID scaffold_6; pos 48 26476 to 4827321)
agcccctcctcatcacctggtactcaccactactgatccctctctgattacttcattttgatgcagcagatatcatctaatcctatcatatacatagtccaaaaatagtttcttggaatttttaatatgtcacatatgcatattctttttaccggattttaaaaaaggtagcagtgaatgttatgagtaaattatgtttatagccatatctacagtttccatctgtgatggatttgcgggtggaccttgagctgcacttccatttctgcagtgcctcttggccttcctatcagggagatacggtgccttgtgcattttaaccatgatggaattgtgatgtatatgccttgcgcatttgagacatttatgggcttaattgatcatgacttatagacatatctctgggcagccatgtcatgttctttcagcagattttctcatgtgcatgcaactgggcgtgattctcgtgcatcattgcattaacaacctcattacccgtaccaaaatgttattgctctaaagaagtaaatagtgaccgaaacagttcaacaaaattttgttatgtttgcatatctgtgttcttgaattacaactgccccatataaaatgtgcagaacatcttctattcatgctgggttctttgatattagcactatgaaacaacttttcataagttcaatcatgctttagaccaagattaaaatgcttaatacatgagggtttcttttgcaaattcttaacttttgtgactgaactagcattggcgccaattttcttctcctcctgtggcaactgaagtggtgtgctcactctcttttccattgcaatggcagggacggaatccag

SEQ ID NO: 111524 - DNA, 806 bp, Setaria italica
  Intron number 2 from transcript Si034873m (locus Si034873m .g) derived from phytozome v7.0 (chr-ID scaffold_9; pos 13 62917 to 1363722)
cgacgccctcagtacccgtacagtacttgtccaaggtattccgggccttactctctgctacttcagtagactgcagtgtggtagtatccgatgtgtttgataggaaggggatccgatggcattgtttagtctttatggcatttatactgcatttgcaaaggcaagcagatgatactggagaaacactgcaattaagatcagagagcgattcgtaatttagaactttgtctgaagtactcatttaactctgattgatagttatgcattgaaagccacaatctttctttgatgtcaaacgaagatgatcataactatctgtggtaactcgttattgactggtaattgcaaaattgttcaccactgctgcttggtatagcactttaggtcttagttttaagctatgttgtcagtgaccataatggtgaaatgggaaaggcacactctcaaccttccaatttctcaaccacagctcaaccttaatacaaaagtgttacttttgcttgtagattcttcaaagtagtacattgctcgggacttgtggtctcatctgcagtatcatgtattgcgtgtatgcatatccattgctatctctggattttgcatttgtgtgaactctgacgaataaatacacactgcacttgggaagacagaacaccatatttctaggtcgcacagtgatgtttgtactatattcttcatgtgtgacaattttcagttctttggttgaaagaccatttccatttaaataatcgtctttctgctgctgaccagctccatttttttttttgctgcagacaagcctaagg

SEQ ID NO: 111525 - DNA, 996 bp, Setaria italica
  Intron number 3 from transcript Si037570m (locus Si037570m .g) derived from phytozome v7.0 (chr-ID scaffold_9; pos 40 334292 to 40335287)
tgatctggaactgcaccatccccggcaagcagggggtaagcaccgggaaacacccgttcgattcgattagatttgatccgcttcgattcgcgaggaataggttaggttttattggtaatcatgcgaggacgggaattttgggaaaacggctctgtcctgtgctaaatcactgtagggtagagtgttgcagagatgtgtaccccttttatcagttcgttctatggtgaattttattttattttaatttgggaacacatggtctatgtattttatcatttattaattgtactgcttgttgatttgttaatttgcttgcctttggatagtaggaactatgggttccacatgttctttgctttactgcaatctaggacacttaccaggactttcaggtcagcacataaggataggcagcttttgtcatgctatttgggttagcggttcaaatataatctggaagtaccagattgcaactgtagaactgtttctgcatggctagacatttggcgaagctgctcagcaatgtttagtatgtctttcttttcttctggtgtttcatgacagtgtccagactggaaggttttagggattatgtgccatcgccacaaatatttcgtcgaattagcatgctgattactgtgttgtagctgagaatctttgcataccatgttcctggcaaaatgtttgtttgtttctgttttgttacctgtatttctccttacagtttgtaaacaagcttcaaaacattgatctacagttattattctttgttaaaccccttctcttttgctgatcacttcccaccattctggaatttttttgtgtccaatgttttgacttatgtatcattgtgctctctaacctctgcatttccttgtttttctttctttttttccttcctgtgatgagatttagtcttcagcactgtttgggttttaactaccctcttgcttctatgcagactgattgggaaggtgggtattaccctcttaccct

SEQ ID NO: 111526 - DNA, 879 bp, Setaria italica
  Intron number 1 from transcript Si017175m (locus Si017175m .g) derived from phytozome v7.0 (chr-ID scaffold_1; pos 32 273347 to 32274225)
cgcccgccgagctcacaggttcactcgatagtaaatgttgtaattttcgtgaaatagcaagggcacatgcatactttagtgttttgggtggaggaatgagccggtatgagtcattatttctggcttctcatcggcggaagaacacgtagagcgcaaaaagcgggacttctccttgcttttcctcatgagccattttgagtttttccgtttgacagtgcttcaccataagccgctcaggaaatcgctgggtgagccctaccaaagaggggcttcgcctgagggctctgctgcgacgctacggcttccgctggccaccgcttgcttgtctgcggcccactccgttcgttatccagctgaccggtccacgggcctagtatgattgggttgggcggcgacgctgcaacgtgaaccttgcttgcggggggggggggggggggggggggtgggggctcgtatcctcgtcgcggcggggctccgttcccactcccccgccctgctcccttcgtaatcatgagccagctaggtgtgcttgagttttcctcgtctcaaattcggatgcatgatttcatccaagtacttcctccatctatctttacaaggcatactataatttggcacgatctttcaaataactctttaaccattaatttatcttatattaatttgtttatggttataaacttataatcattataaaatatatttattatgaatccaaccgtataaagtttatattataaaaataaaaataaaaatagtcaaaattattggtcaaatattgcaatgtttgagtcttttttggattcttggttctgagcattgttattgttgtttgttgctgcagggcctgggtgctcgtccatcgggtacggagaggcg

SEQ ID NO: 111527 - DNA, 779 bp, Setaria italica
  Intron number 2 from transcript Si018300m (locus Si018302m .g) derived from phytozome v7.0 (chr-ID scaffold_1; pos 36 695152 to 36695930 reverse strand)
gctttcggattctgactctggctctgactctgaaggtaacagcgcgttcggttttcatgatacaaattttgacgtcttataactcgtgaaacactccaacatccttttagcacatgaatttatgattgaactcttgccattctggacatgccatgtaaggcatgtttgttgttctctagaatagcagttttttacatgtaaggaagcctctaggacattcagtggaggaaaaaaagtaccttgcatgattgtaatgatcaattgtgtttggttttagtcatttgattccaaaatcatatggccctacccatcagttttttcttggcaggctttatacagttgatatacatatactactaaagaaaaattagcagtagacaagtaggagatgttggtgtcttattatttgcatttcatacattcattgtctagccattgacaccgattaaatgtgaatgcacatgtcacgttgattgcaattgcactccaaattattcttgaatcatgatttgtgggtgcactgtgcgcaaaacagctgtcaggtggtgataattgagctgcatatatgctgcatttgatcttcagtattttgataagagcaactatgggacactgggacccctatattacataaaaagaaaatcagaaatatatagtatagttgaatgttacggcctatgaataatgtgatgcgtggttggaagttgaaacctgcagcactcatatagcactgcctgtttttaggtttcgttgaagagctgactcctgttcactccaag

SEQ ID NO: 111528 - DNA, 870 bp, Setaria italica
  Intron number 1 from transcript Si018300m (locus Si018302m .g) derived from phytozome v7.0 (chr-ID scaffold_1; pos 36 695990 to 36696859 reverse strand)
gctcatatttcccgggctgacctcttcttccgcgggtaaggaagccccacctttgtttggacagatcgttcagttgttctgctgaatctcaccaatcgcgatttcctgcgcggcggagtgctcgtaggtgaggctacccccccaacattttgtggggttttcagaatcttcacagccctctcgttaggtccgcccctgatcgtggattagggtttatccgacgcgggggtggggttttgtgcctgtcgttcctgggcttaggacgatcattaggaggggttttcgggactggaggatatgatttgataatgcgagggcttgcgattttgattgttcgtttactatgctttttttgtcggagttggggtggctcgttgggcacacattctctgttggtttcccgtgttgcgggaaaatgatgtttttctcccctagtggggtaagggaaaacaacccatttgattaaacattgtcagaaaaagctatggacttttgcttcatctggagcttggatgcaggaggtcattgggtttcatcatgcatgtggtgtatgaaagaaaatcaggagtttagtttccaaaggattataattataattgatgagaactatacgagtctcttgttaatttagcagtatgaattgtgtaaagattttttattcaacctgaaaagtaaactagacagtgtatatttgtgcgcactctaaagtatcagatgtgagatgtctggtgtgtgctcatggtcatttagggaagcaccatgtctgatgggaaagattcttcaactgaaggctcttgtggtacactatttgctttgcaattatgtgacgaatttgaatatgaatgatgtaggtcttgacgagttttgcca

SEQ ID NO: 111529 - DNA, 498 bp, Setaria italica
  Intron number 1 from transcript Si034018m (locus Si034018m .g) derived from phytozome v7.0 (chr-ID scaffold_9; pos 41 68953 to 4169450 reverse strand)
ctcgtttgcttgagccacaactgggggaaaacaaggtaatgacagaactggacaagtatctacgggtgtttggacaccatatattctttgaatctgtataatcttggtatccaactgtcgtaagaagtaaaggatagctagagtagacatatcatggccccttggactcatatcttcttgggtagaagatatgtatacaacacattttcttttaccaataattcaaatcagtttttctagtagcactttctcttcccttctcagcaagatcttatggactaaagcctggtaacttctatagggccagaaaactgttcttttttgctattctggctaattatgtgtaacaataccaaagtggactgctgagtaatagaatttcttttggatagctattaccctcagattgccgtttctgttttagtgatgtcttatgtatttgatgttcatttgtttgctgcaggagactgattcacctggtatcctctctaattctgc

SEQ ID NO: 111530 - DNA, 976 bp, Setaria italica
  Intron number 1 from transcript Si035338m (locus Si035333m .g) derived from phytozome v7.0 (chr-ID scaffold_9; pos 42 17215 to 4218190 reverse strand)
actcgctcaccaacgtatcgggattcagcgtcctcgtaagcccaattaacccctccccacctttttttttgttttatttactttttttatttattaagaagagacgcgagctcgacgactcggccacccgctacaggatttggaccggtctgtgtgctgcttgcttgtgatcacagcttccccagttgccctgataggaatcaggataggaacgtgtggcactgtggccggccggtgcagttagtctagtggccttgtcggcgtgcggccggcgccggcgaagtgttcgtgggaatgcgcggtcgtgtttgcttcttgatagtatttgatgatgaccacagatcgaatcacatcatctccgctctgaccagaggcactggtaggagtgagggaagaacttcgtcaaaaggcacgcagagcgtgatgatgaccaaaagttactcaatctcgttgcattacttattagttatataagctaaagtaagatgcatcagttacatgggctccatccactcctttaggaagactgagcactaagtgggttggaagtacaagtctaaacttggaaacatggaaacagcagaaagtggtcaaacaggagggctaaacttgatcaaagttaaagaagtttgacttaggacaaacataaatgaacctagagagtatatttttacgaacttgatgtgagttgggagcttgatcagatggtaattgtatcacaaacagttttgctttcaagtcctttttagtttttagccctcaaattgtagcaatgctcttcctccatacccttctcaaactacaaaaccccatcttcggatagatagaataaccaatttgaagacctggctgacaaaaaaaactaatcagataatgattgcttccgtactttatcctggttgcttggtttctatttatgccatgtattatttatattttcgttgcttcattctgatacatttgtacttttgattag

SEQ ID NO: 111531 - DNA, 996 bp, Setaria italica
  Intron number 2 from transcript Si036718m (locus Si036718m .g) derived from phytozome v7.0 (chr-ID scaffold_9; pos 62 15471 to 6216466)
tctcctacgccacctccctcctccaggtgcgtgctcttcccatccagttctcccaccgccgtcgcatcgattttatctttattattagggcgcgccgttccgttcgatttccatgtttccgtaccgattcgaatcggcgtgcttggtcgtggtgggtttggaccgttaggctgaaaagctggattcaaaccgcgacttttgtggttttgatgggagattgtgcggtttgaacgccaagtgtcttggtgcgctaattccatggtgccatgaatgcccatgtgaaatggattggtgggctacttatttgttggcagtccagttcatgtgaataaattggttgaatccttgacatttagaagataattcgctggaaatattggtgtgtctgattttgggattgggttacatgcgtgttcaatacaatgaggacagtgttgatgttaatgcaccaatctgatattttcatgatgtatttttggattagtatatggatgacaatgcagcttagtagatatatggagagtctgctgtttctgttgccagtttattgtcaatgctctggcatggtaatctgttgcatgctgttagtttagtctagcttccatgctttgattgtgtttacactatgtggatgtctataggaggcctttaggtgtctacagtttgataagtggttaatgcagttctatttgcaaagctttattttttcaggtgctcacttttttaagttattagttcaaaaaaatgcttagttttttgcttttgccggtgtttcttgtgcttaatcagcccccttatgtggcaaacaaatgatacaagacttaattcccactgctgacacttcagtaggatactagtagtttatcctttcttggcttttcctagctttacatttactatttgccaatttacaatatagtgttaatataatttacctttttcttcttattcttgtaatcaggagcggagaattaaagagattgttttgaaggccat

SEQ ID NO: 111532 - DNA, 871 bp, Setaria italica
  Intron number 1 from transcript Si039289m (locus Si039289m .g) derived from phytozome v7.0 (chr-ID scaffold_9; pos 57 457662 to 57458532)
tcggcgtcggcggcatcttccacagcgccgtccaggtgagcccccagaccctgctccgtagccgtccttccctgctagatcgggcaaagcccactagatgcaatatgcgagaagcggtctagttcgaatcgactagttggtgattccattgttagattgatttggtactaataaggggatctactaaacttctgccgttaattacttttttttgcaacaaactaaactttacccgtaattttattttctttttttaccacaagctatccattgggttaatcttcagtaaaaaggtttttcatgaaagtctgaatattgaaattggtgcaatagccattattgtccctgaagtttcatcagaggctcaatttgctccacaactctgtaccaacaatatgcaaaatgtccttgccattgtgaagtttacttgtcaagatgtgggactagagagtacttcaaacagccaagatggacaaactgaaaacctcatggactaaattgtgtgcctgtgttcgaaaaaaaaggacttaattgtgccttcagttaaacttgagggacactaatggctattccgtcattcaaattcacgaggatttaccaaagatgaggtaaggagcattgtacaaaactagtccagggggagtggaatagtttgtgtaacatgacgtatgtacccttttaagaagtatggaaagtatgctgattctgataagattgaacacgagtaggtctgacattttgatttgggatgttttttttttgctacgcaacttgttaaagtgtagttgaaacctagtgccctctaccatcaaggaaggcttgttttgtggattacactgataatttaatgggaacttttgcctgcaggtct

SEQ ID NO: 111533 - DNA, 637 bp, Setaria italica
  Intron number 1 from transcript Si016439m (locus Si016406m .g) derived from phytozome v7.0 (chr-ID scaffold_1; pos 34 990521 to 34991157 reverse strand)
taagtaattatatatcaatgttaatgtcctttttaccactttggaacaatttgttcagtgtcacactggcattttctgcattttagctgagctagcgtccacatcaacatggctatctttcctttttgatactttactatattgacatcatctcaattgcagcctgggatgttgattttgctacgacagcctatcgccaacatgttgaggctttaactcaaaagcaggtcatttagacttattaacttgtatgcttatgtgcctctgttgaaacataacgcctgttttgacatggtgtgatacttgcagttgttggaagaacaggaaaaacaggctcgggaagctgcaaaagagttggaggagaaaaatgataatatgaggtagtgaatggaaatttattttttggacagttctagttaatgtatacagactactataccttttcttttgtttcttgattgttcacttgtgtcaatttgcagtattagcatgttttgttatgtacccactttgaatgtttttgtggctgttgaccttttttccttaggctataacttccctctgatacactattgattattcttttttgtgtccttctgcagcgctcaccgtagaaagtcaaaaaagaacaaaaaga

SEQ ID NO: 111534 - DNA, 596 bp, Setaria italica
  Intron number 3 from transcript Si037511m (locus Si036861m .g) derived from phytozome v7.0 (chr-ID scaffold_9; pos 45 279958 to 45280553)
tatatcttccaagggattactacactgggtaaggcaccttatctcaattaatgtggatgtgcatctcctggtggatgcccatgtgcaattcggaagtctctccctgtgctgtatagtacaataagtatatttgcaccacagaaggcttttgatggatgccatctgtttttatagattaaacctgttcttatcaaatggttttgtttatgctctgtttttcattggtttatattcaattgctttgccaccccctgagattaacagtgaaagtaactttttggaagacgcaagtcttaagagtactattgaagaaaaaggaagaaatagaggtttaagagatatgcaagttatgaagagtttcaagtctgtctctaaactcagagtgcaaggtcagcagcctagtgcctgctttaccgttgaaattgatttgtgcatccattgaaattgatttatgcgtatcaacgtcgttgggaggaagagtaaaacaattccttggtttggtgaactttctgaagcattcccttttcttcagaaaatactaatgtttgttttgtgtttcagggatcctcgaggatttggattcatccaatattttg

SEQ ID NO: 111535 - DNA, 1023 bp, Setaria italica
  Intron number 1 from transcript Si016261m (locus Si016261m .g) derived from phytozome v7.0 (chr-ID scaffold_1; pos 11 276551 to 11277573)
tgagggaagcttcaggcagggtgaggactgagcacacagttgattttattttcttttctttttgggtacaaactttgcttgcgctctgaatttcagttttgttatgctgaattgctggttaataaatacttcaaatttccatacttcacaaggtttcattcgttaatgtacaaattgctagattggacagggagttgtacatacttgtatagtcaggtatgaaaagatgaactaatcgtgtttctattgagatacgaaaagaagcatttttgctagtgtacatgtgtgattttaggacatgttaaggtatccaaggtagtttggagtttggacagtgtaataggatggttgatattactattgcctcaagggatgggaggaacaattattaaaaaaaactgttacgagggagcaaattatcacaaaaattatcacaaagtaccatgattgttaatatggtacctaattagtgaaaaagtttcacttgaatactctgatgattacttgattccaaaatgtaaacttcgtaattgctatagagattctgtattaaaaatcataaaacagatctatgcatattttcctttgatactttgttgtttcttacatatagctttactttggatttgaaaagttgtaattttgttggcatgtaatgtcaaaacattgggtcggggttgcctttttatgtcgctatattccttatatgcatatgctaattaggcttaggatagaatagcgtctgcattaaaaattttgtttagctatcatgtattaatccgaaggagaaaatataattcattttgtacgaaaaccgaacgttactagtcaatgagtctagggtccgtccgatcaagcaaaaggttgcggttagttgttgcctcaattattgataaatattattaaataaaagatttcaaatttattaaataaaatatttcaaatttattaaataaaatatttcaaatttattaaataaaagattgtaaattttaatttttgatatgtttagggagcgaaagg

SEQ ID NO: 111536 - DNA, 875 bp, Setaria italica
  Intron number 3 from transcript Si034602m (locus Si034602m .g) derived from phytozome v7.0 (chr-ID scaffold_9; pos 88 98623 to 8899497)
aggtgtgtgagtctactgcacttgtaccttaccatttcagtaacacaacgatgtttttgctagactgaaagctgtagagtgtagaggtaatatgcatgaagacagacttgttcgcaaagattagtttcacttataatccttaaatattcagatattccaatatgaaggttgataaaccaatactttattatctagggacggctgcagattactttttcttatatattgaaagtcgactccattttccaccttttgttcttagaaaaatacctgaggaatcccacccatccgttctgtttgagttgcggcctaaatatcaagtcaaatagttggttcctgatccaaaggccatttgcaatggttcagctcctaactagagcttctcgagttgtgttcttggaagagctgggacagcgtggtcaaaggttattagtttaggtgggtctagccttcttaataatgcctagctgcccacagtcgtagctatttaacaaggcttgaacctatagatagccagttttttttagctaaaaggtcctccagacaagcactgaacatttttcggagtaggaacagctatattgataaaactgttattcagggtaggatcaccaccaatgcagaagggagtcaaccccccccccccacccccccccccaccccacccccacccacccaatcgaattgtcagatggttgtatgagcttaaatatatttctcccttagcaggataaattggtcttaatatgggatcaatcagagcaatgagtaaggtgtattttgtttgtttaactatgcggtatatctgaatttttaagatcacattgatattactttcaggtggaccgaaagtacaaacactattatcatcagat

SEQ ID NO: 111537 - DNA, 294 bp, Setaria italica
  Intron number 1 from transcript Si017390m (locus Si017390m .g) derived from phytozome v7.0 (chr-ID scaffold_1; pos 35 409076 to 35409369)
ccaaagatttttgtcattgagggcttgcacccaatgtaagctcagtctatgcccatgctccacttgcggctactactctggctcattctctcatagtatatggtgtttgttcttttgtttcttcattatattcatggctacaataagtttccccagacaaacttcaattctctggtgccttgagttaaaagagcaagtcaaaataacaggattgtgttagaaaccatgaaaacaagcagaattattttctctttctaatatctaattaccacttatttgtttcaatcaggttcg

SEQ ID NO: 111538 - DNA, 934 bp, Setaria italica
  Intron number 5 from transcript Si019032m (locus Si019032m .g) derived from phytozome v7.0 (chr-ID scaffold_1; pos 35 702045 to 35702978 reverse strand)
gagcacagcctaatctaacttacaaggcgattaaggtttataaccctgcattgtctagccgccttctaactttaaatctttttatgtactcttattttgtgaatacaacaggttttgtgtgtaagtttcatagaaatttgagtttatttgcctctagttcaggactatagtgttgtcaagttgtgcttgtaagttgtaaagtttatagatcatccaaattattccttgacttcattgtagttcaaaaagaattgctatccttatgctgtcagctttcacccatagggttcacattgaaaatttctaagattgtgcatgaccatgggggattccttcatttgttccttgtgtcgatcccctcttcatgatatcatctctgtttttttagcttctaatttcacatagatctcatttccattacatacaatcattaaaggtatttataaacttgcatagtgccaaaaaaaataaaaatgagtttactagtttctgcccacttttgtgtatgtcatccgtataatgaaaggagctaagcttgtgatgtgctctgaaaattattttttatgcgcatgccatgcttattatgctgttctcagtttgtttaggtagacttttttatatttctggttaatgaaacgagctaagcttgtggtgtgctctaaaactgtaaataagtaacatctcacttgagaattgttattttcaaagttttcttaaattttaggtagcatctaactttatatgtgttgcctgttttacactaaaaatattcaataagatcaagctctgtatctgtatgttcagagatagtatttgtatctcccatattgatctcatgtatttccttttcacacaagtctcatatcctctttatttttgttgtccacctatatgtacctccaattgcagtcctactacgaaaacttccagtaat

SEQ ID NO: 111539 - DNA, 454 bp, Setaria italica
  Intron number 3 from transcript Si017775m (locus Si017649m .g) derived from phytozome v7.0 (chr-ID scaffold_1; pos 40 579559 to 40580012)
atttttggaaggtattgcttcacatccatctctaattctctggttatggacttatggtgttatccactaagtgtgttgtttaattatatgattggattggaagctgcaagatatgattggaaaattaaagcatggggtagaggttcagttcaccataggtttctaccagttttggtgtatgcatttctgggattatttgagttatcttcctgtcaaaagtacttgaagggcatcaagttttttcttaatggtcgaaccataggtcatcaaatctgaaatttttctgggatactagcctaggaaccttaatctcagctgtgcatgattttataaattctagttttgctgtgagctagagtggacagaattcttcttgcttaaaatattttttgtaagttatcattggcagatgctaattgctagcatatcttgtgcaggtcccttctggtggcta

SEQ ID NO: 111540 - DNA, 673 bp, Setaria italica
  Intron number 1 from transcript Si016250m (locus Si016250m .g) derived from phytozome v7.0 (chr-ID scaffold_1; pos 32 063630 to 32064302 reverse strand)
gctgcaaaggtctatacctcgttgcttcttgttgttcacgatattttaaataattcagcatatatagttcgagatttactcctccattctaaattataagtcattccaactttcttggagagtcaaaccattttatatttgaccaaaattataaaaatcacaaaagtttatagcacggaatagatatactatgaaaatatatttaatgaagaaactaatggtagctatttggtatcatgaatgttagtactttattacataaatttgatcaaacttgagataatttgactctccaaattaacggagggagtacctcgtttgattgccgttgccacatcaaatgtccggctgctataaaaaaataaggttattgtttcgcttgtgataagctgcggcatgttacacattttctagttgctagcaacatcgagtcttttctagccacgtacaagcatggcatgggatttttgccgccgcagtttggcttgtcatgcaatttatggctagctacagcttgaaaatatttattgtctcacagagcttgtgaaaccagaagaatctttttcttctaaagtagccttattaatttctttagatttagtcttacttcctcaccttatttatttgtcatgaagcagcttacgattcaacgcccaaagagaactgtacaaga

SEQ ID NO: 111541 - DNA, 1049 bp, Setaria italica
  Intron number 1 from transcript Si013640m (locus Si013640m .g) derived from phytozome v7.0 (chr-ID scaffold_6; pos 35 519667 to 35520715 reverse strand)
cagggtctcccttctgaacactcttagcctgtagaaagatcatacactaaccaactctgattccctgtgattagcatccgccttttagaggattggctgatcatcgaaacaattttgatgtatatatgagacaaagtgtatagaaaaatactcaatgaaagagcaaagttctgtccatttcatgttgtcaatttgtctgatcattttattttatttgtccaaatttgaccaagaagaccgtgaaaatgctaaaaagtaacatgtaatggggagcttctgatgaagtttggtataaaaaaatgcctataattcttcttattccttattataaaagaaatcattagttgttcgatgagatggccactgttaatattcacatgtgatgtggctcaacaacaggcacaagatccttgcatagtggatcttgctctgcgtaactgctagcatgccagctccagccacgagatttgagctcgcaattgataacatgattagctctagattaagctgccatactgattcttgctatccatacttggaacatgatgaagtggtttagttagatccaaggctcaagaaatttggccggcatgtggatcgccttgaaattgcaaaattctgattctaaatgctggaaccacagcaggcaggacaatgcgacatgaagaatcatgaacgctgaagtcaaccattagacaggaggttactcttctcacgatctgatatctaacataaactaggcactcgtgcagatgattttgctatcggttatcgaaacatcccacgctgagcattggctcaactacagctagagatgcctctaaagctggacaaacaaaaaaaaggtggggatagctggctttgtcgcaggctcacagcgcctcatcatcgataagattcgggctgtctacatggtcagtgatgccaattcttgggcttgttctgctatatatagaggcaggtcatagccgggtcgacaccattgcagcagcttctcttgttctccatttctagaggaaaaagaaagcactacagatcccactacagcg

SEQ ID NO: 111542 - DNA, 955 bp, Setaria italica
  Intron number 2 from transcript Si016735m (locus Si016735m .g) derived from phytozome v7.0 (chr-ID scaffold_1; pos 24 012744 to 24013698)
gaggtgagttcgaatctccttacaagctactagcacaagaatgttttcccttgtgcgtataatgtacatttcccttcccctttactaactaaaccaggagtactaagattttgcttaaaatcaactgctttaagtttgttttttaatcgaaatcaggtgatgtgttgtagcacccaatactattcttttttttcctgaaagatcactcaatactattcaaagtaggatgttgatgtatactgccaatggcacagtgggattagagagctgaaaaactgcgggttaactctgcattttggatgccaatttctgaagtggcagtccatcacctgccaaccccccgctctgaaccttttagagcaaaggctgtagatcattcccaatgatgcgtcctcttgtgatagccacatgcgatctttgtccacttgcttcaccggctgtacaccaaccgggcttgtttattcgttcgcccatctgccgatgcgattcccgccgttggacgccgagatggcttttctagctctgcgcgaatgatttggcggttaatttggaatcgccttgtgtttgacgagccgagatggcagattcggcggttgtcagagttggttggttgcttggttagttgaaacatgtttgtcaatggacaatgggtgcaccggttgaagaagaaggagaggcccacgacagacagcctccagctccggctgtgtgtctgtcagcggcttctaatcactccactgtttgcttctctttctctaatagtcctgtgcctgtacttgccatggtccaggaaatggtgatcgagaccaactctttctgtcagtagtttgacatgtttactgacaaaatgcagtatctaccagaacaatttctgaaacgatctctgttccatccattttcaggcgcacatgtgtcctcagggccgcaccccggcacgcccgggcgacagggcggc

SEQ ID NO: 111543 - DNA, 698 bp, Setaria italica
  Intron number 2 from transcript Si033839m (locus Si033839m .g) derived from phytozome v7.0 (chr-ID scaffold_9; pos 48 817725 to 48818422 reverse strand)
gcaaagctcaagtacgttatctgttctttgtcttgattaatttagcatttatttctctagaagattagaatccatgtaataatattttttatgtccacacttacttgctggtcatgggttcatggattaaaaaactcaaccaaccaaggaggaattaggtggcattgtaaataagaagaaataggaataagaagaaataggcacccagattcgagtggaagaaggtttgaacctgggtggtggaggtgtacacccagacccccagccaactgagctattcataattcactattattatattttgataattggtgtttatctataatttttttaccgagaaatttgttacctcagaaatttgaattacaaagaaaactgttgaaaacatgttcagtatcatcagagattgctctgtgagattttgcaacaaaagtaatgaatgacacactcagctatgcataaagacttaagacttttaagtccttgggggttttcctgttcaattaccagtattgtttaaacttttctaaaatgcagttctgtagggttttcattagtttttccaggcatcaaggtgtttcttcactttttttttttggccacactgttatcttcttcattatattggtctggttgtattaactaatgacatgttcgttgcagaggctgttgcttatcttctcctcctggcagtagga

SEQ ID NO: 111544 - DNA, 746 bp, Setaria italica
  Intron number 1 from transcript Si018176m (locus Si018176m .g) derived from phytozome v7.0 (chr-ID scaffold_1; pos 30 235261 to 30236006 reverse strand)
gcaacggcttctgcaccgtcggcgccgggaacctcgtgagcccccgccgccgcttttcctttttttttaattatgtttgacccttccgtatcgcatccgtaatctttcctttatgaggttgggaaagcgatggcgggatgggtatgcgcgcgtcgtgattccgcgctgttcctgccttgatcgtaactctagaatcgttgaggtttcatgggaacaggagcgtgagcgctgagatgtgcggtgatctccttggaatctcggatagggacagaagttaacgctcactggattgtccattgtcctccttcagtcctcggttgtgtcgttgtagttttccttgttctgttcctcatatccgcttttagtatgtttttcttttcagttcctgctcgcatataaaaacaaaacttgattgattagttactaaagtttgctcgtactcgcatgtgtacgatgcatgccgcctcgttaatatggccctacttagctagaccggaaatttctacctttcatattaggccgccctgttatctaggtcaagtggacagcagaggctgtaatcttcacagtggcatgctttcttcatttctctttgcaattgtgaagatttcctcctttttgggatcatggatcgtgctattagtagttttgattattagttcaaacaaattgttttagactggctgagtaatttgtgctcttcatttgcaggctcctgttgcaccaaacaagcagattgaaaagat

SEQ ID NO: 111545 - DNA, 622 bp, Setaria italica
  Intron number 1 from transcript Si019439m (locus Si019439m .g) derived from phytozome v7.0 (chr-ID scaffold_1; pos 15 676517 to 15677138 reverse strand)
ggagtatggcgaggcggcggcgttggcggcgcggtctcgagatatgtagggctcaaaacgcgtctttgattcgaagtcggattcgtggagagaggccgagctggcgccgtgctctactctgatttccgtcagcgccgaggcacccaccgaccaaaccgccattcaaatccgaatagaacagggaaaagaagggcgggaattgataaccccgaaaccgatatgagcacctcgaaaaaaattagtaaattacacctttctggccaagcatgggtctcctgctatttgccacctcgcctgtaacatttccttcttctgttcagcgtctatcagtggcgtagctggctgaaaattttgaggtgggggcagaccttacctctccctggaatgaggccggcacccaaccatatagcatgctcgtcgttgccgttgacaaaacccattaccagcacccattgtgaagtataaaccaacacttcttttgctgttttgcacaaataaatactctgagcacgtagtgtagtagaaaccggtattccagacggatttggtccatggtgacctctttgatctcctataatcaagctaacctggactagtgggcacacacatcaactatcaagga

SEQ ID NO: 111546 - DNA, 957 bp, Setaria italica
  Intron number 2 from transcript Si037547m (locus Si037547m .g) derived from phytozome v7.0 (chr-ID scaffold_9; pos 57 73533 to 5774489 reverse strand)
agggtaagttattgcgatcatcttgacatatgctcccttcgttccgaaattaattgtggtcatctgtagcatagcacaatcacttggtcattttaaagtgtcttttatctgtcttccgtttcattctgcaaatggtttggcagttccaatggttttgtattagaatcagttagggcaaagcaatggtactgctataattccatgggtcttttttcattgtaaaatattgtacatgttagagcgtgggggatttgggcattgtatagtcgcaagtgtaatgacctcatgatatgtgaatgctatttagagtgttaaatggagttcgattgtgaactgagtttccttatttctggtgcatgtatacattgctcaaggttgctggttattgccatttgtaaactttgaaaggctggagtagaatatgtgaagtttgaggttatgcttacgttactatgtttatttggactgttagatggagttagttgtgaatggagtttccctacttattgcctaaacttgttggttattggcattatgcttacgttaccagttgctagttattggcattatgcttacattactatgtttagcttgcagtgaattcatgtagctaattattatttttgtcgttactgattatgtgtgccctagcatctgtatcaactacctgccaaccgtatccttaaaagataaactgcatgccaactatgcataattggataccatgcatagaaggcaagtaaactgcatcgctaggtactctcacttcagaagcctgtgtggtcaaaacaaattataagccatgggttttgtttttcctattgcccctgtacagctgtacccttcaactcggaagttgttaaatgttcttttttttgtttggtttgtgaaacaagcacaacacctgtgacctgacaagtattggttccattttgtcatgtttagggcaagaaggtg

SEQ ID NO: 111547 - DNA, 507 bp, Setaria italica
  Intron number 1 from transcript Si037547m (locus Si037547m .g) derived from phytozome v7.0 (chr-ID scaffold_9; pos 57 74535 to 5775041 reverse strand)
tcgagcagcagaagctcgaggagcagaagaacgaggtcagatatctcacaccctcccctccataatggtacgaattcgaagtgcaatctgtgtcgcgtaggcttgggattatgtgatcaagtagatccgcgaacctgaagtagattggattttctttggcggttcttgttggatcatggaaagctgcatcttttgtagtattattaggtcaggtggaaatgattggtgctgctattcttctcctagttgtgtgcttttcctggcgccagatttgccatacgtgaggggagtgaatatgagatgggttagagcccatcgcttccgtgcggtttgttgttcatttgcgcgaggtggcgtgatccttttaatctcacctgtttgtatgatttgatttgccttccattttcgtatacggctgtgcatcatctattactatttatatggcacctgatgagttctcttttgaatgttactgacaggcagaggaggttgtggttgaggacgagg

SEQ ID NO: 111548 - DNA, 936 bp, Setaria italica
  Intron number 1 from transcript Si014663m (locus Si014663m .g) derived from phytozome v7.0 (chr-ID scaffold_6; pos 32 395404 to 32396339)
tacaccatcaacctccacaagcgcctccacggctggtacccttcctccctctcgccaccttgctgctgtttgctgctctctgtgctctattctctctacgacatccggctcgatcgcgcggttttcgtttcgctactgctagtgtttcgtcatcatcgatgtttactagcaggtgatgttgtgtattataccagacaaggatctccccgttccgttctcgatgcgatctgtagaccctggagtgctgaatatttagtatgttctgcgcgattagttatcctcttcgtagtttgcatatgagcacgaggagaagaaacgattcaatgaccttgccagcgactgctttgtaaattttgcagtggcactcgttttatatcttcttaatttcattttatatgtaaggtaaaagcaataggcctccagtatcgcactttatttccatttagaattgcaaaatatgctaccagggaattgatgatagcaatgaagggtccgtttgacctagccagggaagatatagctgtatatgctcaatacacattgttcagaaggcttttgggtgcttttaccaagcatataaaccatgcaaggctcagaagcctcataaggcattgtacattcattgtttttgacattgtctgtggaatgatgagtatgaacgcaataaaaaagcatgaaaagaaaagctggcttctttgattgctcgcttcagctcatttgcttggatcaaagtttcatcaagatccaatgggctcatagctttctccatttcagttactgaatgcttatccaaatgttgtctttgcatgccctctcttgtttctgtttaaccttgcactgttattggaactaaaggttactgaatgtgaccattccctctttctttttactcaacatttctgatgtttggcagcacattcaagaagaaggcgccca

SEQ ID NO: 111549 - DNA, 920 bp, Setaria italica
  Intron number 1 from transcript Si016137m (locus Si016137m .g) derived from phytozome v7.0 (chr-ID scaffold_1; pos 37 543986 to 37544905)
cagggatctacgacttccccatcgacaagtttcaggtatcgttttggttcctgatgcgaatgtgctagccttggttctctacttctctattcgttgaactatcggtgcgtcagtgtgtgtcggtatttgacagggattcggaggtagtagtggtgctactccgatgatgggtcccaagttaaatacagttttgaattgttcggaggcctggagcttcctcacacgtgttaacttgtaatgttattaggtacagaactacagatagttcttctatcatgtgtgctgccacacttttaatcgaatcattcaaatttgagttcggaaaaaaatcggggctcaattttgtttctgagcccttttatgttggatgggcttggttagatgataaggttgtgtttttttttctgtgttcggaccatggttgtctcattcattatgaacattgcaacttctatcacttttttcgagagagaaaatgtcactattttgactagcttctgatggcattgtttgggacgagctactcttgggacttttcctatattagctataagtaggcaacaaaaagtctgtcatgccttgataaaaaatattttactaatgttggaaattgaatggtttaatggttttcaagttaattggaactgaagttgtgaattacaattaaagacattgggcactagaattggaaggataatatatgcaatcccatccccctctttcagtaataaaacatctgggaggcagatgcaattttatgctgcatgcaaatctgaacatcgaggagtaatgctttccataatcattaagcacccagagcattatcccaaggtccacaagacattatatttcgtttttcttaccctgtttcctatcttcttacagcgcttggcgatccaagcatttttaagaggttcatc

SEQ ID NO: 111550 - DNA, 903 bp, Setaria italica
  Intron number 1 from transcript Si017037m (locus Si017037m .g) derived from phytozome v7.0 (chr-ID scaffold_1; pos 37 904965 to 37905867)
tggcctgcacaggtaggtgactccaccgaaatttaattcacttccacggaaagttgaatccggatctgcttgatactaccgaagtactctaaccactaggttaaagatatagtggttagagatattgtatttatttgatattatatatattaactgtgtaaacttagttaaggttagataaatttaatttaaaactaaaatgattaataatatggatcggaggagcactacatttatattcagacatcatgtatctttgattttactaaatgtctaagttgtaatatactctctctgttcaaaaatatgtaggtcgttttgattttttagtttatagtgtttgctacgcatctagacatagtgtatagagtgtatatctaactgaatagcaatatctataatttagaaaagttaaaacaatctaaaatttggaatggatctaaccatagaagtgtagaaatacatgcgtcacaaagaaggttgtgcatgcacgtgttaacatatatcgattcacgtggatgaaggataacagcaacaaagacgtaacctagctcttcatttttttttccctgaaacctctctccgaacaacgtgacatgaccaggtgcaaagatctgcaatgaatatgacgtggcaacgcaccacccacgtactctgcagaagggtccaagagttcaccgctcagtgacttggcacacagctcaaccactcgcccggatcgaacaactgaaaagcgaaaacaaacaaaacgtaatccttaccctaccccaaccgtcggatcgccggatccaacggctagaacctcccgcaatctcccctcatcctatccatccactcccacttcagccttactccactgtgctcgcagctcacattcgggcacgtcgagctcaatcgaaagat

SEQ ID NO: 111551 - DNA, 660 bp, Setaria italica
  Intron number 1 from transcript Si036246m (locus Si036246m .g) derived from phytozome v7.0 (chr-ID scaffold_9; pos 54 913159 to 54913818 reverse strand)
gggagcacggcgtcgtcaccaagcacacccaggtgagtcgcgccgttgcatccattgattagattagggtttatgcccttaggcgataaggatgcttaggtgctaattttgttttttgtcttaaaaacacccttcaaggattgggtgtgctttcgtggataataagccgatgcatgggggcgatttgaccattggagcggtcatgatactctgttttagtgtaatttctgcagcgcgaattaggtagatgtctcgaattattgtacgaatcttaaacgcagagaccccccgtctgtaatgctattagctttggctaccattaggtgtagtttccaggagttagaagataagttgggagttttacaactcccatctgccagaatgtgtactttggctaatatttgctaatttgctaattccccgattggcttgtgtgttccaatctctgtgatttgagaatagttaagaaagctttgagaacaccaagtctttatataagtatctgaggtttaaagcttctttagaaaaccattgagaagaatacttaaccttttttcccttgttatttaaatacacatattatgcctgtttattcttcctctatgttgatgtctaatcagtgttaggtgatcttgtacttatgtagtgcttgttcacgga

SEQ ID NO: 111552 - DNA, 638 bp, Setaria italica
  Intron number 1 from transcript Si016258m (locus Si016258m .g) derived from phytozome v7.0 (chr-ID scaffold_1; pos 31 344012 to 31344649 reverse strand)
aacaaagccagtaactggtcaagctcctggaggtatgtacattgcttttgcattttttctctgttagcatctccttgggtgtttcatgagtaagttacttttctgatattattggtgggtggtacttttgcaaaataatagtgggatccattgggactaaggcctaccagattgctgtatgaaactgttttcattctgctttatgtggggatagatcgcaaatgacaatgtattcaacaaatagtgaatggagtagtttattttttgaaggaatcagcaggggagccccctacctattttttgagagaggggggggggggggattttacagactattcatacaattatctaaagaggctcttagtgtaactatggccatttcttctctacccatagatcaaactccattatcaaaaatgatgctgttgcagtggcatcatttttgaacttctggataatgaccaaatcaacgatatgttctgctgttcctgtttatttcttgatctgtttcttttttctgagtcaaatttatccaggtatatgtttactatgtattattttttatttataacaacataccttattcaatgtttctcctctcagggctaccagttcaaaggatcatagcagaactgaag

SEQ ID NO: 111553 - DNA, 800 bp, Setaria italica
  Intron number 1 from transcript Si017939m (locus Si017628m .g) derived from phytozome v7.0 (chr-ID scaffold_1; pos 37 314362 to 37315161 reverse strand)
gacaccaccgagaagatcatcgccgagtacatgtacggcaacgtttccttgttaatctgcacgctgcgccctctgcgtcgtcggccagaaataagaatcgatcttgctggcttccggccgtcttttcatggcgttcaggcgtcagggaaagggctctggagtctggacgaccgccgcgtgtaaacgaacgatctttggggagggtttttgcgagatgggggcttctcatagattgttgcagattcttgccttctttttcgtcctggccggctgaatcggtgctagtatttacccccccccccccccccccccttcttctctgccaccctgcgcaaccgctctgttttatcttgttgatgatcaattggtttcatctgctcaaccttcattccagtaaaaatctgttattttttccgctttttattctcccatgaatatttgacttcagtttgggatatgctcaagagagatgcactcttaagtacttgctgtacgtttctttttcatcctgttgggggaggatctttggagcggcagtctctgctgaccaccttgtccctcacggcaccggctgtttccttgtgccactgaccacggccgatctgccggctccctaatcctatgttttacgcgttaattgatccctcttgatgccagatgccgcaagctttgattgttgttaagcgcgtcttagattgctctgatccgaggagcacggcgagcagttggtcagtttgttagcgatttgaccctatattaatgcatggctccttttcggttacaggatcggtggatctggc

SEQ ID NO: 111554 - DNA, 1010 bp, Setaria italica
  Intron number 2 from transcript Si016598m (locus Si016598m .g) derived from phytozome v7.0 (chr-ID scaffold_1; pos 35 393083 to 35394092)
tcgaggagcagaggcaactggcccagcttgagattgtgagacttctctggtcccatcattgctggccttcaaatttcttggttatgatgctttggacgaaatagcgcttcttccaactatcctaacagaaacaaagccttttagtctgaagcaagtgataagcaagtttgtagaaatattgtgtaaaaaataatttcgaggttttaagattctaagggacaattctagtgtactctgcacacttgcggaatctccacattgaccgacacaagtacataattgctgtggatatatcttcagtcatatggtccaatagccatagtgttgcactcctgttgatgctctgattttattgtgtttagttaacgtaccgcttcaaatgattctttatgataattctggtttgtgtgaccatattgtatgtacgacctgttagctttagcttcttggctgcttgcaatgcaaatgtagggaatcaacacacgatatgttagatatgtttattcattattatactcttcttttttggtggtattttaaagagtggccttatgctagcaattaacttgaattgagttcatgtctgtgcattggttctcttactcatttagaatatttgagatcacgtcaagcatatttattcaatgaatcgcgtggatctgtgatgcagaggttgctaaattgatgtttactgttgcatactttctccagtataaaaaattagtattgttttgcacgctgacagtctccagaacattgttttttcaagacaaatccttttttctatgatttttttatggctggtctatgtatttgtaaagatgttttggtggaggtgaaattgttttgcagcaaacatcctaggaagacacatttttgttttttattggagagagttttattacagtagtgtaacttgctgtattctcatttttgctttgttaagtcacggattagatgtgcttcttttgtaacatgagccattttgcaggagaaaaaacggatagatt

SEQ ID NO: 111555 - DNA, 899 bp, Setaria italica
  Intron number 1 from transcript Si036149m (locus Si035684m .g) derived from phytozome v7.0 (chr-ID scaffold_9; pos 48 941805 to 48942703 reverse strand)
cacaacaaggtacaaatatgaaatccttgcattgatctgatggattgcggtgcgggattggaattgaggcagtagtttcggcgcaggaagctttttgcacgtttcaattagtgattcggtctggtattggggactcaggttgaaattttaatggaaagattataatttcctttgtggctagcgataaacaagtgataattagttgtctgggctggttaaccttgttgctatgctgtgagaatattgggtttgttatgcttctgtatggtgtaatgtggacaaaccttgaaatttggacaaaagcatttctggcttattagcttgtttcataggtgcacaactgtgacttcagagaattcccagtaattctatatgtttttaaatagttgctagttcatctaggcatatgaactatgaaggtgaccaatccctgggctggaggataatcgaccacttctttctatctatggttatggctatatattacatatttgtcgaatatgttggttgctttctacagatcacttgcaaaatttgtggtctgaattaccattaattgagttgatacgtgctaaggaggaattcttttcgcgcaatgtacatgatatgacaatttttggggttacaagtatttggaatttagtattgcaatttggaggattaatggcacaaacaatatatggctcttcacttatgtacgcttaagtgtctatgcattttagtgcctcatagatacttgccttgatatatagagcaattgtttttgacttttttcttgattgctttagcagacacatttgtggctcttcattctttaagtgacattctcaaagtttctgtactaactagcttgtccaaatgtttctctcaggttctgtctgtggttggtattttgcaag

SEQ ID NO: 111556 - DNA, 697 bp, Setaria italica
  Intron number 1 from transcript Si035787m (locus Si035787m .g) derived from phytozome v7.0 (chr-ID scaffold_9; pos 21 325723 to 21326419 reverse strand)
ccatccccgtgccggaggccgccgacgccgccaaggttcgttgctgcccccccatgcttgccagacgttcatctccgtcttctccgcgtgcgtttcttggctggatcgtttcttggttggggggtttgctaggagccagcggttgctctgtctgtccgaggattcctcctcgggcgatgccactctgctctctgcttgcggattttgtgcgaatttggaggtttctgaaatgtttctggtctcttcagataagaggattatccactgatctgacctccctggatctcaggccatttcctccttaagctccaagagaacaacttcttaccttccagtagggttaacaaatggaaactagtaccaaatacagcaactgcatctaatctaatacagtgggggattggaaattcaactagtagtaatttaaactagtgctataatagcaacataaaaggtttgaattttcccccaaattgcactcatggaaatcacgcgtgtaattcctaacataaggaaaaacaaaagattcaactttttcgctcttctttcattttattataaatacagcaaccagtacatctgtaatgttctaattcaggcaaaggaaattcccaaattacaactgtttttctgacagcaataatttctctgtttcattgcaggagagtggcagcagcagcagctcgactgaatccga

SEQ ID NO: 111557 - DNA, 508 bp, Setaria italica
  Intron number 2 from transcript Si016938m (locus Si016677m .g) derived from phytozome v7.0 (chr-ID scaffold_1; pos 21 667582 to 21668089 reverse strand)
cgtagtggtcaagactcaagacatcccctcccgttttctccgcattcttcatggtttatcctaattattttgccaattgccatgctttgttgagtagtatcttgctggaatgctttcttgtctggtaggagtaggatttgttatactgtttaaactttaaaacaaataggctttagtttgaatcttgcatatgtctttctgatctggttggatggtattctatttttcaagctgcatattgatgtataagtactgttttgattggaggcaggcaggggtatactctactttagaatttttccttgatagccctacaaaatttatgtcttcttccttcttgcaagagatggcaataaaggtgtttgaagtataatcctagagttatgcactatgctgctgatatttcgaacttcatgcaaaaaacatttataattagtggtaaatgccttgtatttattacaaatgaattaattcattgcattatcaggttttgagggtccatctagcc

SEQ ID NO: 111558 - DNA, 733 bp, Setaria italica
  Intron number 1 from transcript Si013965m (locus Si013965m .g) derived from phytozome v7.0 (chr-ID scaffold_6; pos 34 692377 to 34693109)
cccttcaagcttccgcccctcggtacgcgatgagtctctctgtgtgtgtccgagttcttgctgcttggctgatcttgttctcctaggatttatattctgctggcagattagtactagtatgccgtttgtttcccctctagaaatcgacaggttatcgtgcaaatcggtccccggcagtgcagaaatctaggtagccctgacaagattcagtcttttttacattatcctgtcctggttgcacgtgttgtagtcaggaatctagatccaggatttggatccgccatggtgtagaaattaggccttgtttagttcgcgaatttgggaggtgccaaattactgttacagcactgtagcacactgtagcgtttcgtttgtatttgtgaattattgtccaaatattgactaattaggctcaaaagattcgtctcgtaaagtacaacaaaactgtgcaattactttttaattttatctacatttagtactccatgcatgtaccgcaagtttgatgtgatggagaatcttctttttgcatagtgtcaaagttggaagttgggagtaactaaacatggccttatattaccttacttatctgcgaaatcactgcagtgtcagacagtaggcaagaaggcatgctgatagtagtgttgttttggatagtctgtcagaagccagaacgcgattactctagtgtttaggcatgctgacagtgagaatttggcattttcaggccccc

SEQ ID NO: 111559 - DNA, 653 bp, Setaria italica
  Intron number 2 from transcript Si036591m (locus Si036563m .g) derived from phytozome v7.0 (chr-ID scaffold_9; pos 36 091637 to 36092289)
tcgtgcaagaatagaacctggcttcactactctaggtgatgtcctaacattctggtgccatgtttatgtatctgtatttactagttttgtccccacaattggcttctggtgggatgtgttatgtcaatgcttgttttgttttcacatgcttaagcctaggttaggaaaaaacatggcaccactccttcaagtatcaaccttttgagaagatgaatatactgtgaatggatgattggtttgtattgagcctcatgggctgtttatatagtacatggtggcttggatctcaagcaatcctagagatagagatggaaactaataacgggattataatcaatcaatcctaaccaattctattctaccataatagctggatcctatggatctcttccatatactctaactacagccatgctcgatcatgttgatgacaaaatgtttctcaatactaacgcgcagattctccctgatctctatatgcatttaccctattgatcaacgatgattaatatttactggaaatgctctgtagaaatgaacattgacctcaacttctgctatatcatgtattatgattattaaacatctagttgtacccatttgagttctcaagttctactgttcatttctttgatgttttctttgtgtgcagt

SEQ ID NO: 111560 - DNA, 895 bp, Setaria italica
  Intron number 2 from transcript Si016479m (locus Si016479m .g) derived from phytozome v7.0 (chr-ID scaffold_1; pos 31 542508 to 31543402 reverse strand)
gcaaaggctcggcaacttcaaggtgcgtacggcttcgtcatgctccgttgttcatactctccttcgtctttgtctccttccttggttttgcttccttgaggtccgttaaagctcggaggagcgtggccgtgctccggctttgcttgttcttcgaggattccattgtgtagtgcagttggttttggtagctcccatcaaaaattaaagtttgttttggtagagagagaaaaaggaccggatcggagccgggggaggaaagaagcttacgaccctttgcgcgtgatagtcgtaaagccttagagcttcggcgaggaggatatgatgcgtgtgactttgtgatcgatacgagattctagctactgatgttcatcgtctaaacaatttttcgtccttttttctatagaaaattaaacaagtactgttttttttctccctagaaggtgttgatgttgttattagctaggacgctgttgcgatctactccttggcatgttttgtcacatgcctgaacagcaggtgacataaaataaatgtgcatatatactccacatagtttttctgtatccattttcgtcatgccaacttgcatgagctagcagatacgcactgtgccgtgccactagttaattaaataatgggaaattcaacaagaaaataaaataaaaagaccttctcatcatgatcattatacttccctcccaaatccaatggcacgcgcggtggtcctccgtcctcacggatcctctcgccatcaaagccaaagctagcgatctcgagctgttctgaatccgacgacagcagcaataacaccagctgctgtttgatggtcgttgtcttattgatgtaacgatgccgccgccgtggcgcccgcgctcatgccatgcagtacgtggtg

SEQ ID NO: 111561 - DNA, 981 bp, Setaria italica
  Intron number 7 from transcript Si016043m (locus Si015928m .g) derived from phytozome v7.0 (chr-ID scaffold_6; pos 35 613149 to 35614129 reverse strand)
tcattcaatatccttttgtcttcttgccccacacaaattattttatttatttaattctgcagatgatttctttcgattggtcaaatcttgtttaattttgatatgtacatacatttatgtgcaatagattacatgctgcagtcttaaagctacgcatcttattttttcttttgtttagtagattatatttaatatcatcaagaaattcatatacacatgctcatgctcaatggtgcatgtccgacagtaggtacacagttgtgtttccatgcaacccttcaaacattaacttgttcccctaccactaccactgcctaaaatagtaatgctgttgtgaatcaatctctcagcattgcaagcataagcccaattattgaaaaagcgctactgtttttagcccctgacttggtcatttccattagatgtgctatccatcttttggccatctatactccctaccccccacctccaacccctctttgtagataaaggtcctctgctgtttccataagaagaagtagatgcatctgtcaccagagacatatgtgtttctgtgcaatccttcaagcatgtacattattccctactattgcatgaaatgtattatcatactgttgtgaatcaatctcttggcatgataagtctgatagagctgttgccacattttacttcccacctggtcacttccatcaaatgctctctctgtcttttgcctcctagataaacatccgttttttttgtgtgtgaaaggacatgattgcagccattcactaagtcttgcctgctttttaatttcgccgtgcatgcttgcctgcttttgaatttcgccgtgcatgcttgcctgctcacgttgccatttttgcaataatagttcgtggagaaaagttaattgctctttaaactgtactattttttttgtcatgctatattttgtgtcttaacattgtacgtttgaccgagctttggagaaagcagttctgt

SEQ ID NO: 111562 - DNA, 844 bp, Setaria italica
  Intron number 3 from transcript Si019392m (locus Si019392m .g) derived from phytozome v7.0 (chr-ID scaffold_1; pos 29 092560 to 29093403 reverse strand)
ctcaatcaggtaatccctcttttaattaatgtgttggaggacttcacatgatagtttaatacaacattttgtgtcccaattatttgtactcttaagtgcttatctagtgtaagaacgttatattgtggaacaacttaatagtttcggttattctttttccttttgaaacttaatatggacataccatgattattttgtaaatccaacctagttcacttaaagttcgtttaaatgattatggactatctgagaagcaaggaagtaggaatgcattgagatttgcttcagtatagccaatttatttgcatggtaaattgcttgcttgcaacttgcaagtgttaaatagtctgttaaaaaatactttggttatatgaaaataccatgtatctaacattggaggatgagctagcagcctagtagtttactataaagagggaagcaaaactaaataactaatgatcttttattctgtctctctatccgccactcacacacacagaccactccattttaaaacttatttgtttctttaacatagaagattggcacactgaaggtggttattctggacaaccgctactgatagagatgatgcctgtgagcattctataggttatttgccagatatattaggttgatggactcattatttacgatgactcttctgggtatatatgtttacttcaaaagaactattcagtttgtcctttgatatgaacacaagaattattatatttgtattaggatagattgatagtgtggtaaatttcgaaagatacatttagcttacttttcttcattatatcttgtggtatgcttattctggtgaaaattatagggtcta

SEQ ID NO: 111563 - DNA, 646 bp, Setaria italica
  Intron number 1 from transcript Si038934m (locus Si038934m .g) derived from phytozome v7.0 (chr-ID scaffold_9; pos 38 759863 to 38760508)
ttgagtgtaagtacaaccctgtttttaatagtctgtacgctaatgataaacttaacctgagtacatcattatccttcgtagccattgtttgttaaataaacttaacctgagtacatcattagtatttgtaaccatttaagaactcaatctcctacttaactagtgtggcagccataactcaaacctgctggtgttcctgtagcaatgaatgaatcctgtgttacctcagttttttagctagcctagtgttctgtttgaatgatttagggatgtgctgtccagatgttgaaatctgttgatatctgtgccctcctgaaatttctgaaacattaggattgggagttttgattttctgaagtttcctgtcagattgtgtccgtcttctgcgtagcattgcttcctgtctaccatgttaacctctgtttcaggcttgtgatgtaattagaaagttgtagtgtgtttaataaactttccaggatgtaaaagaacataaattgtggttaattactctatatgtgtagcctgaacgtactttcttgcactattgcttgttgctcgtttgcactgtacagacgatattaaatatatttttgatttgttaatttttgtagttcacttatcctccggagttcaatactggagagaa

SEQ ID NO: 111564 - DNA, 924 bp, Setaria italica
  Intron number 1 from transcript Si020508m (locus Si020508m .g) derived from phytozome v7.0 (chr-ID scaffold_1; pos 30 327416 to 30328339 reverse strand)
atcgagtttcttgtcatagcaagtcgtggtatgtaagtcctcagctaaagataagtagataacagaactgaattatgccagttaattttcttttctcctaggtgcaaaaaagaatgcagaacatataaagtccacatgtcagctagtagcttgcattctcgtttcctctcagtagttttaattgggtctaagacagtagtgttaatccacaatgatctataaattttcgttcatttaattgtatgcagcttaaactggtttctttcgaggccacctatacttttgcatggtttctggagtaggtatattttaatgactgtggagagctctaagttaccacgagaaagaaatgttttccaatccctatgttagccagtgcttcctattatcattgaacatcatgatttgttatttgctaagcttagctagctgaagatgataggtcaaacatatttgatttgttctgtaagacctttcttcaggaagcctctagattttgggccagaattcagatgtaggcagtaaaaattgtgcagtaggatattcttttgcccacagttatatgctcaaatgggagagtgataatagtacaatattgaactcaagtttaccgcaatcttctatatagctcatgaaaaacctagagtcgtagacagttggagctcgtggtgaagaacaacacaacagaggatgggtttttgtactgatcttctcaattttccattcttcctttatgtgagcttcagagcttggaacatgtaacaacctttctttccttctgaaatgagaaagcagagaccacctgcctttttgccccaaaaaacctagccagtagtatccaatgcatatcggatatgattttgtttaatccctatgctaatgttgtgtgcctcttgttttctttttgggcagggcatctttgac

SEQ ID NO: 111565 - DNA, 823 bp, Setaria italica
  Intron number 2 from transcript Si037843m (locus Si037843m .g) derived from phytozome v7.0 (chr-ID scaffold_9; pos 50 64054 to 5064876 reverse strand)
acggctacatcgtcatcaagggccgcccctgcaaggtacagatccctgtttcccgcctcagcctatttcgttagattcagtggattttggcgatgtccccttacgagcggtgtgctgagctgtctagcctttagtagaccgtaacgcgagaagttgctggtcgaatacctttttgtgctggttagtctgtggcatgtgctgttgtggtggatatctggtcaatcgtacctattgtgtgtgcttatgcattttcgtgccttttaattgtggcgatagcaggtcctgtggcggttcatagattgcttcctgacccttagttacgcagtactgtgattacataaattattcattctctgaaatgccagcttctactgtgatgttcttttgtccctgctctgcattgaagatcttttagtacactattctaatatctagtaccaactgcttgcatttgtgtgaagttcctgtatatcatattattatgtcgagtttatattccattgtatattggttgcgaaatgtgtaattgccatctaactcctatggtttctttcactgtactttgtttcactttattattgatgtaattcacgtgctaatttaggtgttgactggtcttgttgtggaagtctcttaattatgaatcaaagttattgctttaaatcccatttgcattccttcaatggcccttggaatgccattctttagattttgtggcatcttgatggcttgattgttgcagccaaatgatggtgtttactgtcttactctttccctcttcattgcaggttgttgaggtctccacttccaagacagggaagca

SEQ ID NO: 111566 - DNA, 957 bp, Setaria italica
  Intron number 2 from transcript Si014315m (locus Si014312m .g) derived from phytozome v7.0 (chr-ID scaffold_6; pos 24 459469 to 24460425 reverse strand)
ggtggttgcgatcacaatcctggtgcttatcgcaggtgctgtaccaaacctttgagttcttcttaagtgtatatttagttttgcggcaggggactgctttgggtccctggagtggcattctcgcctaaatgcgtcagatctgttattggttaagtttttttttatttgtcgttgattcaccactggagaataagcttgttttggactggggcttgcatatttaactctagtgtgctgtctggttcaatatgggtacaatgtgactgactccatgccctggatcatatgggagctgatctggacagtagagaaaggctatactctgtaaattaagcaactaggagagcaagctacagttgcctttttaaagaggggagaaacaatgtcatttatagtcgtataaattagcctatctgtggagtttgtgaacatttattactttgtaaattacagttctgcttagaagcagagagtggaaaattctcggcttttacttaattcagaatatactctgaggttttattacctcattgtgccacaagtcaccaacaggttacttataaagttctatgattgaataaccagtgattaggctcatgccttcattaacattttttagtgttcttggtaattcttacagctctcagatgatttagtattttgaagttctagaacatgaagtatctgaatatctgatgatgatatgtttggtgttatgaaacgaagagtgtgtttgcttttcctttttgtgttaaattcagagatacctttgatctaatatacatgaagtgccatgtcctgctaaacataatatctatttcctctgtgttgcttgttatatctctgctttaacatacaattaattacattagagtggtataaatgataagcaattgctttgtctgcctttctttttatgcagcatcttgtctaaaatcatcaaaaccaaacactata

SEQ ID NO: 111567 - DNA, 534 bp, Setaria italica
  Intron number 9 from transcript Si017154m (locus Si017154m .g) derived from phytozome v7.0 (chr-ID scaffold_1; pos 35 652830 to 35653363)
tcagaggggctactttcatcgtgacctaaaacctggttagctctcgtgttgtcattattcagttgagatgtttccatagcctgtcagaagctactccagttggtgacaatttttttgttatttttggacatcatatgttactaatacgcaactttgactgcttgtatgaataatgttgcaatgtatggggtggtctagtaaattcaaatactccatatacatttcgtctcagccgagatactccccacattgtgggatacactagctgcagtaacaacaaacaagagtagaacaaaggcttctattgcattatattcataaaacctacttttgaagacaaatccgccatatcattttcaaatattcaatctcaccttatataaaaatgttatttatggctgaagttaagattataacaaaaaaacaatattttcttgtactaagggagtgcattgcatcaaaatccggagcacaatcatgctttactgataattgcatgacttgattgtgcagagaatttgttggttaacaaag

SEQ ID NO: 111568 - DNA, 962 bp, Setaria italica
  Intron number 1 from transcript Si016324m (locus Si016324m .g) derived from phytozome v7.0 (chr-ID scaffold_1; pos 27 709685 to 27710646 reverse strand)
gccaacgtctgccccatcgagagcttggattacgagtaggctctcctctccttttcccccttgggctatttctcttcgtttacttttttttttggtttttcttcagcctttcatggggaaaagaatctttttttttaatcttctcctgtgttcttagttgtactaataactaatctaactgggttagaaagcgaaagtagcaactgcctaggaaaccaggattattgttcatcttatttttctttatatgatgactgagccatgtacactttagagaagcaacctcagggcttttgggacataagatcgcaactcttggttcctgagttttcaatgcttgcatcttgcacattcatatcaattacagttttagtacttcttgctgtgtagatatttttttgtatgccaatgataactgcaaggtgatatcaagaaaagaaacaatatattttgatggagtgaattagttccagacaggccccaagtaattctcctctacatagtactatcgattagtcattcctttacatactgctatcttttaagggaatggttggatagcgaaattgattgattcaaaagaaatgaagagattttataccagctctgccctgggctgcaaaattatgtgcaaatgctcgtttcagaaaaagaaaaggagttctttcacaaaaattaatatgccagtctacctctccgtttttttaattagaagatgggtagatatacatttgctagaaatgtctccagatatttttttttctgaagaattcatgcccatatccttatgttaatccacgtactgacctcctagagttttttttaacgatgattgaattgcagagatcatgcaactgtgtacatatacccagtaccaaccttgtgtgctgtgtgcactgtatggacactataacctgttcgttacactcttgaataatttcattgtttcagagttgtggaga

SEQ ID NO: 111569 - DNA, 487 bp, Setaria italica
  Intron number 1 from transcript Si013269m (locus Si013269m .g) derived from phytozome v7.0 (chr-ID scaffold_6; pos 84 30626 to 8431112)
cagcctcccgctcgccttccgcgtcctccacgcaggtatattactactacctctatcctccccttcaatttgctcgccaattcggcctgatgtgctcgctatgctaccacccgcttcaaaaacccatctttttccaattttgttttcagtcccaaattcgcccaactgtgatcccaatccaagtgatcctgtaatttcctctgctgattcatgactgcattgaagtgtttttcaccgttattacacaacacccatccatatttatttcttattcagtctttacttcaattctccatgcttctgcctcttcattccatatttccatcccacaggaaaaacaaaggctgctttaacttcttcttgtacttcttgccaagaaagaaatcttttatgttaagtctgctttctctttcatgtatattccacaattcatttatgttccctgtttccagaacatatcctattgacgcagcaaaaagtcccagag

SEQ ID NO: 111570 - DNA, 391 bp, Setaria italica
  Intron number 2 from transcript Si013269m (locus Si013269m .g) derived from phytozome v7.0 (chr-ID scaffold_6; pos 84 31144 to 8431534)
ggatactatttgggttgcctgtaaagacaaggtacactttgttatgtataccctctgtttcaaaaattaagatgttttagttttgtcccaactcaaacttctctaattttgatcaagtttatagaagaatgcaccaacatctacaataacaaattagtttcattaaatccaccatgaaattgacagtgcatttttttttggtattgtagatgttaatatatttttctataaatttggttgaagttagagaagtttttaggacaaaactagaacatgtacttcaaatgttctttctatggaatcatcattagtacaggtgctgtttcttggagtttaatgcacaatttttctcatgctaggctggaaccttcaggaccaacgtacttttgga

SEQ ID NO: 111571 - DNA, 827 bp, Setaria italica
  Intron number 1 from transcript Si016095m (locus Si016095m .g) derived from phytozome v7.0 (chr-ID scaffold_1; pos 36 023082 to 36023908)
ctgtagcactttgggtgaaggtatacttttctttatttaaccttatagttgtagattctttttttgtgttatatgaggagatatttgtcatgtttaaggtccattacctgtacatttaacaggtacaccatgtactgctggggttgtgaactcatagctatgcatgaatttttaactgtagcctaagttaacaccatctttcggttaaacaatacaagatttgaatgattcatgtaaagtctcttctttagttcctgttattagtcctacaaaaaggtaacatgagatcaaggtggaagtcttgactagaacgattaggtggggcttcttttcatacgtggtcttagaatgaataccttcctgtggcctaataaacattttttcttagtaatttccatatcacgtttcttcatgattctgatagaattttgtgatatagattctgctggatttcccccctaaaattggtacacttgctttcttctgtttagataaatagtgtataaagatggggacatggggtttgctgaaactcaaacgatcattttatgtacagttgtacacaaacactgagctttagttactgcaggaatatgttccccttttatgcataatgaaaacaacatatctggtgctatttagtagcaaaagtgaaaaggagaacttttgtttgctgattcttgcaagatcaacaagcttgacatgctaatactctgatgatattttttgctaccttttgtttgggcacatcgagagttttcattttctccagtatcttatctatgaacttgttttactcttttcatgtgaaaacagtggagaggaaa

SEQ ID NO: 111572 - DNA, 671 bp, Setaria italica
  Intron number 1 from transcript Si016803m (locus Si016803m .g) derived from phytozome v7.0 (chr-ID scaffold_1; pos 34 831844 to 34832514)
tatcgacttcggcctctcagtgttcttcaaacctggtgagtcactgtgggttgttgtgttcattgcgcttggctgcttgttttgtcttcacgctaattagtgaattagtgatatgatctgcattgacttagtaataggcatgtctgatatatgcttttgtaacgcgataaaggagattctgtttgggaataacactggtgtgaaggaaatgatgtcattgcaactctaaagaactgtgcatcgcaatcgttactgggtgtgacacttacattacgatttgttatgcagtggtttgtgactcaatgtaacttttcttcttactgtttcggataagcataagaatattctgttactgaagtgactggcaaaacattattcaagatggcattgaaaggggaaaacattactggcaaaaccttattcaagataaggttcctgaaaattgctggcaaaatattatggcaatttttctatagctgagggaaagttttgatggcattcaaagggccgtgtcatttgtttccttgagacgtcaatcaagatgaaccttcattcgctccttctcttgtgtgaatgcgttcatttgattaggatgctgatgttttcatttcaatgatgtgcgccgttaaccatatttccctttgtttttattttaggtcaaatttttaccg

SEQ ID NO: 111573 - DNA, 728 bp, Setaria italica
  Intron number 3 from transcript Si017192m (locus Si017192m .g) derived from phytozome v7.0 (chr-ID scaffold_1; pos 15 798840 to 15799567 reverse strand)
aagagaaactaatcacaagatatcatcgaaaggaggttagatttttcttttattgatctgttggtgcagttgcattgctaatgttctgaattcctgcaatagatagagacaactttgcacaccagcgggattaaaatatgcttgttgttcatttacttattaaatgttgctaagctgactcgctggagaaattttcatagggaaaatttgttttgtagcacagaaagattgccacttctggaaattatcattgaaagatcaccaccagaagtggcaatccattctggaaaatagcaccagagtgcatgtggtgagataaccaagggcattttggtccaagttaacagtcctgatggcaaattctaacagagtgctatttcccgtaatgtttgatattttagtggtattttacgacgatttttttatggcattttccaaatgtgactatctttcagtgctacataaacatattttccattttcatatgaggctgaacagataactactgaatttaggtggccataagtttattgacctaaattgtctgtcatgaagttgattattaactgaaggctatcccaattgcatgccaacatgtatcaatagttatgtttgttgatatctgaaagcgtgcatgctggcgcatgttgccagttgctgcgtttccttttcttctgtttgattttgtgtttttctttgttgctgcagtccacaaaaggagcgaaagg

SEQ ID NO: 111574 - DNA, 926 bp, Setaria italica
  Intron number 1 from transcript Si039795m (locus Si039795m .g) derived from phytozome v7.0 (chr-ID scaffold_9; pos 17 577664 to 17578589)
tttttggtatgttaattagcagcaccgccatccattcctgcctgcactctagagtactctggatcatcagttcctactgtataagcacgacccaagtattcgtgccgtgctggcacggtccaaaatatattgtgccgtgcggtgctttgggcagctccaagtagctctactccggactctataggaagccagcactgcagactgcagagctcaaagtatagtctctgcaaaatgattttgatacactacaatcatatccaataaaagcaaacattcactgttggaatgattttattcactgatcgaaccagtcaatatgcactgcagtcctctttgcaaatggtcataaaattaaatgggtacgtagtaaggatgattattgtaacatctcagcctttcttcctgaaggtgtgttattagatgcttagaccttcatttcctgagagtatcatactattatcatattggttatgctatggatagataggaaaaggtccattttactcccctcacctatccactttgtccgcttaaccgtacctctggataaagttttggctcattttacttccctgaactatttcatttagtccaatctaccctctaattagatttctcttttttgtttcatcatgtatgagttgaattttgggttcaaattttatgagcatatacaaaacatgatggcttatgttagaaaattatactaagaatttttcatggttattttcataggttagaaatatttaatacgaaattgatcttagatatacaaaattgtacgaaaagtggatgtcaaattaaatattcctagatatattttagtgttgagtgtataatctatgtcacattttgccttttcattgagaagtggatgtctttgcttcacaggtcaatcacaatagcaacgcgaaaaggggagatcc

SEQ ID NO: 111575 - DNA, 861 bp, Setaria italica
  Intron number 2 from transcript Si035207m (locus Si035207m .g) derived from phytozome v7.0 (chr-ID scaffold_9; pos 56 913212 to 56914072 reverse strand)
gcccaacgacacgctcgccaagcacctcttccactgtacgtttgctctaccgatcctctagccattggtccatttctgatgggtcgctttctggattcctggttggttctggatatttcgctggccattttcggtaaatacaccctgcgatagtttttggcttcgtctgatttgatccctgattattagtgtggaagttggcaaaaaagacgaatcggcgtgctctgagcaactgctggcgcttagcagcctcccgcatttggtgtaccgaacgaaatgattgggctaggcgtcgtgatatccaattcctatctggttgttgttggcctggtcgttgtgtgaatccattgaaaccgatcagggcacaggctgcattaaacacgtgatataatattactacatcattgttctgtgttcagatgttctgttcattgttttggacaggtggatgactagaattagcttacaggatttcattgtggacgtatattgtcacagtaaaatttaggaattatgaatgcaagtgatattgtgctctgcaatgcgtatttgaaattaataagttgatgcattaactagatgtttggatccgtggggtttgtgctttatgaacagcctgttcccagggtgtatgggcaaggtttgggtgttattggtaatggtttcaacttgcaaatgatgatgggtttctttagaaacaaaacattgaggccggcatgtaatcgcctcttttgttaatcttgattgcattcaccttttcatgggaagatgattttggacaagttaactgtacatcactgtgcgtcagttcattacctgatatttattttactctttttcaggggaaaaccagacaattga

SEQ ID NO: 111576 - DNA, 885 bp, Setaria italica
  Intron number 2 from transcript Si035783m (locus Si035783m .g) derived from phytozome v7.0 (chr-ID scaffold_9; pos 39 203033 to 39203917 reverse strand)
aatccaggtacgagctcagtcaccaatcttctcacctcccctctgaaatctgaattttactttgaaactagagaaagtaaacttcagattgctgagtccctatgcccccatgcattcatgtttggacgtgatcgagcgtaaactgtcttgccaagttgccattcactcgagatctcttgcttagctaattcgtcggcagcaatcgacgcatgctccccttcatgattgaacagcttgcttttgcaaaaggtgacagcgatgcggcaatcgcagattcacaaacgggtaggtagcacgaacagttctgctttaatctaggtccgtgcatttccctctcgcgaattcaagctcatgatcctacaaaaatcatttcgtggggtggctggcataagatgcacagtgcctctgcttctggcccacgtacatctgtttcaggcccacgtacatctgtttcaggcccaccgcaaaattcttccggttcaggagagctgaatgcaaatttggactcatttataaaatgtaaaactccaatcatgatcatgaatcttctagtagccatttctacatataaagtttcttctaggggcttcaggtgtactctacagttaatagctagcatgtctgccactgttgatttcttttgtcacagctcaagtcttcatccttttgtagatttattttattttctgttgccacatagtgacaggcctactttacagataaactttatgctttccagtttagcttgaaattcttttatttgcagaaatgtgaattatcaaagcttttcatcatatttggcaaaattaggcatgcatgttaacaccatgttagcaaaaatgttgaacagatttttacaactggaaccgtgtgaagctacgttat

SEQ ID NO: 111577 - DNA, 1047 bp, Setaria italica
  Intron number 1 from transcript Si016721m (locus Si016721m .g) derived from phytozome v7.0 (chr-ID scaffold_1; pos 11 374825 to 11375871)
tcgtctccctcgggttgcttggggtcatcaccaaggttagtgatcatctttcctcaaagaaaagggtagtaatcatcaaatgtcattaagatatggattccaaaagcatgcatgtttcctccccgagaaaagggacacgttcatttcgaattaaaaatagtttaagttattcttttcatattttgacttattttagctttttgagctaaggtgatcgataggcaattcgacatatatgtagagagagatgtgatgagttgatggcattctgtatgaaaatgatacatgggaaaccatataaaaacaaaaggtactctacttttagcaactcatattttacgacattggttagcttaacaaaaaattcatccttctagcatttagttattacctaacaaatgagctatggttgctgaaaatttaagtgcagcaaatgcataggccacatatgtcgttgtatgcctcctttgagacaactagaattagtgttagtcctacaagagatgcttaaaacagctgtgaactaaatttgtgcccaacttacaaattccgaaactaccaaagtcacggcatcatgaacacaaactactattaggaaattacagaagtgagtgaaaataaagaaaataaacaagtgaggcggggaatccaacatgtgcttacctgtattgagtggttgttcctttgttcaatccgggaccatggggcctgcctccgttcccaaaatcgagctacacgaagaaagggaaagctctgcgccgatcccgtccatatccaggtgtggaccgtgtgggaagcagagtgcacgcggtgccggcaatggcacattacctatgccagaagccagatcattgcgagtttgcgatgtagtaaaggagatacattattgttcttcaataaacatccgccgccacagtccttctagatccaatggagttctgcattcccttttttttaaataaatcttttgagctactattattttgttacaaaccattcatgttctttgcagatcacgctgtcactggagccgaggttcaagcggag

SEQ ID NO: 111578 - DNA, 886 bp, Setaria italica
  Intron number 2 from transcript Si018080m (locus Si018062m .g) derived from phytozome v7.0 (chr-ID scaffold_1; pos 86 51960 to 8652845)
gccaagctcgccaactaccacaacctggtgggtgggtccttctcgttccctttccatttttcttcccgctgattggttggttcgtcgatggcatcgcccgtgactctgtgggtgctcgcgttgattggcgaaaacaaaggatttggttggtgactttggtgtgtgtggaactgtggatttggtttcctcacgaagttgattatggagtcggaaatgagccatggctatgcgctatttaatggatgctagaaaatagaaaagcaatatgaattgtcatagtggttgcacaacatggtctttgaaattgatgaacacaacgttgagcaactcgattttggtgtggctaggctaggggaacacttctatatcacaattgatgcaagtttttccttaatttctcagcttctcagggcaatactggttccttgcattggtcaaaacttcaaacataaaaactgaagaaaaaaaagagaggaaaataaactagaacaaaaggaaagcaaattttgcttgctttcattatcgttctgcttgaatttaaaatttctcatatggaaaggatgattatccttttgaccccaccttctgttcaagtaacaggggttgttgtgttgtgggccaatgctggttgcctccgattagggaatttttttgttctcttggcttctcagtcagtaaatagttttcatgtgctggtgtccactactacacgttcccatgagatagtttccaagtaaatagttttactagagagtgccacttcctgaacttcattcctcggatcgtatattaattacctgcctattttcttatatatagcttgcaaaatatcacttacatctgctttgcagtttcctgcacttcgagagtttgtcagtggtggaaa

SEQ ID NO: 111579 - DNA, 633 bp, Setaria italica
  Intron number 2 from transcript Si017316m (locus Si017316m .g) derived from phytozome v7.0 (chr-ID scaffold_1; pos 31 571944 to 31572576)
acgccttgaagaacgcattccccgaagagaaagaggtgacgatgccatggcttccttatcttatgttatttcatcttattcactccgtggatgcaaaatgccaggctccctggtgatgctagactagaatgtagtttactttgaatttctgcttactcgtggatgtcaatgataccaatctaagattggtgttttttttactgatgctgtaatttatggaattttcagatgattaagggctattgtttttaaagaggatttcatagttggtaggggtaattattagtttacatccggcggagctcagtacagttatctcagtacatttgtgcaaatggagttatgaaacagccttaagatcccttgagtaatcgaaacatatgtttgtgttcattactatgtgctatccttctgacgtttcttaagcatgcatgcttcttatgaaaaaagtagttaggatatatttttaattaaggagttgaagtacaaatatataaacctcagcagcacctatcttgttataatctaagagaagattaggcatttcatagtatgcagtttagtcaccgtttcttactcaacatattttttattgcagatagttgttaagagtcaaatccttgctggtggccg

SEQ ID NO: 111580 - DNA, 873 bp, Setaria italica
  Intron number 1 from transcript Si034131m (locus Si034131m .g) derived from phytozome v7.0 (chr-ID scaffold_9; pos 54 847104 to 54847976 reverse strand)
cgcgctcgagctcatcagcaccaagatccaccccagtaagcaccgcaccccattccccccttgcttgctcctcgtccaattcaccatctttttctttcttgggaccagttctcctccgtcagagttgactttgctctctcaagcttgaacctttcggagctgttagatttttttccctccctttcgatcgctgctagaactatagggagctggatatgcaaagttgatgcctttttgggcagctccgtttgttcttgaccgccctaatcggtaggtggcaccagcaaccacaggaagatgctaactagatgcacatgatcatcagatcttcaataatggtgacatgataaggccgtgtgtgcgattttctgcattagtatattcgctctgcattttccaacaaattgtttaatcataaaaaaagagagaagaactaaacaatagagcagttcaacttttaaccactggcatctttcactagaccatgacttccaagattctgcaagaagtgaacaaatggagcagagtttttacaggacttcctcccagtcttctgagcactgcaagcctgcaaaccattatagcttcccctttagcagtagtcccgtcatgatcactgcagaataattcaagctcaaatgagtcacgatgcaatacttcaagttactgtccatgatggcagtgctcctgccggttaaagtttcaaaaaaagttactgttcatgtttccccgtctctccattctctccatgcgatcgctacccaaagatgatgcagtcgctttccatgtctccatatttgacttttcttctcaaagtcgttctaactttcccggctcgtgccacgtgaatctttgccagggaccaagaagccg

SEQ ID NO: 111581 - DNA, 1032 bp, Setaria italica
  Intron number 2 from transcript Si038559m (locus Si038559m .g) derived from phytozome v7.0 (chr-ID scaffold_9; pos 63 98538 to 6399569 reverse strand)
aatccgtcttctatcggcgccaaatccctagtaaggtcagctcgcctgcttctagcttgtccgatctagatagtttgacagcaaaaacaaaacccagatccgatttagtgccaggattgtacattgagctgtattgtgctgttcaatggctattgatactgacgtttcagttcatttaatggaatcctaggtatactacattccagaagtatcactgtattagcgctgatgtcctgagctacttaatgtggttcctctaggaaaatgcattactgtactcaagttggtacttcactagaagtgtgattgtgccatctctatcagcagatcatttgtaccatctccccttgatgtagtctgctagtgtgattgttgtgtgcacaggggcatattattaaaaaataaaaacgttgcggggttgacaattgaattgatggaagctgatagcaacagaagttcctgatccgtgccttaatgaagatgtccagttttacacagagttaagtttggtgcggtgtatctgcaagtaccattatttaccttcaacagatatgtggtttgaacctaattcacattgctgcctcacatatcgccatacttacaattgggagatagccattttgccatttccttcttagcacagagtaacaattttcaaatgctcaaagaatatggacaacaagttttgaagtcgaaaaggatcaaagtaagatggataaccaacttacgctgaaacaccgactaaaatgattatctgagtagcattgaaaaggttgtgcttctaacttttgagaaaaccgaccttttaaaataaagaactggctttacctctttctatagatgtttctcatatttgtattctacttgtcgattatgtaaagcatatgggccaacctacttcatatgcctaattgtgccctaatgttgtttaatcaactggaggagtgatttctgtggcttccctgtctgtattcagataccctgacacctatttgatttgtgtactgatcacaggttgctgagtggggtaag

SEQ ID NO: 111582 - DNA, 913 bp, Setaria italica
  Intron number 3 from transcript Si037459m (locus Si037459m .g) derived from phytozome v7.0 (chr-ID scaffold_9; pos 65 81022 to 6581934)
tagcattcgctgacaaattgcaggcaaaatcgaaggtatagtttctccagttgatataacaaatgacatggttgctacttgctagcaatgttgcaaagttagcatcttcctctagccatttgaagtgttcagcgttacaacaacatagtcatggttttgacttttgattcaggtgcccaggtggctgcaaatttgcagctgattaattttttcgtatagtgatcgtcattagagtttggccacaactaaaaatatcctagtcggtgtaccaatatggaaaattttcagcatgttacattaaacacagttaacttagtgcagaatactatgctttgtgtgttaacccctgtcattctggacaaactggactagctgattctgctttctttaaggcttggcatttggaaactgtaaataactatgggactgttgttgaacatatatttctacatttatggactgttactaaaaggatcccattttacctgtatgaataacagcaaagttctgcaatttaacgacccttctgcaaatgctgacatcaaataaatttgagaacattgtgcagataaattttcagggcgtgcactgagatgacatgacaatttttcacctgcttgttaatttttccattctatgttccagttggcacactatggcaataagagtaaagcattttatagtttgtaggttgaaagcttgcggcttctacagtgcaaactttggcctacaacataacactagttcagttaggtgtcatttcaaatgtagactgtaggctcatatcagtatcagctgagcaatagaaagtacaatctgtatttacacatatacagtacttgattgcctttttgctgatatttctgtttgtcctgaaggaactgaccgtaggagaagaaagtttcacaccctc

SEQ ID NO: 111583 - DNA, 485 bp, Setaria italica
  Intron number 2 from transcript Si013555m (locus Si013555m .g) derived from phytozome v7.0 (chr-ID scaffold_6; pos 28 441193 to 28441677 reverse strand)
atagggcacttttgaaggtcagtattcccttaggataattagcacgatgcatcacaggaagtgtaactttaaaatgatttttttgacagagagtaattgggttttgatatgtgatatgtcacagctcagagccactataaaactgtttgaggataattaaccactctgtaccagaaaaggatatgtttctttaaacatttggagtcttcaatgcacaaatttgaatgttaactttatgttgataggtcagtggaagctgtaaataatgcatatgttgtaactggttttggtcaaatccaactaattgattcataggtcaattgaagcatttcaaagcatctattacagacatcatcactgcatctagcatctatgggagcaatttcagtaaacaaattacttatgttcttatgggatatgctttgcccttaacatatcacccttttctaggtgataaaatattcatcgcctacatctgctggagc

SEQ ID NO: 111584 - DNA, 663 bp, Setaria italica
  Intron number 3 from transcript Si017633m (locus Si017208m .g) derived from phytozome v7.0 (chr-ID scaffold_1; pos 41 402032 to 41402694 reverse strand)
cacaaaggaactctctaggccagctgttatattaggtatgcagattattctttgtactatattattttgaattcatcaccatttttgcgggaattagtttgatctcagaagtaaacattacagtaattttcttatattaggcatggctgatcacctctagttttttctatttggatgcttttgcattattgtgtttaggaagacaaagataaaaaaatactaaaagttatgtacaatgataatctgataagtggttattccttgtattttacagaagctatgtttttcgcttcagtttatcgattaagcttgcttttgttgatgatataaagttacttccaatacaatgaaaactagcatttcagagtatctgattcttcttatacccacaaactaagaagtcatagtgtggccatctttttttttgtatgtgtgtgtaatccttgctgccttttatctactttttttctgccccctcgttctttctatctcaggtcagagttgataaatcataaagcctattttgggcttttttttctttgaaaaaactttaaaatttaatatattttggttcttcaagattatctagagttcagctgacagctgcaatctatcctccattatgtagataaattgcgtgaattatcttggagcggtgtcccc

SEQ ID NO: 111585 - DNA, 672 bp, Setaria italica
  Intron number 5 from transcript Si018564m (locus Si018564m .g) derived from phytozome v7.0 (chr-ID scaffold_1; pos 32 276555 to 32277226 reverse strand)
tcctgaaccagacagcccacttaactgtgattcaggtagctctttttcctacctatgactttgtatgtactatgttcactctacatcaaactatgcaacatgaaagctaccacattctactacttacaatcttactgaattaaattatggaacagttgcatgacaactttataactgttgtaacttctagatctaattactctacactattacaatatagtcctaccaaaataagtggtcttcattgctcaatcaatcgatagttgttatctttacgggttcgtattgagtttctaatctctaaaaatgatggtgtcacctttgacctcactattcgagtattcttttacgtttatgtggatctggatatttactctcttttaatatgataattatcagtggacttcgctagcatgatttaggatcatctaaatgtgcattttattgtcaatcatataacaaggttcttttttgtgaaagaaacatggtcgaactgaaagaatggacataacaactgatgaatctacgatgtagcacctgcattttgcaagatccctttctgattaatgatgtactgcctagacaaacttatctgataatatgtttactttctggctgtctttttgcccaacgacaggcaatctcctaagatcgggtgatatccgaggctat

SEQ ID NO: 111586 - DNA, 961 bp, Setaria italica
  Intron number 1 from transcript Si037371m (locus Si037371m .g) derived from phytozome v7.0 (chr-ID scaffold_9; pos 46 098970 to 46099930)
gcgtccctatccccttccctccacctcccttggtacgcccctcctcgccgtctcttctccttcctgtcagtgcccctcgctgcctcgggctcgtaggacagagtggttttcttctcggccctccactgacacgcgccaagtgctgcggttccagcatcgtgggtcaaggattgctgcgtggcgtatgtcctcgttgccctggatggatttgccgggcttcttgttttcaagaaccgacattttcttggttactgtcttgctgctccgccatcaaaaggagaagggtggactactggactgttggagtgctggtggtgaatccagacattctttatcctgatgcagttggagtgggcgcctgccaacaatcggactagttttgtagggaaattccgttaaatgcagtcacccacatcttcctgcattaccgcaggaggtcgcaggctcctgatggaagcgctgtatctcgaatgggacagcaatttggatgggtttagtgttctgtcttacagaaatgttacctattagttcagtgcctatagcttggatgtaggaccttgttttgcttccagggctcactgattgataatctactgctatatgatcctcattagcactagcacatatgacagggtgccttggatttgcacttacaaagttcaaggtgaaggcacagtttagcaaccggttttgggttggtagcttttactgtttggtctttagaagtagaagatcccatgtttctagttagtagcaaacgttgtgctgagcattcatgttctaaattcattttggtctaaattcattttggtctaataaagtgtctaaatcaaattgatccattattgtctaataggaaggattgtttttctaaaatataatatggaaattttagtggggttcttactttctctgaaataaaccagcaattcaagaactggcttccttggaaagacacaag

SEQ ID NO: 111587 - DNA, 752 bp, Setaria italica
  Intron number 3 from transcript Si016527m (locus Si016527m .g) derived from phytozome v7.0 (chr-ID scaffold_1; pos 72 50866 to 7251617 reverse strand)
attgtgaaacagctcaacaacctgcagaaagagaggtaattgttgtcacccttgttgcatcaccagtgatgcaccgttttcatcctgccaatatttgttttacatcatttgatgtcatacacatgtgcatttgtttgtgttcttgctaggaaggaaatggaaaatattgtaattttatccaactttacaatagctcggatttctagtctgctatagctgatgaagatggcttaggcatcttcccttttgaatgttcagttagacaatgacaatattgctctatgaagtccaagcttatctggattgtttggagataattgctttagtgtacaggtttgattgccttgtttattcctgcccaaggcatggcatactcctgttgtcatgcatatgttgcatcaagagtgaaaattttagtaatgaaaatttagtcaagtagctaatcagtgaattgacatttgcctttctggtttagcagtttaagtagtagtcccaaggtaatacaatatataaaaacctcaaagctgcatatacttgatacttccattgttcatatttagggatatgccggaattgaaatattctcttttggttgttgctagatgaatgaagtgcatgtcactatcaaaagatcttattctttcctcattaattaagattacaaaaagtctttctttcttctgcaattttcactgaatctgtgatgtccttcaacagtgattgccctcaggaagccttggaagctgtgtcta

SEQ ID NO: 111588 - DNA, 930 bp, Setaria italica
  Intron number 1 from transcript Si018958m (locus Si018923m .g) derived from phytozome v7.0 (chr-ID scaffold_1; pos 41 362467 to 41363396)
gcgtcgtctcaggtcagccaccccaaaccctagccctgctagtttacgaatgcgaatttctgggtcgtattctccttccccttccggattgccgggcacacgcgtgcctgcggggtcatcgaattcgcgtcggtggctacctctaattttgacgcgtcctgttcaatttcgagattctcgtgtagatacctagatggtgcgtctaatcgtagtcgttaggcgctctgttgtttccattcgtttgtagccaccttcgattttgattccgttcgcgttcggtttgaacccgtttggggcctttagtagcattttttctgaattgtgcgtgcccgtgttgttttacttatgatgtatatgttagattttgggtctactttcttaatgctgatttttcatgctattaaggcgctaatttggtgcatacattggaagttatttgttttatttaggtgattcttccaaatattgtgtagtgagggtcacctctatatataaattaggttctcttttcctattgcagtctcaaggatagttttgaccttttaaatatctcctgagttgttagagctggagccacagtgagggttttaatacaactcttgaacttgctgacacatgccatatgtagttattcaggaaattaggcaaatgtaactgcattgttgcctcctgcaagtgagttaatttaaaagattcgggaaattgatgagcactaggtcttagttgcagaatataatttttatgatttgtcttgacctctagaaatatatgagcttttatcttgtctattaagtatttcaattaatttgcaatgtgggagcttcaatgcattcagcggtttacatatggaatatattgttcccttgctgaatcttgttttctctctctctccttcttggagttgtgatttaggactttggagtaacctgc

SEQ ID NO: 111589 - DNA, 971 bp, Setaria italica
  Intron number 3 from transcript Si035622m (locus Si035609m .g) derived from phytozome v7.0 (chr-ID scaffold_9; pos 58 137702 to 58138672 reverse strand)
gctcgtcgccgagcacaacaaggtacagtacttggcccccagatctgcttgtcactgtcttcctcacccaattactgatgctttagacctgctctgccttttactttaattcaaagtatttcttttcttgtcactctatccagaagccacgtagtagcagttgtataaagtatgcaaatttggaatgtgtttatcttaagtaatgcttattccctatccttgtcgtggataaattactagtgtggctttcaaaaaatatatattactagtgtgggaacaccctttggattcattcacatgcttgtcgttgaagccagctaagtgtattggatcgtgtatgtttgactgctagtgctaatgcaataggacatttatataaaatgaactggcgtagtatggtaatttggactttcgaggacatttccgggaaggaggcttccgagtaaaatgtgactttgtcagggtctgaaaacattgaaatcttgctggatgcaagcccgaattcaccgatgatatgtttggtttcgtttctgcttgcaatttgttcggtggatcaggtggttgacatctgacatggacaagagggtgagcatttaacaagcatggcccagtcttaataatgccctgaatgatggatggtcttgttgagaattgtccttttattcagccatgtcgtgtcggcattagtctgactcgcttaattattaattaattatcaaaagaatccaaggatctagtacagtatctgctgcctgtgatacaaaaggccatgttcttccacatgtgacaaactctaccaatatgtaatcttacacttgtgaattctggggcttgacacatcatatcatgtttatatgtatatgcaacgataatatttgccatttcttttttatgcaaactggtggggaggcccttactgaatgtgaatatttaccttgctgttgtgttctacagagaggctttgacccgca

SEQ ID NO: 111590 - DNA, 669 bp, Setaria italica
  Intron number 1 from transcript Si016035m (locus Si016035m .g) derived from phytozome v7.0 (chr-ID scaffold_6; pos 24 048526 to 24049194 reverse strand)
aacttcaggcctgctctggagattttcaccgcgaggtaaaataaatttgcacaccacccttctggagcagtagtatgtattccatgattgttgataggagttgcatggcaatgaagattgccatgtgacatatgtcattatttatgcatggtcccttttccttatatccatcagtccctccctggcattcatatgtactcatccaaagatgacctgtatactagtccaagcatattaatcatgcgtgtccatatcctaaaaatgtgttgcacgtttctatagtatggagaaatacttgtaagagatgacaagaggaaataatcaataatggattagacatacaagtgtaccatgtatgtttttgaatggctcgcgtgacattgaagtaggtagtcatatggaaatatagaagagtctggaaatagtatgacccctgtacaaatgcattcatcctcccacattcctaatatcatatcttgtctgttgactctcagctagtcatctttaacatttcttaaattttgttggaattcaaaatatatatttgcaagattgttttgccccctgcaaagtaaggattttagtctcggtttcacggtaccgattgcaacatctgatactgaaggtactaaaggtgcattctccgttgctggagggaagattgaggat

SEQ ID NO: 111591 - DNA, 644 bp, Setaria italica
  Intron number 2 from transcript Si035264m (locus Si035264m .g) derived from phytozome v7.0 (chr-ID scaffold_9; pos 49 090487 to 49091130)
gagcttccgttagtcctaggtgagcgtgctcagattcttggaattagatcttcactttatggcttgctagaaatgggtgccatcatttttctgacatccagattccagaatatgtagctttagggggattggagttgaagattagaggcatggatgcttttagcattagcctgttttcatacatggctggtaaatggcaaaaagttgtgaatttgtttttttttgccctttaagatggccatcatcatgtgcgcttgtacagggcactggactaattggtgttaaccatgcgttagtatgtacgagcagtttttattgtggtgtgtgtagtggtgactttaatttcttgtaagaattggagttgttgaatctttttctctttgtttgaaaaacagaatttgctcgtggctttctttgtactgaactagtggcaaatttttctagtatgcatgcatcagtaagcattattttgaggcacatttattcattttagaaagctctggagttaagtcacagagtgatggatagctaggtcaaaaaacaagaatcgggtctattattttcaatttaaaacagaatcaataatcagggtaaatttgactattctttctctaggaattccagaaggctgttgcagattggag

SEQ ID NO: 111592 - DNA, 580 bp, Setaria italica
  Intron number 2 from transcript Si036610m (locus Si036610m .g) derived from phytozome v7.0 (chr-ID scaffold_9; pos 53 148397 to 53148976)
tctcagcaaggggattacagagttgtgacggaactgtaagaaccattctgtctttttcttgattgttccttgtttctggcatacatgagcatttgaagtttttttttttttatgattgcaaagtttcttcccaaagataaaaaacatgtaatactcgaagcttcaaaggtcaaaaattatgtttctctccaacatagaaaactccttatcacttagtaaattgaaatggctcctcacatttgcaaatagcataaaaaaaactattaagctgcacgcacatctccatgatgtagccgtttgagatggtgttttgttaaagctaccaaaaaactgcaacttgaaagaaaactgttgctagaacttagaacaaggtagtattacctacttgtctactgcgggttccccccatggtttgagattataagatactaagcatctatgactaatacatgcgtgctggttacgtatttcaactttatgaatcgcaaaatcatgttgactgcttttctgaagctttatgcattgtttctacgcatacatgcctgagtgccatattgtgcatcttatttcagggaagtct

SEQ ID NO: 111593 - DNA, 948 bp, Setaria italica
  Intron number 6 from transcript Si019034m (locus Si019034m .g) derived from phytozome v7.0 (chr-ID scaffold_1; pos 13 791404 to 13792351 reverse strand)
ttggtaagtaaatgcttattgcacatctttcggcaagaccttaccagagtagctcttcattgtgtataaaaaactgtagatattagttcaatgatctgtgtatgtctgatcctttttccccgggtacaggcaaaaatatctgttgattcatccgtttctataatgtgggttaacaactgatttttcttagatatgaactccttgaatgtagctacaccaaccagagcatggtgaagtagatgtatctttctccttttaccccccaatcacaaattaaatgtcaatttccgccatcaccttcttgtgttgtaagcatttacagattattatttgttatatgctgcctaatttgatgcagagcagtgccaatattggtattcctaaattcctgttatgaaatattggtttttgtccagtagcaaaaggttacagtctactgtttaacctctgattgctagtcaagtggccttcatggatgtgcattatttggagcatgtttggatgccaaccctaagtggcctggccaaaatttggctattggccatgggcatcagcgatgtttgcatgatagcaccgatttggcttgatcagacttctgtagtttatttttgccacgaaggctggccaaatcgggacagccaaatcagccgccaaattttggcctcggctgatgctttgacttggccacttggggccaacatccaaacatgcccttgattttcagtatcgctgttagtaattatgctcgtgtcagttttagtagcttttatgttataatcttaatatgtcagacttcatcctatggatgagtaccctattcataggatgttagtattactgcaagcaaaagttattttaggtatctgacttccatttagaaatagtgaatcatccctgttttggtcaggagcagaattcctggtgctttagcattttacaataagcagc

SEQ ID NO: 111594 - DNA, 367 bp, Setaria italica
  Intron number 3 from transcript Si019872m (locus Si019872m .g) derived from phytozome v7.0 (chr-ID scaffold_1; pos 32 566515 to 32566881)
tacgacttgcttgatccccccttgcttgatcccccgtgctcctgtccaattcaggaagggtcgtgaatgtttcttcacgggttactcaacttaagataaccttaagcaccaaccaaaacaaaaactaattgcaccaaaccagacactgaaattttcgcaaaaatataaacttgtgcaaaattttgaacaaattcattacgcaatcctgttcctctacgagttttatatcaaagcaacaaaacgaataacgttgtgcaatgcttttcttttcccggttcatgtcaaacgagggggtcattaacgtgctaagcgacatcgacaacctcttagaggagaagctcgacgaagtaacctgcgccttcctctg

SEQ ID NO: 111595 - DNA, 992 bp, Setaria italica
  Intron number 1 from transcript Si036848m (locus Si036849m .g) derived from phytozome v7.0 (chr-ID scaffold_9; pos 68 71469 to 6872460 reverse strand)
cgcgaatcgcagcttcttcctggtgggaattcctggtacggaggcgaggagcctttcttgatctatttgtcttcttctctttgctttcgtgttcttgccatttgcgtggattgcgagatggtgtggtggattcctattccttgccggcttgtgttctgatgggtgaataggtgatgatacgcagatgaagtccctgttctgatgcaatcctgcttttctgttctttttttggtacttctttatacgtagacaggatcatattttgaggggaaagatgtgctggttcaccgtagagctcgtatgaattcagagatctcgatgcctacctgttcaattgatgttattattcgtatctatcatgttgatctatcagatctaatatacttctccaattcgagttcatggaaataaggcaaagagcaacagacttatctctttacctcgaagttatagaaactgggggaaaattcaatggtgccatcccagttaatcattataattaagttcgtcgttttcggtgtgcttgtacattcctatcagaagaacatagaaaattgcacatgggagtcaaggggacataaagtatgtagtaggggctgctttcacctgcccattcccatattccaattggattgtagtgctaatcaattgttgcctttcttgtcattgcaagactctggcctacagaataaaggaatcaatacttagtagcaaatagtttcttcctggatagaaagaattgaatatgtctgtgttatttgcaaattcagaatggggcccaaattctggttgtattcttttcttcatttcttttaaaaaaggaagcataaaattcatccagactccagagtatataaatattctgaaaacaaatattactccacagtgtcttgctttgccattgagttggtgtgttgttattttgtattgcttaatatttatatatcttaccattaggatcatcagggttgagcattactgagattgggagt

SEQ ID NO: 111596 - DNA, 863 bp, Setaria italica
  Intron number 2 from transcript Si013492m (locus Si013492m .g) derived from phytozome v7.0 (chr-ID scaffold_6; pos 32 306232 to 32307094)
gcgttgtgccgcccggtgagctacactgctcccaggtactctttgccttgatatctagctggtttgctggttgatgagaaatggattgttaaaaaaattgtttatcatgcatggaaaaccaatgcattgggaagagtagagtcagctcagtgtttgatttaatggaagtctattcgatccagggctcatgtaactattgagctaatttgatatttttatgaaaatttagagcaaatggaagtcttgtcattaaggcttttcaggctaactccagagcacataattgcccacttatgcccacatttgattctttttttctaaaataactgtgagtcgactctgaggagccctgaggactgggatgtagaacagaccagcaagcccttcaaaaaaaaaagaacagaccagcaaggtaggaatatgaaacatattcagaattaagatctgcagtgatatgaattattgcttacatcttaacaagattaggaatagaaataagatctaaatatgaactctgcatccaatctatgtccaaaatcgaaacctaaatggaaagaatcatattctaacatctaaatgtattactcaacaaaatgagggcccttggtgataccttttgagattcaaaattgtagcctcttattggattagagatttttgacagaggaccatgtgactcctgtagaagcaggcatttagcttcatctcatgacattgatcattataccatgatataattttgagcctgtgtttatatttcttatcattcctttatctttggaacttagtaattccttcttaactgtgttatgacacttgttattgcagtgggttgaagaaccaacacttctggtcactcgttt

SEQ ID NO: 111597 - DNA, 742 bp, Setaria italica
  Intron number 3 from transcript Si034793m (locus Si034793m .g) derived from phytozome v7.0 (chr-ID scaffold_9; pos 89 6371 to 897112)
tcctctctaggattggtccaactgaattcctcaaggtaagctatcttgattaggccactggcacttgcagcacgtgcattttcagcaagttgcttcagtagccattggtaggtttattatttagttattcataattgtaaggtgtcctcgtgggaagaagtaatttttattactgtttgcttataataacaacaatgaagcaagcgcagaagaattgtttaccgataattctcggcgcttagtgtattatctagttatatgataatcagacatgatggcatttctgatcatttcgtgatactggacaaatagttccatagtatgtgtaagcagacctgttcgggcatcggtgtattgccgtacgcgttctgtaatcaaacattcttcttcttaatacaaagatgcgcagctctcctgtgtagttgagaaaaaaaatagttccacacaatgttgtatgctccactgtgcacacctacttgttgtgatcgacagagagctaatagtgatgctgggggaatgaaaacctgaaaatagggggtggattgctgccatgataatttgctaaaatttcctggagtaaccagcatgtatcaatacatgcagacatgtaccaatgctctcacatttacaatattttttttttgtcaaaatttgtttgtgttggagtgctctcacacttattggatcctaacttataattcttgcaggaccttgagacatttgttggtgttgacgctgtcca

SEQ ID NO: 111598 - DNA, 515 bp, Setaria italica
  Intron number 3 from transcript Si036403m (locus Si036403m .g) derived from phytozome v7.0 (chr-ID scaffold_9; pos 14 349612 to 14350126)
tgcagttttatcttaccacctacaccgttcaccaggtatggttggtcacagcttctgtgttcatggttgactgctatcaaacttttctgtaataaactcacgtagttctccccttcaaataactcttttttttctcggcactgtgaattcgcctgtagaaatagaaggttatcctgttttagtttatttagaaaaaaatgtaaaccaactggacaaagttaataatgccatttctctggctagtgggaattgagttgaagcatcaaagcaccaatctgatcagagtgttcttgtgttgacaaacatgtctttgaatgtgaaacataaattatcaatcaattgcagtactgaacaacccaggtgtcttctgattgttgtaataatatggtaaattggtaattgtcatctatgagattctagtaaagtcagttgctgtggttcaattttattttcattgagttgatccttaccaatatctgtatcatgaatccttcaccagttgatgctatctgcag

SEQ ID NO: 111599 - DNA, 581 bp, Setaria italica
  Intron number 2 from transcript Si015555m (locus Si015555m .g) derived from phytozome v7.0 (chr-ID scaffold_6; pos 10 950673 to 10951253 reverse strand)
gggtgtgggagctcattgagcagctgggtttgcaggttaagtctcgattgccctctgttctcggttcctattttttttttggcaaaaatattaaattctagtattctatccactaaaacaaaagacttgtgctaacaattattgaacatcctgcttataaccattcattagagaaaaagaaaatgtcacaaacatgactcacgtgatgttctgaatcttgaccgataacaaaagatcttacaatcagggatcggtagtttaggaattgccggacattattatacttctagtattgcttttctaaattgttcatcatactattttgtgtgtatcttctaacttaatcaaaatacgaaattatactaatgaataacgaaaataatccggaatgaacctgcttcccatgatgtatccgcagttctcatttcagtggaaaatctgaaaagcctcaacaatataactgtatttattcccctgaaatttcctggggactatgcctgagaaattgagaatatcattcacatttttacaaacatatctaaatgtcaaataacagacaacagctcacacatacattgggg

SEQ ID NO: 111600 - DNA, 728 bp, Setaria italica
  Intron number 1 from transcript Si016572m (locus Si016572m .g) derived from phytozome v7.0 (chr-ID scaffold_1; pos 40 699215 to 40699942)
tctgcattggaagtaagcaggcaccacatcccctgctatttgaaatgttccgtctctttttctcccaattattcatagtgagtgttgaggctcatgatgctctttgattctactgaactgttcgcgtgcatttagttatcagatttagcaattagttgatcttttccttgaagacatagtattttctaggttgtgctagttgcttttctggacttcttcgggtgcttgtagatctgcatgtgtgcatgcttatgagaagcaatctcttgatagcttactttttgatgtgatgggcaaatgctttaattgaaaaccatgaccgtcatattgacaacattcattctgctagtgaactcactcacaagcttgtactccctccgttccaaattgtagttcgttttggcttttctaggttcatacatattattatgcatctagatatagtgtatgtctagatgcataataatatctatgaacctaaaatagccaaaatgacctacaatttggaacggagggactagctaggtagtccagaacaacatattgatcaaaagggtaggaacctttctgaacattagtgaatgcaccaatgcacattttagctcatagtgacgaaggcaaacatcatactggtgaggcccgttgagtgtggtggtcaatatatttgtttttcttgtattttctgttattttaatctattgctcaatatctatctgtcttgatagata

SEQ ID NO: 111601 - DNA, 895 bp, Setaria italica
  Intron number 3 from transcript Si017759m (locus Si017759m .g) derived from phytozome v7.0 (chr-ID scaffold_1; pos 82 74151 to 8275045 reverse strand)
gcaggcaaaaatagaacctagtttcactgaacttggtaatgctcttgtatgcgccaaaagtcccttctttttctcactttagcttatttccaagtttttgtaaatagcaattttggtgtgggctccgccactgcagattcatttggcataatctttccttgaaattggaggaacaatggtcatcatatttgaatgttctttgtttattttgttaaagcttgattgccattatgatctcaggagtcaggaagttcctttttaatgatatattggctgagaacaactatcacgatcaattggaacaaaaacatctcttgcttagttgatactccctctgtcccaaattgtaggtcgttttggcttttctagatacatatcttttgctatgcatctgcatatggaaaaagccaaaacgaccaacaattcgaaacagagggagtatctttttctttttgttgttttgtttaatttcagagtgcattaatttcatttttattggatcatcattttatcatccctttctcttatagacttggggcaacttgaagaaacatgcatgatctgtaaaccagaaagaaaaggatgttgtcatggacctagaatcaatgactcagcacaaatgagaccacctgtcaaccaatttgtgtcttataattaatttttcatcgatgtgtaatttgctctgtgctctagcttattgtctttggatttacgaatggtttgggctagtgctttttccattgttgtgaatatctgcctttcgcatggaaatttcaaggacattgttgccatcccaccattataatataaacaatagttgcttcatttttggtttatttactcattattcttttctccagtctggcagaaacttgaggaagagaatcgtgagttt

SEQ ID NO: 111602 - DNA, 795 bp, Setaria italica
  Intron number 2 from transcript Si017759m (locus Si017759m .g) derived from phytozome v7.0 (chr-ID scaffold_1; pos 82 75082 to 8275876 reverse strand)
acgtccgcaaggtctcgcggcaggacatacagcttgtgagcaccctcatgatcccacccccaccccccttcttctcgttcatcctgcttttgtttttttttttctcttttggtctctgactccctgttgcggttcttaatcgcgcatcatgcagaggcaacgttgagtttgattgcttgcatttttggaattttttccctgtatattttattacctgatagggttgagaagtagatgggatggcttagggttacaaatggttgtgttgttgcagcaactgtatgccctcattaaggctttgcttgcatgctagatcttgcagtagtgctgggacggtaccggattgatttaggggaagaggcgtgcatggggaagataggagtggtgaatttatggacgccgctagggtttgcctgccacctgtaagaatgatgtgtattaaagccttaaaggaaaaaccgtgtgctctcgttgtcgctttgctcttttggatgtatatatttagtaactatcctttatcataacttgtgcttaaactctcattttgtcttgggcgttaccacatacagatatctgccttttatggttctgaaatgtgccggcgtccatttatctcatctatgcacaatcagcaatggcagcttatggttttgttttgttgtaagaagttgtgattgaaatgtttgttactcaagataggatgcgccagttctcttttgcacttcgagcaataagtcctcatgcaaaaacttctttgcaggtccagaatctcatcgaacgttgccttcagctcta

SEQ ID NO: 111603 - DNA, 685 bp, Setaria italica
  Intron number 1 from transcript Si014394m (locus Si014394m .g) derived from phytozome v7.0 (chr-ID scaffold_6; pos 28 502655 to 28503339)
gtgccgttgcagcagtacgtcggccgccaattcaggtgatacaatgtagatgggaattgactaacatctctaaattttgcttgcgtgttggtactcatcttgccagtgattaaaatgtgctttgttcttgttattagtgaactaaagatggtgtgatcattcatgaaataggtgaaatacttgggatggggaaaggtcgaaatccctttcctttccaaattcatgttcaggaattgtgactgcattttgttttgcaaaagaaaatgttgtgaaaattctgtgaaaaatacccaagtttgtgtttcatttgaagaatgactggtgtggtgctaacttgttagatgcaacacaaggactaattatttattggcggaatagccattatcgtccttgaactatcaacgtaggctcaatttagtccctgaactaccaaaactgtcatttcggtccttttttcacaagtcccgttcttcacagcaattatgcgctgctgctgacgagggtgtagcaagcaaagctgagaatggaacatattagcacatggttcatggccattttgatttaattgctctttgttgccaccaattagcttcattagaggcaatatgaaacagaccgttttttcctctcatttatgtggagggtatactgatcattctgcttgttctggtgaacagtgagttag

SEQ ID NO: 111604 - DNA, 536 bp, Setaria italica
  Intron number 2 from transcript Si034262m (locus Si034262m .g) derived from phytozome v7.0 (chr-ID scaffold_9; pos 50 898763 to 50899298)
tgtcagcttcggagttgaagatttctcaccagcaagtaagaggggcatatgtttcacttacattcttaattcgtctatcttcactatgtttctgatcatgttaattcatctatgtgaagtttttattggacctcaccatttcatgattcagccactttagtgaagttcagttgatttgtgtttcacttaaaaaatactggatcatgtaatatttgtttataaagtgagacgatagaattcagtttggttgatcaatggggtaaaatgggctattcatatgatttcttgttgtactggaatgatgctaatgttctttctgaaagactctccatattttttttgttaacagtacttacacatataactgcttatgtaaaagctcatatttttccttatttcaattaacattaagttccaaaaggtattgcatcatttgattgttgtattttctaagtattcaccctgctctgtttcatactctgactggtatcatcttcacagcccactgagaatatcagccaggttaagacctgccg

SEQ ID NO: 111605 - DNA, 874 bp, Setaria italica
  Intron number 1 from transcript Si013483m (locus Si013483m .g) derived from phytozome v7.0 (chr-ID scaffold_6; pos 34 852299 to 34853172)
ccctcgctggcgccgtcctctcccaacgtggaccggtgagttctcctgttcggattcctgtaagtacagcaaatgggtcgcttcaaaaatggggaattttttgttgggcgccgtacccgttgacatttccaaacgatgattcgcgcagaaattctcaattatgctcgtccggtggcacagtggaagtggtagtttgttcggtactattattcttacacaatgtgctttagcctgtagatttaaaaatttaaccttttctttttgctgttcaagtgctcagaaagtctttctcagcagctcgtagtagtaggcacaaagttctggctcacttgcagtgctagttgcatgaaatgtgggttggattggatgtttggtcaattcagtataagaaccaaaggagcaattttgccttagcatgactcaattttagatagtttggattctacttaggattttgtttcttggcagtggtactctggaagagtcggagttggaaccaggtcttctagaactgtgtcaggaatagcatttcataatattggttagctaacatggcattgattgctgatatcttgaattcaataccgcaaactgtttgtgctagcagcctgtggatatgctagattttgatttcgaccatatacatgcatggtaaccaataaagtacaatgttttagctattaagtctagcattaaattggttgcaaaagtatttgatttgagaatgaaagtccgtaaatgctacggtcaggttgtatctttctttggcatgttgcaataattcagaacatggaatcatcagcgaactgatccttttttttcttccatttcatttctaggggtggaattaaatctccgtggtctcgaagaaaaa

SEQ ID NO: 111606 - DNA, 589 bp, Setaria italica
  Intron number 1 from transcript Si018370m (locus Si018370m .g) derived from phytozome v7.0 (chr-ID scaffold_1; pos 29 784003 to 29784591 reverse strand)
gctcgccgtcaccgcctcccccaagcccggccaaggtgcgcgttcaatgtgtatggtgttatactgttatttactcatattatttactctctatgtttgaaattacaagatttctttcatttcattactaataattttgtatcacataaataaaatattataaacattaacaatggagtgatggttcatcaaattaagtctttcctaacataacaagctaatagagttaactagccatcaccaccacgaagaaagggagatcttgaagacttgaatgatcgttaatgacatcacgtacgactcagggtggagttgctccccatgttctagtgttcgtcttttactcttttaccttccttcttaaatggctgaactatgttcttttgttgcttgcaatgcgtctgaaaagcaaaccgagtaagaaacatttttgaagctatatatctaggccgggcagtagtaggaaaacctttcaccgtccatttcccgcgtgttcgaaggtcaaaaagtagaatctttattgtactcatcacgaaatccatggccatgcgcagttctgcacgccggcgtggacacggtgacggtgacc

SEQ ID NO: 111607 - DNA, 567 bp, Setaria italica
  Intron number 1 from transcript Si014160m (locus Si014160m .g) derived from phytozome v7.0 (chr-ID scaffold_6; pos 31 535741 to 31536307)
cataggtgcagctggatcaccaagaacactggtatgaaattcgctgatcttcatgtatttgtttcacatgcactagcatgatgtttctactggaggaacagtttcgaataatgatcgtaagcttttcaccttttgaaacatggtttcttcgtgtacaggagaaacgcgtatgtcttcggataactgaatgacgcaaagaaacagtagttaaaaagtaaatttttaccaactagtgaatataaaaagattggtcatcaggaaatttatctgaacgaaaaaggaggtttggatagacaatgggacaaacttgttctttaagagttggcgaagtcgacttcgctgaccagtgatagtctgatttgaccaagtttcagtggtcacttgctggtgagatagagagaaaggagaataaagatcagctgacaaatgcataagaaagggacttgtccccggttcggtgtagtttgttgtgcaaaatagactactcaggaacatatgaaaaaatggaaaggatataaacaaaacaaaaaggaaaaactgtctgactgaaaattaaccattgtgcag

SEQ ID NO: 111608 - DNA, 953 bp, Setaria italica
  Intron number 1 from transcript Si037900m (locus Si037900m .g) derived from phytozome v7.0 (chr-ID scaffold_9; pos 12 118468 to 12119420 reverse strand)
ggcacccgccgccgccgacaaggaagacgagtggggtgagtaaccgtgacgcgccctcgtctcttgctgtgcttgtttaccggtagctagcttcaggtgcgtgataattttccatgatacgagtagacaagttttgaggtataggcggttggatgacctcttgctggtaagtggtaacacgcccatccttgtggccggattttgttgttgttgagggattgcctgagacattgtgcaagcatgctcgttctacgtgggggaaaagtctagatgattgtgtaaccagaggatttttcaggtggaaaagcaacatgatagagacctactgacctatggttataaatcgcaaggggcatttgccattcttaagaaaacaaaatgtgaatttcaccttaactttccttcttgatcaaatcagccaagattacacgtgagaaacttcaacagaataaatgccttcctttgctgaatctttgcattagctattcaacacaagggtcaatttctcaagaatcgctgctctttgcttttcatctgttgccctgtttgatttttatcgagtgagagctgcgtgtttctgttcaggaactaaacctttttctctcagaccaaataccgtacttactctaggaagttggatattaaccttttctttactaagatgccttttgcattgcatatttttaaaataggagatatatgacatcaggcaaactatgaacctcgttgaggggaagatgaatggtataaatcttattaacatatgaccaacatatgacttaggttgttgattgtcatatgtaattacaatttagttgtcagagtctcagatactactatttagttaggtagttgtaatacatgaattgcattccattctgagctccatttaatctgcactgctgctattttacacatccttataattttaatggtgctatcacaattcacag

SEQ ID NO: 111609 - DNA, 707 bp, Setaria italica
  Intron number 1 from transcript Si036957m (locus Si036957m .g) derived from phytozome v7.0 (chr-ID scaffold_9; pos 26 61049 to 2661755 reverse strand)
gtactcgcagatttttagggagtcccagttgcaaggtcttggtttctcgctgatcctgcatgcatggaagcttgaatagttttttttgcaggatcacaatttgcttctgcacctgcctccttttctttagtgctaacaaaagatgttttgttaagtgtctgttcatcagaatgctatggaggctctccaatatatgttctttcatttgattttgttttgccatcttttataaacactttgtttgaatggttggcaagattatgtgatatcccagtgactttggcactttgttctctcccttcttgtgccttaagtgaggataattctgatgatcaaatagttcaaatgtggcaatgctcaaagaagagaatgttgccatgatgtaaagcatatcaaagctccagtacagtttatttgtcaatgatagtaatgtccaacaaatttgagttgtctgttgtttctccttttgtattgtcttgagcactcacaattcttgctgaatgacaaaactttagagtacatctcaatataatattgattctgtggaaaagttaggagttttaaggaattaaaacatgtgaatacgtgggcattaagcatgtaacactgataacttcctttttgtgcctatctgtgggcacctgatgacctgattgtgcctatcttttgtagggctctgatcatcctggtgtgtatcctgaagttga

SEQ ID NO: 111610 - DNA, 876 bp, Setaria italica
  Intron number 3 from transcript Si016135m (locus Si016135m .g) derived from phytozome v7.0 (chr-ID scaffold_1; pos 32 023013 to 32023888 reverse strand)
cctccgccgcagcaacctaaaccctgaaaggcctggtagttatttctttcattaatggctattccatataatggtttatgcacaaataaccacttgatgtgctggaagcattcttggttttattcttgttaggtggagaattactttctacattgatacacttttcttaatttggattaagttctactttagatgttgcacatattatgggttgcctgctttatctttatcttcatataaaagtttgatggagaatgttttttgatatgattgtaaaaaaaaatctctaatacatacagcaaaaagccaaaaacttggtcattaggtgggagtgaaagaatctatgctgtacaactgtaaatgcatgtaatgtttgtagcggtcaggaatatgatgagaaatatagctgcaataaaaggagaccaaaccgttagctccactcttaaatgtacctcgaatttccagatattttggagttctagaaagccatattggaaagtttaagggtctcttcctataattttatggaaagattcatttatgtatgttagcttagagctcctattctatcagatgtcacttctaagttctttctttgacaactaaaatctgctgtgacaatttggcattcaagaatttctgttgtttatatgttcttagagtattgattctagggaatgatgagctacttaatattaggtttcatttactttattattttcttattttgcttatctcttctgttttgtaattttgggttgttttgcattggcatatatggttcatgttttgtgcatatacgattttttatcttgatgagtaatgcctagtttctgtgtcattgttacgatctatgtgatgatacaataattccag

SEQ ID NO: 111611 - DNA, 716 bp, Setaria italica
  Intron number 1 from transcript Si035061m (locus Si035058m .g) derived from phytozome v7.0 (chr-ID scaffold_9; pos 44 314173 to 44314888)
aggtcctcgcggaacggagtccatcggcgcccaaggtcagtgcccctccctcgccacatgccccggcggatccccgcgcccgcgggctccagttcggcgtctgcgccgcccagatccgttcgtttcgtgccaagcctttgtgttcgggctcaactatttggggatttatattgtctgagggatgtgcccctgcagtgagaaggtttagtttatgcagggaggactcagtttagggtttgattatgcagatgcatgtgtgttaccccgttgaatttgcgtctttgggatagctttggttaggttttggattagaaaattgacaatatgctactttataatagaaacgtctgttatccagcacgaagatatgcaaaattaaacctggtaataacggaatacgtgaacatcttttaactctagtgctagcctactgtacatttggaacgagcaattaatgtatgcctaagttaggaaaggtcgcatcttttccctggtggatggtattcaagtttgcatttaaaatatttcatgaggaatttgatgtgcaaaagtttttttttttgagatataaaaggattgccctatataagcaaaagacgggtatagtggtaccacatcacatgctctgctattaatgactttgtggactggtatttaagccctcattttcttgaggcaatattctgtgttgttgactcttttatctctgcttccag

SEQ ID NO: 111612 - DNA, 1043 bp, Setaria italica
  Intron number 2 from transcript Si036579m (locus Si036579m .g) derived from phytozome v7.0 (chr-ID scaffold_9; pos 12 238616 to 12239658 reverse strand)
cgcacttcctccagaccaccgagctcgccagagaggcaagcagatacccacttcctagcggtttcctttagcattcgaaacatgttgctagtttcagcagtcagcaacagttcagcactctagtcttgagctgacgtaattcagaattggagagctgctgttctatgcattatttcccacaatttcactttcaatgtgaaaggttgatgccataatatcaagttcgactagaagttttttttagattaaggaatattatccggcctcggtcatccacaattggatgcctatagccaaactcacatgaccttgacagaaactcagcactcaggctgctccagaagcaccaggcttcacactcaaagttcagattcaattgataaaactacttctaggactccctaacacctaacagatcctgaagcgtctcccagctgtagaataagctctccagcaccattgcatcctccagaactgtccgagtgtatgtcctgctatggaagaagtcttctcctaaagttccagccatatttgttgaagaactccaaggcagtggcttcaagcctgctgcagttcttcttcaaatcagttttctcttcctccttagatagcaccgcccatgctcttgtccaaaaagtccctctgaaaattacctgcaaaaaagaattagtgatggttcctttgaacagcacatcgtttctattcaaccatatagcccagcaaagtgcagcagctcctacaatcacctggtttctaaacttcccgggataacctctagtccaagaacccagcatattaggaacactaacaggcggttgaattccaaacgaaaagaacactgtactccaaataaatcttgctatatgacaatcaaagaataggtgttgcactgtctcttcagagttgcaaaaacaacacttggtacttccttgccatgcgcaattggtgcgtttactctgcaaaatctgtgggacaatgggtgctgaggctgagctgcctgtcttaacatcgaaacagatagctcggctgcttgactgcaccac

SEQ ID NO: 111613 - DNA, 1002 bp, Setaria italica
  Intron number 2 from transcript Si017477m (locus Si017477m .g) derived from phytozome v7.0 (chr-ID scaffold_1; pos 63 23522 to 6324523 reverse strand)
ctctgtttgttggccgtgaaattcgcagtgaaaaggtactccttcccaccccactttatatatgcttttcttggttaatgccttggtttcagtcagtaaaaatagcatcatatcttgaccatttatgtgattattgagaaagaagaaaactgtgttacggcttttctgttttgtgcctttttagtgaatatcttgcaacactagatcaactgttttgttgcctgaaattttattagagcctatctgtctagggatgccattaggtacgatatggataactctaagcagaaggagacgcactgatgacagttaaaattcggtgtgatttcaattgatgtctattcaatagttgagcataattatctaagttgtgaataatagtaactcaaatcaaacagatagtttctgatattgaatcaagataactatcaagggtataatttgaactgttcagaggtactaagaaaaataggttttatgccgcccatcgtagtagccaagtttcttagcatgaaactaaccatatatgacatgtatagcgtaaaggtttcttttttaagttcgtactattaggtgtttgtcttccatgctttatagagctacattgggatttaaatgaaataatggatctggttctgcgagacaggggaagattatgtagtataacactgggagttggcacacatagagaaacaaaattactttgcaaaggccaatatgagagtggaaactggaaaatctaaaaacagttgttagttttcaatggctataagtgaaattacttttgcagtgaatgaattgaaatacggggttagcttttaatatagctttgacttttgttttagtctttatggaatgtaaacctattaaactatgtcttctaaagtttcactaatttacatctagctttcccttttcctgaaacaccattctattgatttgggtttcattttttgtttatatggaactaaaacattagaatgaccctgaattgcaggtagt

SEQ ID NO: 111614 - DNA, 1035 bp, Setaria italica
  Intron number 1 from transcript Si018340m (locus Si018340m .g) derived from phytozome v7.0 (chr-ID scaffold_1; pos 39 656487 to 39657521)
gcccgcgctcccagatctcgcacgcctcccgcaaggtacgccaccttccctcctaatgcttatggtgttcaaccttctctgtacatggatcgttggttggttgatctgtactttttgtgattgggcggtttgtggggtgcgatttgcgttgttcggggagcgaggggagggggatctccgttggaatgagttgatttcgcggtttagagggtgcaaatctgatgagtagtgatcctgagattgggcgcttggagccggatctaggggtgatttcgctaatgggaagctataggaaggcctgtatattcctacttctggaaagggtgggtcaggtgctcttgctgttgtgatctttgtcgcctagtaaggctgcggccggattattggttggcgggaatttatcaaaataacacaaaaacaactggtgccacgagatcaggggagtttggatcaggctacgacttataattgttatcttctgattattggcgggagtttgtcaaatcaaaataataaaaaagaattggtgccaggagatcaggagatttcgaatcaggctacggcttataattgttaccttctgattgttaatgatttgaatcagtgcatctgttggtatggatagaacattgttggatccgacctaggactaggacaccttcattgaggtgcctacagaataattagaaaaaagtatataatttttctcagtttaaaaaaactagcagtgtttgcaggtcatcaatagaatgccatagaatgggttgtgcttgaattggaatcaatctttgagctgattgtcttctaatgctgcaaacatgaggcaatcagtagaaactgacctatccttacaacctaatagatattaggtgtcccaagtatgtaacattgtctttctcaacagataaaagtggttgttttgcccttttaatattatggttcttctttttgcgtttggcatgtgcaagttttgtacctttatttacgaagctacaataccaattataatcgaataccgcagggtaactttgagct

SEQ ID NO: 111615 - DNA, 1062 bp, Setaria italica
  Intron number 2 from transcript Si016347m (locus Si016347m .g) derived from phytozome v7.0 (chr-ID scaffold_1; pos 10 620853 to 10621914)
gcgccgcgacgacgtcgtggccatcgtgctcaccggtcagatctctcacctcacctccgctgccgcccttcctacttgcttaattttcttccaccaccgaatagtatatgattaacctgtcaccacagcctgccgattattatgtttccctccatactggggaagtggggatcagtctctgctttccttttctttccgtggatttttaatgtctcgctgcagacgaaatataatactagttggtccagccattttaagtttggcgatatcctggttagctatgggtaagtcgtggcactgtcaccgtcctagtttcctatcatttccgctcacctcagtccacctccaattttgggttggcctgcttgaccgcggtactgattggccagttgcgtgcctctagagctaatttatatggctcaagtaaatccaagtgatggtaacaaaaatacagagctgtattctttttactcgatataatagctttgcatatttatctgcttctctactactaggcggggaggacgtttctgccttttcttttaccttctactaaaaggatagtatactggtaccttttcaggttatatttgacattaggcgtatttttattccaattttgggttggcctgcttgaccacggtactgattagccagttgcgcttgcctctggagctagtttatatggatcaagtagacccaagtgatggaaacaaaactacagagctgtattattttacttgatataatagctttgcatatttatctgcttctctactactaggcggggaggacatttatgccttttttaccttctactaaaaggatagtatcctgatatccttttcaagttattcgacataaggcacatttttactcactttttgacttgtttaattgatgacttatgtggacgttctgccaaccttgtacacttgactgatgtatgaaatggttccatcaaagtcaattcatattgaatatcatttctgatacttgttgctgtcctggattctgaattgcataggtgccaagggcaagttctgcggaggatttgatatc

SEQ ID NO: 111616 - DNA, 892 bp, Setaria italica
  Intron number 1 from transcript Si034220m (locus Si034220m .g) derived from phytozome v7.0 (chr-ID scaffold_9; pos 50 80213 to 5081104 reverse strand)
agaacaaaccgtcaatcaataaaggtaacgataaggctcaatcaacactgttgtttatttttaaaataattcctagccacagagttctttttatgctggtccagtatatttgtcaataccatagttaccatatccataaactaagaattaatttgtgttaaagcgtatatgtttgctttggatttgggaggaaaagttgttcatgtttctggtaatatggttagcaaatggcacaatatgctatccttatctttttactatttaacttagccatgctagttctgttacttcgttctgggcatcttttttattctttcgtagttccttgctgtaacctctggattgcagcctgaacaccttcatgggtcttatctttttagtgtcaatggtggcctttgagatgtgtactgtataatctagaatctactatgttgcaagctgttctctagtccttataaggctgcaatctgtactaggagtagagcacatgctcattttttctttggattactggtttcccgaatcatattgcagagtagtacttctgtgtattttgttttccagtactttgctcattgaaacttgtaatgccaatcttctttctgatacattaacttgcctttcccctcaaggaggtttaaaaaaagaagacatagggtgacttgctttcgcttgaccacagcttgtgtctttccttttctgcatgtcatattatttgttgtctggcatattgatgcttgttaatgtcatgctgagagcttagatagtttcttttggatgtttctttatagcttgcacattcttttactgaactgtattcacagctgacttggtcctgtcttataattgttctgtttcttactttaacccttcaggtaaacaagtcagcagt

SEQ ID NO: 111617 - DNA, 703 bp, Setaria italica
  Intron number 1 from transcript Si016221m (locus Si016221m .g) derived from phytozome v7.0 (chr-ID scaffold_1; pos 31 427653 to 31428355 reverse strand)
ccaacgagcccgtccgggacttcctcccactaactgtacggtccttcccatggcctgtataatgtgattgtgatgtgtgattttagagagcgttgaattctacaaggaatgcccagttcatctgcccccacttataaatcctgcaatttgatatggttatgttatgcgagcataaacaactttcagttgatgaatcatgcttgatttggcttcataaggattaaggaaactccagattttatactgccataattacatctgcctcaatactcacatttgagctttgatgttttaaaatttgcttcatgttttacaagcatgtttttgattgccaaatgattagtttttgttcttaatcatgcaaataggcacacaactggcatcaagaatttggtgaaactgattccaagtaggcagtataatcaacctttttttagtgcaaggatatttgagtttgaaatgtcgcaaaagctccatctaattaacaagctctttatcctatgcggtattttaagtctaaattataaaaaaattgtgatgattttagaagttcagggtccaaaagttatgttctgtgtgatcttgcatttttaatgcaatattctgtcttatatttatcttttgagtactatttggttgtttcttcgccccaatgaagtttttctttttgggtggctgtaggttgattatcaagaaaaacaat

SEQ ID NO: 111618 - DNA, 834 bp, Setaria italica
  Intron number 3 from transcript Si035757m (locus Si034858m .g) derived from phytozome v7.0 (chr-ID scaffold_9; pos 43 982923 to 43983756 reverse strand)
ccagattggagggtgggcgaggtaatctcagtttcatgaatttcttcatggacataacatctcaccgctcttcatagccatagcgcctggttcttgagattataacaagtgttagaatgtattcgttcgtggcttagagaaaaatgattgagaaatatccgggtcctcagatttagcagtttattagaaaagtataggtcagagtgtgttctctgaggataatattattcaatttcaaataagctgtgtaggtgtatatattgacaaattggcccatcagggtttggtcctgcatgtataagattctcggtacactatgcatgcttattctctgttcaatcaactgatgtaagaatgaataatgtttctaaattctagcattcaagcttattgggttcactgtctatttgtaatgttccaaatcggtgtcctacttagttagcttgaatgggttagctttatttatgggtactcaccttaatattagttaaggaagcaagttaagccctgcgttgccttgtggaagtgtcagtgtatatttcactgaagtacgcttgccacccacaatagatcagcaattgtttttgttgtggatagatgtgtggggatttagtgggctagccctcatatgggaaagtttcaagtgtcaaatgcagagagtttgctttggttgaagcaagttgaccagtattcaaattttaaggtttgattgacacactaccactctagtattaattaacttgatgctgaactctgttaggtcttgtcgcaatcatctgttggctgttgtgttatggctaatagtgcttttacagtttgaaggtaaattcactg

SEQ ID NO: 111619 - DNA, 870 bp, Setaria italica
  Intron number 1 from transcript Si018020m (locus Si018020m .g) derived from phytozome v7.0 (chr-ID scaffold_1; pos 64 51153 to 6452022 reverse strand)
tgtgtgctggactgctggggccttccggaattcaggtgattggcttgtttcttccccgctccaaggtttcctcgtgctaggggccggtatcttctctctctggtgccttgttctgcttctccgtgttctttgcttgtgttctttatgcggcaggctgccggcaccaccttggaggcagcacaagtttctcattatacctttttttctgttttcaggagtaatttgttttcttttctacaatgtgattaggctcttcgatgcagctgctcattgttaaatgttaatggcccgtaataattactaggaggttgcctaatggcacactcttcattttctcttttcttgttgagcaaggagatcgggggatagtatacttagacttgacttcatttgcttctctttctttgagaaacaccaacacaatggcaaaagaatttctgtggttttgattacccttgcttgctcagatcggatgctcaggttcgatgttggagattttcgggttgctttcttagaggtagtagtagcttctttcttgctccaattttgccccacagctcaaggcgctgctgctataacttcacccaagaatcctacgattttattatgcattccccgccaaatgtcgctcctggtattccattttcaatgcaattcggtttggtacacaatcggtcgattggttcttgaattcaggatttggttgtgctgattgtagaattcggcgtcgatcttcaattttttctgttcttctcctccttcgcttcgctattttaacctttggcaataactatttttgacagctcctgatcagttcctgctcttcgtttcatctcctagtgtactcggggtaacagagctgatttgttg

SEQ ID NO: 111620 - DNA, 887 bp, Setaria italica
  Intron number 1 from transcript Si016356m (locus Si016356m .g) derived from phytozome v7.0 (chr-ID scaffold_1; pos 38 297632 to 38298518 reverse strand)
gcttcaacccgcacctctggtaccgcatcggccaggtaaccattcctctgctcccgctccgttcgatcgtaaacgcgcagggcatgcgcgacctgccgtcgttttctcgtgtgctctgtgttggtgttcgacggacaagcgaacgtgtctgtttcccgacgaagtttaatgatcagttcagtggctaatgatcacgcacccagaggggtcatactataaatttcttataatactaaaatgtaaggtgctctagcgtgtagagcatgagaaatgatggtggcaaggtcactagagcagggcgctttctgtttgtaacaaactgtaaagaaacgccgcgtgttcttccacctaatttcaccaaccggtgtgtatcatcaactttggaaattggaacgcatacacgtacgaacgcgttaggtgcatgcagctttacagctcctctgttttggtcaaaagtgctgaaggcgattcaaactcgtccaaggaattcacaacgaacgtagggctgctactgctagtcgtttctgaattcatcttcttttacacgttgaaagaaatgtactgcttactccgtatcaaaatactattcgttttgatttttctaaaaaaactaaataatatatctaggtgcatgttaaaaactatgcaaaaactaaaatttgggacggagggagcagtagtcattgaacttcaagcaacagacaaccaaagaacaagctgaattttttgcttttccttgagagacattcgagcattagaattggcccctgctaaatgtgcaaaattccagagcagagcagagactgatgctgttgttcacgcggcggcggcggcgcccggcgtgcattgcaggtgatcggcgtggaggcgagggcggtgtacaacaa

SEQ ID NO: 111621 - DNA, 551 bp, Setaria italica
  Intron number 1 from transcript Si038291m (locus Si038291m .g) derived from phytozome v7.0 (chr-ID scaffold_9; pos 47 961132 to 47961682)
gaccaattgaggtgggggataaaggaggtaggtacatactaaagatggtggacaagaaagttgttcaactaaatcctaggccataaaaaaaatcacattttagcattatatttaatcacagtattgatgggctttttcctctattaataataattcgattttcatgctggaagatccaaacatccaggcatccagcttatccttttttcgttgatgaaaggtgcaggccaacaaaaactaaagcaacatacccagtttcctcaaaatagttgagaccacacaaaaccattgaattggaatctgtattatagaaagatgagacttagatgctacgtgttacattcttgtaaaacaacttgctcccaaagaaatattgtatcatgagaggaaaaacaagcagccatttttttaaaaaaagaagagtaaatccattttccaaaaagaacacgagatcaaagaaactccaccagttctaaataattaacaaaaagaagacatcaataagatattaagagaactgcttttgggcttctatcgcacagaaaatcact

SEQ ID NO: 111622 - DNA, 537 bp, Setaria italica
  Intron number 2 from transcript Si018500m (locus Si018504m .g) derived from phytozome v7.0 (chr-ID scaffold_1; pos 48 27243 to 4827779)
gattcggtcttcggttgggggtttcttctgttcaggttgagtcttttgggtggggaaatgaaaacgcgttcttgtttttttcttcttcttattttttttaaaaattgtatgaaggttgtttctcttgtccaaacgattaggctttacctgtcttttttttgtctgattttttagagttcgtagcgctgctaaatgttactagtgattcaagtgttttattccatggaaatcgtgcgtatctagttgtaagcggtggattagttaaattacttggcagatttggtgcatattgtcctcgatttgcatcaccatggtttttttttacaaagattggaattgatataccctgatttgtttaggaatgtcgttttgatttgtattacacaacgtattttgtgatagtggcttccgcgatgctctccctaaaaattaggatctcgtttcatcaagtacaacatctgcatgacttatatttgctgaagtgacaaatcgtgtggttatttacatcgattgtttaatgtgcagcttatagtagtc

SEQ ID NO: 111623 - DNA, 527 bp, Setaria italica
  Intron number 1 from transcript Si038700m (locus Si038700m .g) derived from phytozome v7.0 (chr-ID scaffold_9; pos 66 79093 to 6679619)
tagagctttggctctaagaattccaagagttggatgtacctatctcaaataattcaaggtttatatctaaatgtttacataagtcattttgtatcatgcatctaacatctagggttctgttgctcgacaccagtttagcccaaataaaccccgaggtttttcgaatgaaaaaacaaagagacgcatccagcttcgtctccgtccacacaagctagaaattccctagaaagccactccaagcctttgatttgacctgaaaaagaagccccccacaaacaccactctacaccactgcactgtctctctccaaaggcaggtgcgttggcttccagccttttccctcctgtatctctctccctcctcggtccctccctcctctctaatcatagcatagagagagaagacatacctccaggcaccctcctttccctctagtctcccccaaacccttttcctctttccctcgccccaagaacttcatctcatctccaggccaccccttttgcgcaggagctcgcggagacagt

SEQ ID NO: 111624 - DNA, 593 bp, Setaria italica
  Intron number 2 from transcript Si014177m (locus Si014177m .g) derived from phytozome v7.0 (chr-ID scaffold_6; pos 32 948972 to 32949564)
tgtgagtaacatttttctatccaaacctagttgaatgcttcctagtttgaccacttatttctgaacaaatggcgttgtagttgttacgagttacgtcccaggatcttgtgaacttgtatgcatacttgtgctgtctgctgtattttccctggctgacgtctaacctatgataagttcctagttcatgacaacaaacaaatgaaataaataaaacaaactgctatatttgcttaaaggaatgactgatgggaataatttgtattgttggtttaatgttgtacaaaacagttctccttcaatatatttatacctggagccaatgttgtttactccagtcaaatcctattatcatgctttatgatgttctagcattgtcattttgcacacatttgtcttcccccatcacttaagtcgaagattttgttggggatggaagtactggaaagaggtaaacctacatacggtgctgcattatttgtgttcggatgatctgtaaccatatatatgacattttgtatacatatagtgtgcttattgacgtttcattcatgatttcaggtactataggtcccctactggaattcagctgagat

SEQ ID NO: 111625 - DNA, 629 bp, Setaria italica
  Intron number 1 from transcript Si015326m (locus Si015326m .g) derived from phytozome v7.0 (chr-ID scaffold_6; pos 30 351175 to 30351803)
gacttacattttgagattctcaaggtatctttcaagtaaaaaactaaattgtttggattaaaatctgtgttgtctcccttttttctgtgctacttgtggaactggaaccagccaaaactaacgaaaccttgaaccgaattcaatggacatataagctttataaataaggaaataccaccagagatataaacaacaaagcttttggaatataagtaggattttttttctgcgactaaatatttgtcagtctgattttctcttgcggccgtttgcagcccacgggcttaatggatgatggatccatctgggtgttccatttccaagcccagctagagagagatactatttacaccacagcccgccctgagcccaacacgaacgcctcgtcctttgatttctttgattgattgatatcatgtcgagggtaataaggtagctgatacaattagcattgtacgtgtaggcacgtgagtttgagagaagggagagtccgtatacaatctgtatccgtgagaccaccagcctgtatacgtacagaacctgtcatcagttaaatgtgaattgtattcttccaaaaactttgtacactttgagctggccaacagcaactgctgggcgactccgcaggg

SEQ ID NO: 111626 - DNA, 918 bp, Setaria italica
  Intron number 3 from transcript Si040750m (locus Si040750m .g) derived from phytozome v7.0 (chr-ID scaffold_9; pos 97 90418 to 9791335 reverse strand)
gctgaccagccagaacgagaaggattcggccaacggtaactactatatgaccatgcttcttccagttcatctctgaagacggttcgcttctagatgtcaatgcgattacagctggagctgtaacttgttcttaaatttgtgacaatttacacttccaatttgatcataattttaagatggaatatctctatccagggagctcccaaaatggactagttcagttggttaccaattccattgtagcaagtttttacagttattctttggacaatgtccgacataaaacccaccatagagtttagctgattcctctttgaacaaatttcaagctggtgctatgagaacaattaatgcagtgttatgacttctgaaaggcgcaaggtgctaggcgagtagctgtgtggcacttaacacctgattgggatagtaggcaattaggctctatgatggtgggtggcaaataacgcctagatgtcactttgttaagctaggtggtcaacgttaagaacagtgacataatgaattactgagttggacctcaaatttaagattcaaatgggtgtgtatcttgaagctctagtttgttttggtctgttctattctcgaactatgtgccaaaacactttgaattgacaagttgataattgctgaccgttgccagtgtgcatgttttccatcagctcaatggcatctatactgttgaacaccataaacatatccttatgatgcatttacgtggctcaaattaactggatacatttttcttcctatagtttgtgaaatcaactgagtaactgtagatttattttttctgtaaatacgttccactagtgtttggttattgttgtgcaaatagtttgacatgttgttatcttgtaatcagaagcagaagttctttcagctcctccaaagctggtt

SEQ ID NO: 111627 - DNA, 653 bp, Setaria italica
  Intron number 3 from transcript Si018364m (locus Si018364m .g) derived from phytozome v7.0 (chr-ID scaffold_1; pos 34 214774 to 34215426 reverse strand)
cattctctcagttctgggaaactcaaatctccacagtaaggttccaacttcattggaagaactcatgttctaaatgctgatactagaagttgagatattagttggtgctgccatgttgaaatgaccctgcgctattatctaaattgtctgtaactaaaaaaatagcccataacacctgtatttcatctacaatattttcttgccaaaattgttaccattaatttagtttttgtgctgcttatttcacacgacgtgttgttcttgcctatctttatctacttattggctgaatgatgcagactgtcgaacggagttctagaaacacaaatttgctaaattagtaaattagatgttgatttggttctaaacataccatgccgctatattttcattctagcagtttgatttgtgcaccctgtgttaccacacttcttttcaataaagtggaacagcaatgccatttctttcttccaaccagtcatatacaaaaaaaaaaaaaaaaaacaggatgccacttatgctgaggtactttatatagttattaaagctctggtgtttggtgtctgttccagaatctgaaggtcctaacaaaattttgtccttcgagtgtaatattattacatcgtcgaaattattgaactttgaattcacag

SEQ ID NO: 111628 - DNA, 623 bp, Setaria italica
  Intron number 1 from transcript Si016211m (locus Si016210m .g) derived from phytozome v7.0 (chr-ID scaffold_1; pos 24 977697 to 24978319)
ctgaggaggaggaggtggccgcaggcgccgatctggtgagcccgcgctcgctccctgctgttttcgtggttgctcttgctttgtgatgtttgaattttgggaaattttggaaggtcgctttgtttccttgcttgtttcgtgtgatctgagctcgaattcgaggggcggcaaggtaatttggctcgggccgcgcggaattcttcgttttgtcttcgcggtttctttgatcacaagatacttgcgtgtttgggggctcgtggagcccgaggcgcattaaattccacatcttctgtgctgttttattggggaaattaaacatttcccgcaccagcttgtgggattcccactccgatttgtcaaatctactggttctgattcaaaagtattgactttcgaagcttgcacgaactaaattccacattttttttctgccgccccttacttggttgctgcggactccgaatttctgcgcgcaaaattgctctgatttataatgcttgccccctgacgcttcatcatttctgcaaaatttgacaaattttgccttgatcccgtgcaattgagctaccgtgctgttgtcagggtttgtgtctaacacgctatgtggtctgggctcctgcagg

SEQ ID NO: 111629 - DNA, 589 bp, Setaria italica
  Intron number 1 from transcript Si034305m (locus Si034305m .g) derived from phytozome v7.0 (chr-ID scaffold_9; pos 48 262111 to 48262699 reverse strand)
ctccacacccgcgcagaggtactccccgtctcttcccccgcctcctcgcctcccccactaaacctctccaagtgcgatccgcgatggctgttcagtttgattagagccgagctgattcggagcacggtcttccgtttttagactacctgcgtgtaggatctgccttcggatttcgtttttcttcctcgtcgagatcggcagctacgtgatgaaagtgtgcagtgccaatttgttcgtgtttttttcttttttcacgcgtgcaagtataattacacccaagagcatcatatgactttaagtgggctcaccttatgaattgtggctggaatggggatggcagttcaaattgcgtttcaccttaagcctgatggtgtaatcaagctgttgttacagttatgctaattgctagttcctttacaacgacaaatgacaccaaatgtagtgtaatctaaaccacaatcattcagtgctgttcttctccctttttggtctgaacatgtaagttcttgctttttgtttaggtttccaatgcttatttaactcattgggaatgttcttcaggttccgtttcaagtgcctctcgaggtta

SEQ ID NO: 111630 - DNA, 1036 bp, Setaria italica
  Intron number 2 from transcript Si018129m (locus Si018129m .g) derived from phytozome v7.0 (chr-ID scaffold_1; pos 33 611197 to 33612232 reverse strand)
tcgtcaagcagttcgaggagttcgcaggggcgcaggtaccatcgctttagcctgcctgttcaatggaatacctactgctccatcgcactatcgcaggcacaattgctgaatagttgtttcattcaggataacatcatatagtttgttccttgatacaagaaagaacatttcatattactgaaccattggatatttcacattgacatttcattgaaaggttgtcaggctacttttgatattggagcatagacaatttatggaataaggatgctcgttttccctatcctgctaattttttttgctatgttgaagtcctatggatgaattgagacttggtaggcatggacgttaggggtgggcattactgatgactggtacgctgatacggctttagctttcttataagactctttactttatacctatggaaggaaagaggttttgtttcggagcagcagcacagcagcagtaggtttcttataagactctttacttagtcaggcgtttgacgaattggggagtgtaatgggcaaatgaatctgttagctgcacatcggcagtttggtattcatacttgataggtagttaccctccagtttctgttacttgtactaaaagaagtgcatttgatttgactgaactattatatacttcacttatttttatctcatactactgtttgatgttaaagcataattaatttacagagtaataatttcacaagaacatatatttgtggccatggttcctgaaaaccacatttttcttgactagttggccattgctactgatcccagattttatggtcataatgtttcataaaaccccacccaatctagttaaagctcattgactgtttgatacgctccgcttgttgatccacttgacactccgtttatgaaattctttgaccataaaacatggcattaagttttcttcagctacgagtacgaaacctgtggttttctgatttactccatttttcacttgcgcctgtacacttgaactaatgattttcttttatcatccacaggat

SEQ ID NO: 111631 - DNA, 552 bp, Setaria italica
  Intron number 1 from transcript Si015396m (locus Si015396m .g) derived from phytozome v7.0 (chr-ID scaffold_6; pos 18 795262 to 18795813 reverse strand)
agaagaacgtgcagattgagccactacttacaaaggtacgtcagataaacaaaattttgccagaaactctgccaattatttatttatttttatatatttaccggcaaaaaaatgcatactgatcgtaagattttgtttgatcaaatttttaacccgctagctaaaggtggatgagggccggttgctgttttcaactgatataaaaattgattttaaagggaagtaacgcgaaattcatacccccatgacattgtactaacccttatctaaacaatgagctaaatatgacatgatgatttgcttttataataaaaataaaaaacagcaaccggggtaataacccgtatactatcatggtgcatcttgtcttctccaacgattctagtctcctacgagtgaattatgatggtttcagcaacataaacgtttttaacatgatactccattaagctttattctaatagtgatggtagttgagacaaattgaaaatgctttattccccttgatctgctccagatatctggagacactgcattgtcatcggtaaacat

SEQ ID NO: 111632 - DNA, 952 bp, Setaria italica
  Intron number 1 from transcript Si020627m (locus Si020627m .g) derived from phytozome v7.0 (chr-ID scaffold_1; pos 52 9009 to 529960 reverse strand)
tttatcaaggtaatttacttattatttgcaccatacctgttttttaaaaaaaacaaaattatgaacgtgacgacatttgttccattttatcttgaattactatattcggcatgttatatcctcttattctaaaaaaaaaaatcgaccaacctaagaggaactaggtggcattgtaaaaaagaaataggcaaccaaattcaagctagaggactcgaatcttgtcggtgggtgtgtgcacccgcaccttccaccaattgggatatgctcattaccttatattctattgttttgataatttggtgtgctaagtttagcttgcattaccagaacaagctgctgtgaccaccatggtgatatttagtcagcagctgcaaattgtcctcctaccattgttctatgctgtagcggccatagccttctatgtcgatattgttgcatgttatggccactgctagtttgatcttattaagatttctattccaagtgacacacctgatggttgctcgtgacaattcacaaaagttgttcttaggaatcatgattctccatatattgcaatgcaacttttgcaatagaaactattatgggaatatgccatcttctatcatcatcctaagtggaaaatatgatgcctctgttgtaaagtgtaaacagagtaagttgtttggcaccttatatgatcttttccacactcatactgcttcaggacttctctaggtaagggtgtaaaggtcaaaaagaaaaaaaaactgcattacagatttcttagacaacatgtcctggaagttgtttacactattaatttcattaatcattgttatatattagaagccttaataaatttgactagtgatgtgggaacatccagtaaagcattgacaatctgcatttgaattcattagctacttaatgttttttttttcacttttgtgctaatggaccttcaacgcag

SEQ ID NO: 111633 - DNA, 676 bp, Setaria italica
  Intron number 1 from transcript Si036391m (locus Si036391m .g) derived from phytozome v7.0 (chr-ID scaffold_9; pos 24 215743 to 24216418)
cggctcccttctgctcccttccttgggtcttgctggtaatgcctctcttcgctatagttctatggatttcttttgttgttttgctgcttctgttagtttgattgttgtagttcatctttcctctctttcttctatcttttcacgcctctatttacttttctcttgataatatggtgtgtatgtgctttgtttctggatccaagatgttcttgatatggtttttactgattgtgcagtatcaaacacggatctggtagttttaatttatttactcctacagcatagatgtatcttgaatcagcattggggagagcccatactgaaaataagtattcgtagtctcactaggcagaaattatttcggcagcatattcccctccttccattatcttgcccttattttgttttcccttaattgatccttctcggttacattagttactcaaacatttgcacatctgcctgcttgttccacacctttcaacttcaagccgcattccttatcatttgtatctctgtgtcagtaaaatctcaaactgtttctgcatttctttgtcgattttttatgttttgtgtgcattgatgagtttctcctgcaatgtacctttgtacgctgtaccatccccatggttcttccgcagtttcaggtcaagaagctcgtcaactggttcacctc

SEQ ID NO: 111634 - DNA, 899 bp, Setaria italica
  Intron number 1 from transcript Si017062m (locus Si017062m .g) derived from phytozome v7.0 (chr-ID scaffold_1; pos 40 427294 to 40428192)
tgcatagttggtggacagctttggcgtccgctaaggtggccaacaggaaagggctgtgaagcttaattattctcgtcctatgggaaatttggaatgaaaggaacgccaggatttttcaaaataaggagtagacgatacattggacggtaaataagatcaaagatcaggcggctacatggattgtggcaggtgctaagcacctagagtccttcattaatgcggtgagggatctgtagtatcgagtttttttagccctctctcattttcccttttgctttgggatgtgcgtgtgcagtatgtatagaacttttgtacttcgcccgtcgggcattcctccgcttttttaatatagcagcagctctcctgctgactcgttaaaaaaaatcctcctggctaatccactactccctctgttccaaattgtagattattttagttttttagttcatacatattattatgcacctagatatagtgtatgtctagatgcataataatatctataaattaaaaaagtcaaaatgaactgcagtttagaacggaggcagtatttccgtacaactattacaaggacggaagatcgatccggcgtcccatgtttttcttgcattgtaccttgaaacttttgctttttctctgccgtgcttgactgctaacgagccaagcctacatgagtttttccttttttcttattaaaaacaatgtttttttttcctggagccgagctgcctgagcctgctgccttcagggctccaggctcgactcgtgatcggctcgatgttgtatcaaagtcgaggaggtgacaggctcgcaagagctcggctcgttgacagcagttctgcttctgccttccccacctcgtagtctccgccgaccgggaccgcgcgcgcgccgacccc

SEQ ID NO: 111635 - DNA, 918 bp, Setaria italica
  Intron number 2 from transcript Si037163m (locus Si037163m .g) derived from phytozome v7.0 (chr-ID scaffold_9; pos 15 05809 to 1506726 reverse strand)
agtttgtggagagagcgcacgacttccctggcgtaaggttccatgattccgctgtatagcttcgcgtctgtagaatcgatgcttctctggaatcggggaagggccggccttcgaactactcgggatccaatttggatgctccgattagtttggatgaacaaataatgcatagatgatagatggatggaacgaactcatcggatttcatttggctgtgtgttttctagtttggctggggttctgggcaagatacgtccactggagaactgacgtgatagtatccataaagcagtaggtatgatccagttcagtgatcctctagtgtttaaattgtaccgatgtgtaagcttccacccatgagaattgctgctccaaactcagcaaagtagattagtggatcaaaactaaaattgtgattaatttagtaccaggcacaaatattatcttgatcttatttggactgacagctggatttttgcttttacatcattttttacacattctcttttggttaactcaattgattcttcatattgcgtgaacaacttagcatgcttttgaacaactatgcattgagagtttatggtgctgcatcacaaaatccacatgtttaaaaattgaaacaatgtgattggctggccatttctgttctttatcgaagtctactcgatctgtaatctattgttttgcaagatttaaggctacatgaatttattggtttcagttttgtttgttttgcaatcctgcaagtggtaccaaattgttatagcttactgctgatctcatcactaagtaatttgcgaattgtaatttgtctaatctgttttacagccaatcattctccaatttcatatttatcttttcttcacatttccaaaaatgacatacagaaactgagcgtaagggaattctcatctc

SEQ ID NO: 111636 - DNA, 621 bp, Setaria italica
  Intron number 4 from transcript Si014494m (locus Si014494m .g) derived from phytozome v7.0 (chr-ID scaffold_6; pos 48 02919 to 4803539 reverse strand)
cttcacacagaagtaggttcttcagtctcttttgttgcattactgcatacacagaaatccttcaatatttgcaacagcaaagtacagaattgtatggagtatttcttctttgagaaaattatatggaatttgatgttgacaactaaatgaaaggatcaggcttttcttgcctccactgcagcctactgtagttttccatagtaaacactaaacaataatatttgcaaacctttcttttattacttactcccttcatcccaaactgtatgttgttttggcatttctagattcatagtttttactatgtatctaaacatggtgtatatctagattaatagcaaaagctatgaacctagaaatgtgaaaacgacctaacttgggacggagggagcaatggacaaatttgttcatatggctccttcgtgaggggaagtccttttgcaactataccgaatattcatatggctcccaagtatttgatttttgctgaatggatgagttttggcaattgaaaactagagtatgaaacacaggttttgcagtattctgttcagaaacttgaatgctactgtctcaatttcttatcataatactgcagaactcgaaaagagatccaagctg

SEQ ID NO: 111637 - DNA, 799 bp, Setaria italica
  Intron number 3 from transcript Si014550m (locus Si014550m .g) derived from phytozome v7.0 (chr-ID scaffold_6; pos 39 77666 to 3978464 reverse strand)
ccaccatagaggtacagtttttgttccaggctgatttctggtcccctattataaaggatgaaagattggatactcgttttaaacataggattaaataatgaagatagaattgcacgcttaacttttttaggaaatttttgggtatctgcaatttcgtactgtggtaattgggggtgggtctagctttaccttgattccttgagaatagacgtttctttcaacttttatcagccccttttgcatcagggactcaattcacgaagggccccattcctgaatgtcaaattaacattcaaattttgtttcaaatacatgtcattctatgatttcgaacttttacacaacattgctgtctttgcaccatcagttttcttatatacaccactacacctccctttcatactccataatgctactagcattgaatttgtcacttactactaacaaagatattccagagattaaaaacataatttgggctaaggtttatgttatgttaactgtttattatacaatgcctgtatgttttgagctgatttgctaatgtctgccttcctctataacctttctatctgtctgtcacaatgttttctgctgcctgacttgcacagttaacaacttgtatcttgtaagcatgcattgttgaattgcagtactgatatcggttctgttatgtttgccaagcctgatgctattagtatatatttatcttcctttctttgcatgtatgagcactgtattaaatttttttcttcatactgcaggaggagtttgacgaagtctgccaagaaagacaggt

SEQ ID NO: 111638 - DNA, 554 bp, Setaria italica
  Intron number 1 from transcript Si017953m (locus Si017953m .g) derived from phytozome v7.0 (chr-ID scaffold_1; pos 41 396617 to 41397170 reverse strand)
tcgccggggacggtcgcctctggccacccgcagaggtgagcagcaagaacagctcttctgcatctatgcagaacaacggctgcgagcatgcactttctctttcaagggaaaaagttggaatctctataagtgcctacttgttctgcttcttgttaggatcgtaggacggtaggaggaggcgtcaccgtgcatttacacctaattcgtcccttcagaaataaaccttctttcttgtttatgcacacaactcctatagttaatttttttcctgccaaagctacctaatttgcatcgtttccattattgaaagttcctttttttttaaaaaaaacatgagcatcctgcaaaactcgagggagaatataaaggagacttttgttggttgcattgcccttcagatctgctgcaatcatcaaaattttcttgacaagaaaacagtatcctaatattttgtctgaaacaaggaatatttccttccttgccgagctgcccaaatcagcttcaactaatctgaactgcattttccgatttggtagcagctttggagtggtggg

SEQ ID NO: 111639 - DNA, 996 bp, Setaria italica
  Intron number 1 from transcript Si017724m (locus Si017724m .g) derived from phytozome v7.0 (chr-ID scaffold_1; pos 87 68326 to 8769321)
aggcaagtgaaatttgcacatcagctttccttccaatgtgacgcattaggaagcatatgtccccatttttgaaaggaaatggtagttgttgatcgtttacttttatttgggtggtatgtatgcatatggaaatcttttattttttgtaaatggagttatgtttcttttaattatagatgtatcctcaaaacgcctcaagtcctaataagtttggcttttctagtagtccaaacataccatgtatatagctatttcagactgagaatgcgtcacaaattttttgagctcaagtttgaagttacctggatctccaacttatggctagattcccattcagcattttaaatctgcatcttggatctaccaaatgaaacgcatagctcatgcttttaatttatttgcaaagctagagtattttttaagaagagtctccctctgccccatttactttcatgtcttcacgccttaattaatattaataggttttcactaaacgagagccacttgaatcaattagtttctgatattagggaaaaaaaatcaaattcgataaaacaagttgatggtgaagcttatgccaaaagaaacatattatgatcctgcacttttcttaagtttcaaaagtaattattctatcctggcatcttggaagtctaattcctaacttgtaaatactttgctaacattggtttgaaatggtgaggttcggacttagtgttatggtaaagtaccgttactgtgagttaaaaatgtcctctcatagtcttcatgtacttccaggagagagtaaaaagagcaaaattgcactattctctggatcactttcagcctaatgtagaaaaatcaacgtataagatttgtctcatattttcctcttttcaactgtctctataatgtaaactccttttcaggagctttgttgcttattttctcttttgctgaccaactctagatgattagtgcaggtattaagtgatccagagaagcgtgcaattt

SEQ ID NO: 111640 - DNA, 992 bp, Setaria italica
  Intron number 1 from transcript Si035996m (locus Si035996m .g) derived from phytozome v7.0 (chr-ID scaffold_9; pos 39 270835 to 39271826)
gcctaccaccgcgctgtcctgctcgccaagtacacgtcagtgagtgctctctgctgctgatggctgttgctttcccggtttattcagttttcaacatagttaaaagaacactcttcttgatgagattgctataaattggcacctagataagagatgggagcatacgaatgtgagtaagaggaaggttgaaaatttgaggtcatttatctacgtttgcaatagtggtattatttatctaccatgcagtagtaattatatttgagatgaggtatttcattttgcttggcttggtaggatacaaacatgcaactgaggagagttctgagaatcaggtacaattaaaatggtaagattgcaatgtggtgtaattacttgagggtgtgatgctaggagttggtggtattccggagaaagttcttaagatgataaataggaatttggatcagttgctcttgtcattagcctggatgatcttttcttggcttcaggatatttgatgtgtaagggactgaactcctatggtaattttgttcccttgaagaaactaggatgatatgtggcaaatgttgttctatgcttcatggtcagtgtctatagcggtgtcagctctgtagtattatctgctgaattttaactaattatgctattgctgtgatgtacattttatgttgcagtgtatgaaaattgacatgtttaagtgcactttgttgcataaagaataactttgtccattgcatggttggatgacttaattaggattagatatactgtaacatccaacaaggcacaggatattacttatctgctgcataaagttcgaatttgttaaacctccacccggccatttgtacttcttggcctgttttttttctttttgagaaaaaacaggattgtacttttgtaagcttcatataataaaatcatgaagctcacttggtggtaactgatgatacaaaggcggcagcctgtggagaagtccaaagaacttcaga

SEQ ID NO: 111641 - DNA, 816 bp, Setaria italica
  Intron number 1 from transcript Si016454m (locus Si016454m .g) derived from phytozome v7.0 (chr-ID scaffold_1; pos 32 393585 to 32394400 reverse strand)
tccatcgctaactccgtcgtctcccgctgctcgaggtacgcgtctccgctccacacgaatctactgcgctacgggttggggatagaagtttgatctgagctacccactggttattcaaggatacgcacggatgatgtttttgatcctgattggggtagttaccacaaactccgtaggagactaggatcgcaacagaagtacacccaaatgcagcagattgcttctatccccgagcttgattggtactagaactacacagaaccctagtggacgtttgctcgtccgagcatttaattttgatgtatattgatcctctggcaaggtttattcttcttgtgaaattagtaaaagtgatggagcgaacaacatggctacaccagtcatttacaattagtccttacagaaatctaataagagtgacattatctattgctggacatgtgcacttcacacttcaagttcaatacttttgccagagttcacacttagtttctagactgtacctcattaggtttgggcatatcgtgaacggggttatcaagcaacacaaaatagccacaactagatcaactaaaggtgaatccaccttttaataaaccaaattatatgcaatgagggatgtcgttattggcattagtatttaaaaagcgcattatcctatatctcctcaagttcacatttaaccataatgatgctgttgttggcaagatctttttcagatcctgtcacattgctcagttatgaagtgaagtgcttagtttcctaactttaacaatttcaggattcttgctatttcaactgaaaacttacagcaaa

SEQ ID NO: 111642 - DNA, 637 bp, Setaria italica
  Intron number 2 from transcript Si038811m (locus Si038811m .g) derived from phytozome v7.0 (chr-ID scaffold_9; pos 38 6607 to 387243)
atctttgcaaacgggtaggccttctcaactgaatagcatttgcctgattgtttctgttgaatcaccatagtgttcattttccaggatacaatgaaagattcttgcatgttgatactttatgcttcctttgtgcatgattataattgtttggtgaatatattgtccaaagacagtagcagtttccagttccagccacttatcagattagttgttttgatttgtagtgctgggaggtgtctctgcctgacctgtggtacttgcatttaaattggaaaatctcttctttctaacattctacttaattctttaaaaaaagtgaggtaattgattatgaagaaaataacagttcctttgttagtggaaatcatgcctaacagtagtaacctttttttctagtatgtttacccccagtatgctggtcattcctaatgcaagtatgctctgattcatttaatccgccatgtcttatacatgctattaatggaagtttaggttgatagtaggaggtcaggagtttctttcttttttctttttggcaaagcaacgtcctattatgaactactttagcaggaaaagaaactaatgaatatgtatctgtgcagcaaactagtgacccttgtgattcaacacttagctc

SEQ ID NO: 111643 - DNA, 917 bp, Setaria italica
  Intron number 4 from transcript Si035181m (locus Si035181m .g) derived from phytozome v7.0 (chr-ID scaffold_9; pos 99 9490 to 1000406)
tactgttactcctgcaaccatttccttcttcaaaggtatgattctggatcaaacatgtgcactatattgcttaatttcaactgtctctaatcctgtaacgatatttgggctgttcaagtttgtcttgtgtgtttgggtgtcatttcatctagattgaccttccatgttgtttacacagatatttactcaattgcatcaccttttaagttgatcaactatacaatatgaccacattacatataaggggggtccacagtttgccaaaacagagtctggctagttcgctccgcttaatcagtgtttggttcaaagtttcagttatagtttgccacgctttattggacctgaagccagctatcacacacccattttctatccatatattgtcacaagtttggtgaaaagatttggctgccacaaaaggcttgccaaatgaagtatggtaaagccttcctctcatattcgcattacgtttctccatcattttttccccgaagaactgtttctccaccattctgcacagtcatcagcacccaatatttggtagtccatttctatgttgtatctccatccaatgttttgctcaacttccaatcctgttatttggtgtcaaagttaccattcattattgtgatcaatttgattgttatgtcatcccgttattgtttctgtttcattgggccaccaattccttttagatcaccagtttacactttgagttggttacaatgctggctcaaaatatctgttctttttgctcattggaaacgatagtaaaatatgtctccatttgccgaagtataattgaaaaaagatgttatgtttgtactttttcctttttatatgtgcacggattgtttgtctactggaaacaatagcctcatgcatgttctcattaatatggcagatattggtgc

SEQ ID NO: 111644 - DNA, 599 bp, Setaria italica
  Intron number 2 from transcript Si017286m (locus Si017286m .g) derived from phytozome v7.0 (chr-ID scaffold_1; pos 39 948174 to 39948772 reverse strand)
acctttgtggtgagtgagaattttattatgcatttttttggtttaacaacggaaatgtaacccaatttgcttctgagttagatccatagggatcaattggtggaattttaatcatctgctatcttagttcagttcataaatttagaattggagacctttaccatagttaacatggcaacacttgattcagcagtttcagttggctgcttacttgcagcaaatagggacccattaattgaggatactgcatatggttaactgatagttaagatgtagtgatgcaatatttcactatgacacacagcaattatctgtttggttgatgccatatggtatctgcatggaactgctgcaatattcaggctacatatagcatacacaatgtatcaactttctttccgctttagaaatttgacatgttacttaataggtagttagaacctcatctcctgtctggattttcatattcttctgcagttcatcagcttctttgaatgttaggagggtaatacttttgaattagattatgtgagacatcttctcttctactaaaaaacaatgcagggataaaggagtctgatacagggctggctccacct

SEQ ID NO: 111645 - DNA, 1022 bp, Setaria italica
  Intron number 1 from transcript Si037241m (locus Si037241m .g) derived from phytozome v7.0 (chr-ID scaffold_9; pos 57 766910 to 57767931)
cgcagggcccttttccggcgacgagcacccaccaggtatgccctccccttcacttcccttcctgctgtgcgaaacggagcaccccaaaccctaatataagctatttgtattcggatcccacccagttagattcttctaatagcttcgattttgtctgcaaaaattatcgacactgaatgtgataattctatgcgatactgaatgtgatacatttcttggtttatctgtggtataagtacaaggtacatgttttgcagtgattcttctgttagacgagttgcattatttagcagagattcctcctttatggttgtttatctggtgttgtttgagctggtcataatggagaatattaggctgctcaatgtttttgcatcttgtgctgttgtgccatcgtgtgatctgtagacactggtaatctggtaacaacaagaagtgacagacgctttagcgagtagttcttgctatacagtttatatttcattgtttctgactgagttgtgtgcatccatacccatgtaacttctccacattatgtatttggataacatttgtctcaccttaattaaccatttctgagcctgatgtgctaaaatttaattgttaagaaaatgttagttctttgttactgaaatttttgcataggcaaatagaaaaatacagtgaatagcctgtactgttagattatatatggcagtttgctgtagaaacttgctcttttactgttagtagtcatttgatccattccgttaattatgatgaccctgtttttttttatctggctctgctttgattcacactctccccctccctctgttgcatttttactacagcttggcagaacaaatattcatgtataggctgtattgtcagttttatgggtaatgcatgtatctatgtaggctttcaaatttgtagttgtatatagtttgttatatcgtgattcgtgaatgaaacaacctaattataaatataattttttcatagcactgtgctggtttcagttattggatcctgcattg

SEQ ID NO: 111646 - DNA, 542 bp, Setaria italica
  Intron number 1 from transcript Si020159m (locus Si020159m .g) derived from phytozome v7.0 (chr-ID scaffold_1; pos 28 327253 to 28327794)
gttttccttcaggttttctcaagttttggctagaggcaccggaggagagccagtattcctctagtacggttttctcaagcagtcaacgattgttttatttgtttcaaaataattttattttaccggagcattttgttgcgttctcagtatatttttattttgtttttgcgacaattttatttttaaaagaacttttatttattatctgaaatattttccggaaagcatttctatttgtttaaaacatttttccataaccattttgttttgttcttggagaaatttcctttggttgaaatgcttatcagaatattattcttgtactcagaataaattttctacgtattttgaatgagcttaagtgcttaactaataggcgcacgtctccgtttcgatgggttttgtggcagacctagcatataggtttgcccctgtacaagtactccagccaaagcctgcgtttcattcttatcagctgcgcacttggcgtgcagggccatcccgaaggcgggacagggacaccctcttgccgtcctctctct

SEQ ID NO: 111647 - DNA, 658 bp, Setaria italica
  Intron number 1 from transcript Si019393m (locus Si019393m .g) derived from phytozome v7.0 (chr-ID scaffold_1; pos 88 90103 to 8890760)
ctttcgtatcgctgatctgatcgtagcgagagtaagtgattaatatctcttttcctacttttttacttgttattattgggaccattttcaagctataggaccagctggtacgcgtatattctctcctgaaatctggaggtcaattttgctctactttgtttacttttactagtttatgatgcgggtgcgttgggactgataaaggatattcctgttaaatgttgccgtcgtagcatatcaagtacctcatatttttatgactaatccaaaactgaactgctgattcaaaactactgcctacatggactcctgtgatttcagctatatctacccacgttctgctagagaccccacactggaatcctgaacagatgttagatggattccttgtctgtacagaacaaacatgatcaaccatgggctcctgataatactcccttgttctttgagttttcctagaagaaaaacttttcaagagagcaagttttctactaaaaggaaaatatatagtttccacttagataagatggaaaaattccaataggactatggaatcttcaagcagcatgtttactctttgtatggcaagtatttgtttatcttataatttccaatcttaataaaacttctaattttttatgaagctcgtcgggaggca

SEQ ID NO: 111648 - DNA, 749 bp, Setaria italica
  Intron number 1 from transcript Si014568m (locus Si014568m .g) derived from phytozome v7.0 (chr-ID scaffold_6; pos 15 048204 to 15048952 reverse strand)
ttgggaacttgaacagaatctgcagagtttgacaggttttgttcttctctattaatttaatgtttatttaatttacataagcaacatttttattttcatcatgttcatactaccaaaaattaatacctgtttttccagttgattcaactaggacctcaaaatcctgctgcaaatcatatttttatttcacatctttattttattgaaaatgttttatttttagatcaaagaactgtcctttttcttgtgtcggatcttgcgtgcattattctgaattgttagataagtttaaagttgaatcagctgctatgtagagattctagaattcctgtcttttgtttgtatatgcagtgatctggtactcaagtctctaatccggtcatcaacaaaaacgtttgtgcatctttgagcttgttctgtgtaaatgcgatttgttaaacattaactggcctgcattggctgcgattagatgtgttcttggacaatttcttaactcagacctatgccagggaaagtcagtgaacagaaatggcgagcacagtatcttactatccatgcccctgatatagtatgtcacataacaattacttctgattgcttttagtacgtatttctgttacagagtgctgtatcctatatatggccaatcaagattgtgacctgcctcttgttctgttggcaaaacctccatgttattaattgacaatgcattgacaggtgcctcgccgggtgagggcacgggtgcaacc

SEQ ID NO: 111649 - DNA, 643 bp, Setaria italica
  Intron number 1 from transcript Si018292m (locus Si018292m .g) derived from phytozome v7.0 (chr-ID scaffold_1; pos 33 119363 to 33120005 reverse strand)
gcaagccgaaggttaagttcggcgaaatcatcggggtgagcactccttgagcggactttcctaaaatcgtgtagcatccgggattggaattggagcatttataatgtgaaaatgaaggctgcaaattactgtataaagagtaccttgggagtcatcaggtcatcgaggagtaacatctactgtatttgcttagtgttcagaattctatttctttatggatggttaggacttatttgattagttcttggctgcattctagcatagtctctaaagtgggctagtggccatggccgcattggaattagtaatgggcgaggtggagaactggttttctcactgtttatgcaaactctcaacacatgttgtcctgttaagggcttagaaatgcagataagtcaccaccaagtctactatcttttatgacctttaattctttgttgttcttgcatggtttcattaacacaggcacatggcgggacagaaatttggtgctttgacttttgtgcaaaatccctggctattcattcatttgtgtttgtacaatccattatgatctcgtgaagcttgacttgttatgtactatttccttgaattatttggtgttgtagattctgaacaagcagttcattgaggaggctgagaa

SEQ ID NO: 111650 - DNA, 1017 bp, Setaria italica
  Intron number 3 from transcript Si020398m (locus Si020398m .g) derived from phytozome v7.0 (chr-ID scaffold_1; pos 12 44729 to 1245745)
tggccaggtacttgtcccgccaaagcctatatatcaattttttgtttaccctaattaattaatctctaacaattgtctacaaaagtaattttaatacaaagtgttcaaaagttaaattgtttctttgtaaaatgattttctgatagatatatagttattcgctggacaactgcatgcctgtgtttatttatgttagagaaggttgtatttcccaattcctgcaactgttttcttcttccaagtgaatggtttttttttaaatttttggaagataattctagcagttgataaaagttcacatgcaaccacccaagcttttgttcaaagagtggttttgaatatttctaagatgatatctttattattacaagtataatacaattcttacgcatttgttggagaaggttgatttagcattgtgcatgctatcagagttaggaattttgtattcctatttattttgttgtaccgatgttctcatggtagaaagaccttgcatcagctggtaagacataacataagagtgcatatgcagctgagtgatgctttgtcgcttttcttatttgacaatggtagtgtgcttagtactatcatttccacaagaaaggcaatgttcttcagccgagtgatgctttgtcgcttttcttatttgacaatggcagtgtgcttactactatcatttccacaagaaaggcaatgttcttcttggttcatttcctgacctctgtaatgtcttcaatttattttccaaaacgatcatcagtgcgttggttatactccccagcgtgcgttatttgtccttaagtgtgttgttttttccttgtacaaataccattgtttgacactctataatatgctcttttagcattgaaccaaatttccagttgtgttcattgctgtacttctctgccatttgccgtttttccctagaatgaaacaataatacttctcgtatctcttgtgattttattttcatatataggagaggcccattccttgaaagtggagaagatcttg

SEQ ID NO: 111651 - DNA, 958 bp, Setaria italica
  Intron number 1 from transcript Si037691m (locus Si037589m .g) derived from phytozome v7.0 (chr-ID scaffold_9; pos 19 509005 to 19509962 reverse strand)
gctgcacacatacagaagaccttggttagagatctgttacttcatacaacattttttattttctaaagtagatcaattcagatagtgcatatatagtaatatacttcaaataaaataggaatttgctaaacagagaaaatatttgttgtcgtgccgtcgctcctataaaacatgctttgatagtccctctattcatcaatggaaggcatattttggtagggaagaggtcttccaaagtcaatttcgaccattagttgctcttaaaagatactatggattgctacaaaattgacaccgtcttgaaagtactttgaatgcggatctattggtgcaatttttatacagtaaacatgcatatgattctactaattgttggtcaaaacaaagtttgatttctccgtattcaaaacacgctttacgttgatggaaggagtttcgttgcatttttcaaatttatggtgctatatgtgtttattaacattattactatgactgctcttatatcagcttgcacattcttagggggtgtttgggaggaggggattaaattttagcccctgtcacatcgaatgtttggacactaattagaagtattaaacctagactaattacaaaactaattacacaacctctaggttaaatcgcgagacgaatctattaagcctaattagtccatgatttgacgatgtggtgctacagtaaccattcgctaatgatggattaattagacttaatagattcgtctcgcgatttagcctaggggttttgcaattagttttgtaattatcttatgtttagtcctcctaattagtatccgaacatccgatatgacagggctaaagtttagtccgtggtatccaaacgcccccttatttcctttattgattatctgtactcgcacttgtctctaatagtttcacttatggtaggcttaatccttttattttatttcaatagg

SEQ ID NO: 111652 - DNA, 585 bp, Setaria italica
  Intron number 1 from transcript Si013585m (locus Si013585m .g) derived from phytozome v7.0 (chr-ID scaffold_6; pos 35 085604 to 35086188 reverse strand)
acaacgtcatcgccggcctcgccctcggcctcacggtgcttatcttacttactgctcgtgcatattaacttattgcatatattctcgatccatccatgcttaacttgctgagttgctcatctcgccaagagtcaaacctgcactcctgcgagcatcgatcgagatgcatcgattatattgattgatcgtcgatcggcgtacgtggctcatcaactaacgcccatcacatgccctgaaaatactaatcagactagttgctcgatcaagtcaacgaaaagatcggcaacctagacaaggccagccacatatatgcatacagaaaggattggataaaaaaagaactctgatcttgttcagtacactgtcttctctagattattagctgttgcatcttcttttctggaaacataatgagacttgcaaagttaatttcttggatgatacatatggaaccctgaaaagattttaaactcacgagatttttgctgcaaaaaacgcactcgaaacgactcccaaattatgaaattcaaaggccggagctactagcagctgatgggtgaagcgtgcatggtgtgtggcatgcag

SEQ ID NO: 111653 - DNA, 710 bp, Setaria italica
  Intron number 2 from transcript Si017195m (locus Si017195m .g) derived from phytozome v7.0 (chr-ID scaffold_1; pos 35 810358 to 35811067 reverse strand)
catttgaaggtaccattcagtttgctacactttatttgtcatgttgtttttctttcctatctatatatatgctgggtttgatggtattgcactgttaaaaacaatattgaaaattagcctattagtgagtgtaattttccttgctcactatagtgatagctcatatatttagaacagctcaaagggtacagacaaaactaagtagcaactgagttggcgaaatatccttccatggtttccttcctaagatgtaacattaatcacgttctgctttgggttatgtaagctttgtcataaagtggaattggttgtatgagttaatcctttgacaggtcggttctaaagtttgatggaccagttttcccctcctgatatttagtgtagtttctcccttgtctttgaactctaacactcttatgaagtctttagtagttagggtttgattcgcctcagtcatctttatttggttgaattgtcttctcttgatccttgtttgcattgtaattgctggttaccatgagctaattctcttacactaagtgatgggaatgtttatggtatgctaaatgttgcatggacacagtttcgtcctatgagtcattatacttgaatttctggatgcctctttgtttatttagaactagtggtcaacgttgcttttgtgttaactcccatttttttatttttctaaaattcagaaatatccagtg

SEQ ID NO: 111654 - DNA, 849 bp, Setaria italica
  Intron number 1 from transcript Si014492m (locus Si014492m .g) derived from phytozome v7.0 (chr-ID scaffold_6; pos 20 975726 to 20976574)
gcccgcttgaggtgatgaatgagagagcaaccacggttgggccggacggatcaattaccaaactcacagccatctgttgctgttgggccattagcgaagtggacagcaggctcaacccaattggcgttcaggtttttctcaaaaaaaattggcgttcaggttttctcaaaaaaaaaattgcactcaggttcattgattttcctccattccgttttcttgaataaaacctcctttctttctttggcagcacgccggcacatgaggttaattggtcttttctctctctttatctttatatgttcggttcttttctttgacaaattctgaaatataagatttgctagctgatccattttacttttttattatacatgcagttcgcccgttcgtcctcaaaggatgcgggggagacggtctttttttcccaatattggttagaactgacttgtatcgattaaaattaattcgatgagcaccaacttctatagctgtatatgtttgtagacacgtttctttacagctagcctatatgactatatatatatatataatcaggggtacctagacttgtaataccatgtagagagatagggaaacaccacacatccttagaggggtgacctttcatatatatatatagagagagagaggattatactatacaataccctgcagccaatcggtgcggtcaggcgcggccggtttccgcttcacgccggtcccagtttattttcacgaacgtgggttttttgattttttttatcagctcctccgaacgtggttaacgtcctcccgttcccgtttctcctagcaggaaccgcgcccgccattccccgccgcgcgccgccg

SEQ ID NO: 111655 - DNA, 530 bp, Setaria italica
  Intron number 1 from transcript Si016471m (locus Si016471m .g) derived from phytozome v7.0 (chr-ID scaffold_1; pos 40 739551 to 40740080 reverse strand)
gcttcgccacgccttcgccggcaacgagttgccaggtatgcctgcccccttctcttcccttcgtgctgtgcgaaacggagcacaccaaaccctaacgtaagctacttgtagtcggatctgacccagttacatatccatccctggtttgaaatagtatggttgtttgtttttttagtaaaggttaccggggtgatgatatatttaatcagtcccacggtccatcatagactgtggtgttaaattgtagtttctcttagataatttgtaactcccctcctgttcgtgtaagaccagtaccatttgaaccgtcaactgcttgcatcaaactttaatgcttgatttcaaccttttgagatctttgcgcctccagcgttttgcgcgttcttgtatcagcatgctttgattctcaatttataatataatacagaaaaagggtgggtgccggttgcagaggtgctgcctaatttactgttcgcattgtgctgggtgtaactttctgctgatttcaggttcctgctgtttcagggaaa

SEQ ID NO: 111656 - DNA, 1019 bp, Setaria italica
  Intron number 3 from transcript Si018167m (locus Si018167m .g) derived from phytozome v7.0 (chr-ID scaffold_1; pos 27 684849 to 27685867)
atcttcaaagagagtttcttgatcagggagacacagtcagtgatttacttctaagctatttgatccagtatataatgatatagtagcttccttgcagagtttctgcttcttttacctatcaagtaactcaaagggatggcagcagcctaattctggcaagtagagagaaattttcaattgctagtgcttttgagccttaagtatatcccatcctctctgcataataagatcagtaacctgcataccagtagtactcaccgctaagtaataattgatgagcagtatgttcaatttggaaatcttttgcaaattgcatcagtaaaaagaataataaaatgcatgtgcagtaataaatagagatccttccattggcacaagatctaaatcttaacaagccggtacagtcgtgctagcttttcaatataagctggggtagtgctagcttttagtgatcagtatgtaatagcaagtttaggttcgaatgtagcatgtgagtcaatcttctgaatagatgttttggacatcttgatacatagagcctatattaggaaaattcatgacaatatttcctaaaaaaattgaaggatttttttcccctgacgtctgttcccccaattctgatatcaaggggggggaacatatataaacacgtgtgtgaaaggcttatatttggagtgacagggagcaaatttgttacaatcaattgaaagtacatttaaattgtccactaatcgagaggcatattgcttagcatatgtagacaattcaacattgtcgaagaaagaaacacaacagcaagctttccatgttatggtcccttatctttcttttctttgagagagtatgattgttgggactagctctttgcccaaccttttttgttggttaacccttgacatgagtcatttctttctactgacatttgcccctgcattgctattttgttaagttgtgttttgcttctgaacaactgatcattgttgccaggtgctctgtctgcctagcagactatcaaccag

SEQ ID NO: 111657 - DNA, 956 bp, Setaria italica
  Intron number 1 from transcript Si019352m (locus Si019352m .g) derived from phytozome v7.0 (chr-ID scaffold_1; pos 49 40680 to 4941635)
tgtcctcccggtggtgtcaaggtgaagttgggggtggagatggagcggaagcgcgggctttcgtctgcgacgtcgcgggctggggcgccaggtgagcccatcacgtcgcaaatttggtcacggtgacggtgcgctgccaccagttcaccactgtacccaacacttcaccttatttacccaccttgcccatgagtttggttattaggaatctactactgagtaacttattttatttgcacatactagtgattatttacgtggcttatcatttgtatcatctttcttgacaccattctcacataagctatttgcgtacatgtaattgtttgagttcttatgctgttgcgacgcatgggtgacacatgggtaacttcgttttttatcttttttggaattgtaggtccggtagagattgccggacttgtattaattaatagagaagaaatggataacttcgttagcaaaaggccaattttgcagttgtctggtcaaaggtcaagtagagtttttttttccttgtaaagttgcaaatggttgttcatcgctaatttagcatgcatgtgtattaccaatgcaccaaaactcctaaaagcatgattcatatagatcctgcataagcacgaggtgttacaaatcaaactctaccggctgaagcatttacacataatagctttgctgagtttgtaagaaagataaaaagttgtttaacaatttacaactaaaaataccttttgatttattattgaatctaagctagaaggtgctcattccaagttctttatttcatcatcttgcctgtgttcttcattggttggaggcgttcatactagttccaaactctgatacttgagtaattactttgacgatacctgaacattaatttgatatcttttgttttaacatcacctttcctttttgcaggatagcttcagcttattcattatatttgtctgctt

SEQ ID NO: 111658 - DNA, 833 bp, Setaria italica
  Intron number 3 from transcript Si037409m (locus Si036539m .g) derived from phytozome v7.0 (chr-ID scaffold_9; pos 43 810493 to 43811325 reverse strand)
taaagcccccaacatccaatcagataaagcagcaggtatcaattccattctatctgtttctaggttctacagaaagtctgccttttcacgttatttgtttgtgcagtattgttgtatctatcacatatctgtaattctgtatgcaagccatcttatgctcacaggcccacaccttgcatacagtggtatactagaaacaccgttgaatctgtttgattcttccttatccggaagatctgttatttcattcatatcaatatcatgtaccccgtgcttgagcagctgaacttggcatttgttctccccctccaaatgctagggcattgaccatttgtgatctattttgattaacaatcacagtttacgaaatactgcatagtgctgcaaatgaatatgtccatggagttagtgctaagatcttcttattgttacccactttgttaatttaaatagtctaatgaattttctctcaataatagaaatagaatactaacaataatgcatctacaaagacttaacatatcttgcaagaaacatttttgaaacaagaacaaaatagttcacagcaatatataaacaaatgagctggtgttactgaatgggtgtgctgtttgggagcattgatttcatctagtttacagtcatactaccataatcagaatccgtactttcattatcattctcattgcttcatgcgctttgctagcatagaaaaacatttttcctcttgggtttaattattttgcatacatatacaatttggtttattctgcttctcatcaactaaattttcaaaagatcgcatacggattattggagcacatcttggagct

SEQ ID NO: 111659 - DNA, 778 bp, Setaria italica
  Intron number 1 from transcript Si018293m (locus Si018302m .g) derived from phytozome v7.0 (chr-ID scaffold_1; pos 36 695990 to 36696767 reverse strand)
caatcgcgatttcctgcgcggcggagtgctcgtaggtgaggctacccccccaacattttgtggggttttcagaatcttcacagccctctcgttaggtccgcccctgatcgtggattagggtttatccgacgcgggggtggggttttgtgcctgtcgttcctgggcttaggacgatcattaggaggggttttcgggactggaggatatgatttgataatgcgagggcttgcgattttgattgttcgtttactatgctttttttgtcggagttggggtggctcgttgggcacacattctctgttggtttcccgtgttgcgggaaaatgatgtttttctcccctagtggggtaagggaaaacaacccatttgattaaacattgtcagaaaaagctatggacttttgcttcatctggagcttggatgcaggaggtcattgggtttcatcatgcatgtggtgtatgaaagaaaatcaggagtttagtttccaaaggattataattataattgatgagaactatacgagtctcttgttaatttagcagtatgaattgtgtaaagattttttattcaacctgaaaagtaaactagacagtgtatatttgtgcgcactctaaagtatcagatgtgagatgtctggtgtgtgctcatggtcatttagggaagcaccatgtctgatgggaaagattcttcaactgaaggctcttgtggtacactatttgctttgcaattatgtgacgaatttgaatatgaatgatgtaggtcttgacgagttttgcca

SEQ ID NO: 111660 - DNA, 747 bp, Setaria italica
  Intron number 1 from transcript Si014623m (locus Si014623m .g) derived from phytozome v7.0 (chr-ID scaffold_6; pos 60 42221 to 6042967 reverse strand)
aagtgaaggttacacacacgatctgtgaaagcgaggtaaatagatccatctccttcatgtttaccttttcttctgagtgcttcaatttgtgcagtaccaacagatcaggtgactatattctgtacatgctggccattttggcaggttttaattataagtgtacatggttagggttttgatgttgtgaaattatgggtgtgattatattgcaaatcttaatatggttaaggtagacagtaatccccactctcgactggctttattcatgattatttcgtacaagttgataactttctttacatgactttgtttggggttctgttgtctcataagggcgccattatgcactgaactcactgtacttcttttcatatgaagcaactctatccttctccgtgttaaagcaagccctttttctttgcatccctgtgatgaaattgtagcttattctcccctctgaaatcctttgtacccatccgatgtggcaatgccctagtcctcattaagcacttttgtttgtcttttatttgcgctgtagtcattatctgcaaatgagtaagccacatgcccacatttcaattcatatttttcttacatgttctcaaattttcctattacgcgatttagttagacaacatgtgcacatatcaattagatgcagattactggtttacacaagtatttattttctgtttctaaaagagtatttctatactgatgatcatgatttaccattttgtttgtaag

SEQ ID NO: 111661 - DNA, 466 bp, Setaria italica
  Intron number 1 from transcript Si016293m (locus Si016293m .g) derived from phytozome v7.0 (chr-ID scaffold_1; pos 41 355920 to 41356385)
ctgagaacaccatcgtaaaagaagataattttgtgaggaatctttccttgattctcttcctgttgatgttgttagttgacaccatttccatcacatgtgtttatctaggttatcgctgtttccacattccttaaaaggcataagattacttctgattttttttttggccatggaacttgtggagttgtggtgtcatagatatttgcactaaagatgttaatgggtacgtattttcatcaactgtttgtgtgtgccttgaaaggactatcactaagcctggatatccgctaaaatggtccttgatatttatgtgttctgacttttaaaaaactgttagcaattagttttccatctttgatgtcactgatgagtcttcagttttcctcccatctagtttcttgtctgatacccttttctcatatggaatgattggcaggttactcctacaaaacaacagcctttgtca

SEQ ID NO: 111662 - DNA, 964 bp, Setaria italica
  Intron number 1 from transcript Si019019m (locus Si019019m .g) derived from phytozome v7.0 (chr-ID scaffold_1; pos 30 299347 to 30300310)
tcttagcgaccacctgctgtggatctgtaagaaaggtattagccacaattctccccattgaaaagatatttatatctatactagaaaaccaaataacctgcagtattgtgtggaaaagaaatggttaaactttatgttctgttcgctagcattactgtgaaacattaacagaaaaagacataaatatgagcatgcgactacattaaattaataagagtattaaattttacttataaatgcgaaacgtaactgaagaaagacaaatttagaagggcgctgttaaatattaaattattctagaagcacacaagttactgaatctcagagaagtagtagtgtgctgatgaatatcttttcaaatgctttagatgttcagtttcaactattttttcaagaatatactatctcagatgccaaatacctcaaagtaagaaccaaaaggaacatcatgtgcctggtgctttgtctcatagatctgaaatcagataaatactcattgttttgttgatggaaaaaactcccggaaaaatttcagtgatatatctgttctaagttattgttaccaagtttcttttatcctttgagaaagaagcatgctgccattctgtcactgctgtgtctggaggacacaaaggactgtggcattgtgacttgaaagttacttcacgaaccttgccaccgtactcttctgaggcacaccacttcctcagctgcagtaaaatccaaacatttatgtattaaattatgttggtcattgctgtcagcagtcaaatgagtagcagctccaagaaattaatattaacaatgtaaatagtgcaactgacaaataggcacctttaagtctgtatcttttcttgtatctcggtattgctggaaaaacattgaattgtcacccaatattgcactgaaaaacttctcggctgtaccagggaagaacttctgcaagataagtcatatcagaata

SEQ ID NO: 111663 - DNA, 813 bp, Setaria italica
  Intron number 2 from transcript Si035468m (locus Si035468m .g) derived from phytozome v7.0 (chr-ID scaffold_9; pos 49 413965 to 49414777 reverse strand)
gccaggtttgtctctaccaacaatgctttgaatggatatacaatacattttttacttgtctcacaagccataaacaaggtcaaggtacttataccatgatttattttctggcacgtgaaccatgtgtaaagagactcaggtcattgcacagaatatcataatcaatttttatggaaaagactggtgacactgtgccatcaaccttgcaagtctaattaacttgtgcaacacatttgtgaaccatgctgagcttctgccatggttctagctaatttgttttttaacctaggtggcatgatggcaactattattccatatgtagagcaccatctatatccttatatcagcattgcccaagatccttcaacaagaacacaaaaagcaaatgacacaaacttctgtttttatctcaggcttttagtgataaaatatcttttgtcttcactggaatagtgctttcaagagttagggctatacataattaaattattattagtgtagaaattgtcggcaaacagggctacacatctccattcccacaagtgcatatgcatgcatctttatgacctagtccggaagcatttatgttgcttaactagcacgttttcttgcagtacatattattttgaactaagtgtttgcgtacttctctttttcctcttattgtgtattatattggaaatgattttactggcttccagctgcgtgtactccatgctaaaacaccttgctgagttttatcttcattgcaaccaaatgaaccacttcctccacccaggtaagagtcgggcgactgaaggagggcggcgaagt

SEQ ID NO: 111664 - DNA, 775 bp, Setaria italica
  Intron number 1 from transcript Si035971m (locus Si035971m .g) derived from phytozome v7.0 (chr-ID scaffold_9; pos 34 444346 to 34445120)
ttccacatcaatagtactatacactcaggcaggccttgtttagttcccaatttgggagtagcaaaattggcattttgccataaatgcgcaactgtagcgtttcgtttgtatttgtgaattattgtccaaatattgactaattaggcttaaaagattcgtctcgcaaagtataacaaaactgtgcaattagtttttgatttcgtctacatttagtactccatgcatgtaccgcaagtttgatgtgatggggaatcttctttttgcatagtgtcaaagttggaagtttggaaggaactaagccttagttttttccagcaatctcgattgttttttcgctggaggtttcaggtataccagtgagagcggtgagcggtgcagctgtgcaacgcgagcagaatctagctgaaacgcagcgtcacatcacgtggtatccggtcccgttacgttgctgctaacggcgctgcgcaaccgcaccaaaaacggccccatgcccctcccatctcccccactgactgcgacgcgcgacgccgggatcccgtcctggtacgcccagcgaacggggccccccgccccagggggatgaacgacgaacctcccggcgggctcaaccgtcgcaacgggagcggcggcagctttcgagccgtcgacgccacccatttccaacgcccacccagctgaccggggagaagtaggacgacgtcagttgtgacggcgccggagctccccaccttccatgccaggcctttcctccggattggtggcccggcctcgcttt

SEQ ID NO: 111665 - DNA, 343 bp, Setaria italica
  Intron number 2 from transcript Si035829m (locus Si035829m .g) derived from phytozome v7.0 (chr-ID scaffold_9; pos 91 1851 to 912193)
aaagggtaggtttatactactgtttgattgcttatagctggacttgatgttgatgtttttgtcacttaatcaccacattcaaagaaaatatattcacaaatccagcctcttcactcatgtgtggttcattaacgtagcattgtatactgaagcatacaaaaatatgtgatctcctgtactgcatattggcaatgtgatctccaacctggaaattcatgttatgtgttattgcttcacaatcttatcacttattctttcttgttccagaggatctaaagaaactcgtcaatcaattatgtactttgttttgttataggaaaaaacttggttttttttgcaggac

SEQ ID NO: 111666 - DNA, 718 bp, Setaria italica
  Intron number 2 from transcript Si017358m (locus Si017358m .g) derived from phytozome v7.0 (chr-ID scaffold_1; pos 30 275319 to 30276036 reverse strand)
tgcccgaagctgcactcgctgcaactgcgcaaagagtatccttccaagtccagagttactttattttatttatttatagtttgtggaggttagttttcaagtgacgtttggtgtgtgaagactcagcgcctagcgattcagaatattaaatgtcggttcatcccttttttttttgtctgcctaattgcttagagtacttgattggtatgtctgaggtgatggtgaagtgaattggacatgtctaatgggtttgatgtaagtttgcaatgtcgcctgagtggctgtacatgtgatgcgatgctactgcaagattgtttggatctttgtgactttcatgatgattgagataaagcataaaatcttttggtatttattctactttactaagagcattgtgtcggagtagcttcatatttgcgatgatttgggcataccaattgctttatggatgattcggaatcaagagtcctgttactcaacaatgtgaacaaataatcaaatattagtgacttggcttctcagggttgttttgatgcattccctgaggcccggcccagcactgaagtttctatttttcctaaggcatgcccaagtcttcttttaattatcgtcattttgcatacatagattgtcccctattaccatttgtttgttagctgtgtgtccataattgggtgccattactctgttctatgtcttccttagtgtggtattagat

SEQ ID NO: 111667 - DNA, 612 bp, Setaria italica
  Intron number 2 from transcript Si014481m (locus Si014398m .g) derived from phytozome v7.0 (chr-ID scaffold_6; pos 27 862436 to 27863047 reverse strand)
tatcagcctgtctaggttgggctgcaccaaatctggtaagtcattgtaattattggtcgaattgtagatgccttgcaaatattgttttattgtctgtttgcttttatacgataccaagttaggtatattttgtgagtgctgctcagaagacttaagcatattgcacctacaaggacatgattgtcagtattgaaaaggcaaaattaaatatttgggggtatttagggaaaatatgtcctgaaatgtgaggcattattactacatttgactatttttgtttggtgatggagacacaccatagtctcagtcctgattgtactttactttgtgtatcatcatatttcttttttctaaaatgtagcagctgtaatcctgaatccttacaaatgtttagcatagcaattaaaatgcatactctcgtcaagtgtaatggttgaaacaatgattggtgctcttctttacacaaagggttttgccttagtgttagctcttagctgtacctttcaatcattttcttgtgatgccattaagaattttgttgttaactcgtaggtatattgccttgcaaatgttacttaactgacagtattatgatgaacagatatcacgtaa

SEQ ID NO: 111668 - DNA, 736 bp, Setaria italica
  Intron number 2 from transcript Si017598m (locus Si017520m .g) derived from phytozome v7.0 (chr-ID scaffold_1; pos 81 18810 to 8119545 reverse strand)
ttctgtactggtaagcgtttagttgccttgtgattttttgaaactagtgcattgctgttcttctttgagcaactatcctgtttaagaatctttccttttcatgcacgttcgcaactaaatactgtaaaaacttaggaatacaaagttcaaatcttgtgtctgaggttggctctgttttttcacaactcagtgttttaatttttgagatgtcatgacctttcttactatatgtggcatgatgactctgccagtactggcatttatgaactccacctgagggagtgccacttgtgatgatttctatatataggacaaatgcgatatcaattaagttgtatttgttttgttgaggggtttcatatgctccgttcttttcaatttagatatccaagaaatgattaaactttatatatcatgatgccatctcgccttacaattatgtctccacatcatacttgactactttaggacaacttacattgcataatggtaccaataaattgatggttttgagtctggagacactatgaagctgttaagtatcttaatgagcatcagttcaagttcaacaagtgcctgttgagttcactatattttcactattttgtatggaagcagctttattgctaatacttagcaaatactttgttctcttgctgaatctgtttagaattagtgctgaattgctactttcttaacagatccaaggcaacagacaagtcttctgtttggtcaa

SEQ ID NO: 111669 - DNA, 307 bp, Setaria italica
  Intron number 5 from transcript Si017893m (locus Si017893m .g) derived from phytozome v7.0 (chr-ID scaffold_1; pos 68 81631 to 6881937 reverse strand)
ggaaaaggattctttagtgcgcctcgtgtttggtggtaagcagaatgtttggatccacttaatcataatgatgaacctaactgaactttgctatttatatgagttgttgatatcaaaataaaaaagtagattagatgttgacattatcaagaattccattgtcttctgtttgtgaataatcgaccttgttcttgtcagtgtactggtttcttttccgaaccagagtggccactcattgttttactcaattaacattctttattacttgtgcacaagatgacggcatttatgattatcaattaatagg

SEQ ID NO: 111670 - DNA, 664 bp, Setaria italica
  Intron number 2 from transcript Si036087m (locus Si036087m .g) derived from phytozome v7.0 (chr-ID scaffold_9; pos 54 68436 to 5469099)
cgccggggtttaacgaggagaccgctttctctctggtgggttcgattgctccactatttgtttgttcttacaatggcatattgtttgttcctgattacaaaattacaacttttgagttgtatcccgtgcggtttgaataaccactagcaatatgcctggttaccaattaatctgtgaataaggtggggaatcagtgtattgctttcatgatagtattctcaacctgcattttgcgtttcctgaggaatgcaggtatttgtgttgctgcagagattatttttcttctatataattgtttacttcttttgtgtttatttctttatgtattatgaagtactgcacaaacaaaccagaaactggctacctcacacattatctatccgccgtgtagtaagaaatatatgccattgatgatatgatagacagactgcatacattagtaatttgagaaaaacataggttcatactcttatgtagttctatcattgatgcagaacaatattttgcacgctcttctcttgcactacaaaatatacactgattgtgttccacgttgacaagtgcctagttgtcagcacaaacaggctttatctcacttttcttatgatctattctctctgctaacacaggagtgcagcattggggaagctgagacaccaaacta

SEQ ID NO: 111671 - DNA, 938 bp, Setaria italica
  Intron number 1 from transcript Si017863m (locus Si017863m .g) derived from phytozome v7.0 (chr-ID scaffold_1; pos 41 580084 to 41581021 reverse strand)
ccgcggggacgccccgcgcagcgccctcctccaaggtctcacctcactccactgcctcatctctgctactcctcaaagcttgaaggctttcgcagcttgcagattagtttcaacactgatgcagcagagttttagtcccgaaccaattgagtagatacagtggatggtgtgctgtagttcactaattcgctgccgttattgcagcactattgatcctaggcacttctccggtttagctccagcctccaaatctcgacaggcggcactagctgactgtgtgctagcattagttgtctaatgctccttactaatatttcataacactagttttaggtttaggccgagtttcagcgagtaaattttccgctggcacatataatttgggggatatatccataaatgctgtaaaatgattggcacttaccacctagccctttgtaggacttgctgaaagtatgacgtccagtaatttgttaagtagagtgcctaactgcttatcccaaattatggttttgtttcattgtgtgaggctatttaatatttattgctatgtagtacattttgattccctgaaacttctgatacctacatctttttcttccttgttgatgtgtatggtactgagattatgttgtttacttgagtctgctgtgaatagagatcattacagacaatggctgccagatatgtctgccaatgttttcttagtcaattactgataaaataaaacactagacgagtggcacttctttgctcttccaagaagtgaaaggcacattaaggcctgatttgcaatcacccactgctgcactactagctgtgtgtagcttcagatttttgcaacttagtgcttgagagatcaaaggatagggcttaagaaaacctgacatattttttacaatgtccagctgcaagggatccttctaacttgctggccc

SEQ ID NO: 111672 - DNA, 941 bp, Setaria italica
  Intron number 3 from transcript Si035985m (locus Si035985m .g) derived from phytozome v7.0 (chr-ID scaffold_9; pos 48 185176 to 48186116 reverse strand)
aggtcgggtgttataatctatttctctattgcacaaacacatcctattctatctgtgggtttttgttatttcgatagattttcattgtactgcaggtctctccatcagtctgtttcgtagttctctatgttatctttctagtactataagttgaagagttttgaggtggaaacttgtacctgatcatcaccagtcctgtctgtcgtttagtttgcctgtctttgtatggtcaaactatattttctgtcacatgtaccggagagagggatacatgatttgaaaattttgaacaacttgttaggtgaaaaagagaaagtaatttaaacatataatccatggtgaacaggataaatttgcctaacatgctgtgtatagggaccaaatgcttactgggaaagcaaataattttttacatgtatctgaagagctaaataataatttgtcagctgtgcagctttgcaaatcgatgtttagatagttcagagttgcacttgaactctgggttaatatttcaatttgctggccagacatagatctcctagaatcaggaaagtgattgcttagcggtagtaacaagaatgttgtgccctgttaagattctacagaagaaaacatgatttgggatcaaagacatagagctgattgctttgtggaatgttgtccttattctgtcataaatgtgctaaataatgcatgtagatgacatatctacctttaccatcccatgctaacttccatagaaattgtgctgaactcagcctacataggagtgccggggaatttatccgatgccatgctgaataattgaacttatatatattgttccttttgtggtgtatgggaaatgcatttccctgctacctttgtttttgtccagctaaaatgacatttgatattcatgcgtaggttgtgtctgtcattgaaagacgtgcagatcaact

SEQ ID NO: 111673 - DNA, 1020 bp, Setaria italica
  Intron number 2 from transcript Si037115m (locus Si037034m .g) derived from phytozome v7.0 (chr-ID scaffold_9; pos 47 227980 to 47228999)
tacgtcgactgcgtcctcaccacccaccaccactggtataccatcgtctccttccagctctctttgggttcagtacttgctagtgttagagcatcctgattcttgcttgctagagttgttgaacatcatcttattaccatattagagttggggtcacaaaagggcttcatatgtaggcatttattactagctaatagatccggttagtgccagggattggtccagtcacaaacactcaattaatccagttattacataattgctgtaagggtttgtgagtgactacagatatgcacataggaattcaatagatggacctttccaacttgcgattttgctattctctgagtctaattgctacatggaccgtggaagtagaaaactattgtgtaatacataccgtgttgaatgttgtttgctggtaatgaagttcacaaagtatttgctattgctaaaacgtccttgcaaaaaaaaacaaagaaagaaagaaagaaaaaaggaaagtaaggtctcagggaatatgcagctagcagcttcttgttcactatgctatgttgaagaatgcaattttaaggaatgaagaaaccagcttccagtcaggaaatgcggttgattatgcaatggaagtgcttgacgtatgtgatgtgttcttgggcttagttgttttccattcttagagtagtctattttcactctaaatttgcaacatgctgtttagactgctggggagtaggctttctcatcactcatctgtgatgtaacatctagtgtgaagtgtacttatgtgatgctttcatctcttcaatggaatgggggatttctcctgctccacttctaaaaagtgcaaatcgactacaatgtcaaataggtagtcaaaaaggtctatgctttaaaaataattatcgtgtggcagaaagtactctgcgtgaactaaaaatgaacaggtgttggtgaacttcatggcaattttctactatattattaatggatcgtgcaactgattttgtgcttctagggatc

SEQ ID NO: 111674 - DNA, 732 bp, Setaria italica
  Intron number 1 from transcript Si013137m (locus Si013136m .g) derived from phytozome v7.0 (chr-ID scaffold_6; pos 33 368935 to 33369666)
gatcgccacctgcagcaacaactcgggtacgcaatccttcatctcttctcacgcagtttctctgtttttttttcccgtgttggattggagtgctaggcttgagcggttgagccttagattcatggcgggaggggctgagtagcgcggtaggctgcaaggtgcagagcaacatgcccacaggaggggcgcgcagcgcggcaggggaggggaggggaggggaggggagggacgcgtagcacatagaggaggagaacgagaggttgaagaagtcgcgttagatcgatcggttcgggagtcaagacgggctcacgatgggccttgtgacgtaatgctagacgaggagaaatctagtgctaaatctgaaatcgcagaagagttagtggtgcgagggcaaaacaattcggtctgggagcaatttttcgcctaatttatcattatcattagtcagtgcgtatatccctatagcaaccggatgaaatcagctatgaagcgttgggggttgccccccaacttctaatatatttctagcaatagatttaggttggatgactgattagttagaattgggtttcgatgacctctgttctttggacactctcaagctgctgatacaatagctttatgattgattatagtttgtgtcgtatctgttctggtctggggtgtcttcttcttcctcatatttgcattctaacagctcttccttttgacttggcatccatcaggactagc

SEQ ID NO: 111675 - DNA, 568 bp, Setaria italica
  Intron number 1 from transcript Si019220m (locus Si019220m .g) derived from phytozome v7.0 (chr-ID scaffold_1; pos 12 84889 to 1285456)
cgaccgacgacacaagtcacggtcagaacaaacacgggcgagcaccccgactcgcaagaaggaccacctcatcctgactccttacaattttgaataagctagttttagttactatctatatgctaggtgctatttaatgccatctataatataaattattttaatataatgcagagatcattggatttccatcattattttacccatgctaggagaagcagtggttctagactcatccagctttagtagagataggtccaaggaattcataggcattgtacaaaagtaagacattctttggcagtacttaaatgcatgttgacattctatacacctaagttgtattagtaactcttgtctttatatcctcaaagtatatataagctttacatactaaaaggcggggaccacaattcaaaaaggaagaaagctatgaaaataatataccatagattcgtaagaatataaaaacttgatttttttcatattatgtacacttgtcattaataacaactcatcatttttttatttgattgcagtgccacaagcaacctctcggctctgcgct

SEQ ID NO: 111676 - DNA, 796 bp, Setaria italica
  Intron number 1 from transcript Si017263m (locus Si017263m .g) derived from phytozome v7.0 (chr-ID scaffold_1; pos 87 80425 to 8781220 reverse strand)
tccctggtgatctgcgccttgccaggtctgctgccttcattatctgtcatgtacatatcatattttcaattcttctttttgtctgttcagggttaaagtgcaatagaatttccgataaaatttgagggttgaacagtgacctttatgttcaaaggcatctaagagcatgtagcgtttgaaaattttagagtgacctgtgtaaccaatttaactgcatctactgatagcctagtacttctggaactgaatatgttagcttccagaacaaaaggtgctgtgtgtgcatgtttgtgtgtgggagagagtgagctagcatcttcagctgaagaatcacaacaggcatgcaaagcatgaaagactttaaatttgaatttaaagaatgcaaaatttctctctgtgaaacaaacaaataaataattaagcacactggattatatttttggaatcatcctatacttgggttatgttttctccatattgttgtttgaatgtgttcataaagcacatttgagttagaatgctaagagatgctgtccaaccatgctagaaaaatgttactgaggatatgctttcagaagtatatagcatattggattttagatttgtttgtaacacatgttcccttcaagtgctttattatgttgaaaacatgttaaacagtgtaaaatcattgcctggaaattggaactctactaatcagtttaggaaactaagggatttttattagtactcagttatcttagcagcttgctttgcaattgcttggcaggttatctttcaaggacaacccttttag

SEQ ID NO: 111677 - DNA, 1064 bp, Setaria italica
  Intron number 1 from transcript Si018568m (locus Si018568m .g) derived from phytozome v7.0 (chr-ID scaffold_1; pos 30 483388 to 30484451)
gacgccatcaagagatacaccccgcccgtgcacaggtgagctcgcgtcgcgtcaccatgggttggttgggtttcctgcaagacgcaagctgagctgattcgcggggcatttcttggtagcttgtgatgcttgcggagagggtaggatcccgttggattcgaccagttcttggcatttcttgggccgttatgcttagatttgggcggtcagcggtgttctggcatatcattttgagcagctttgatgggcttgatctgaggtagcacctgagaaagtgtgccttgcgaatacttgctgtcacatagactccatagataaaaaaaatccttctttttgtttcctttggcctttttgttgttagcacctaccgcccgtctttctgttagctcagagaggatgtagcacgaaaggagcttttgtaaacgtgcaatctatgtcactagcgagagagctaccattttcaatttgctcgttatcctttaccatgctgatctagcctagcaattgagcatgtgagtagaggagcagcatgcgtgacttgtatagttttatccccataggcaattttttcagctttgctgaaattttcatggctctgttcagtttgtggttcatgcatctattactttatcagatatctggcatcaaaggcaccatcgtatattttattggtaactgtaaactgctgcatgttgtcattgtcctttgtccatgcatttgtgatctcgcatggccacagttagaagtggagttcagtgtaaactctaaagagcaaatcaattttttgtagcaatcttgtgcattggctgatcactctttttttttctctcatcagttgttaattgatatagcaatctcagcattgcttctcattatctggatgctgtttgaatgttgaaattatcaactaatgcttggaaccttgttttgttgtatagagatcaacattttcgttagctttatatctttgtatatgtctctgcttatgattatttgcttatggctgtctttattctcattattgttcaggaatcgcgcaaacaatcggcggaagtctggaggta

SEQ ID NO: 111678 - DNA, 762 bp, Setaria italica
  Intron number 3 from transcript Si038742m (locus Si038742m .g) derived from phytozome v7.0 (chr-ID scaffold_9; pos 18 709256 to 18710017)
taatccagagattaaatcaattgactcttttgcaggttagtggttcatactattatttattgtgtaacatgaatttcgaaacatatcttctgttacttccttctgggacagaagttttttcctgctttttgtgtcagtatagcagaatgctgaattacaaacccattttctggaattacacagattttctaaattcaccttcgttgtgttttatttttaaccgaaaggagaagaaggaattagaatgttgtaaaagggaggtgttgagttcgtatacagcagatgtaccactatgtgaatctgcagaactacagtcctttgccattgttgatggtaataattggtctctagtccattgccctatcattttaatgagacaaaggactgcatcaattttcaaatgagccgcaaaatcaaagaaagtgtctttacttctttagctgatagcttgaaaataaacttgaattttgtaaaagggagatgttagagttcctatacagcagatgccccactattggaatctgcacaattacagtcctttgccattgttgatggtgataaattggtcacttggccattgccctatcatttagtaagacaacgaactgcaccaattttcaaatgagctgcaaaatcaaaacattatctctagctgacagtttgaaaataatctgccttaaatgctggttgttttttgttgacacattataaattctgatgttttcagagtacttgtcatcacttcttcaagtagaagtcatc

SEQ ID NO: 111679 - DNA, 513 bp, Setaria italica
  Intron number 2 from transcript Si013998m (locus Si013998m .g) derived from phytozome v7.0 (chr-ID scaffold_6; pos 74 79396 to 7479908)
aagaagtagaaggtcagttcatttaccttcctggacatgttactgttcctgtttcactgtttgtattacgcaaatatttgaattaacatagctgatcttgtcttgagccctagaccactttttgcccttttgtgactcagggattgaaatgttttctaagaaaattcttggaaaattcattcagtaaataaacatttttttagagtcggcaaatataataggaactcgtgcgtcgtaaataactagtcaacttcatttttcatcaaaaaacctattgtatcacataggttcagtatgatcttatctcatggtatttctaggcatgctacacaattgatattcagtcttccaggttgcaggctaacattaaactgctattttcttttgtttatttagcagactatttttgagaatattccattagtgtatgttttaaaggattcacattacaagtggaggctactactgtgtacatgtccttttgtcctttagcagataataaaagacctaagc

SEQ ID NO: 111680 - DNA, 353 bp, Setaria italica
  Intron number 1 from transcript Si016728m (locus Si016728m .g) derived from phytozome v7.0 (chr-ID scaffold_1; pos 85 50274 to 8550626 reverse strand)
cgcgtcctcgacaccatcctccgctccggtgagctcacttagctcttcctccttcggaatggcgcgggctgcttgaaaacgagctggttttgctaataaattctgccgcttaattttggtggaagtctgaatgactctgtatgattacaatttagaagctcaatgcaaatttgatgcacattgtttgtcttaattcttgaaacccgtaaaatctgcataattgaaatgaatttatgttactggttagtttttgacttatatgcttgcagacagtagggctgctgtgagtttctttattttccttgccttccataagaagcttacacagcattttctttgcaaatcttgtagca

SEQ ID NO: 111681 - DNA, 440 bp, Setaria italica
  Intron number 2 from transcript Si017706m (locus Si017277m .g) derived from phytozome v7.0 (chr-ID scaffold_1; pos 40 745550 to 40745989 reverse strand)
tgttgttctcaagacatccactagacaagtaaataaacttacctgacctttctgaagcatctatgcttctgttatcgtaacttccaatcaatagcggaacacgcattggaattttgagtttgtttggattctgttatctttttggatgttgataaacaacaacaaagccaaacccctatgtagttggttttaggcattactacctgagaagcatctctagagttcaattacattttagttctctacaacctattttgattaaacaacccatctcttgtaaccactcttaaatatgttattatacatggtttgtttggtttaacatgctatttgcctattttttgttgggtgatctttttgcaccatgaagaaaagactcactatccgccctttggttatttgcagactatattccttcctgtaattgggttagttgaccc

SEQ ID NO: 111682 - DNA, 609 bp, Setaria italica
  Intron number 1 from transcript Si017706m (locus Si017277m .g) derived from phytozome v7.0 (chr-ID scaffold_1; pos 40 746061 to 40746669 reverse strand)
agcagctgccctacctcgtcggcaacatagtcgaggttcgtctatcacctgaattattcgctgctgggagttaatagttcattggggaggcacgtttaagttatcgatctgcaaagcatatgagaaaattttgtctgttcaacttcttcggtaggattttcatgatttggcgttagtttgtacacactagttggagccatagatttagttggaggatgtatttggcttggctaggactcattagccctctcttccactagatagataacacattaacgttaatgtctttatttgtatgagcaatccttacaattacctaggaagtctgtctttacagcagtaccttttgctatgcagtttggtaactgtgttagtttctgcagttagttaagttggtttattctgaaagtgtacatgccattcaataactcttgataaaaaatgaaatggactctcgtggagtgtggaccttttttgagttcttaacaatgttatgactgtggttttcaaaattgtaattttgtaatgtttaaagccaaatgtagaaggttgatgtaatatgcttagaattcttcttatatattttctcaactgtttcagattttggaa

SEQ ID NO: 111683 - DNA, 726 bp, Setaria italica
  Intron number 3 from transcript Si037568m (locus Si037563m .g) derived from phytozome v7.0 (chr-ID scaffold_9; pos 14 202326 to 14203051)
gcagaaggcaattgaagctgttgcggacatttacggtaacattttgtaccctctgatcgattgttttctggataatggattgttttgctgtctagacttggaaaatatattctgaacaaagaaagacactagatatggtatttgcacaaactagtatactatttgcccattgtttaatctttaagacacatactttgaattattagcatcagttttaggcggcttgaccgcttgagaggatgaatcatgttaggtggagtttgtttatcacacatgctaacacagatgaggaccactcaatatgctatgatccaaagggctattctttatgcatgaaagctgttatatgtgccctctgcaggtgaatagtcatacatgaggttggtatatgtttcaaaaaagaaatggatttgaaaaatccagtacataaacatttgaaaaaccatctagatagaagaaaatttggcataatgtctatttgattctaattgttatggggatattttttttccttagctgtatgacaattatatcttgaaagaaatgttttcccaatcatgccataacacaagtacaccacataaaatggaaaatattatacttgtagaaaggggtgaacaagaacaacaaaagaacaatcattaccgtgtcagcaacaaaatttgagatacatacctcatttcatgcacaggtattgactccatagcagcggatctgaaggagaac

SEQ ID NO: 111684 - DNA, 773 bp, Setaria italica
  Intron number 2 from transcript Si038103m (locus Si038103m .g) derived from phytozome v7.0 (chr-ID scaffold_9; pos 57 345121 to 57345893)
agcccctgccttctaaggtaacatgggaactctccattttctgcggtgcatcataaggatcatcatatctccatttatttgttctatttatggtctctgtcaagatttccaattgccatcccgaattgcttcttttatggtataggagttactgtatcccagatgaggtggagactgataagaatgttcaggaacccctaaacagcatacaaaaaatcagatgccatggagtttgcagcatttcatcttgtttggctttttttgccttatgtttaaccatgcaaatttgtacttaacttggttcttcctcatagtcaaagaaagcctttccgtattgccttcctggtatatgtaatgagtcacataatgaaagagatgtctaattccgttggtattttgatatgtacaactaattcatatggaagaaataataacacattggaataataaattgctgcacattggtgcatcagcatgggatactgcccatggcaggtggcttctggtcatgagtcatcaatatataacatcatcctctacatctgtatgtgaaatactacatgatctatatcaattaagccttgccagtatcaacaaactaactagggtaatactcaatgcaatttgatttttttattgatccttataacatgttcccttaaattgacatggttgtttcgagattattttgtattgctcttaagactgcttttttgacatggagatgtgtttatgcagtggtttgcaggcgccggtctgatcattcttggtgt

SEQ ID NO: 111685 - DNA, 603 bp, Setaria italica
  Intron number 3 from transcript Si016814m (locus Si016814m .g) derived from phytozome v7.0 (chr-ID scaffold_1; pos 34 062128 to 34062730 reverse strand)
acgctagtggcggcttgaaccagcagcgaacaggggtaaggggataatatgaatcatggcaaatcttgagtttcttggttttgttgaaaatgtatcttctagttcaagcataaattataggaagtatgcttgcaatatttgtttagcttactataattttcttggtgatgagactgcaaatctgagaggaagcattagcatgtggcaataggctttggcagttccatccactattttaaatctgtcttgtttattttatattggcatgttcagcatgtaccagctagtttaccatttctacttaatatgagcgcttgtcagtgaagtcaaaggctcaaaacccttaattagtcaatgaaatgcgacttcatatgtacatttttccacatgattccatattaccaccagactagtaaattttactgacccattttgggtatcaattggcattggcttgtatatttgaacaattggatgactccactatgtacattttcaccaatttcgagattaaaatagttgcaagcttactcactataccattacccatccttagtgttgcaaaccctgcagttcattctgatttttattttcagatcatag

SEQ ID NO: 111686 - DNA, 441 bp, Setaria italica
  Intron number 1 from transcript Si015735m (locus Si015735m .g) derived from phytozome v7.0 (chr-ID scaffold_6; pos 19 99564 to 2000004 reverse strand)
tacagagaaaaggtatggttttgatgcttgcatgtcatccctgaatgtttgttgcacaaccctgtgtagtcatagttgtttctagctgcatctgaaagtaacatggtggtcctttgatgtgaaattatgaatggtacagtattcgattgatggttcaggaccattttgatataaaaggatagcaggaaccatattgtagatgtgctgttaatgatattttcaattgcaggaacaatattcagattcttacatcttgttttgttctttcatcttaaagtgctacaatatctgtgctctatgtgctttgtgtaggctagttcgttattgtgttctttttttttttgaggaacgttatcgtgttcttagcacaaagaaactgacatgatctttgcttttgttcatccagaagttttcatcaattttgttactgcggcttgcatt

SEQ ID NO: 111687 - DNA, 872 bp, Setaria italica
  Intron number 2 from transcript Si016320m (locus Si016320m .g) derived from phytozome v7.0 (chr-ID scaffold_1; pos 12 676142 to 12677013 reverse strand)
ggagggataatattttggaggtagcatagatgatagatctcttttatgcttgacagagctcatatatgtttgataaatgccatgcaatttctgtgttttgataaaaaaacaaagatgatgcaatgaataagtgctttgtttgtgactttataaaccaaataaatgttagctagcactataaagcttcattttacatgagaaggtagcaagctctctttttagttcagaaacttgtggatggttctcgcagaaattaactaagcattctgttcttggtctcttataattttagtttgtgtcatcaggagcctgtagaggatacaatcaaatttgtgttagggaaagtcattcatcctgatggtcaaaatgggtcattatgtaaacaaagaaagctatcattttctttttttttgttattctgaaaaaagacttagcactgctacacctgaaagcctggaagataacacagtcaatgttgctattagcatgaacaaaattatattgccttgaaatttaggatgttggcatttgcaataatacaatcgctaacaattataggatgcatgcagctaaattacttgtacataatctagaattatgatggtgaatgcactgcactggagctagttccatttgcacatttaagcaacttttagctgtatattatgtcatgaagaaaatattgcaaattatcatttaggcatgtgttctttcttgttctgcttttgtgtattacctgtagaatctgaatatgcataaaataatgtttgacatggtgtactgctgttttgtttaaaagatttcaagctgcaagcctgcagtcacacggaaatatgtcatatactcatgttgatcaaactttcttttgcagg

SEQ ID NO: 111688 - DNA, 841 bp, Setaria italica
  Intron number 1 from transcript Si016320m (locus Si016320m .g) derived from phytozome v7.0 (chr-ID scaffold_1; pos 12 677137 to 12677977 reverse strand)
gaatcaggtgcttcatcaatccttccccctacttcatatagattcccgtaagaggagtacattgtttattgactgggaagaggttcgcataatagcaaattagcgattggggttgctctggtgaaccctgctcgtttcccgttgacctttgggggttcgtttttctgtttatttgccgtgttactacatgattactttgaaatcaaccagctgataatcttccatgggttttcttaagaacgggtttgatgttaaatgattgcataataacacctgtttgatgttaacgggtttgatgttaaatgattacatgattgcataataacgggtttgatgttaaatgattgcataatttcctcatggtggctattggcctaataacacctgttggagttaattgtgatgcccaccgctgtttgaattagctattaagtcaagtgaatgaatcagtaaagcttgtgaatctccaataattatgctcttcctacattttcataattagtgactcaaatccgcagcatcgattggactgtacttgttggtgaactagctattctattgtaggattgatttgtgttgttgtgcttgtcgagttgggaagtcttgttgagttaactagatgttgtctttttggtgtcctgttatttccttaagtagttgcagacttgaagttgtaatagttgctttcatgattgcttatatgcacaccctctatgattaacatttgtttgtggtggttgtgagctcattttaagctgccgtactgtggattctgttcttgtagcatctgacagtgattggttgattcttcgatatccttgtacaggcaatactaaatttg

SEQ ID NO: 111689 - DNA, 638 bp, Setaria italica
  Intron number 1 from transcript Si038548m (locus Si038548m .g) derived from phytozome v7.0 (chr-ID scaffold_9; pos 32 725993 to 32726630 reverse strand)
gtgggatttagataagcataagaagggtgatggaaagctttgacatccatccgatgctcatatgtggaagaagttcaatgagcggtatccacaatttgaaacgatccaagaaatgttcaatttgaactaagtacggatggaatgaatctgatgcgtttggtgaaaggaccagcactcacagcatatggccagtgatcttgatgatgtaaaacatgccaacatggttgtgccaaaaagagaaagtaccttctgctatccatacttattcgaggaccaaagcatcctgacatctatatagatgtttttcttgagcctttgatgaaatagatggaaactttatggaaggatggtattaacatcatttatggtttacacgataggaatttaatctcaaagccattatctttgtcaccatcaatgattaccaagcattgtttgttttgttaggataggtgaaaggtaagacaggatgcacggtgtgcattggagacaccgtatggtctttcctagaggattctagaaaggtagtttaccttggtacaggtgcttcttggtgaaggacacatgtaccaaagtaagaagttctataattttttttggcggcatgcccgaactagaatctgctccaaaaaaatgag

SEQ ID NO: 111690 - DNA, 712 bp, Setaria italica
  Intron number 2 from transcript Si014266m (locus Si014266m .g) derived from phytozome v7.0 (chr-ID scaffold_6; pos 45 89582 to 4590293)
tgtcgaatctcagcaacgactacatcgccttcaaggtccgtttgtccttcgctgtttctttttcctttcttggatgctctttcccttcccatgtgaattatctcatcttagaaccctagaaacggattgatatcatgttttttgggcctatggtgctggctgatgggtttgtggttgacattcctgcaagtccgtttttcatgaattgaaacagcgaatttgacccaaaaattggggcccgttatattggtctgtgaagacgtgccttcaatttggacggttactgcatcaaagggcgatttgcgcgattcagataaactttagattgtttgttctcttggtgcttgcttttctgtcgctaacacttctgaggtattagatagctaatggtatcattataggtttgggtcatggaggggtcattattttcctgtgatacccaactgttatatgattgttaaacgatgtagtctctgcagtgaggttattctttatttaccttgcttttctaacaatggtcagtgtagcgccctttgtattatttaactgcctgtagttagtcgaatagttaaggctaatagcgatgcattagtggtttaaggctaatcttgaaaaggcagcatacattcaaggagttcttattgcattttatttgactgttttctttgttgattcaggtgaaaactactagtccaaagaagtattcagtgcg

SEQ ID NO: 111691 - DNA, 829 bp, Setaria italica
  Intron number 2 from transcript Si018455m (locus Si018455m .g) derived from phytozome v7.0 (chr-ID scaffold_1; pos 55 62219 to 5563047 reverse strand)
aagatcagtaaagttgagaaggacagtgccatcaggtgtgtttctgtaatatgctacgactggctggattgacactctgctccctaatgtgctacttcaatctatttttgtttctgtagtttttacatgagtggacgagtagtttctattcattacttgcaaagtggagactttctgctcgtgttagtgagctactcccttcagaccaaattgtaggtcgttttggcttttctagatacatagttttttgctgtgcatctaggtatagatcatgtctatacatatcaaatgctatgtatctataaaagccaaaacgacctatatttcaaacggagggagtactatgctagatagtaccttatgccctgtcttgaactacacttatgtgttctccttagcttcactagatgcaatcatgcaagcacctcataaattctgttaggaccataaccaaatggcttcaaaatgctcgattaatctggagaaattggtttcttagtacagatacgtttgtaatgtttatgcttacatttaaagctttcatttgctcaatatctttgttttagatgcttatataattctgtgtataacccatggtgtgttctgcggtcatcaaatgatatataatctttatggaattgtggtcaggctttttctttcttacctttttccttgatatatcaataggaattagctgtctgaatcttgtttgtctcaagatcgtcagggtcctataagtttttcttcagattttagtatctctgagataatgatgtcatgtgctgtccttgcagagtaacacgggagggaaaggagcggagaaaacgtt

SEQ ID NO: 111692 - DNA, 910 bp, Setaria italica
  Intron number 1 from transcript Si038080m (locus Si038080m .g) derived from phytozome v7.0 (chr-ID scaffold_9; pos 53 397629 to 53398538)
caagaagcgccaagaactccacaggtacattcagcaaaccgtcctattcctggctcaggcaaatcttcccgtgtttttctcctgccactttgttcatacggcttctgttcttttccatctttctcgtcggttttggagtaaagagtgatagttacaggcttggggcttgagaaattatctcaccgccttgggttcacggtacagtgatggatatttgaaaagattgttgatgggttctgatgctattttctcaaaattcaaaagaaaagagaataagaagatctgaatcacctgacgatattgatagctcaacataacaatgccattggatcttctcaccaagcaagaatgccattggaagcatatgccattggagttcactttaacaattactactgactaaactatatatctaatcatgcatgtatatcttatccatgaaagacaattgttactcccctcttttcagaatgcaaggcagggtttggcctgctctctctctccaaaattcattttgatcgctaatctcatatattatactgttcgagaccatgaaatcgacatcttatgaaagtgcatttaaatggaattcatgttaataactgcttattgtataatctacaacctaggctaattcttggttagagattgagtctcggaatgcatgtgtgtcttaaaaaggaaaaggagggaacagttggtacgaactaattttcgccggccactaaatgtatggacttccgacagttgtgggtgcaatgatggttatttaagctgtagatgctgttttgactggttggttctgtttttttttctctcagcatctttttattctgaaatattgagattgtatatggggaatatgtggcctatggtttacatttagttgcattccttgcagatccagggc

SEQ ID NO: 111693 - DNA, 954 bp, Setaria italica
  Intron number 1 from transcript Si016637m (locus Si016637m .g) derived from phytozome v7.0 (chr-ID scaffold_1; pos 37 379575 to 37380528 reverse strand)
tccggctcaagtccggcgtgctcgagttcagcaaggttagcaatgcgtaccaataataccgtgcatgaaagcttgacatcatcagatcatttgttccatttgagcttttttgcttaaagttgttgtctgtataaattgtaggaaaaactttttttaaaaagaagtaaacttgagctgtttcttttttataagttgagtgtttgaatataatcaaaaggagtgtgctgttcaattagaagctagcaactctgaaactatgttttagattgcattgtttttgtctcaggatatcttcagtcctcagcctgaatctcatttcttccattaaagatatagaaacttttctttccctctccaatacaagatgtataaactaataggatgtgagctaattcttattagggaattcagatgccatattaattcactaaattggagaaataaaacttcaatttcagctaaaaacatttagtgttggtagagagattttttccccttaaatatattgagtggactttgagcaaatctacgtgatcccaccaacagaagcaatcatcaacgtctctccagcaatctatacccaattgtggtgcactactgtccatgtcaaccgtcaggaatgctgcagttgagtggaatattagcaaccaagaaagagggagaaaaatatcgattagcctaggtggtcctgatagtaaactatgcacattccatgttgtgatcgaatcaaattccgtgtaagttaggaatcatccgtgtataaactattgcacgtcgaattggacgatccctcgtttgactttgacccaagggaagccgtagagatcatgcagttcatcttcctctgcatcctgctggttcctgcaagagtacacgtcgttaaactatgatcacagatgatataatttttttttaaaaaaatgttcacggagttcacagagaagaatgttgcag

SEQ ID NO: 111694 - DNA, 979 bp, Setaria italica
  Intron number 3 from transcript Si036892m (locus Si036892m .g) derived from phytozome v7.0 (chr-ID scaffold_9; pos 22 299451 to 22300429)
agaaggggctcctgccgcaggcttgtgagtgctcataaaagcttgcaatttttagctctgttttgtgaatcaaactgaagatcaggcatagtgttgacccttagccttaatgtaacctggttccaatgtgcttggtttgaaatgtcctatcttgttgaaatttcaaatattagttggaacgctttaagatttaaaatttagtgctacaccattacctgtgaaactgaggagatcaccaagcagttagcactcttacaagataacagtgatgttgagttgcagcctgaacagcagctaccttttgcttgttagggacaagttttgttctttttgtacaaatcaagtgtgccacatgatgatcagtataaatcggtcatctaataacttgtctggctaagcttaagcttttgaaacgagtcaaattttcagatagtttgaaacatctgatagtttggtcaccttgcttggtctagacccagcttcaagtggcacataagcttaagctactccatgtaggttagaatgtcctcagaactgttaggaagtcaatcaaggctggatgttcgtttgaatgttacgttgggactcgagaggtttatgcctttccagttaggaaaaaaattgaatggtatatgtatgatcttccattatattttttggtcagtctatgataaagtatttatggaacttttcttctttaattattcagttagcctattgtaaccatcaagaacaggattacatgtttttctaccttctgaaagtattgcatttagccctacacaaacattcagttttttaatgcctgcaatgtcatagtcttattgtaattgatgtctgaactgaacacaaaagtaatgcgtatgattggtggctaacatgcctacttgttacattacgcttttataaattactcaagtgtaaatcaattttagcatcaaaattgagctgcctgtgcgtctcatgttgcagtaccttc

SEQ ID NO: 111695 - DNA, 510 bp, Setaria italica
  Intron number 5 from transcript Si018201m (locus Si017696m .g) derived from phytozome v7.0 (chr-ID scaffold_1; pos 98 84538 to 9885047 reverse strand)
taatctcattgtttggcaggctccacttatccactgtatgatcctgaactctctttgatgctcattcttgttggtccagttgtgcagatcttgagatgttactgcatctatgtttttaaagatatcctgttgtgctatttgattgtatcttcaatactgctgtaattgaaataaaaaaaatgtggtggctgagagtcgatacacaaacttattgtgtggcctgaacgattttgaacttttcacaattgatgttttcaacccacaaacaaaatgatgttgctccatgcagatatggccatttttctgtgtaattagaaaaaattactgacatggaaatatattcttgttgacagcatttcatatggatatagaagcttcatttttctttgtgaaatagatgtatcatgtgccagttgcctccctttacaatctttattcttgaagatggtttaagtccatgaattgcttatttcagcactctcggtggagttcacgaagtcacagattgtt

SEQ ID NO: 111696 - DNA, 1033 bp, Setaria italica
  Intron number 3 from transcript Si019048m (locus Si019048m .g) derived from phytozome v7.0 (chr-ID scaffold_1; pos 40 107856 to 40108888 reverse strand)
ctcccaacatcaaggtaattaccttatcagttctagttctcagacatttgttcgaaattatgttgttcctttatacttatgttatgctcttctttatgctgaaaactacacatagttcttggttgttgccattccgttgatgttggacctccaccatactctagatagctaccttcatcattgttatgttacaggacgagtaaagtgaggtaagggctaatcgccactaatcgtcgtgcttttgttgttgagaggaggctatggtcatagccgagtttggtgggggcaaaaccttttactagattgttttttcaatgacactcagagtgactctgttaagatatatagcaagagatgacatactaataataacaaatccaactgactaggactgttagaaatttccataatacagttacccatgagctaaataaaattttcactttcacctggagcacaatatgccttgagccttttcttgtcacctgtagcaattttcgaatcaagtagtctcttttggcatgagtaaattgaagagtttggtagtccggtattcccctcttttaagagaaagccaggagatgccttctcgtggtcgagtttttttactcactgattgcccaagctagcaagtcaggggaatgccttcttgtggtcgatttattttttactctttgattgcccaagcttttggcccgcttgatattttcatataaacattttgcaaatacatgaatcatttgttggaaagtttacttacctgacatttcgagctatgagtgtatgcatattttactagacattatttataagtacttatcttggatgcttgtagtacttatcttggatgcttgtatccacattttgctattgattgtagatgttcacttcatagtttgttctttgtttcgctgttgttccaaagaccttgattttattataaaactttgtattcctgcatagtctaatatttggtaattgttgtttgctttcaattacatcttttcttttcaggtgactactcacctattgg

SEQ ID NO: 111697 - DNA, 831 bp, Setaria italica
  Intron number 3 from transcript Si037069m (locus Si036873m .g) derived from phytozome v7.0 (chr-ID scaffold_9; pos 11 037066 to 11037896 reverse strand)
ccaagcctgaagtaagtgaaggtatcagttgaatctctttcaaaccaagtcatagagtagacaaaaattatttagctttccttttatcgtgatccagcggcacatctccctattctaactaacaagcatgctgtttgttcacttgtcatgtacaatttttatttatctagactgaattatacttgaaattgaagaaatgttgacttgatataacctttgtaaagtaaaattacaaagttaattctatgctgaaagaaccagcgagaagtctgtttccaaaacttttggttagtggttatttattgttctcatgttctgtaatctgcttttctcatactgcagccagattgcttatgtgtgtccagatatggtgaagtgaaacaattcactttttttttagtattcaaattactttctttagccgtgccaacatttattttactaaatgttgcttaagttttttactagactctacagaagtacagatacctctgtttacttaaatgattgaatttagcccattgcagtagtttggtttagttgaagctgcaaatcaaatttgttaccttctgaccgtatcagttcaataactaaactccaggcactcctaaatttacatgacaacaacatttgcattcgtcacagtttcaagctctatattacccgagccatgagctgaatatagctttttggacgagcattctgcactaacatgtccataataaatggattttttatgtttaattacaagtgtgccattttgcttatagttgcaaccacggtatgtccttgtgggttcattgtaaatttgtgactattttgtttacagac

SEQ ID NO: 111698 - DNA, 634 bp, Setaria italica
  Intron number 2 from transcript Si017408m (locus Si017408m .g) derived from phytozome v7.0 (chr-ID scaffold_1; pos 37 918281 to 37918914 reverse strand)
cgcccctgtttgcgctcgaggttagtaacatttgaatctgaacggtgagaagaagttgtgagacgcggacagcagagtagtagtacagtagctagagttttggtttcgataatataagcatgcatgtaaactgatttccatcagctttaacctgtgcaagatgaaaatacgtagacaattagtcacattacttgtttctcccacacaagttgcacactatgataccttttgcattttttatgaaatggtaacaggaaggccaatgcaagtgtttgatgtttgatattttgaaaatactgaaattttaaatctgataatctgtttacaaatcacaagtgttaatgtttgatggtacaataggtagtaaaggctggactaaggatgtacgtatgacttaaccttgattgatgtggatagttctcagtcacgctgggaattctaatgcagaaaaatcctgataactgttaaatgaaacaaatgtttagaaatcacaagggctattgttctattgtacaataggcagtgaaggctggactaacaacatgtggtgtattcttgaatggtgtggattgttctttagtgtggcacgctgaatgcagataaatcctgagaaggctcgagaagagtttcggac

SEQ ID NO: 111699 - DNA, 792 bp, Setaria italica
  Intron number 1 from transcript Si017058m (locus Si017058m .g) derived from phytozome v7.0 (chr-ID scaffold_1; pos 10 273870 to 10274661)
cagcagctgagcaaagtaccttctccccagtccccagtccccagaccaacaatgccgatacagacacggagtttcgcgctgtgctctgcttcagctgagcccatgcggcaagggaacatcgatcatgaagattcttggtgcagcagctgatcaccccctacatgcccagcttcttgtcctgatcagtatgctgcagctggtgaacttgaccgctaacatgctttccatgaaccataggggctgtttggtttttgcttatttttagcacgtgtcacatcgaatgtttagatactaattagaagtattaaacgtagactatttacaaaactcattatatagatgggacgagatgaatctattaagcctaattaattcatcattagcaaacgtaggctattctagcatttgatgtgaccaagaccatgtttagttcactccaaaatcccaactttagcactatgcaaaaagaagattccccatcacatcaaacttgtggtacatgcatggagaactgaatgtagatgaaatcaaaaactaattgcacagttttgttgtactttgcgagacgaatcttttgagcctaattagtcaatatttggataataattcacaaatacaaacgaaacgctacactgttgctacagtaattttatcaccccaaatttggacataaaaattaatttatgaatagcctgctgtcagatgatataacaatcctccacgaggcaggtccgacacgaacggcacagctggcgtagctgtgtccgtggcggcagccggcagcacacacag

SEQ ID NO: 111700 - DNA, 715 bp, Setaria italica
  Intron number 4 from transcript Si016076m (locus Si016076m .g) derived from phytozome v7.0 (chr-ID scaffold_1; pos 37 688514 to 37689228 reverse strand)
tctactgctttaatagacgcaagaatacaagaactgtatgatttttaacacttgtccctttttgtctaatgcactatttcgtacaaacatcaggagtttggtttattatccatttatgtttgcttttctaatttgaacattgcagttcgcacttttcttttcgttttcatttattgtttttttaaaatttggatgaaatagttaccttgtcctaaatgtcatatatttaaaaacggatggaggtcatggaaggagaatgtagcaccacctaaacctttttggtggtgttgtagttcttatttctctaggccgatttctttgtgacctcttttgtagaggtggttgtgggaggtagaagaaagaaatgaagaaagcattactttggattattttatagtgtacttttgtcttttttataaaagaatattgggtttcagaatgctagctaacaaataaaattattatgctgcgaaaatatttatcacgaaaaatataatgacaccatttccacttgatgcatcaagatgtcctttctctactgtataattcaaaattaggtcaactggactgcacattttctgtagtgtcacatttctggagggagtagtaaagattaaggaaaagagcaaagtgatgagtgaatcaaaatggctgtccctacttataatctctttcatcaaacctcattcgctcctattttacaggcctatttctg

SEQ ID NO: 111701 - DNA, 998 bp, Setaria italica
  Intron number 3 from transcript Si014439m (locus Si014439m .g) derived from phytozome v7.0 (chr-ID scaffold_6; pos 26 962601 to 26963598)
gtacagtgcgacgcctgcaaagactggtacgcttgttcattccagagatctgtaatttaacattttattactgaggtagagtgcagcaatttcacattagttttgcaggaaaccacattgaaattagtgtgtgttataaccacattcatatggttctgtggaatctggatccatgctattgctgcgtagtcgtaaaattaaaatggataatgatcataaaatgtttgttattgtatcatccgtagatctttagacaacagatagaagatggattgtgatttgaatagccaaggatgtgggaatgtgtctatttctccacattgtctcaaacttgacacattttttttcatgaaagatgacaccatttcatataaaatgtttcatcttatatgagatcctaactacaaagtgatgctagaggattcaggatttcgtgctggggcatttcgattttagtagctgtactgttgtattaagagaactgctagaggatatagctaagattgtttgatcctgactgacagcctcttcatttgtgcatgccaaactctgtttctctgttcgcaattttcatgtcccattttgtttggaatcttcatttcaccgtgggaaatgtgcaatttctctagcgctttagggtttaggtgccatcaactttgcataaaaactgagatcctatggaaatcatatatgcctattacaatagaagtgcaaaatggacatacatgcttttaaggtggtatgcgttcatgtagtttgccatgtcacctccagcattcaaataaaatttgaaatgatatccggatttccttccataggatgttttatggtgtcaggactcaggtccatgcaaataaatatgtatatgtcaagttgggaatgcagataaatttattttgtttgttcccttgtatgctgttattgttcttccatatgcatctgtttttgggctccagtcttattcagattctataatatacaggttccatccatcgtgc

SEQ ID NO: 111702 - DNA, 1056 bp, Setaria italica
  Intron number 1 from transcript Si020362m (locus Si020362m .g) derived from phytozome v7.0 (chr-ID scaffold_1; pos 93 12732 to 9313787)
agggtgataaagtgtcaaggaattggtggcggaaggtttgttggattaattccctattttttctagccaaatagataaagtattccatgtggctttcttcttttggtcttaacagctgtctgtttccctttttgtagtaactgtgaaaataaatggaagcatctcttgttaagctgctatctggaatacagtgcttattacctaggtgtttttttttctaaaaagacttaaagttagtgttctccaattatggttgttctatccaatataccaaaatttgtagctatgttagatctagtagagtctgattctatttgtagaaaaccttgcatgcaaccaaggacaaatagcatgtgctttgcttctcatgctggttcctactgctcaattagcttgattggaccctaaaatttttgataatctcccagtttgatgatctttatctatcatttaatttttcaaatataatgatctagagatatgaatatgcagtactttatgtataatagctcttgtcagctggtcctttgagtaaagaataaaagtttggtttaatcaaaggaaaatttacagttacctgacactaaacagtaagcaccaccaatttctaccattgctacagctacccatcaattgttactcctactgccattgttcccaatgcggtgatattgtagcgcatcaagagtccagacagatgagtggtagagaaagagtgcagtgtacagggagaaacgtgataatatttttttaaaaaaagagacttaacatgtcagtctcctctgtttaggatattttaatttctgcttttttgcgctaacgaaaatgattaaggacagtgcaacccacgcttctcatgaacttgtaaagcttcccgtcgaggttaatttaaagctgaatgaactttctttactaagtgatatgaactccagcatgctgctcaaacttttggcagttctggaaaatgctactttgatctactgacctatctgtgctaattcactttgcaatgtttctgcagttggagcttattcgtgggctcttgtccaaatctgt

SEQ ID NO: 111703 - DNA, 536 bp, Setaria italica
  Intron number 2 from transcript Si036313m (locus Si036313m .g) derived from phytozome v7.0 (chr-ID scaffold_9; pos 56 449883 to 56450418)
cctttggggaccttgcacaggtttaatctcttgcgtgcttattgatatcttgatattagaaatttatggctttaaaaaaaatcttattcttctcctcttggctgtgtgcatttgtatatcatcatccataatcgtgtcttaaaggacagtgtttggaaataattgaaagtataagcctgcttatctctatgttattttcagctggacttcttgttagaaacattgcttgaaacacaggagctaccttatttttttccctttgttttctttctcccccttcctgtaacctagccttcccttaggtaatcatgcattcagaaaaaaaaaccccagaaaactgtgtatgtgtgtgtgtgtggggggggggggagggggggtatgcaaatatattttcaaccacgccttttaaggccattagttgctctactccaacttgcttgggactaaaagcctttgttgttttatgtcaaatttgaattcattatgctcttataatatctatgctcatcttgttaaccaaaatgtaggaaagactt

SEQ ID NO: 111704 - DNA, 890 bp, Setaria italica
  Intron number 1 from transcript Si015256m (locus Si015256m .g) derived from phytozome v7.0 (chr-ID scaffold_6; pos 32 28215 to 3229104)
aagtaaagaatcaaaccacaaaaggagacacacaatttacgtggaaaaccccttcaatgtgaaggggaaaaaccacgggcaccagccggcaacaatctcactatctcaagggtttagggttacacgcctatggcggcttacaagagaatctgataatctctttctcttctgtcgtcctatctctaaaaccctagcaagggtgtatgtatatatagaaccgaaaccctagacaggggtattgagctgtacggactcttggtcccgtgcaaggatggaactcctcctcgtccgaccttgagtccttcgtcctggagtcggatgcgcctgggactccgcctcgcccgacctcaagcctggggtcggatgcgcctgaccccttgagggtcgatctccgactcgcccgaccccgagtcctggggtcgggagacgctccgactcgcccgaccccaaagtccaggggtcgggagacgctccgcctcgctcgaccccgagtcccggggtcgggagattctccgcctcgcccgaccctgagtgttaagggtcgggaaggtcggcctttatcctggagtgaatttggaacaactccaacaggagtagctgctgaaatctttttgtgctaatgttcagatggcactgagcatgttttgtctctttatcaggtgctaatagcatgtcctcttcatgcattctacgtttatttgtttcactttgatttttcttttctgaaatgtgaatgcattatcaacacttggttaatagcttttgcatgatgtaatatccttccatcaatgacttgactgcttctatcctggaagaataggcagatacgatttttgtctggatcatataaaaataatgttgtccttgtttttgttcttgtaggaatttgg

SEQ ID NO: 111705 - DNA, 1010 bp, Setaria italica
  Intron number 1 from transcript Si019031m (locus Si019031m .g) derived from phytozome v7.0 (chr-ID scaffold_1; pos 32 60637 to 3261646 reverse strand)
cactgcttgtgcattggtaagtggtaagtttaatctgaaccggacaaacaacatccctagagtggcctagagggagagggagaatcacccaggatcacgaaatgaaattgacggcaactacagaggagttgcccagctatactttagtttaccttttttttcctgcgagtttcttagctattcttagagcacaagtatacttcccgctaaggtgtagtattttgttttttcataaaaaaaatcaaactgtgaaagttttgaacaagaaatcagtcaaattatatgcatatttaatgtaaaggaattagtaggttcatattcaaatggatattaagattatgtaaatttagcaaatggcaatactgtaagaaaactaaatgccaaaatttacttttaaagatttctcatgtcaaaatatgtcttacattggttaaagaagttttctgatttatctacacatgtttagtactctaaatgttaaggatctgctgattgagtttgacttgaggaccacacgttcctaaattaattagaaaaagagcaaagaaatatctacaaatattaacaacaacaactactacacaacagcaacaattttttttggtatggatgtgtgttgtgtgacctggaaaaaatatggaatcacaaattcatattgcagtacatcaagatatacactaaaattttttacttgcttaacaagatagacacactatcacttttgcatatagccaatcaaaagactcatttggaacgtgagaatttttgctgccatatcagagttgaggttgttcatgttatctgagattccaacaaaaccaaaaggcttagtttgtttcgcatttactcattctaaattaatggaatccctttaatttgttcggccatagacattgatcggaaaatgatgacacggttccaactaattaaaattttgtttgctagcattgcattcatactacaattgatgctcgatcattttcacagttcagagtagtgcagtagtagtg

SEQ ID NO: 111706 - DNA, 1011 bp, Setaria italica
  Intron number 2 from transcript Si016200m (locus Si016200m .g) derived from phytozome v7.0 (chr-ID scaffold_1; pos 39 475261 to 39476271 reverse strand)
cttgtatgtgtgcagttttggtgtggcatttgtggttgctgtggcacttcactacctcgtagtcattggcttcatagcttcatatctgccatatgcgatacgcctttccatattatcagttttccaatcaggcaggagaaacttaggtgattcagcacattcgtaggtaaacactgagaatagcctgtccttgaatagcgcaaacttgtacccttgaatagcttgccacatccattgggagacttgggctttgtgacaatttgtggctatgcatgagaaatgattgtctcgaaattcacacttatgctaacttttcctacggtgttggtagaatgactgttttacatcagatcatcaattcaaaaggaatttgtgttgtgatatggtagttttgtcatccaattcatcggggatgaatttcgtgcacaggatgtggctcctgtgctttatcataatccatatgctgggtgactggttcataatgtgtggttctatacaggctaacgtaaaatagtcttccaatggcagtccatcttgtttcatccatatttgaatgtatctttatgttctcacttaccttttagctactgaggcccctcagtgctacttaattatctcactgtagtctccaaaaacaatttaaatggacagtgtcacatgagtacaaggaattccaatttactaaatatttttctttacactattctccctgtttgcgggagtcaaatttgctatttccaggtttgggtacaaaattacttgttccaaacaaagaaactttgtagtactggtgtcacatgtctcctgttatataataagtcatttaagataatcatgttgcagagttgcatgtagtagcaagtgcaaattattattttggcaagttctgggtaaataggcagatttcttaagctaccaatttgcaattctcttaaactctaattgtgaacacaggctaacatcgtttattatccagatcgagtttttgcaccaactactacaacccgtcat

SEQ ID NO: 111707 - DNA, 1001 bp, Setaria italica
  Intron number 2 from transcript Si016736m (locus Si016736m .g) derived from phytozome v7.0 (chr-ID scaffold_1; pos 34 186159 to 34187159)
gtcaccgccagtgaagaagaagaggaacctaccaggtaaaatcctatagctagaacatcctgttcaatttcggccatgcatcttctcctagtggatcttattagcgtgattggaatttgttgcgagtgtttcatcatatctaggaagcgcctcttcgtttttctatggatgttataacctaggttttttgttatcagtttggggtttcctcgatacaaagctttcttatcgagtatttccgtccaagatttgttctccgctacctggatttgaactacatgaaatggtcctatatttttcgtcagatcttcatccctgtcttcccgtcatcccgtgtcttggaattttgtccacatcttgatcgattcgattcaaaggacccggtcgtcacatgttgcacttactagctagtacttcatttaaagcctgtagcctcacctgagtgaattctcttcaattcaggtaaaagagtagagagagcactgaaccatcttttctttcttcacttgctacatattctccgcaaataaattcatttcaggcacatactagtttcttagtcatgatcgtgtatttattttatcagttaaaaaacatagattttaattaatttccgcaagattattccatgttgttcgtgagcagctatctaggcaagctagctgtttatcctcttcaccctttgctgtctcactctctcttacctaaacagatagcggccatggcacacgatctatgccaattcctttgttcgctatatctcttgctgcaaacgtccctttgctcctttgtgctgctcaaagtctcgtgaaaatattctctcccccgttgccttattttgtccgtaccctcaccaaaccaaaagcaaggcaaaacacacatattctccgatccagctgtgtatacattaatcagctagtaaccatgcatgcatgcctaatactaacttgatgatctatcgatcagatcctgacgcggaggtgatcgcgctgtcgcccaag

SEQ ID NO: 111708 - DNA, 588 bp, Setaria italica
  Intron number 4 from transcript Si037629m (locus Si037629m .g) derived from phytozome v7.0 (chr-ID scaffold_9; pos 49 007069 to 49007656 reverse strand)
tcgtcagggagctggagaaaaaattcagtggcaaggtgaatttcgcttgttttgttgtgctattgtggtgcatagcttgtaatgttcagttactgactatgcttgaataattttaatgggcctagagatcgtgcatgaggttacttgcatcataagtagtagatgtatcattagtaaggaatgcggcactgaatataccatcatcatgcatggcttgaattttgaacagttcagttacagtatatcctttttaatccatcgagtatctgaattgagtgacagatgaagaatcaatgctgtttgtgtaggctatattatcatccagtaattgtttgagtactccttcctagaaatttgcagaatttcttcttggcccgggttatcttttcagtgcttgtgatgttaatacatgttactttagtatttgctttgtgttttgagttgttattccatacgtcgattttggtgccatggcatatagagtggaaacttttggctaagtgatactgtttggtgtgctcctctataattgtatacaggtttccaataattgaacataatttgatcattctttttgcttgacttagg

SEQ ID NO: 111709 - DNA, 758 bp, Setaria italica
  Intron number 1 from transcript Si040540m (locus Si040540m .g) derived from phytozome v7.0 (chr-ID scaffold_9; pos 58 096840 to 58097597)
cgcagaagagtgaagtttcaggtacagagtgaaattaagcagggtctccggtcttcagttttttattgctatacgaaattaattgtcaattaaagttatccatgaaatagtctccatagagatttaagttttactgagtgtagataatttttcgtagtatcatcatggtaattttggttttcctgagagtgttagtatagataccacatatgcctgttatacgaaacagagtagttggaaatcttctggcttcttttaggcatatgtgcgtgagcccgcttgcctgatgaattggctctggtgtcagtttaggaagaataaaacacatggacatgatcagttgctgattttctatctatctatttttcttattgtgttttctaaatttctggaagttaactttagatactcaactcctgtagattttgagtaaggaacttattgcttactatatgatcattgatttggtgctgtacatttgtttttcccaatgagatgttatattggcaatcggttaaaaagctccggtcttgatctcaggttgttttaaaaagctcctgtcttttatttgtggtactgaatagtatgatgcaacatctgcaggtgttttttatataaatgtagaaactccaaatttagtgctctacgttattatttatctattagctgttttatatagccagcaaaagatagtgttttatgcagttgtggttcgggtaaaagtgggtgtctgactgtgtttcagtggaatatttggc

SEQ ID NO: 111710 - DNA, 489 bp, Setaria italica
  Intron number 2 from transcript Si034935m (locus Si034935m .g) derived from phytozome v7.0 (chr-ID scaffold_9; pos 78 37840 to 7838328)
aatatcaccgctacaaggcacgtcgcaatcatatttcccacctctgttttaaatttattgcctaatcttttagttgattgatggatcagaccatgattgttattttactggccatgaggatgctttcatttatgtagttctatcaaaatttattcctaacatgaagaaatatgaaaaaaaggagtatccaagtaaaatcaaatcttcctcacaaaaaaaaagaaggtaaaatcaaatctgggaacaagcaatcttaaggcttcttgtgtttctcagtagtgttgggctctgagcaaaggtcaatgtcatgccataagctaggtttgttgcatcaaactgctttagagcatatgattttaggaaatctcgaaacaatgctggtaagaattaagaaacctcttgaaccaggatttagttcttcttttagaaaattattaggaactacttctgtcaatctgatatttggtgtctttatgctactacaggaag

SEQ ID NO: 111711 - DNA, 562 bp, Setaria italica
  Intron number 2 from transcript Si020651m (locus Si020651m .g) derived from phytozome v7.0 (chr-ID scaffold_1; pos 41 908023 to 41908584 reverse strand)
ctagaaagcttagcttcaccctgtttggtaagagaccttttctttgcaaatgaaatatatctattagtcaagagatctagcatctgcttattagttaagagctgtcatccagttcatcagtgggagccctatcttgtcccttgttgtattaggcaagaattgctaaaattgaaaaactttcctttggtaaataaagtatgaaagtagaatccggtagaccgaaggaaaaaaaatttgggcaggtctcaaatggctccccgtttcttagggctatgctagactagttttgatcctgtccaaagtagcacgggatttttgcagctgagacatttgtgctaaggaatgtgctgaagtattaatatctggactgatagaatcacatggctgagtggtgctacacttagtaagtatggttgctcttagatcaacccatattgtccaataatatttgtataatctggggaaccaagagaaggtagttccttcttttgttataaacacctgtttcatctgccgtgcggaacttcacattatatttcatttgcaggcaagacagaccctt

SEQ ID NO: 111712 - DNA, 708 bp, Setaria italica
  Intron number 1 from transcript Si020651m (locus Si020651m .g) derived from phytozome v7.0 (chr-ID scaffold_1; pos 41 908753 to 41909460 reverse strand)
tgcctgtctctgctagccattcctgttctgtcaatgtaagcatgtttgcctcaaacattatgcaaatttgtggttcaatctgtttgttttagtgcaatcaatagtccttgttaatccatctttttcctatcaccagcaattactattggtgcatttattctccattcagttggtatgtagccatttaggtcattttgtaatgataatattattgttgcggtgccatccccaccttgtctcctagttttgtctagttttgattgcttataaaagattaaaaggctattcctatttgctaccctcctgtttcctaaccattttcgcaataacttttgcgctaaaaatgttatctttgatcatgcttcgttggttaactttctatcacacctagcttctttagtgaatgactcacagactctcgacaaacactattaggatttatgatcaaaatatctagaaaagaaaattgtgtttcttactgattttttgacatatttatttgatgtatatatgatgttgatagtttcaaaatattctgtttgtatcatgtttcagggaaagtcttcgatcattcccaaattcaatgtctttggctgtcgcaattttttatgcgttttttttagacaggtcctgttcattgctagatattaacataataaatcaccatcgccaggtttctcacaaaacttctgacagaagatttgccac

SEQ ID NO: 111713 - DNA, 944 bp, Setaria italica
  Intron number 3 from transcript Si018416m (locus Si018416m .g) derived from phytozome v7.0 (chr-ID scaffold_1; pos 21 400585 to 21401528)
atcgataccaccgggaagatcaagcaggttccccttcttatctctcctctagctagctcactttgtaactgaaacagaaaatcacatggggagaaagactagcccatctcttttagactagctctgggggcatgttatgccatcgattcagatcatacttcattcgttgggcattgttcggttgccttggtctgattttgttgtggcttgtgggaggaactcctgcagcgtttgtgcattttgcttgtagtacctgagtagaattgtagtggtttctggatctcgttttggtggctaccaaacttcactaagctgaatatgcttatgttttagaaggagggttggctataaggatggttcagtgcttctagaaatagttctagtttaaaactttgaataaaaagggctagagtcaaggtcatcagagctttggctttatggatgtagtaagtgatagcacatcaacactgtctgtttctattttttttttcttttttttttcctttcgagagcatatgggatagttgagtgtaggcgtgtagcagctttttttttttttgataaaggcgtgtagcagtttttaactgtccggcaatgtttgctacaaaatgtctatattgttttttctaagtgcaaaagttgagtgggattataagtcgatggatttattactgaagttgaactgaatggattgaggggcacaacattatctcatcatttcgatactcgtagaatgcaataacattttatgcacactttgtaaatacagatatattaaattagattgaattatgtatcttcctgtgttcctatgcttccatgattctgtatttgatggaatttcctttgagttattccttgttgtaaattctagcctatatgtggaaacgattttgcatagcctctcttgtaacataccttgcttttgtcagttacaaacccag

SEQ ID NO: 111714 - DNA, 609 bp, Setaria italica
  Intron number 1 from transcript Si018312m (locus Si018312m .g) derived from phytozome v7.0 (chr-ID scaffold_1; pos 15 914096 to 15914704)
ggtaggtcttggtaacaagcatccccccggtcgccatcttctgattggactcgattccctgtttgctgcgttcttgggttgggtttgggggagatctgagtgttatggatagtctgggcatccattcctcaacctcgccgaagggaatgttcattcttatgcattctttagtgggtaaatggaagattctttcggtcgaactggtaaaatgcagaactctgttggcaaaaacacagcaccaaacagatcgttaatggaaaagtaacacatactaagcagcattatattaaagagtacctttttctaggcactagaaatttcacaggacatggagattgaaattaaattttgattatttatctacctgctgcatcactattgagggcagactgaattacttctattgatttgttatgtatattcatgttgtgctgagatttctagtatgtatatgattccacttgaatgtgtttatctatctcttgtccttttttacatgtggtcccactggaaatattgtgacaagtgtttcagcactcaatttgtgctatttgctctaggttcaagtctgagcacattactattctttcagggtacaccttgtttctt

SEQ ID NO: 111715 - DNA, 976 bp, Setaria italica
  Intron number 1 from transcript Si018719m (locus Si018719m .g) derived from phytozome v7.0 (chr-ID scaffold_1; pos 31 998178 to 31999153)
aggtgatgtgattggttccttcttctcccatctttgatagctttgattagaagtattcccttgttggttggcagtcagcatgacaaattcactggttagtaaagactgcgtacacggcaaattcttctcttattttgcataattcttagcattaaaatgtacccctatttgcgcgcacttatcaaccaattttaacagatggtattgcagatcttatcatagatatagcattgctcaatcaacaattgttcattgtttagaattaccgtgataccaatcttatcatatatatcgcgttgctcaatcaacaagtgtttattgtttagaattaccgtgatatcatgtactatgtaccatacagttaccatttttcttttggtgacagagagataggtagctctgcaatcgcttaatgtgaatgctgtcattgaattctgtcagtttacctcctttttctagaaagggaaagagataaggttactctgcagtctcttaatacatgctgtctctgaattctaacaaacagtgtccacaagaagctaactctacctcaaattgcccttgttttccctttctgtgccatcatttctgaaccagccattacactgtttagcacttgagaaagttgaaccagagggacctaccataatcaggtcaacaaagaccagtcagatcatctacatatatactaactgcagatcaatgcttgtgcaccatttatcaagttcttgtgattcttgactagtattttcccaataaattgaagttaatgcgcgatggtcatggtcaaacttggaaaactcaaactttggtccttgtggtatagacaacacaataaacaagttggacaatgacacaagaggggtcaggtcagctagctgagtttgtggatgcatttgatgttttactgaaactgctattggataaatgcgtgcatgcagctgggtgacgccgtggcgagccggagcgtctcggt

SEQ ID NO: 111716 - DNA, 856 bp, Setaria italica
  Intron number 1 from transcript Si020504m (locus Si020504m .g) derived from phytozome v7.0 (chr-ID scaffold_1; pos 13 24947 to 1325802 reverse strand)
gctggggcctcttgcagcttcatatttgatctagggttggtttgttcttttgtcgtctttttctctgcaactggcactaatataatctagagtcttcatgtgtgtgtgttgcattcttatattcttttcttataacgcaatttatacgcactgtctcttgcatgttcgagagagaagaaaactaaagctagtcaggtttatatttgtattttccattcacaacgtgttcattatttatagtttaagagctgaagctcatgatttgttaaaaaagtgcgaaaatttggtagtatgcaaattacctgacaatatgccagattgattatgagaagttgtgaggtcaaagtgtaccttttgatttaggaggaaactcttgaaaaaagaagtaaaagctcctgaggtttgttagtttgttactcaattagtaattaggatttaggattctgataattaacattttgtaagtttgggaacatgacaatacaattctaaagtgtctggttttaaatttcattgtctgtttgcatgttagaggatgctgtttacagtctagtctatttgcataaaacaattaccctagccaatagattccatcaggtatgagtcatgtctcgattctcaaatgggcactaccattggagtagtgttcggtgatcatcaatagtggtggagcaatatctgcaagttggcaaagcatgggtgtcggagtgctattctttgccatttaggcagccctgtaacttactcagcttatctcaactgtttctgtaatttgacttctgcagcactctggtttcttacatgtagcccttggttgttgggtgttgcttacgtttggacctcgtgtatgcagagc

SEQ ID NO: 111717 - DNA, 922 bp, Setaria italica
  Intron number 2 from transcript Si035518m (locus Si035518m .g) derived from phytozome v7.0 (chr-ID scaffold_9; pos 62 85797 to 6286718)
aactcgtcaagttgcccttcttcaggtacttcaaggtgaggatttgtggatttgtttttttcaatgtcttcgtcagtgattttggcacaatagtggagatgtgtgttgtgatgttcaaatagggagctagagttgttagaatcttgattcatgcttgcttcattggagaattgggtgcctggctgcgtgatcccttgtcagattattatgtttagttacttcagtgtggcttataaatagacttgccttttaattagtaatgattctgatggataataaatcatctgtggtggatatgggatcaaagaggtattcgcttgatcaggatgtgaagattggcatactttatttagggaatttgatgcaaacagtgcacattctaatctcgaggatcatctaatggtacttgttagctatcctagttggacgcttggttccagtatctcgttaagttttgccattctattcatatattcctttctcaatagctgtagtaggaaatttgtagcagagaatagtatcgatctttgttgttagtgttgctgtaaacctttgtttattggaatagtggaattaattagtgtggctactattttgtacaattgtactttcatctcatatgttctaagattactttcagcatttcactcaaatacattgagtaatggaaatgaaaatctatctgatgatatggtttcagaattatgaacccctttaattttctcttcgaaattttgcataatggactacagtttgaatttgtaagtctgcctactatatatgtaaactatatgtgattccaccaacattctcacattgtcaaaaaaaaaaaatgaaacaatggttcatctgttctaagtaatgttttcttccttgtcttttgtaaggttaaattgtggtgtgactgccctttttggcctga

SEQ ID NO: 111718 - DNA, 399 bp, Setaria italica
  Intron number 1 from transcript Si014056m (locus Si014054m .g) derived from phytozome v7.0 (chr-ID scaffold_6; pos 32 822065 to 32822463 reverse strand)
cccgcagcctctccttctccggtgccgggaacaaggtggattctatcttcctccaaacttgtgtgctgctgctcaattttgattctagaagcgaagttttatcatcgtcttcgattttttttctttctttttttctttggaaatgttgggtggtgagtggtgcgttgcagtgaccaaatttgtagttcagagagtataaaaaaaattagtagttcagacgatattaaagattatgtagtgaattggaggcatgcggttgggagtccgacgcacatcccctctgtttctggtggcggtggccgccactcatgcacgctcagtgttcgacgatttgacgcgctcctctctagcatgctaattctgtcacaggatttcgttgttggacagggaaggatccca

SEQ ID NO: 111719 - DNA, 891 bp, Setaria italica
  Intron number 2 from transcript Si034561m (locus Si034561m .g) derived from phytozome v7.0 (chr-ID scaffold_9; pos 49 644056 to 49644946)
catgtatgaactatgaacaaagtttgccaggtgtaaccaagagatgcctgttttttattagtcccagtgcattcttttaatcaatgactacgtggtagatttataagctatgtcttacaacaattcacaagttgttggataaagtggagaactggcgtcagttcattgataaatatattgatcatataattatctgccaggctcattgtcagtagccaacagttttcctttcacaaatctatgagtgtgctaacaaaatggtcatgcttgttttgacatgctctaccgatgacacatccttgttattctgaaaacgacgttcttttgttgtaactgtagagaaatctgtggcaaccagagttcctaaagccaagtacctgtgtcttgaatgatgagtactggctggaatgttattgagaggaatcttagctggtagtggcctagttaaatttgtggttttcaagagaacaatatagaacatgtatctgcagactacaatatacatgcaaggatacgccagaatccacatgatacattcatgaacaattttggggctaagcagatagtttttttagtttgtagaagtggtgggtccatgtttttcaaatcttgtgcattcactgccaccaagcaatcttaggtctagcttttgaagtaatcaaggacacgcataacccaaagatcaagcaggttcaagtcctatttttgttaagagtcctccctctgaagtctgaatgacttgtaactagctttgcatgtgtttaaaagatcttccaaataatcaaatgtagtgatctagatgaatatttgctgttgaccttgctaaatgctagtaaaattttgcaacctcatgtatgtatttgcttttgtagtttcttggcttgctggttg

SEQ ID NO: 111720 - DNA, 615 bp, Setaria italica
  Intron number 1 from transcript Si034426m (locus Si034426m .g) derived from phytozome v7.0 (chr-ID scaffold_9; pos 56 679261 to 56679875 reverse strand)
gccggaaatcgagatcttcctcttgtgcggcggaggtgagcgagttggttaatctttggcctttcaattttgtaattttcttacgttgatgaccctgtagcgcctgaattctgcagccttgtttgggatttgggccagtagaattagcatttatttgtaggtattagtttgctttttttcggaggaaaactaagaactccgcagttagttagtataggaatttggggtgatttccagtagatatttttcatatttttttctctgatccgcacgatttggacaaaatatcattcaaatttcttcaacctttgtggtggctgcgaaattcttcgtttgtttgatcaagattttcatccttttattactatcgcgtagaactttgtgccattttgaagtctcccaaaatccttattgtcactgagctctgaactctggagcatactcgttttgattagttgattgcatcagccatcaagccatcgagcacataccagtggcttctgtaggataattgtagttgctcatattgctccaagctatgcaatgttgtggttaaaatagcaagagatttcatatttggatatttggtaattgcaacagataagccgattgaac

SEQ ID NO: 111721 - DNA, 778 bp, Setaria italica
  Intron number 2 from transcript Si016780m (locus Si016780m .g) derived from phytozome v7.0 (chr-ID scaffold_1; pos 81 65079 to 8165856 reverse strand)
ctaagattaacctttacttcccaaaactgaggaaggtgagcatttgcttgtactgtagtacaggttttggaacttacgtctgactaattttttcacaagctcttcaaatacattcgaagctttatgagccgtacagttatttagccagttcttaacataggtccaagtattagactattagttcgtatacctctcctcaatattgatctttgtattgctcatttatactttctgggtaaattctagattgtctttcattcggtagtgaatagttttcttatcagtaagccaattcgagaataaataagacgagtgtaggagctttgccagtacagtctggttataataagcttttctatattatgttaattctttgagtagtggcttctagtcgtatggtcttcctataagtgaaaaacataaacagtgttgtcaaaaacattatggtatgcatataattttatagggtggaactggttctccaacagtgttgttttccttttccaaatatgtgagaatctatgttgtcataactcataactcaggatatggtctgtagtgctgtaggtagggaagtatcttattgaaatctttggaccagtaatgtaacaaaattgtaagagagcattaagatacctaaaacataaacacatgtgctgattgtattgttctgtgcaatatatagagcaacgtccaatatgccaataacttacaggcatgtgttctcctcaatcaatgtacaggtaaaagccttgccttttaaaggcacaggaaagca

SEQ ID NO: 111722 - DNA, 470 bp, Setaria italica
  Intron number 1 from transcript Si017807m (locus Si017807m .g) derived from phytozome v7.0 (chr-ID scaffold_1; pos 33 028966 to 33029435 reverse strand)
ggtgtcggggaagaccaggccgctgggtcgccagggtaatcattctttcttgtcaggagttggtagttttgctgctgctcgtgagctgtgactatgattgaaccatgctgtttttcgtgggtgcgatttgattgctgctgccgcgagcactgctatgttttttatgacttaccgatttagactcaggcttttgaatctcgattagtcatggctttgttgtttagctgttagctcgatcttctcgacgaccaagtgtaattgaatgcgtcgaagcaaattgtgtctatttgttggatctaactgctgaaatagtccttgaactcttgtagtcttgtattgtatgtagcaatggcatcctggtgtggttttctgttggacggagctattttttgatggccggagctaacgttgaaccctgcttggcctggcttgcaggttttgcatcattgaggggcctgagacagtccaag

SEQ ID NO: 111723 - DNA, 705 bp, Setaria italica
  Intron number 1 from transcript Si038365m (locus Si038365m .g) derived from phytozome v7.0 (chr-ID scaffold_9; pos 50 543436 to 50544140 reverse strand)
tatccactttgactgggcaggaggaaagcaccaaggtatatctgaaaattaccatttaatcattgagttctgacacattcttggcaaagtctgaattgcacatttgactgaatgttctatgaacaagcatgtgggaaataagatgttagatcagtttgttatgtatggctgccttgtttattattacctggatttaaaaatctgtcagtaatccatgctacaataaaatttgtttatgaatttaaacccttcaatctggtagtagaataatagccatttttatttcaacacatcaaacacaagtgtgcagttggacctttagttattctattttctgtaaaacaagaatcagtagtagcgtgcatgtaatgaaaagttctctctcttctctgtttcctttgtgaggtaaaagattgtactgcaaaaaagaataatattgaccaaatgttatttaaccttgttgggcatgaacttctagtagagatgatagtgtattgaaatgttaacctgatagcttgaccaaatgatatcataaatagagcatacatgtatcaatctaggatttacatgtctgtctactctgatctgaatattgcttcacgtgctccctgctctgtgctttgatctaaatattttaacacatctggataccaaaccagcttcagcatcttgcttctattattcaggtgctcgacccaaagttac

SEQ ID NO: 111724 - DNA, 878 bp, Setaria italica
  Intron number 2 from transcript Si037252m (locus Si037252m .g) derived from phytozome v7.0 (chr-ID scaffold_9; pos 55 986563 to 55987440)
gttccttggttccccgtcgagttagttcttctgaggtaatgaatcttcaaattagagcactcacattaaccatctcatgttgagctcatctggtttttacactatttgatgtatacaaatctcttgactgttggagagaaagcccagtgcactatactaagcagcagtaaattattctagatttattggtattataccacagtgttctgtaactattctatatgtgcttcagtttttgtttaggcataacagatacatattaagaaatattatgcatattcagcatcacattcagtgttcaatagtaaacactagctcaccaccatagagcattgcaatgtaccttatttacaaaagctgtgaaggatgtagtagtgattattagcatctaaaattcgcctcaaaaagacgaagagtaaatttcagataactatacattatgtataaattgctgcagaatctcaccatttacactccattttataaaactaaaatattaattgtacaacaaatgcgtgcactgcagaatcagtaacaggtacaaagtccattttgatgtgattatgtgaacacttttcagctagtttctctagtcacatgcatctctagctgcaccttataaacatgaaagatcttgcatttcatagcacacagcaatgccccatggttctaggtcagagaaggtcagactgataaactgataggaactttataagagtatttattgtattcttgtatctggactttcatatacttgccaaagatgttagttttactttgagctcatcagtgtttttgatgttatctggacttttgttctcatgtgagttatttttttatcagaagaggcaacggaaattaaagagtacaccaaagtt

SEQ ID NO: 111725 - DNA, 350 bp, Setaria italica
  Intron number 2 from transcript Si017994m (locus Si017976m .g) derived from phytozome v7.0 (chr-ID scaffold_1; pos 29 810668 to 29811017 reverse strand)
agcaggccgccgccaggaggcggtgggagaccctggtacggttcattcattcgcctctcttatgtatatctgcctgctcattttgtttgtggttactgacgatgacaatgcaaatttcttctgaaattttctcggtccgaaactgcagtgctgttggattgtttgggttttgccttctttgttctcgtgtaaatgcattaagtgtttgaaactttgaatcctgcaccatggaattatacaatctttggtgatatgccaattttgaaatgctgagctcctgtttacttgtatgactctgaaatgctctgcctgaagattagggagcagaaaattaaaaccctcacacccag

SEQ ID NO: 111726 - DNA, 655 bp, Setaria italica
  Intron number 1 from transcript Si035858m (locus Si035858m .g) derived from phytozome v7.0 (chr-ID scaffold_9; pos 51 803118 to 51803772)
cttttccattctaggtaaacttttctcagatacacacattataaaacttcagcactatagttgctgagaaggaagtttttgcctcaaatcacataataatttagagtgctgggggcattttcttgttctgttatccaaactattccttttttccaatttattattgccttaaaacgatttcagttttcaactatccaccattgtgatggcgtgtaaactgcaagctgtgcttaagatgatgcttaaaatggctagagctcaaagtttggtcacctcgtcataatggtgcttacatagttccacagaccgaagatacaacataggcaactgccatgatgtctaatcaagcatgacgcaatggattatgcaccttatttatcctatgtgggcatctgttcaaacacctgcattgtacatgcccttatagaatgtttgtttcatgagatttaagtcctctatattaagaattagccagaacattaggtacaaatcacttaaaaataatcctgtatactatcatatgctacaaatcaaagtgaaagttgtccgcatatttataagttcagcaatgagatttgtcgagttttagcatcttatcttcttgacagggactgatgcttgtcaagtttcagtattttatcttttttgacaggca

SEQ ID NO: 111727 - DNA, 336 bp, Setaria italica
  Intron number 1 from transcript Si017301m (locus Si017301m .g) derived from phytozome v7.0 (chr-ID scaffold_1; pos 76 76482 to 7676817 reverse strand)
ccacccgtccgtcgtgtttcccgctgtgttttcttgttctgatgctaaagtttgcgcatttgattggttcctatagtcttcgatctggattgtatccaactttgggttttgtagtaatataaccgttcttatgttgatttttaaaagcaaatgggagaaaatcttctaattggttggacataactcccaaaacacagaaaaaaaaggctgaaaatagaaaccaatttcaggcttacataacattccgttacaatttcagtcttcactgatgatgccattttatttgtgtcgggtgttgaggttgttttttcatgctctttggtgatagatttcccc

SEQ ID NO: 111728 - DNA, 940 bp, Setaria italica
  Intron number 2 from transcript Si039869m (locus Si039869m .g) derived from phytozome v7.0 (chr-ID scaffold_9; pos 12 447454 to 12448393)
ggtgcaggagttctagacatcacaaacaaggtcaggttggaaattagagtcttatgacaagtcaatttaattattactaaattgaggtccttttagagcctccactaatttctcacacaatagatgctctatgaaacgagaagacctaaattccaatgaagaaagactaaagcatccaaccaccaatcctatagagtcctttatgatgggaaacaatagccaaataaataaaataaaataacaaaactaccgttatatgtacttcccaattacccacttcacgagccaaaaaaagagacagaacatataaattctcatagaaaagtaacacatccgactgttgaccttgtaaactcaatcattgttggaaaccataaccaaaaattaaccaaaacttccttatgtatatacttttgaattactaacttcatgtccttaagaaagagagaaatcctacaaactctcatacaaagcaaaatatttgaccatcgatcatgtagactcaatggtattattggcaacaatagtcatctaatttgcttctaaattatccacctctgctgtaagaaaaagtaacccaaagtaacttctaaatcaacatagaaatcatctacctctgccattatgaaaggtgtttacttaaggatttatacaccaatgacaatatttgtccatgttataattatacaaattggctatatattaactgaagcactacaacatctctaacttgaatagtttaactgtgagcacccatactacacacagtttcttgaccgagtaaatctgaccaaccgagcactgtggcgcaggttgcaatggctatttatgctattgtagtaactaagagtccattatagagccaagcatgtaggttttaaaaaatccaacaggagcgttggaacaataagaggtgcaataggcctggttatcagcttgg

SEQ ID NO: 111729 - DNA, 449 bp, Setaria italica
  Intron number 1 from transcript Si035037m (locus Si034903m .g) derived from phytozome v7.0 (chr-ID scaffold_9; pos 45 892141 to 45892589)
ggagggagtgcctgctgttttggtgagtttggtaaagttaaaacattatatacatcgaacatgctgtgagttggtctaatgtgtattttctgttgagaacatacgtgtgaggttccagtagactgacctcttaaagtgcttattactatggtcagaatttaatgttgcaaatgttactaaacacattcctgtctttatgacatttctttcgtgtccttattggcctgttgacttcttcatcagtacttaaatttcaaaaacataaactgctgtactcaaattgaagggcttctggaagttctgtttaccactaatacagaagttattcttgttttgtaattttcaatagcagacaagatacttttacgatcctttgagtatcttattgttactgggatcactgactgctctgctattttcgttggatgacagagctgactacagtccaa

SEQ ID NO: 111730 - DNA, 649 bp, Setaria italica
  Intron number 2 from transcript Si034303m (locus Si034303m .g) derived from phytozome v7.0 (chr-ID scaffold_9; pos 12 647258 to 12647906)
ctacatcgccctccgagcaaacgacgacggtggtcagtaatttttttcgttttcctagctacaagaagcaacatgtatagtacttcatctagagtgcatgcatggagtacgtattaacaatcatacagcagtgtttttttttccttacatgttgttcagatatcagtgtcattactttttactaactatacccaataatatattggaaggagaaattttctttaggggaaagaccaattactgtctgtgtctgtagtaggatggtccaatataatgtgtgcaagactaattcggcagatatgcactggaccatatgactgatggatgttggtatatgactgaattacttggagtaattcgaccaacttatgaggctttgaactcagtctaataaccacataaaggttacaatgcaaaaaaaaatcatgcactttttccttccccttgcgcatgcccagccaaagactttggctgcaagacgagattgtatagaagactacaagcggtcaatagctggcataagaaaagtagtaaaaacagagtaatagtaaccccaagaatttgattcaatttcgtttcaaaaaagaaagaaattgattcaattccttcctcaggaggaacgttcgcgctctacactctgatttcgcgc

SEQ ID NO: 111731 - DNA, 623 bp, Setaria italica
  Intron number 1 from transcript Si015656m (locus Si015656m .g) derived from phytozome v7.0 (chr-ID scaffold_6; pos 10 249788 to 10250410)
gttctcctcggccgccaagggggagacgctcgaaggtgagctttcagctggctgtgagaatctggggaggttttgagctgctgagggagtggttggagtgggaaggtcggtgctccattaaaaatgggagaaattttgggtgccgttgagaatagaagttggctgagcgtaagcgggtagacgaggaaacgggcatctcacttgccgctggtcaactgttgtcacttttctatttccccctaaatttcaattctgaagtagtgaaatttgaaatagactggaaaactattgccaatttctgatttcccctaaatttcaaattttaatcagtgaaattttaaatggagttatattctggttacctattgccagttttggattaacccctaaatttcaattccgaattagtcaaatttgcagtggatttgattaaagataaaagaaaagattgcagcagggacacggattgacatttctttctatataattgttattaaatcaattcttaagtttactattcatatccacttttaccactttctgtttcttcttgagcgaggttaccaaccatgtccatccatgctgcagataccataaggactgttgagggttattctgatatt

SEQ ID NO: 111732 - DNA, 1001 bp, Setaria italica
  Intron number 2 from transcript Si017146m (locus Si017146m .g) derived from phytozome v7.0 (chr-ID scaffold_1; pos 31 595108 to 31596108)
acatacagagcggcgaggaggtggctatcaagttggtatgtgataatctgatcctgtttgtagacctattctcgtggaagcatgcgtgacattagccaatatagttagtcccagatgcaaacatatcgttggtctactgttgctagaaacggtttcacgaggaactcttgtgtagatgttgtagcacaacctaattgtaaatgttaatgctgttccgtaattgcctgcgaaaagattgacatggcttctcgcttgatgtcattattttgttacgacaaataagaagacttccaagcatttccttggttgtccatgcgaattgacttgggtttccttttcattgaataataactgtactcctaaacatttccttggatgtcaaggcgaatcgtcctgttttttttatcatgaataataacaagacctccaaatttatttttggttctgcaagcaaattgacctattgtatggaccagtaattagggaaggaagaaaaaagattgaagatttctagcgcatccagttccaagcatggagcattggttttgttactcgttcgttatttaggctgtataacaactcatattttgtttttttaagaaagtgacaactcatattttgatagtgccattttgagcaaatgaaacaataaaatcttgaaaagtacttgctgaaagtttatcaattgtggtctgtgacaagagacatgtgatttcgattttttactctattccgtgaatgactggcttgactgaagcaaaaattgtgctatggagaaatgcaatttagattgctatagcatataggtaatgcttttctagcttgaacgtataccataacctttgtgacagcatgtggttaaccatttttggagcaatatgatttttcagtcttagtctgggcagtgcccctttcagcatcaggacatgccacctgatcaattttcttggtctcatgttttaccaggaatctgtcaaatcaagacatcctcagcttcatta

SEQ ID NO: 111733 - DNA, 959 bp, Setaria italica
  Intron number 2 from transcript Si034679m (locus Si034679m .g) derived from phytozome v7.0 (chr-ID scaffold_9; pos 12 101883 to 12102841)
aatctggtactagaaaatcggagaaacaagtcaaagtattaaattttctttctctttctccctttaaccatgttgttataagtccaatatcgttacgtggtaagttcatgccagcttctgcaatgctagtttgccaagtcattcaccacctaaaaaaaacgtgttgttgaattgctctcaaaggaatcgtaggaagtaggaacagggggctgctttttttttatcatgggatcggattttgtgtttaggggcaacataaggtggaaatgggtttccttagcgcgggccaaagcatttcaaattacagggacgagcaaattttgatggtccatatgcatcacggggtttcactaaacgtcataagggacgcactgttagaatttcgaagcaatacattgccttccactttctatcctctcccaagtctcaataacatcttgcagcgcagatgcccatttcttcgttcctttcttgccaaaactacggttcaggatgagatctccaaaaaatggcaccactgattttgtagcatatggattctgctgtcatcctgcaagccaatagtttgagagaaggagaaaacaaacttggcatatcatgctttatgtttgtgagattgattgcattttctacttgatcactaaagaaacctgtaatattttccactttaaccagttatacaacttgttctgcatgtaaaggaggtgtgtatgtgtcaccacaatttgcaccctacagacaagtagcaagttgcttggtctaaagaaaatgaaactctatctcctgcgttgtagtgttggatctaattgcaaagttcctacagtagtgtttcatttgatacccaactggcaatgttattttaccaccatttatccgttattgttgtttaatcggtaggtgacactgcctgcttctctgtttgctcacccttaggattttctcccacttcttcaattcca

SEQ ID NO: 111734 - DNA, 775 bp, Setaria italica
  Intron number 2 from transcript Si018561m (locus Si018561m .g) derived from phytozome v7.0 (chr-ID scaffold_1; pos 23 938739 to 23939513)
caggtctgttgcaatttgtcttttaccaactcttttttttcctgtatcattcttatagcaatatcgtatatcatgagtggaagatttacttatcagctcgaaagcatgtattgatagataacagtttttcttgtgttggactgtagaaatataatacctaactgtaacacaaataaatgcatgaccggtactcttgtttgctctccatctagtattatgttctggttcaaattgatctgcagctttgaaagctcaaacttatatttagaagaatgaataatttgtcatatatagttcagagatgaacatgtttgtgtatgtttcatgtcagaatccatctatttcttgcacacttattatcacttcgtgctgtttattttgaaactgagcgctcaaatttaatgatctggaaggtaacatagtagcatgtgcacatttaattgcactgtttcaccatatcttgttctgcatttttttttatttttatcaaacgctaaacgggcacaatctttagcatctatttcctaaatactaattattactttgcaccgttacattcttattttgaaactgagcactcccatttactgatctgaaaggcacttgttattagttggggtgaataaggtctgcatttatttatttttattgaatagagttcttaacttcttatgtttagaaatactgaacgggcacacatctctaacatgcagctttgactatgactaatcttttaataggcatcaagagctaggcttttcaaggagtacaagga

SEQ ID NO: 111735 - DNA, 653 bp, Setaria italica
  Intron number 1 from transcript Si035385m (locus Si035385m .g) derived from phytozome v7.0 (chr-ID scaffold_9; pos 82 66598 to 8267250 reverse strand)
tgctgttcaattcattcgaagagctggagagcgaggtgagtgcggatttggaagcattttggtttacaggtttcttagaatttattagtcatacacaaaacacatttcatatagatatatgaagtgcgttttttatgactaataaattcaaaatcatgtaaactaaaaatgcttccttatccattcactttgtctatttaattttttaataaacacatcagattttttttattacaattcgggcaagttggtatctctaaaatcaatttcatattaaatgttccgaacctataaaaataatcataaaactcttaatacattttttaacacagggcattaattacgtcctctcataaaatttgaacttaaaagaatttgtacatagtgaaataaaaaaagaaaaatagttcaggaaacaaatcgagcataacttttattaaactgaattgatgatgatagtaaagtagattttttcttaattttttagtaagactgatttcctacctggtaccgccagatgaatttcatttcagagcatatatatgtgcggcacgatgagagattcggagcaagtttaattttttctttgaaccggactaatcatctcgaccgcttcttcctgtgcctaggtcttggctggactgacaaactac

SEQ ID NO: 111736 - DNA, 1033 bp, Setaria italica
  Intron number 1 from transcript Si034807m (locus Si034807m .g) derived from phytozome v7.0 (chr-ID scaffold_9; pos 66 00760 to 6601792)
ccagaaccccgcctcccgcggccgctcacacgccggtattcagctttctagtgctccatttccagtgctcagctcgagtgctctagtggcagtgttttgagttgcatatctagtcgagttagtttttgtcacgctacggatgttttagccttttttgcatgctcaatgcagcgagattttgtaagaattgcatacaatccagatttaagctccaccacagtaatgtgcactggtagtgactcaatgcctgcattgttttcaatcaattgttctcatctgtgaaccagacggaggttggttatattggtttctgatgtaatcctaactgcattaggtgaggccgtaaggttaggatatagaagctgaagatgtacttacagcagattttttttttcaagtgatctgattggatcatgtttcttacgtagtagttgaatttctcgaaagtgccatcatgactgtctcgtgagattgcctgcacttattttgttgttagtactgtactgtacgatctggtgtagtatttgcattagcgaagttacatagactgacatgtacctccaacataccgtaaaagtattacaagttcgtagaggattacatcgtgggttagttgatccattagcttaaaagcaaatatacgcactatcaaccaacctcacagaggctgcaaagttttctttcactccttttaaaactgcagcttgttgcattgctcccagttttgctctgatttttgtgcatacctacctcagagtatgtagatcctgccactttgtttgataagaataagatagagggtcaaaagcttgtgtttcaatcagttggcttatgcagttgtgctattgttttgctatttgttgttgttctcttttcaacctcttttcacaactttttttgaactgttttttgtgcatttaaacttctgtccacataattagtctacacatacttatggctagaaccacaaaaatctattgtaactgacagtccgtcatgccagatacatattttggacctggaactgtggata

SEQ ID NO: 111737 - DNA, 273 bp, Setaria italica
  Intron number 3 from transcript Si016939m (locus Si016939m .g) derived from phytozome v7.0 (chr-ID scaffold_1; pos 28 037404 to 28037676 reverse strand)
atacaaactttgaggatctgcagatcagtcaaaaggtcagagtgatatgcctgctttcttttgtttttttttctcggacatgtttcatttgtaagagaagaataatgtattagactattaattaatagtaccatctagaggcatcaaaataaagatgcacagtaagctgatggtgttggcacagactgagagtgtaccatgacgcatttgtttacctaacctgattgcgacgtttcaggaattcagcagtctgcatcacctgaacctctcctc

SEQ ID NO: 111738 - DNA, 1011 bp, Setaria italica
  Intron number 7 from transcript Si014133m (locus Si014133m .g) derived from phytozome v7.0 (chr-ID scaffold_6; pos 21 285381 to 21286391 reverse strand)
aggtcacaagagcttcccaagtggacattcttcatgtaagaaactaaatgacctggtacattatgtccattatgttcctagtgacagtttgtagcttgtgactaatttgttcattggtccactattttggcatgcagttatcataactgtctgatttcaggcaattattgtgattgtttgtatacatcacttgctcttctgaatccttgtactagtcaatcagtttactttagtccttgtttattctattgcattagccaataatttgttctgttggttcactcctatataagaatttcggggtgagtcgatcattgaaaaaagacaaagacttcatttatgtaatatcaagtctttttattaaatacgttctagtgtagtttcatccttttctagaggaaaggtaacacttaaatagtaccagtatgctaataagaaatgagaaataagcatacagctagtcagagtaaggattaaaaaggcaaagttcaatgttttcatgcagttctgacacaattgttgtctacatgaatacctctagcctgaatatgctgttatattataactaaagctttcctttaattggataagatcctttgatttctgccctttcatgttatgtatacacttagaatgatttagctactgtgcacttggaattgctgttcttttcttgctaatgtctgacaatcagatgattatccttttcatcatccctgtcacacattagacattacacaatttccatggcatgactggcaatatgaacgatacatattagcaacatatggtttcagcacattttcgagcatggatcacctactgagcaggttgtttaccatttcataatctcaatagtcattgcagctttgagaatttctatttggttaccctattagctataatatggtattccccctattgtttcagcagatgacctgatgaacctgttcctaccctctctcatcttctgcagggtcttttgctggtctaggttttcttgcgtggtac

SEQ ID NO: 111739 - DNA, 852 bp, Setaria italica
  Intron number 1 from transcript Si018432m (locus Si018432m .g) derived from phytozome v7.0 (chr-ID scaffold_1; pos 12 069566 to 12070417 reverse strand)
agagggcctgcctcgaggttggcaaagtcggcaaggtacagtaattaggctgcaggaagaaatttctctgctttctcgtgctattccacagccaattcgtgctgggactgctggctccatcggatgatttatgtactattcgagttcgatcttgtgcttggattaggggggatttatttgagtaattggtttgtttaggcagttctagtgctgttattagtacggaaagtggcaaaaagcggagtaattttcaccttatatcatgaaactgaaatgtgcagctgttgttgaggggggaaaaacactacctttcacaccttggcaatgctgtgaaactgcatgaaagaaatcaagcatgttagaatattggtgaatgaagtgtatgccttatattaagagtgctagtcttgtaattttatagttgaactgagggaaccgcatttgaggtgttggtttcttgactccatgtaggtgtttgatcataatttttttgcacaaaaccaatcgttttcttgtgtccccagggcttgtatggtaggttcatcgctgtcagtttttggctatggctaatgcaattctttcctcagcaaaaagataattgcttgaccgccttatagaatactaatattaattaaaccttacagttcacttcagtgtagagttgtagatttggtgcggttgcttgtttatggattcttcaatcatgtaaaaaaggagcatattcaaagtttcctgattgtgtacagatccacagcttgtttcattttgggaaagaaatatcaagcatgaaactactatttgtcatacatggatagtaattttgacaatttcatttaccatcatgtgcagact

SEQ ID NO: 111740 - DNA, 990 bp, Setaria italica
  Intron number 1 from transcript Si016688m (locus Si016688m .g) derived from phytozome v7.0 (chr-ID scaffold_1; pos 11 584038 to 11585027)
ggagtgccgcaggcgctgccccgtcaacgcaaccggtacgtcagcttgacggtggtggaatggaatccaattttacttttcgattccgttgccgcttctgcttccgggcgtggtcggcgctgggattagcatttggttaggtcattacaaattatcatggacaagtttggaagattacgaagtttgatttgatttaagaaatgtggttatatattggtgctgcttgccttgtgtatcaagaaggaaagaaaatctagttatttggatcattcgtggtctgtacaattgcttacccacgaagctcaaactagcccttccgttgactgcggatcacataaattgtattatatttcattagttgtcaaatttctttattccaaatatatgcaaaatgataaaatttctcttagttgaaacaaccattggcattcctgagtctaaaagaggccaaattagtatcttgaaggttttgtagagaatcttttaagctgatgaaacctatgacccacatgacctccatagtccatatacagattatgtaggtcaacaggaccttagccactaaattagctctgtattgggttctttaatttaattctggcaagaattatccaaattggtatggttgcaaaaaaaatatgtaggcacataagcctgatattagaggcatgccagcacataataagattctgttatatgttagaatctgttatctactctaagataaacagaaacacattgaggataatacaatcctaccatcatatctgatctaagtatgtaatcctatcatgggtttcaatatcgttaaattttggctccatgaatctttttagtatgccatggtttagctttacttggagctctgtttaatttacagagtgatcattaggaacttcatattgcctttgtttatcttatgaccttatttgagattccttatccaaattgatagggcgtcagtgcatacaagttacgccatcctcaaca

SEQ ID NO: 111741 - DNA, 775 bp, Setaria italica
  Intron number 1 from transcript Si018847m (locus Si018847m .g) derived from phytozome v7.0 (chr-ID scaffold_1; pos 35 549461 to 35550235 reverse strand)
ctgcggcgcgcacccgcggcgtccctaatttccaggtgaggccacgtattcaatttaggacctggcttcgtagttggcccgcttgcgtaaaaatcgcaccttgctcctcacttcagttgatttcgtaatctaggcacctgaactccttgaatgatccaggcaagaggcatcattttttcttattgaccgaaggggaaaactcgtcacaattttcattactcgtataaactcggagtgatagcaattccttgaatgcacattacaatttgcccaatcaggattcacctctttgctgattcactgtataaactcgttcgtcaaacctcttttagtgatggccattgtcacaaaatctgggggccaacattttctttatacccaacacagcaaacctgaacaagttacatttagggccaacatggcttacatttaagtatatattcaattttgccactgccatctgctaagctttgattaatgcactgaagagcacagctcagcagtatgccagaaaacctttgggttccattgaatctggtcccccccctttttcaataaagattttcccattgaatctattttttgatgccccgttactgatatattctctattgctgttatcatctaatgttttttgatgctctgtgctttttcttcactatttcaaaatgtataggcgttatctttctcatttcttaaacatttatactgatctaacaatgttgtgcttctgtacttccttttattgtagaacatcaaagacgcggttcctggc

SEQ ID NO: 111742 - DNA, 855 bp, Setaria italica
  Intron number 1 from transcript Si013322m (locus Si013322m .g) derived from phytozome v7.0 (chr-ID scaffold_6; pos 13 13553 to 1314407)
gaagataggctcaaaaacctctcctcaaagctaaggtacatatactaattcgatgaaagcgctgtactcccttgctgtttcatgctgattcttctactaagtttatcctcatcaactgtttagttatcagccctcttcccttttagttcttttatctgcatgtgaaggttgattttagattcttttagatgctacgccaatgagatgaacgctcatatattcccagtgcaagacactaaaccggctttaaattaccatgactgctttgcaaaaccatgctttactagcatttccttgagcaagtcaaaccaatccggccaccaggaactcgttacatgctgattatgcatgagagatatttcacggttttttaattagcgagaaatttgttggaattgtcttgtccttacctaacattatattcctctgaccatggaacctaatattcttcgacatgaagatattatttggggttccataacccataagtaccttttcagctatctttttgtttcttttcacggagtataggggtggtaatggatcatgactttcatactttcttcacaatccaacttagccatatctatttttagttcaaaatcatataattttatagtccggcccttattgagcccgatccttaaatttgctagactaaattagacggtcttttaccaccccaaagcatatgtgaagattttttatcaataatttttaagcgtgcataatgagatttttcttttagtgtagaagtacacaaagcagaacttattaggtatacaatgcgcccactgatttatcttaccttcgcaacatcatggtttctactttctagttatccagccaagtagt

SEQ ID NO: 111743 - DNA, 555 bp, Setaria italica
  Intron number 1 from transcript Si018744m (locus Si018744m .g) derived from phytozome v7.0 (chr-ID scaffold_1; pos 31 440738 to 31441292)
gagatcgtcgcttcctcccccgtcgtcgtcttcaggtctctcccccatctacgctttgtttctactgccctttacagatcgagcaaactttggtctggatcttagagttggaatcatacataggtgaccgtgtagtcatcccttatccgtggtggtgctgtttttttgcctccttgctaatttgcagtttgctcggcttggtctagaacataaggtcatttgtggattgtgatagacatcaggattcattcttttcttcttttcttttaccggtaatttaacaatatgctgctgcacatggtgtgtttgttcactgttcttgttcatgccaacaagtggacagctaaaatatgatcactccctttgctatccattaataacatttatgatgaaagggtgtgcatacatgtcaggcaattctgttggtatgcttacgggttaacagaatttatatttttgcttcaactttcctgaagtcttattttgatatttcctgatattgtaatttggatgaccacagcaaaacctactgtcctttctgcacccgagtgaaac

SEQ ID NO: 111744 - DNA, 725 bp, Setaria italica
  Intron number 2 from transcript Si018744m (locus Si018744m .g) derived from phytozome v7.0 (chr-ID scaffold_1; pos 31 441341 to 31442065)
tggaaagtgagtgttttgattttagtgtacttcttttattctgtatagtttgcaattaggcagataaatgttctgaaaatttgaacccgttatctcctttagaattacaaggaacatagtctgattcataaaccttaatagtcaagaaattgaacctattaaagaaggttaatttttacgatattgactaatgatgctcctagaaaccaatcatatgtagacttatcagctcatctatcaactgaaagatattgttacttaagtttaaccaagagatgaaattttttttttttggtctggttcttgttaaattttacatattgttcactgcaaaacacttgttttgatcaaattgcagtcctgaaagtggctggatactactgagcatgtaatcattggggcaatcaaataagagcttacttagtacttctgcaaaccatgtaggaatctgcctaacgttttagtgccattatcagattgatttatcataataatacactgtaaaaatttgctccttgaatgaagaacgaaaatatgttatgttaacgaaatagcatgatcaattagatcatttagcaacaacgcatatcatgtgtctttttttgacagtgcaattacatgagcaattttaacatgtttcaagtactcctcgtagataacaagatgcatgcattctatgagaatcctgtgctgaactattacgtttttatcactttgcgaaggtg

SEQ ID NO: 111745 - DNA, 683 bp, Setaria italica
  Intron number 1 from transcript Si039834m (locus Si039834m .g) derived from phytozome v7.0 (chr-ID scaffold_9; pos 33 856888 to 33857570)
ccaaggtagtgcacacacattacctgcgtacaatgacatttatttgagtaacaagaattctctgccctcaattatatattttcaatcattgcttggtacggtacatcatcctaaaccacacaggccacagcgaagttcagcgagcaccattgttattttcgtaaccatttttgtggcagcatatattcgttgatacatccaaaagtcgcaagcggattttaatggatattaaattgtacagtgtaaccggaccatataaaagtatatattttcgtcataaacgtaggaagagagaaaataggtagacatcctacctcttggcctttagaatgggtgcggtttcttttccttttttgcgattctattatagccacaaggagcacaacattagttatagtagacccacaattggagaaggtaacctaggaattggagaaggtaacctaggaaggttaaaaaaaacataataattaaagtccttacaaaatgtgacggtggtgtttgtatttgtggcgcaaggagccacgcttcattcttcttatagaaaggtaacaccttctcaccacaaatatgtaactccaatatgacttcctatacgattgtcattcttgctgcaactacgttgtttgttttatttctccagtttatagcattaattaagtgatgaaaatttgtagatattg

SEQ ID NO: 111746 - DNA, 651 bp, Setaria italica
  Intron number 2 from transcript Si019959m (locus Si019959m .g) derived from phytozome v7.0 (chr-ID scaffold_1; pos 65 31121 to 6531771 reverse strand)
tggtggtggtgggggtcctctcccaccaggtggtggtgttccagccgcacaagtcaggggaagggtaacatcctacccccgccggttggaggagggtgtaacgtcccgtccccactagtcagtggatggtgtaaggtccgtccacgttaggtggtggagattatacatgaagagctgagaggcctatcaatctttagttttgtatggttgtcttactctcttgtgcatgttgactcgagatttgagttaacggtaaagataataaatgagttttttttacttgctcctaagtgattggttgttttgattatcacatctatgtttgctagatttgttgaatttaatcgtgcctgcagaaatattttacgcataagagccgttttgctatccttgggacgtaccaccaaaatacaattaggaatgtagaaaatcttagttataaataaatcctttgttataattttgttctacctcatggtgcccctaatgatagtataaatcgtccaacgcttaaacatcatatatcacgaagaaacggtacaatgagattatcactaaataaagtcacgtccactgatgatctgtatatcttatatactctactagatgttgttaagccatgtcatctatattgttatagcttctagcaaa

SEQ ID NO: 111747 - DNA, 874 bp, Setaria italica
  Intron number 1 from transcript Si019871m (locus Si019871m .g) derived from phytozome v7.0 (chr-ID scaffold_1; pos 78 62899 to 7863772 reverse strand)
tcgcccgctccgcccaagcggtcgcgccgcgggaggtgaggcctcgtcgccgtgcgtttcgcttcacgtagagctcgaagctgatcatgtacgatggtgaagcttttgttttttgtgtgtgttgtggattgtgttgcgcagttcctggagcaagtgcaggcgaagtgaaggcagaggcagccgtacgtgcagtcgctctcgctctccaggtgagctaatcacggcttggtctctggcaaactgattaatttacacgatcatgcattgaattggtgtcagtacggagtcttaatggcatgtacagtgtgtgatggccatgggtgtggtgtgctttctcaagctgccagccctcactcttcttccatatattagcttaaagttgatgaatttgcgtcaatttcattgtgaaaacttcttaccaaccaccattcttctaaaacagactctgtaactgtcaaattttggatgttgttcatcagtttgttctaatcagcatttggaacacaaatgtctttatttggagattgagtttacgtcgtatagctatgcgttgcacaataatgtgccatcatacaaataaaaaatttgaattgtagttctcaaaattgaacttctgctccaccaatcatgcctttgcttgttggcacccttgtggaggtaaacttcttgtagagttcctattaacttgataacacgagttggcatcagtacttgtgggattccttaatttaagcaaaagcatcagattgaattggtatttactaagaagacaaactaatgaatagacaaagcacatggtctttcatgtgtttcctgacaatttctcataaaaaatgacttttcgctcttatttcagataggcctcactcaagat

SEQ ID NO: 111748 - DNA, 746 bp, Setaria italica
  Intron number 4 from transcript Si035235m (locus Si035235m .g) derived from phytozome v7.0 (chr-ID scaffold_9; pos 54 819280 to 54820025 reverse strand)
agtcacctggaggtcagttgctctgtctttaagtttcttcatttatccactatgctgtttgtctcaattctcaagtcattctgtcttaagtgccttaatttatccactatactgtttgtcccaggctgctctgttcaaaagttgcatacttgcatatctcttgttcagtaacatcatatcgccaacaaatttactatctgtgtgcaactaatgtatcacttatgggtccagtaacctattttatcttggttgattagatctgaattctggaaacatcacttaagattcatttagtgttcgaagaacaacataaactgattctttttagagcagatcaatcatagatatggactgacaattcatgtatcatgctgttagatctatgtttaggtgtagtggcactagtagtttgaatgtggcaaattggttatatcctaggaggaacagaacatcttctccctccttgatctctctcttctttttctcaaaccggtccgagagctgtctgtcattatatccccactcttgatctctcgacggaactcttcattgtgactcgatataataacaggacgactcttgttttgatcttctgctaacaaaattgcatatgcctttttgctgatgtatattattctacctttgagcatgcttcgtggaaatggctattacctgtgtttactgcacgaaatctccatcaaatattcgctaagtattattctatcattaatagcagaataaagttg

SEQ ID NO: 111749 - DNA, 1005 bp, Setaria italica
  Intron number 2 from transcript Si035235m (locus Si035235m .g) derived from phytozome v7.0 (chr-ID scaffold_9; pos 54 820770 to 54821774 reverse strand)
atttagggggtcacgtgaagtctgcccctgcttcggtaggtgttcctcttgggtcacacctgtgctggcttttatatttagtaaaagatgctggttttggatgttccgttctctttcaaatttccgattcatcatgttattttgcttatggatggttaatggatgtagtagctggtgctgaatgctttttgattacagcagtggtgtgcatatacttcaatagttcaattatcgtttgatacacggtgatgattgttggatccttctgcttagtcaacagacaacattgagtttggcggcacatgttttcttctttcgtggggttgttttgtgatcagaatattacatttctaaacatttcatgcttaaatagaacatccttttgattgtacttgatatccaatatactagtggtagaacaaaacgcatttgctcataattggatccctgaggcagtaatagttcttgatctgctacctttgtttactgaaatgtcaaatatgaaccatgcttgtgcttgttcgaaaacaaatccatctggagtgatcagggatgttcagcctggcagcatagtttctttgctttgtgtatggctggtatcttgtgtccaatttcttatgcacaaatctcagtctttgcgatatactttttccaatggtgtcgtaaagtcaaattctgtttgacatggaccctatcctcacattcctactatccctgcttctttctgatttgggtttatggtttatctgacagttatttcctttgactttatggttcagttatgctgaaggatgtagtacccatggtagcacggccttaggaaggcagtgattttgagctttcgagttctttagtttattagttaattccgcttgaatgtattgtggtgaaagccatttgctttattttttgaaacagcttgtgctcctgctaattttctatgtggagaaatctaacttttcctacctttgcataattctatctaataggcactttcccaacagc

SEQ ID NO: 111750 - DNA, 984 bp, Setaria italica
  Intron number 2 from transcript Si036866m (locus Si036866m .g) derived from phytozome v7.0 (chr-ID scaffold_9; pos 32 56570 to 3257553)
ctccacagagcaagccctttcctgcagcagataaggtaactactacttccttggaatgcaaagttgctttgtttcgaactttcatgtccatttcaatagctaataattcttataaatttggtgcttaggcattgtttattttgatttatcttgcttggcttacagcaacatctgcatttgtgattttggtgtcctcttagttctattacttagatttatcttgtgtggcttacagcggctacattttgtgattttggtggcctcttagtttcattagtgctggactatcagccaccgtcaggagtctcatcatattgagtgatttattgatgttgttgaaggaaaacgctccacatacttcagttgttttcagggaaattgtttgttgtctccatgttttatgatcttttatcctcttttgggaccacttaaatgccatgatggccacaccattcttcttgggtactacaaatgtagcgatgaaactagcaaatctatggtatctaccacaacttgtccagtattagaattatgtcatgacaagctctccttttgagttgttgtcttgctctctctgtctattttcaaaaatggaagcgatgccacactagagatgttactatggctttgttgctcctaaattcagactattgagagctgtagattacagcatcatttaactgacttgagctgcacactatgagtgtttgttttttttttaaaaaaatgtttttttagggggaaaatgtgacacttcactcacggatgtagaatttgtctaccaccagagtgccaccaatcttgcaaccttttaacagtatgattgcagtaccaaagattttaaacaagatcactggatgttgaaacattagaaacttttccatcttggtgcattcagtatacttctctccaagcagacgattttacaagctgccgtctcctctttcaggccaccggacgcggcaagcgccaacctgctgattg

SEQ ID NO: 111751 - DNA, 774 bp, Setaria italica
  Intron number 1 from transcript Si037182m (locus Si037182m .g) derived from phytozome v7.0 (chr-ID scaffold_9; pos 53 115179 to 53115952 reverse strand)
tcgtcctcttctagcgcgtgtttcgtatttgcccagtgagtactctcctaatccccctccctggctccctctaacttgatggaggcgtcaaatctggaagctctgtcaataacccatccttcgatctgtccccaatcggattcccagtcacgggagggtgtggctgttggtgcgggcttgattagatcagaaactcggtaggctagattcagatcctgaagcgagattaccatgatatgtttagtacttagataacggactaaccgagtatgcaataagccaaaaacggcgtggttagtgcatttggcttgttggtaccgtgcaggatttatgattgtcgatttcaaggtcatataaccattattagggatattctgcttgtgattattctttctgttatcgaactgctgttagaactcaaagttttgcagttggtatagaagaagacatggccttagtcacgggaagttaagatcttggtgtacaatgacacctcatgtggttttgtgttgttttataaattcatctagggagcatcattcatcttctctgattcaatgtgcttttttcataaaatgtcatttgcttttcaatgctggcttagtcttcacttgttatttccgctcccaacagtttttcttttacaaactacttcctagttgagaagattgcacatcaccacctgattaagtgattgttctcctgaatcctgataccttccttttcctatccattgcagatatctgctcatcagtactgtgcttgaagtgaata

SEQ ID NO: 111752 - DNA, 856 bp, Setaria italica
  Intron number 1 from transcript Si037747m (locus Si037427m .g) derived from phytozome v7.0 (chr-ID scaffold_9; pos 45 587607 to 45588462 reverse strand)
tccttcgtcgcccccgccccgctctctgtcccgaggtgagtgcgtggcttgttcgggtctactcctgctctcgtgtggggaatttcgtttcgggacaacttggagcacctaggatgggacctctcccttgttcttctgatcctgtgctttctagcacagaaagaaaattcctgcgtcatctacggattcttcttctgagctgcctggttaccggacaggtttctcgatgttggctttgggccggattgggctggcacgctactagaatagaaaacatgtacttgcacacaacgggaacaaattcctccaagcttccatgtttaaattgttccaacaaccggactcactgtggatgaacttttaatcctctgatccggtcaaaaaagatgggatggctttgtcattgcttgcttgctcctagtatatgagactccggggcgacgtctcggtcagtcggtgtcaaagtccctggcaggatggcttcgccgctccgtggcgtcctgccagtcgcacatgtaaccaaacacccgattacaatcctttttttctatactttgttgataagctagtggttacgacttcggaccacattttgatttttgtggctttcctccgccccatcattacaaatttcttcttggcaacgatattgctgaatgtcatgtatcatggcttgcttagcatcgcccacatgttggatgtgtgaatgcattcacgctgtgcagttgcagcaattatctgcattctgcagtaacctcaacaaacatgctttccccctgctggctgcagtaccttacatatacaagccggcctctatccaggttctccggcagagccaaggtttcactgctcaagc

SEQ ID NO: 111753 - DNA, 740 bp, Setaria italica
  Intron number 2 from transcript Si034803m (locus Si034803m .g) derived from phytozome v7.0 (chr-ID scaffold_9; pos 54 41703 to 5442442 reverse strand)
cttctatacaagatacaggcaaggagaaaaaagaggttcggcccttgaataagcagtaatattctttaaaggttgtgcacctatgtaggtgctgttccagtcaacggcttgataagtcaggaccaatatagtagttacgcccctttctttaaatatcacagcatgggcacagacatgcgtgctcagcaccagtggtacggatttccaatttagtgtcatataagtacctacatgatttgttttgactgagctacagttctctttccaaagattgtacggtcgatctattcttttggagtcacatggttggatagagtcatatatttgcttgtgtgggaaatctggagtcttttattgctctggattctcgaccagctaaagcaagcgaattgctctaaatttagtcaggtttttccattcaagaccaaaacatgtcataaataccagttatgtttggagcagataagctagagaaataaccgataatcccaacactgattgcttctgatttttattatttcagttaggatcttgactagatggttgcatcttctttataagcatagtagaaacctgaacagtagctttttcagacaagataaaaaattactcaggtgtaatctttatgataaattacctgcattgttcaaaaaaagaaacttgcttgtttgtcttgcgtttgactgtttatctgtaccaatgcaggattcagctaaccatatcactttctggaagtacaa

SEQ ID NO: 111754 - DNA, 1035 bp, Setaria italica
  Intron number 1 from transcript Si035833m (locus Si035833m .g) derived from phytozome v7.0 (chr-ID scaffold_9; pos 54 858957 to 54859991 reverse strand)
gctggtaatttgctcatttgattgcaccacttcctggttagccatttaagtatttaatcaacgtgtactacttcaccacgattggcctctcgattcggatagtacagtcatgtactgccatattaattggtccggataatagcacggcaggtttaacttaggaggaggaattttgctgatgaaacagtgtcagcgatgttgtgtttagcgtccaccagagctttctcctgctttaattagttcatgagaatttgcttcttctcttccaagttagttgagctgctccgctgatcctcaagtttgagtcagtcagttacctcagaaattttcatcatcaactcatatagtacttatatgtataggcccttcaaaccatttaagttgaaatttgaaatctatttgctcatgctagattattggcattagcaatctgtactatatattacctccgatgcaaaaacacaagatgctgtttaatttagagtttccccaaaggcaacattcccaaaccaaattactatccagtgcttgttagggacttgggtgtgatatcacaaatgtttgtagctaggtagtagagtacttggtaatagattccagaaccaaaagggtgaagtaaaagtgcatctttgacaaattaaatcgtctcaacatgcacgtttcttttcttttgttgaagtattataaacatgtacttgtgtttagtttcaaaattatttgtcaataagacaataatattcaaacaggttgtcttttcttagctagaagtagaagttccctggcttgaggttttatgaaacgtactgaacttgctcccgaaagctgcttgccgcagttgccagcatgggagagtagatgttcaatgcaacagtgtttgcttagtttaaagactttcctcggctagttgttatatacgcctcagcctaaagcaaagcagtagagtaatgagaaagattcagttaactgacatagccatcaaatgtgtgccaacactgtgcagaccgaagtcatcttcctggggcagctgcggcaccc

SEQ ID NO: 111755 - DNA, 782 bp, Setaria italica
  Intron number 1 from transcript Si034889m (locus Si034889m .g) derived from phytozome v7.0 (chr-ID scaffold_9; pos 32 45390 to 3246171 reverse strand)
gcgacctcggcggcgcgccctccgcaaaggctgaggtgagtactggcccctttattccgtgcttaaacgctagagacctaggatctgattcatagttcatctgatgagatcttcagaggacaatgaagtgatgatattcgggatgagatttagtgtgtaaattcaggatgagaatcaatcttgagcttcgtttatgtaagatgtgtgatgaaattaggtttctcttcttatctcttaaatgtgttacaaaatatcaaaacttcctggtaaaactctagttacctatgataaaaaaaataatactaaactgcatcgcttgcacttgctaaggccatatgttattcagtgcatgagatgacgagagtaatctggtttattgaccgtgtcttccactaatttagagagacaagcagacatagcttccgcttaggttgagattgtagtgaaaatctgttgggaacagcgagggagttcaactaccaaacttttctgaagcgggagggtggaaactggaaaaccatagtccatattgttatagcataaaaagagcccgatttaaaattatgatggaacctaatcactaaattgttctgagagaaggcaaatgtgccatgacctaacaaagatctttgagttcagatcatgtacacactataagtactttaaaagtaaaccatctaattcattcacttttaatctaaactctaatgtactgaagttttagtgtcgagctgttctaataatcactcatcagaacttacccttttactggatttggcagg

SEQ ID NO: 111756 - DNA, 938 bp, Setaria italica
  Intron number 1 from transcript Si037658m (locus Si037658m .g) derived from phytozome v7.0 (chr-ID scaffold_9; pos 23 214301 to 23215238 reverse strand)
cgccggtgccttcgtcggctcgctcgtcggatacggtactgccttctattcccaaatctcatcggccgttcgaattcggggaccccctacctccgcccttagcggtttttcaaattagctataggacagcacggtcgtcgggctcggctagttagtctgggggtgttagctgcgcgccgtgcctctgctgatttgctgtgagaaaattagctatcgtcgctataaattgggctcgatgtgtggaagactaggacgggaggggaatgccattgctattattctaccttgaaacttttgctccaatcattaattgaaatatgagggttcgatagaccttaagcaatcacaactttgtcatatgagggtctttttgatttttgtagtagtgtgtgcttgggatttgttgtccacaccacactggagaatcctaacagggagtgtgttgttaacacggttcagaagaggaggacagtttgttggacatgaggttactacaagattggtgatgacacatttcactaaaagagatatagtgggccttggccagttcaagtagcctcacctcaacatcaattttggagctcgcctccatgctttttatgggttaatgaaaatggggtccttagtttcctagggaagtaatagccaactgccaaactgagtatggaagaataaaaaaatactgaatcttctttttctgaaaatataacattagaggaaatagaattattctagtgtatcaggacttagctgaaatgaaaaaatgagttggtagtttggcgcttgtagaaactctgagcactttacatctcctgttctacatactcagcgaagcttcacttttcttgtgaccctctttcattccactagtctagcgttctgttagattttacagttatttgtattatttgatttcttttccagggaaaggtttgatc

SEQ ID NO: 111757 - DNA, 695 bp, Setaria italica
  Intron number 2 from transcript Si013622m (locus Si013622m .g) derived from phytozome v7.0 (chr-ID scaffold_6; pos 31 566190 to 31566884)
gccggaatccaagccgccgcctccctctcatcaaggttcgtctgattcagcatctctctgtttctctgggtgatggatcggaattcagacgtttgcgcggcggatccttgtaagattttgccgaattcggcaattcgacgggtacaaagctaggctgggccatgaacagtcagatgctatctgctacatagtaatacctgtacgaattatcgcttgaaattaccttttgatttttagtttgtgtttgcgtggacagcgtggttagaggaaagtagaaaacgacagattaacggaacaaagaaatgatcacgtgtagctagctgaggaggagggcgcccagtggtggatgcaaagagccgtgcacgaccttttctgcgcccctgccaattcgcctgtactctatttcaaatttcgcaatctgtaaattttaaagggtttcggtatgttgttctcgcagttttggtgccccaaccgtcagatctccgtgggccttttcgtttagaatttttactaactctgccatgcttttatacgtcgaactggaataattttaccgtgtttctcggtgattacgagttttgctgttcttcgcgatgctgctgccacggcggccttgttctgaattctgaactaaaaccacaaccggtgcgcgtcgtgcaggtttcttcctcaagacgcacgacttcctgcagccg

SEQ ID NO: 111758 - DNA, 973 bp, Setaria italica
  Intron number 2 from transcript Si018173m (locus Si018173m .g) derived from phytozome v7.0 (chr-ID scaffold_1; pos 22 024864 to 22025836)
atattacgctccagcttgcttgagtagaatccaaggtgcgcattgcactacccatccatttcttggtttgacttaaatgcaatctgttgctcacttatttaatcagaagttgtcatgtacaggctgttatctttgttacagtctttgcttacaataacatggtcttttcgtggaaattaaatgataggaagtttaaaaacttattgatgtatagagaagaaatagaatgagggacgcggtcattggtttcaggtttatccatcttatattgcagaaactttttttctgggctgaattgaaaatttgtcttgaaaaaaattcttagcactctggttataggtccatggaataataacttaacttgtggtaggctgtcctcctaggggttatataggcatgagttgcacgacctcccttttcttgcctaatatgaatgactgaagcagcatagctattctggcatttttgttctcctaatgaaagtttctctataaaaaaattgaagaaatgaagattttgcctagttttgatgagtgatgtcgtgaaggatgacataaagtctaattcaaagagttaattttgcgatgcttttagtgtgcagcccagattatgctaagtttctaaggctaacaggagccaagcggaccacacaagcccagttcacttctttcccaaataatcaaattactgtacaactgtgattcctggctgctgaaaaaactaactgtagcgtatcaaacacagttgttcaccaattgcctcatgagtactagccaattatgttatcatcttgccttgctacttgttctttgtaattttactgtaatttaattattttgttacctgattacaggtcttcccttaactttatcttaaaaagtgatatcttctctatccttacagttcagttccccccttcttttttatcatatttgcaggcgctctagggcacttccacattaaggagctacta

SEQ ID NO: 111759 - DNA, 527 bp, Setaria italica
  Intron number 3 from transcript Si013907m (locus Si013907m .g) derived from phytozome v7.0 (chr-ID scaffold_6; pos 29 96857 to 2997383 reverse strand)
gttggtaagtataaattgtttctttggtattctcttccaattacttgcttagaaattaatgtagggtttttttgaattgttagtgtaaaggctaaattttagaaacatgcatttaattatgagctaaataaggccgttgcttccaattgcttttgaagaaatttgatttgtgaaattactcttttgctctataatctctatctagatttctgtgcgtttcatgaacttatggagacttgaaaaaaattctgaaaaatagatagaattattaatggtctaaggaacctagatggaaaaaagctacatatgtatattcttgtcctcttttctaacaaatgaaacgcgttgatgtcctttttctcccatttttttccgtgaagtttcatgcctagatttaagcttagagagagacaaaataggagttgctaataagtttgaattgttttaaagtctttctcatgttaggtgaaacaactgttctccttttcatgatgttaatgtaaaccatttgccttccaccaggattt

SEQ ID NO: 111760 - DNA, 626 bp, Setaria italica
  Intron number 1 from transcript Si017191m (locus Si017191m .g) derived from phytozome v7.0 (chr-ID scaffold_1; pos 81 56683 to 8157308)
cttacgctctagaactcctgctctttcattgtcaggtggggatttggatcttccaccagcatttctttctggattccggtcttaagagttgcagcccgacactcctggtcgtgttctggtttctccgaggaatcatcttctgctcatggaatcaacaaattgttgtttgagtttctccttcagatctcgtttcatgaaattttagaacactctggaactatctgaagtttctggccttgataattcattaacttgttgttttatttagaaccatcccaaaatctgatgtttatttttttcccgttttgttttccttcctgtgatgtgtcttgggcttctaaccacaagtcagctgtgagctttctgtcgttcagacgtttccgctctgaatctcatgatttaaaagccaggatactgttgcatcaaccaaaaggctactgttgttgaagggtctaaatcatatttcaactcatatttttatcgagttccgggctctgaattttttccttactattcatgacttgatagggcttgcaacaaaatgtcagaatatttatttgtcttgttcttattcagttattcactttgcagccttggaggttggagcaagcagtcctcctcaagtc

SEQ ID NO: 111761 - DNA, 1027 bp, Setaria italica
  Intron number 2 from transcript Si036198m (locus Si036198m .g) derived from phytozome v7.0 (chr-ID scaffold_9; pos 48 96525 to 4897551)
ccaggggggcgtggagagtgaaggggataattcaggtgaggatgcgatgaattagccatttcatttgattgacttggtgtgtctgggagaatttggaggtgaaagatggctgcttgcagtttaaaaactacatctttgattccttcttgctgtgtctgcgttagaattatggctattttgtttgcaagttaggatatggcatagtggacttacaagtttgttatgaagttctatcataattccgtaatttatacccaagtctgaactcccgcgtgaccacgatgaatagccaggaggatcctaaacttggaaattaagctacctcctcgatcttttagtgggttttcagtcagccagcaagtcagagaatttgctaactttgtgttcttatattgctgtgctgttgatgatccatactataaggggttaaatattacagtattgcagaaatggaactgacaaaatggaaaagtcttcctctaaatttttaggacttgagcttgctgatcatacagaagatttttctcaccactttaagaaagaacattgaaatggccaacttttgacttttcatatcttagggatcactattctgcaaaatatcttctcagattttaggtaccgtacaacttagcatagcaacctgggaggttggggcagcaacttctgcacgtgagctacttttttgtgttataagctactttgcatatcttggctgactaatgaacttgtacacattgtttaatcaacttttgtatcgtgtctttttctttcatatagtgtgatcgttattctttaaatatctagttacaacttagcattatcctgggtttacaacttctgcctgtgcgctgcatctttgtgttgcaagctgctttatatcttggcgaactaatgagctcggccaagtgccaaacactggtgaatgtgaagtttcacataagtagagaaacatagtaacataagctaacatgtgatggctttactgtcaggtgtcaagatccattggtgatttttatctgaagaa

SEQ ID NO: 111762 - DNA, 835 bp, Setaria italica
  Intron number 2 from transcript Si018653m (locus Si018651m .g) derived from phytozome v7.0 (chr-ID scaffold_1; pos 40 731210 to 40732044 reverse strand)
gcacaggaatttccgatcggattttctgctgtctggtatctctgctgatccgaatctctcggccatcatttagtagcggatttcgttgctgcgtggtggatggactaattcagtccatcaatccacggttctggttgtgtgctcctgctaggcatgtattcttcagcgcgttcaagttcatgtccaaaaagtgattcgagggttccctcatgccctgcggtatagctaatcagatagaatgtaagcttacagttttcatccgttttgtcaatgtcataagaaatgtcatatgttgtgatgcaagtgtaaaatggctgtacaactatcaaaacatgattgtgttttcctttatcttcatgcagttgctggacactgttgtgctgcaagtgtaaaatctgacacaactagttcgctagttactgttaaatacactgatttactttgaaagatcagctgagagaggatccctgggatgttgagggaattaatccaaaacattgtctgggattgaatgttatacacggttgtggctgagttactgtaggttgtacttaattgatttcccctttttgacttctttccagtttccacttaactccttagttggagaatttgtttagaatttctgcatccctacttcaaaaattaaatccaaggctatgctcgctgtgtgtgtctcaattgaccactgaaagattatcagagataaaatatgagatattctagaaattttctgtttataacttgtttttttttacagttgcttcctggtaattcatctttcttttttaccatcccagaatttgtagctgaaagtttcttcgagaacaagcaa

SEQ ID NO: 111763 - DNA, 711 bp, Setaria italica
  Intron number 3 from transcript Si040205m (locus Si040205m .g) derived from phytozome v7.0 (chr-ID scaffold_9; pos 52 360938 to 52361648)
gattgtggccacaactactgcaacgattgtgagtaatgtctatttacgatgatccgggtgatttcatcattttcaacttttgcatgtgttccagttattagattctgatagagaaattgcgcaatacattattcttagcaaaaaagtttgatgaatgacacctcttgactaccatgctaattaacagtctggctcttgtccactaggagttgcaagatctgtttggtatgagaagcttgctaacagctttcgaacctcatagtagcaataaaatggttcaacgttgtttctacctgtagctcacattcatcatttggaggcacctgtatttgaacatcatgcactaaactgacctaggagagtaggaggtattacttgccatttgtatgtataatcattgtgttatttttactttaaatcattgcatacttttgtgcactttttcaagaatgatgtgtcaattcatacatgaactttatctgaattttctatttagagtgggctttgaattctatcacagtagttttagctttatatgaatggcaacttttgtgctaccgctccctgaccacgaccacctacatagagaagcaaaaggggacaacattctacaaattagctttgctgcgcctagtttttcctgcttagctatttaccacacatttcctatcccccacctaggttggactggatatttcattgtgaaaataa

SEQ ID NO: 111764 - DNA, 1006 bp, Setaria italica
  Intron number 1 from transcript Si034069m (locus Si034069m .g) derived from phytozome v7.0 (chr-ID scaffold_9; pos 10 231173 to 10232178)
cacgccgccctcttctgccgggagcgcggggatccgtatgcctctatcttatggcttttgctttctgatgattttagaatattaatacaccttctctcgtggtagggtcgttcccatgtgtggaattccgattagtggctgttctgggccggattttgggatgcaatgtaatttgagcagagcagtttaggttctggtttatgaagttcggaatttcatttttgagatggaattacaggctaatagtgatttaacgaaaatcattgttgtattgtgggtaagatcattctgaatgctaatttctagtggcacttgaaagtttgaatatggttcgattcttattcaggacggaattataaagtcatcatgctagtttagatgctaattcgactaggtaggaatgtattaaagcctttctgaggaattgagttgaatttcagcagcaaaaagagtgaattcaggtgctgttgggttgtttgctatgtcaaatgttgcttgttgagcaaaaatttgcaatgctgttttacttaaaaggttaaaatgagcattacacctgatagttttcttccatctttctatttgctaaaagttgttggatacctgtaggttatgatgattggttctcttcaaggaacatttgctccttcttggagccaaattgggtgttatccagggtgcaatttatcatttttatgcctgttctaggcttctagtacaatagggtgggcaaattagtaggtgtagagaactgtttcatgaccggcagtggtcagaaatttaaaggcttatttgttctttgggttaccaattagaaactgtctgaaatgtacaaaaggaatttagttgcttggatgtttaaattatacttaaaaatgaaaaagtaaaggatatctgctgctggtgtagaatgctaattttgtttcccagccaaattataaaggtgggctcctcactgatatctcccattccaggtcttgctggcgcgacagcagacgtccattgttac

SEQ ID NO: 111765 - DNA, 865 bp, Setaria italica
  Intron number 4 from transcript Si013217m (locus Si013145m .g) derived from phytozome v7.0 (chr-ID scaffold_6; pos 39 99807 to 4000671 reverse strand)
aaagcttcgagacttcgcacattgataaatcaaaggtgctcggttgatttaattttgatatgcttagtcacatgtattgcccttctttgaaatactagaacacaatttgtgaataacaatggtattctttggtatcaatttgattagattgtatggtagcatttaattttcacgtgcacaaaaagtaaatcaaagacctcttgtcacataactgcgacatgctgaggtttactatttttgttcattatcttctttctggttattctgatgctaaatagtgtgtttacattacttaccttgattaatgatggatgaataagataaaagggagcagaatgttaagttgtagcgctgaaccattaaaggatttttaagggagcagactgattgactacataataaatatgcattctctgccactttgaaattgagttttactaatggagggagtggttaaatgtagtcaatgcttccttggctctttgacttgttggaattttacttctggttgttactgactacagattctttttgatatagatctttcttttgagattgtttcgtgtggtttggacatgtccacctgtttaccccaatagcttttatcaaatacgacaatatacaaacaaaattgtctttttgtaggggttctagctttagatgcctatagcagacaccatccttttcttatcctaatgttgtatctatgcatgccataattgggatgtatctgcttgctgtgacgtacaagtctaaaaatgcttccagaaacacattttgtgcttgtaaaaggcgatactaaccggggtttgtttccttttgactttcagtctgaactggcaacaccagctctgcaagaacccca

SEQ ID NO: 111766 - DNA, 657 bp, Setaria italica
  Intron number 1 from transcript Si035665m (locus Si035665m .g) derived from phytozome v7.0 (chr-ID scaffold_9; pos 14 414895 to 14415551)
tgggcgagggttttgagcctccacgtatggcttcttgataattgattcgtacgtagttgcgagtgcaaatccaattgaatgctcgcttttctttgcgcgtttcgatccgtcgccatcaccgagaatgtgttggcccccttgaatcgaacaaaggtgtgacctcgtgtcatgtgatcggtgccaacgagaacctatacctggagttaggattggatgctcggagcaaggtcctatgcaacaataatttcgtcacagcatgattcttcttccttgcaaggaaacaacccatttttttttaaaaaaagaaggaatcgctgcttgtggtgggtgggtcacaactcacaacgtttttgtttgccataggattttaccacgagtcaaaaagcagaatgtgtctcaatatacacctttcgattggctgtcggctgcgtcaatgcaagttccaatgcgatttattgctacttcttaaattcccttaaaaacgcccatcaaatgtcggtgtatccagtgtggaaaaacaaaataggcgcggccagcgaagccagccagccacgactcacgcgacccgaacccgacccgtttttaaccccgccggccggggaaatggcccgtccccctccaggccctcctcccctctccctcttcgtcgccccggcc

SEQ ID NO: 111767 - DNA, 360 bp, Setaria italica
  Intron number 1 from transcript Si034277m (locus Si034277m .g) derived from phytozome v7.0 (chr-ID scaffold_9; pos 49 482534 to 49482893)
ggcggagttcgtggaggtcgtcgaggcgctagctcgtaatgttgcccccaatctcttcatgtctatatgtgcttgctatttagtgctgtttgtgttctggaaatgtgtttgattatggtacagtgtatcgattatataattattaatgatgaggggcattcacctgcatgttaccgcataccattttgttatcttgattggtgaaagttttcattgtagtacatcctgcttagtaggcaacatgattcatatgaacattttttctatcgattctcccctacccattcttcgcatggtaattcatctgatcttaaatgattcttgttaacactgtgatttgctattttgtttgtttaggat

SEQ ID NO: 111768 - DNA, 976 bp, Setaria italica
  Intron number 1 from transcript Si033926m (locus Si033926m .g) derived from phytozome v7.0 (chr-ID scaffold_9; pos 20 120746 to 20121721)
agacggaggggtccgtgtccgattcaaggcgcgaggtgaggcgctcggtactttctctctcttgtgggctggggtttctgtctcgctgcgagatggtctgggtggcaacggcgggggtggggatctggatgcgtaaagacgggagctttgtgtgcggaactgatgaaaaatcgagtttctatttgggatttgatgtttttccccggcgaattttcatcgatttacaagaaggtcgaatctttcgggtttacaagaaggtcgaatctttcgggtgattttcgactcgaaagcttctgttcgacgcccaatcacgttgcctttcggaatggtcaagtcctttggacccattggatattcaattgaattttcagagggtttgtgctcttcgttgcagatcgaactctgcgccagtctgagggtggtttgtgggtacttttttctctgtgcaattaatttgtgcgaaagctcgttttcttggttgcgtatgtgcttcagttgggctgtgggcaactgaatttagaggaaaggaatttgggctgctaggactccactatggaccaaagaagtgtttatatagtgatgaaatgaaataccctaatcaattgctcattctgaattatcctcgctttgattgtcatttaacccacatggattgttgctctagttttgagtagcatataattttagttgggagccaagccataccatttgggttcaccctttgtggtattgcaaggtgaaataaacaagtgttggcttggataaatgtatcttggtgttagacttcaagcgaatgctagagggtccaaatgtcgttaccagatcttttttttagctcaaaatggttcggcgaagggacttttttagcttttttattatgtagtttgtttgtttgattttgattttgtaatgttcttttgttcatgataacttgcttttcctgtgatagaatgctcatttaatctctttatacagg

SEQ ID NO: 111769 - DNA, 873 bp, Setaria italica
  Intron number 3 from transcript Si017763m (locus Si017763m .g) derived from phytozome v7.0 (chr-ID scaffold_1; pos 41 652766 to 41653638)
caagtgaaaggtgtgcaggttagattccagggctctttagcattcctcgcctgaacatttaagtcttataaattggaatatctatcaattattgttcatagttttctcatcctttgaactattattgtgtctgcaatggtaatatgcactcggcatgtccattcagttgcaatttactctagtttatctgaagatttgtttcctcatgttgtgaaactggcagtaccctggaactctaaaactaccatagtaccatacgatttgacttgtaggataagcacaacaaaattcggcatagcttagctctgatgaactagtatggcatcaaaattgtgaagatatgcacttaaattcaaagaacaatacctgataatttgctgtcaatagctactcttttttccatgcaattgtcaaccccatttcaaaagaggagagggccttgagtgaaacattgttctaagcttgcttattcacttgcatctgttcagtatgggaccttgtcacatggcgacatggtcagcaaccaagtttatatgactatctgaggccatggtttgatcctttagtttgattatgttagtacttcagttaccagaatatgtataatgataggtgcttctagaaatctgtagtgaacactctttttttcaagttatccatatgaaaacccaggcatttgtatatcatactttggatggatctttttaacgcctcttatgtacttgtcatgctgtctttatactttgggatgtcatttttgatgaccgttatgtacttgttatgctatttttatactctgggatgggtctttttaacacgccttgtataattgttatgctgtcattaaacaggtggaagagctttactctcttg

SEQ ID NO: 111770 - DNA, 638 bp, Setaria italica
  Intron number 4 from transcript Si034207m (locus Si034207m .g) derived from phytozome v7.0 (chr-ID scaffold_9; pos 35 649253 to 35649890 reverse strand)
ttttggtaagcttgagttaggatttacttcttgtagatgctcgcatactgtttacttttctgtgtatgctaaattttcagcaacttcctcatgtaaacgtgcctaccatatgacgccacagtgcggaatttattataatgaagatgaccagtcctggagtcccgattgttcttattcttctgagctcagttacactgccgtgtcttaattttcaccacattagtttagtttcattaatcaaacaataagataagtaagtatgcgatgatgatgcctttcctaagcctaaaagtaacattcaatctggagtggcttgggacattgcattatagtttctacttcttcggcctagtataattttacttcttaggcctagtctaattatacaaatggaatatgtggttgctttttggagactggatggggtaatgatcttgatatgtacacacgttaactggcttcctctgaagccaacttccttgtcagatccataacacactatttgtttcctttagtttagattttttttgttaatctttttaccacaaagcttaaagtatacagaacacattgacttgaaattttcattgtcctgtgatgctgaaaatgataggaattatcctcaagtcatagaggaa

SEQ ID NO: 111771 - DNA, 496 bp, Setaria italica
  Intron number 1 from transcript Si036879m (locus Si036879m .g) derived from phytozome v7.0 (chr-ID scaffold_9; pos 51 157994 to 51158489 reverse strand)
acaaccttccgatctcgcattcccgagctaagaaggtttgtttgccttccgttcatccagatcttattcttcagcctgcttgcggtgcgggcggtgtgagcaaatctagattttgagacatttacttgattgttttttgtggataattcgtttgttgttgtcttcagtcagctctttttatcaacttcgtttgtgaatattgagaatttgtgaaatgcgcccacgcgatgttgtcagtcgggataacctggagcttatctggattgcagggcatttcattggaattttgggggtttagttcaaattaaggcttgttaattaatcgattgcgaaccgcaattgtgttttgtgcactgttatttttgttttcagtctgttttgtttttccagtgacataaaatgaccctagttaactgaactgtcttaatctttcttatgtcttctagaaagctaatatcgttgtattctgtagggaaacgagaagcagaaaggcacc

SEQ ID NO: 111772 - DNA, 450 bp, Setaria italica
  Intron number 2 from transcript Si013596m (locus Si013596m .g) derived from phytozome v7.0 (chr-ID scaffold_6; pos 25 714901 to 25715350)
gaaaggtaggagcagctcttcgacgactgttgttgtgaacttgtgatatgatcagacatgtgcctagcaattgtttgacttggggaactgggtagagcattttaaggggaagtgtgaaattgtaactaggaattgtgtttgcatagatgcacagcaactgcacaacaacatcagttataatgtgtcaaaagaacgaaattgctgcagactgttctaatccatctgtcacattttgttcttagatttgtgccaatgtgttgacagtttttctcagctaaaacctatcattctgtttgattaacagttgtgaagaagcagggacagtctctgtaagctagaagttgcagatactatcttattctgtaaaaatgttgacttctttctaagaaagccttcgtttctgcctgatacacagtggtgaagaagcagggtcagtcccagagctccctg

SEQ ID NO: 111773 - DNA, 759 bp, Setaria italica
  Intron number 1 from transcript Si017924m (locus Si017924m .g) derived from phytozome v7.0 (chr-ID scaffold_1; pos 22 633459 to 22634217)
cgccgcacgcgcctcgtcctcaaggactcggtaagggccccccgaccgagcctgacagctcttccgctgctcccctcagtcctccccccacgccctttttccttaaaccctaggacttgccgcagtttgttgtcttcctactgagtagttagtttatatggacgaatttaatcttggttaccataaaatcttgagtcaaggttatccagcgaaatgggttcagtgtgggatttaccgctgtcttctccatttgtttttagctttggtacaactggagtaccctttaatttcctgaaactatttaagtgaagtcaattattcaggattgcctctttattcgtttctagaggatttggtggagttacaatgtaaagaattctgctggttcctttgcacttcctgtagcaaattcatgggcatcaattgagtttaggatctagccttcacattggaatgactgaattcagtgcatcttgtttgagactaataactcttaattgtatattgtatagtaacaatcaagttacttcattcatacgagggacggtgcatagtgtgaactgaaaagcatattgtgattaacaatttttgtgataagtgcatgcttcgtaggtggaaagtcaaactgaaacattagttactttgttctgaggctagaatttattggctatggtggcctataactataagtccagaatggtgttctttgatgctaggaacctgaccagtgagcacaaaaaatttacaggaacacgaaac

SEQ ID NO: 111774 - DNA, 652 bp, Setaria italica
  Intron number 1 from transcript Si017447m (locus Si017447m .g) derived from phytozome v7.0 (chr-ID scaffold_1; pos 78 71734 to 7872385 reverse strand)
cggaagaatctcccttactcgaggtactcgctttcgctgatgtgctcctgggaaactatcctgtgcgattttgtgcgcgagagatcgtacttcagttgtttggcgctgctttaaattcgctggtgtatgtgacagtttaactgcttcattgatatattccgttaagtgaaacagttggaactaattttgtttagaaaacaaaccgtgtattggcacttgaaggatcaaaatatctgtcaagtttgccggcagttcacattattttttgaccaattgaacaactgataatctgggaggaatttgctctttaagcaatgccagttgctgatacatgactaatttggcaaaatgtttcattgttatagtgaaatcacaagcaattgcaatgaagcgtttattaggactatgaactatgtcacagtaattacaagcaactacaatgaagtgtatattagggcaatgaactatggcaatactcaccagctcactggtaaaatgtcaaagcaccatgcttaatcttcttttggaaaatgctttctttcataggctcttacccttttgggtaccagtgacacatatggttaattattgttgctttgtattttatgagcttgatgattgttctctttctctttgtaatatggaaagaata

SEQ ID NO: 111775 - DNA, 798 bp, Setaria italica
  Intron number 1 from transcript Si034632m (locus Si034632m .g) derived from phytozome v7.0 (chr-ID scaffold_9; pos 40 450638 to 40451435 reverse strand)
agcgtcctctacttcgatccgctatacgaggtaccggatccgccgctatgacactttcagcctgtgatctgctctgcagtttccggttttgttgttctaggattgaaatgctagtgtgtccctgtgcattgttagtttaggtgatttcaaaacttctaaagtgtgttctgcatgattagcagataaatgctcactgcttttttgcgatcgtttcatgtaaaggtgatatgattttggcatctagtgtattatcgcctgcctacttgtagatttagtggtcctatttgtgtttgttgcctcatgggtggcgttagttgaactcctgttatgtctggcaagaatatgtttgtactggaatcaattcctgggaaccagtttatgttggagctttagtacctttaaataggatgaagatctgattgtgcaaggtgcctagggttagcccgaactcctagtcaagccttttttggagcattgactcattttctgcctttccacaagattttatctagagtaatttacattaaaatgatcagataaaagtaattttgctaggttgaagccatgaatagtacgtagtattcagtttgatttagtttcaaaaataaaaccactttagttatatatcctcagtgctagtactttttactgcaaatttcataatatcgctgcagttgtatcatggtgtctctggattacatggtgataaagttagaacatgatgtagatctgaccctgttaattgttatgacactacatgaaggctactgggaaagtaaagcgtccttctattgtatt

SEQ ID NO: 111776 - DNA, 785 bp, Setaria italica
  Intron number 1 from transcript Si014450m (locus Si014449m .g) derived from phytozome v7.0 (chr-ID scaffold_6; pos 35 523698 to 35524482 reverse strand)
ttgcccttggtatactctgcatatctaatcccaaggtatgtggatctggtcttatatactaactctctgaaatgtgaaatcctgctcaaatcattaaatgcctgatcagtgaagtggaaaacttggattttattaaaactgcattaatactttaatccttttggaggtttgtaaattggccaaattgtgttacgtgtgcatggaaatgtccctctaatgcctaatgagaccatgtgaatgcagtcgctgcatgttaagtggagtactaacctatttgatgcacttgcacccaccagtgcacacaacaaagcatgtgtgcatgctgtcttgataaattattggcattttttaagaaaaactgttgaccataaagcctatatatgtttggtctgaagctaactttgttatttgttctcataatttaaagctttttgttcttaaatactgttaatataggcccagaactgaatgcttcaagttggatctagtgccatattatagaataatcatatcaaagcaagacagaatttactttaagacactatgatgcgtgtaaaattttgcatggtggcctcgttattggtagtgtggccatgtatcttcactgtaatttttatatcgtaaaccaaattgtgatctacatcatgcaaggttcttaactttgtattatgcagtttcttgttgcttatttttcttttgaaccattaaaatagtcagtttgggtatgtgatgatttgaacatgtatgtagtggttgttcagcggtggattcacttgaataggttg

SEQ ID NO: 111777 - DNA, 889 bp, Setaria italica
  Intron number 1 from transcript Si017016m (locus Si017016m .g) derived from phytozome v7.0 (chr-ID scaffold_1; pos 32 756937 to 32757825 reverse strand)
ccggctcctcgggctacggcaactacaggcaccaggtgagcgcggtatccgaggccgttcacttccgtgcactttgcgcgcgtggattccttaactaaggacggaatgaaattttattgctgtgtatgactgtatgttcgtccgtttgttgcgtggttcagaaggcgcttcggaaattattctggaaccgtagaattgcgcttttaggtgctcaatttgtggggtcctgagccaaaaggatgcttcgaatttgtgcagtacagcatctcaagtactttcgacatcttgagttggtagttgtgggttctgcggagttgggggaagaactgctcggcccagagatttttccatgggtttaaggatcatgtgacagtgcagctagtagtgacatctaatggttcagccgttcagggtccactgacacatcactatccaagctacggttgtccgcttctttaggagttagtctttgtcaagtagtccttttcatgaaaggaaaaatgtataagcagcaatatgattcagaaataggaagggatatggaatttcacaaattttgtttctaaatttctatgccaaggatgaagtggtacaaaaattttccactgcctaaaatcattgctgcataagtttgcaagaacattagctaacaattgaaaagctaaaatatttgaaggttggtacttgtactttccactcattgacttctattgtaattatgcgcatgcacctataaactgtctgaatatgcatgctcatttggcaatttcaatgccttttaatattgttttgtctccttattagcaggaatcagatatcagcttgagattattttccatggtgcttttgcttacagtttgatgtgatttgttgtattgcaggctgatat

SEQ ID NO: 111778 - DNA, 688 bp, Setaria italica
  Intron number 1 from transcript Si018053m (locus Si018053m .g) derived from phytozome v7.0 (chr-ID scaffold_1; pos 55 37112 to 5537799 reverse strand)
ggacgtcgacaagctcgacctcgacgtcctcaacggtgagtcccagcggttccagattaatttctggttcgcaaaatgcagattaattctggtgccaatctcagtgcatagttttatgatacaggccaatcttggtaactgtgacggctaggttctacagggacgaaactcgtctgtctcatatacgatgaaactccatctcatctcttctcataatgatcttgccacgtcagcaaaaattctgaggtgccataatcatgaaactcttaatcaaaccttctcagtccactgagactggtcttatgaatccagctagagagtccaatacgggtccaaacctttccctttttttcccctgaaaagaactagacgttcaatggtctaaacctttctcttttccccccctaaaaagaacttggacgttttttaactgtaggtcatattgtcaggttaaactactgttcttcagttgtttctgccccatacagaaagcaggaatatcacatgaattttataggaatcgataaatacagctatctgatcacaggaaatttctgcattctgaacagatctaaaatgcacagcattctgcatgtaagaattgattaaaatctatgtggttctcgcaaaagaatgatttgacagtgcgtgattttccttttctggacagggcctgcattgctcattg

SEQ ID NO: 111779 - DNA, 962 bp, Setaria italica
  Intron number 2 from transcript Si034415m (locus Si034415m .g) derived from phytozome v7.0 (chr-ID scaffold_9; pos 54 48667 to 5449628)
tcgtcctcgccctcctcatcgtcctcacgacccaggtacttagcttgttgcctggcaccttagcttgctaactgcaggtgagcacttcactgaactgtggccaagattaacacgcgcagttaaattaatcatgcacaagtaatcaaatttaaattcttcattctttcttcagccccgttgctttcgaaatctagtataatatggttatcaagtaagcatcaagcctgattcgctactttcttctgtgtcgtttcatcttgacccatctctggcacgcgaatgtaacgtgcacagttagtcaagaaccgaatcaaaggtgcggctgataagaacatgccaagatgcccaaaccaatcaatatcctgcgtgtgttcttgtttgcgtaggagttacttacctcaccaccaatcatggccccagggaagaaagcgaaaaaggggggtttgaaaaatcccatgcctatgtcatcatgagaccatgcatgcatgtactaggatggcctacaaatagttggcaggattttgtttgtttgtttgtgcacatgcgttttcttcgtacatttcatagtgggcaacttcagaatccatgtatgattgctggtcctagttgataaaatatttttttatgaaaaaatctagttgagaaaaagggcatttttctatggagaaatctaagttgaaaggcatgtgtttccgttaaataaacacttacatttaaaagcgaaagcacagattcttttctagttcttttgggttaactaatgaccgcagtcctcgattaactaatccaaaagaaaagatattgtgcttcccttttgtttgttttgcatccatgtggtcatctctggataaactagaatgacaggagatgctgatgccgtagtgacgttttgactggtgacattctaacaatctgtacttggtggctgcacactgcagatactggggtacggctgggccggc

SEQ ID NO: 111780 - DNA, 672 bp, Setaria italica
  Intron number 3 from transcript Si016131m (locus Si016131m .g) derived from phytozome v7.0 (chr-ID scaffold_1; pos 68 26439 to 6827110)
tttctggtttagctgtaaagtatgccttctgcagttatttgctccaacccctccacttcctggccacaatatatcatctcattactcatactattttttgttatttttttcgagtctgttcaatgtatcttgtataaaacaataaattcgcatttggttatgttgtttgtggttggtttgcaatcatgcatgctaaagatattcctgttgtagactatcctctttaacagaggcggagcttagtggaggccatagtgggccacgtcccccctgcgaaacacaattttctacttatacagtagcaaaatggctactgtcaatgtattgagagcttaattacttaggctggcccctcatgtagctttgctcaagctccgccactgctctttaatgctagaatttggtggcattttgatgttgctactcacagtgtagaattactctcagctgtgtattaaggtgactttttcaatgaaagaacatacatttgctgtacttctggcatgcctccgtaattgcattttgcaagcgcttcgatgcataggaatttgcttttaatagttttaggttgttttcccacagttctttgctatctgcttgtggcgtttgttgatatcctgtaatgccatctttgtagcttggctccacttgtcaagaaggttggtgaggaca

SEQ ID NO: 111781 - DNA, 1029 bp, Setaria italica
  Intron number 1 from transcript Si016642m (locus Si016642m .g) derived from phytozome v7.0 (chr-ID scaffold_1; pos 28 539348 to 28540376 reverse strand)
gctcggcccggggcgggtcgtcgccaacaccgagggtgagtcgcgcctgatctgaacatctgatacgtagtagtagcagtagggcccctcgactgctcggtttggtttgggtcaagtttgaaatctgcgctgcagggatggagcatctgaacttgatttctctcacttaatttgattcgatgcttagcttgcactagttgctattgcttggtctcttatctcttgattccgttggtgctgatatttttggcttcttgctgtttgtgcacacgtttatacttgagttatagctccgctttggtggagcaaaggattgaacgagcgatgtctcgttgctttggaaaaaaagcgtagatttttcttgctccgtggtagtcgttttgttacgtcatatataggagtactttccgcgtttgggcattcgggccatcgtgaagtccacttccagtagtgctgcagcaagaggccaccaaatttggcctactttatctgtttaaaaagaggaattatgctaatattgccttccaaaattgaggagttcattcggcttgctaatgtttgactttgaggtgagattatttgacccgttctttgagccagagaaaaaaaattcttgctagttctgtgttattgttgggtcgagcctagccatgttaatgaacagttctctctatctctctgttttttttttggttgctgatagagatagtaattgaacagtatagttctataggatgtgtccccatggtgtaccatgaatagaagaacatcagacactgtgttgtactagcaatggatgggcctattgtaataactaatccatttgtgttttgggaactttcaagtacataattttttttaccttacctgtttgagaaattttgatcgcattgttttttttccaggagacctatttttgccaaatattttgcgtagaagctcgttgtcgataaaatttctcttataggtttgtccattttaactgggagtatgcttgctgatgataatgttaccttttgtccacaggtg

SEQ ID NO: 111782 - DNA, 640 bp, Setaria italica
  Intron number 2 from transcript Si035250m (locus Si035250m .g) derived from phytozome v7.0 (chr-ID scaffold_9; pos 35 144736 to 35145375)
agaacaaaggatcttgaggagcagcaggcgaggaggtgtgttcttttctgccaccaaccagataaaaattttctgcatttcacttctttctttaaaatcagaaagcgcatggctcttggttcaggcaaaattaaatcaaagcacatcaaaccaatgatggatgaagaagaatttttaatgatcaggaatggcataggacatttccatgaacagaactgtataaataatcctatattttaaaaaccacacgcatagctttcctgtaatttatacctattatttcagagcaaactatgctgaacatcacacgtcaccaaacatgtataatttaaattttaaatatgtaatttgactgattccttaatcactttgaagacacaatgagtgtctatctccatatcttctttttctattaaaatgcaaagtaaaacctttgtagattttatttgacctgacaaaaatctatgcttgaatagtggtgacccactgttaggacataaaatgtcacaatatcctatagtgcccattgttgaccggtcaaggagtgtctaagttggcatgcttgttgattgagtttctgtcactcacttctttcaccttcctgatgtattttgttgttctgcttgaagtcgaatctgga

SEQ ID NO: 111783 - DNA, 1028 bp, Setaria italica
  Intron number 1 from transcript Si017211m (locus Si017211m .g) derived from phytozome v7.0 (chr-ID scaffold_1; pos 41 862509 to 41863536 reverse strand)
cctagaaccaaactgctctaactgaaggcgtagaggtaacttatccagacaaagttacagttcaaattgttaatttcttcaggattagcctacaagttttcagtcatgcgacggaggtggggaataaagtgaaaaatctagttgtgagattgtcgacgtgtctcctccaggcatgtgagctctcagccactttggttgtttgatgtggatgtgatgctcgtgagagaattaattggttccctctgttggttggcatttatttgactaaatcactgcgccttgtttgcatcttcagtttcttttctttttacctccccccattcccttcgcacagctgatctcgcttatctgctgaagtggattctgcaagaggtgccaccttgtatgccctgctacagtatcgcccatcattggatttgttgttgcagtcatttcttgttagtgctatgccttttgttatgtttgcttctctactcttgtctgacactttgatttgatcttccttcagattttttttttggttttgtcgtgctatgtgttatctgggtgttgtgctaagatttcaataactggtagcctttcattttattttttcctcctgaaaggaacactaatcttttttaattgcctaatcaatgcttgaacctatcttgttagtgctatgccttttgttatgtttgcttctccactcttgtctgacactttgatttgatcttccttcagattttttttttttggttttgttgtgctacgtgttatctgggtgttgtgctaagatttcaataactggtagcctttcattttattttttcctactgaaaggaacactaatcttttttaattgcctaatcaatgcttgaacctaaatgcatgtacaagtgttaccttctctagtttttatttataaaaaaacaatcattcattttttcagccgaccaattattcatgttctgctccatgacgtgatgttcgaccgtatgctgtttctttgcaaaaatccttcaagaaattctgcaaacttgcaggag

SEQ ID NO: 111784 - DNA, 884 bp, Setaria italica
  Intron number 2 from transcript Si019138m (locus Si019138m .g) derived from phytozome v7.0 (chr-ID scaffold_1; pos 12 914329 to 12915212 reverse strand)
aggtagtgttgttgcatgctactacttcaccacatatgtgtatataatgctacttttatccatatatgtaacaactattgtatctgatgctcgtggtttatcgacgcgtgactacatgtgtagctgtcctaagggattctaattgaggacctcaaggacaacagactcaagcaagagtaccctcctgaaatatttgcggaaaggcaatactttgtgaactacgagaaagattttgattggattttccatcctgaacactgcaaacttacttggattggatgactaccagcggctgtgccccaagctacaacaggtatttatgtgtccgtgtattgatttaggcctcacatttatgtagggattttaacttcagtgttaagtttctaatttgatagataaatttcagtttaagatccatgatgttatgagcaattttgtttgttgtataccatgttttcagatttccatatttaagttgttcatgttccttactgttattgttcacggcttactatttaattgggtttttcagcgtctttacattcatgcagttcttccattatcatagagcttactcttagcatgtcgacagagctcagatgtatttttttaatggttgtcactttagatttcatcttaaggcatccccataacgattgctctcctgttttgactcagattaatgctatctttgctcattaaatttagctttctttaatttgtctgtcctggtgggttttccccaaccatgatcattcaatatatttgttagcagcttcatgtccaaactcctgaacttaattctgtagcctattgatgaaattaatcatttgctttcctatttccctatttctttatgcagccttctgactacaatagttggg

SEQ ID NO: 111785 - DNA, 695 bp, Setaria italica
  Intron number 1 from transcript Si013517m (locus Si013517m .g) derived from phytozome v7.0 (chr-ID scaffold_6; pos 27 027170 to 27027864)
gctccggcctcggcggcgccgtcctccacctcaaggtgaggtgcctgtgcccctcacattgcctcgaatcggcaagctctttgctagaggcaggcagccagccactgaaattccaactcgaggtcgtaatgacttatttcccttggattccttattccaccataacccaggttccgaattccatttagtttagctgaatttcttatttctcctcctcattaacaaacacattgcctttacataactgcatgatctgattgaattttgattgagagtttggtactgaagagagaaaagaattttttggaatactgaactgattactgcaagaagacaaaagaacacacatgtttggaacacggatagaatgcccacagattatcgcacattattggtagcccggtcggttgcagacaatataaaggccaaattgccagtgtgcatgtccatatcactccgtcctctagtgcacaaatgtgaaggcatggttcctagattcagctttcgtttttctttggaccagctgttgaacatcggcacttggtaattctcacatatttttgaaggccatttatcagttctattacaagtaaaaatgacaatctttatacaaaagtcggcatacttgatgaattgttatctgaccaaatgtttctttctggaaaaatgtagactgcttcacctgagagctggac

SEQ ID NO: 111786 - DNA, 935 bp, Setaria italica
  Intron number 1 from transcript Si018417m (locus Si018417m .g) derived from phytozome v7.0 (chr-ID scaffold_1; pos 45 75054 to 4575988)
ttccctgatccgttgccgagttctgagccaccgaggtatgtgcccatttccaattctttacggttgggatggatgctccaatcccgtccagtttgtcgcagattagtttgatgttgtcggtttagtattttcggaggtcctcgcgcggagtgatctagctttagtggtgtaggatttggctttcaccgggcctgatctgaggctagagtgatttggaggaagtatcatttagaggggttcattgcggaaatctggaagcctggatcttctaggcctcttgttcctgcgtgttagggtagcaagttgtgaatcatttaggtttgatgaattgagaaaaaaagattctttggctgaataaccggtgatttgattagttggtgagggcaagatcaatgtgacggtttgctccagatgctattaaagttcaggttaattattagtcttctctgcttatgagttgtactttaccaactgccaattgggccttgtgttgtatgattgtatctgttgctctccctgcatattggtatgcagcatttgtgaactgggtgaagctaaactgctaaagcatcctaccttttatgggttatgagaaagtgttatatgacagagccatttttcatgaatcaagttagtctgcttgtgtatgtatggttgtgtgaatacagttgtcagtttatccgaatcactgattacatacttttaattagcttcaaaacatgtaacatagccaccttggaatgctggactggcaaacactttattaacttgtcctcttagtgacttatacatgttcctctatttgtgctactaaacaattgtggttcaaatgatctctgagtacgtagaaagtttccgtggcatcccatttgatgttattttttctgggtccttgtgcagggagagtgttccactcacatagctgatagtaggat

SEQ ID NO: 111787 - DNA, 1042 bp, Setaria italica
  Intron number 3 from transcript Si018710m (locus Si018710m .g) derived from phytozome v7.0 (chr-ID scaffold_1; pos 23 896854 to 23897895)
cccgtgccatccgccgccgcctcaccaagcaccaggtatatgcaccatactactagtctactacgatacaatcatatcgccactgccacccctaggtgttcgcacgcctttgccctccagtagtgttagaaagcgttttacttcaaaatagatattcttgcgccctaacgagtgaaatgaggtggcaccttattaatcaagtgactgttattttcatgaggttgtttctttctgatagtctttagtgctttgccaatgtctgatttgattaggttatataagttgttgcatccttgctggaggcatcattgactgaccaactggcaactggtgatgccttttgtttaagtttttcttcattatgcaatttaaagcaatgaattaggtttgttgcctggatatatgatctgaatactctctgttctcacacaattaagtcgtagctgactgagtgctactaaatttgggtgccagataattacatttccttcaatctgttcagatatgcagtaggtttttgcttgctagaatgttctttgcataattctgagttgatcagttgatgtgtgatgtagtttgatgtatgaaattatcttgtgtgtaactgagtgtctacgattactagctgcactagtctgcaattgctatgacgcctatcaaaatggtggtatccaatcatttccctaagttggttgttttaacagtgtgacatgtgagcaagtgacaactgaaacaataccctgtttagaatgtgaccctggaatgccaatcttattagttactgttgcccatcaattgccaaaccatgcaattggcaattgaaacaataccatgtttagaatgtgtcactgaaatgccaatctgattggtgctgttatgacacagcaatcaccaaaacatgcattgcccttggaaccgtaaattgcttgccatatttctgtacttttgtattggattatcaaatcatagacggcctgacatttttggtctctgtgtctgtcctccagctttctctgaagacggagagggaaaagaagcgtga

SEQ ID NO: 111788 - DNA, 617 bp, Setaria italica
  Intron number 1 from transcript Si035104m (locus Si035104m .g) derived from phytozome v7.0 (chr-ID scaffold_9; pos 99 30541 to 9931157)
ctccggcgacgacggcacggcgcacccgctcaaaggtatcgctccttgcggcttttcttgttcgagcgggttgctctctgtggtcgggatttgggctcgcttatgtgcgtctagggtttagggctttgcgctggctcaggatttgggttgagcgattgtatcccctagctggttggggctttagattgtgcggctggttgggtttccaatgatgggagttgcatttgtatcccttttttaaggaaatattcagtaatatgctgatgcacttctacggttattgttggggattaagtgctggggatggtgaatgttgctgttgttttatagcttcaagctgcccttggactggatagttctcaagcatgcatgctcaagtgttcagattgttttcttgttataatagcatttttattttgatttatttcttagtggaagcatgttgtgagatttcctctatgtagcccttttatatgcttgttgtaacttaaacacacaattgtcttgatgcctgatggtttcatgatatccatgaagataacttcatatgtttctattcttgtgttgtttggtagtcttctgtgtgacgctgtttgactaattggttactcctacag

SEQ ID NO: 111789 - DNA, 962 bp, Setaria italica
  Intron number 1 from transcript Si019970m (locus Si019970m .g) derived from phytozome v7.0 (chr-ID scaffold_1; pos 70 14600 to 7015561 reverse strand)
gaaggtgttgttgcgaggagggtgatcccttcggacaatagctgcctcttcaacgttgtgtaagtttgtgtcctactgtactgattttagcaaaaggagaggttgcatattatactttgtaacaccactgtttcgacacagatacgtgatggaacacaaccggaataaggcttctgagctcagacaagttacttccttgaccaaatgtttagcagttcagtgcctcagcatttcttagtcttttccctgcttttaaggctttgattttttttaaatggtactacctgcgttcccttttttcttctttcttttttgcctcatggtatcatgcaaacttggacacagcttgcatattaccatcctgcccgataatgaattttctcttgcctgaaaaagggtagagaaatctattcataatttattccagttatgatttcaactgtctaataaaacgagttgtatggaataatttgacaataatatagaaaagtatcatccagatgcgtggctggatggtaatttagtccatatatataaaccttctttcaggactgctctcatgtcatgtattttgatcatcaaacatgatgaaattagttagatccaagagcatgtcaatctgttgagttttacttcgttatttggtcaaccgaacgaatttaatggtcttaacaaagtttacacgagataatgatggttcacccacggtcccactgtgttattgacatcaaaccagaactgtaacagttgattagccttagtaaagctatgataaattgactgtctattcgtgcccccatggtattgctttttttactcttttagttgaaaattttcgtgtgcgtagtgcaatgtgcatgtactatcaccatttttcttactatctgaaatttcataatgttgacattgctatcttttcttccctgtttgcttgaaggttatagcagcaacagttgttggtg

SEQ ID NO: 111790 - DNA, 1001 bp, Setaria italica
  Intron number 1 from transcript Si039190m (locus Si039190m .g) derived from phytozome v7.0 (chr-ID scaffold_9; pos 53 380947 to 53381947)
agcggctcaacaagctggccatcaggaacatcgaggtgggtggctactcgtccatggagcttcagatgattactcttatcttttgagtgctcgttgagctttgtgctgatgagtttcttttggagtttcaaatgttgtcagaatgggagttcaaattggggtctctttgtgctgatgagctttgtgctttggttgggcagtgttcttgggcctatttttttatcaatgatttcttggtttgctacttttctgtattttgtatgattcactgcactttcagtgtgaagttgcattgcgtccacattattcagtaactaaaaaggctgtttttcactgattcttttggttttgggcaataattgctggtaatctttcgctgtcactttgaagaatttttccaaaaagttctcgacttttagaggtagacaatgcaaattcaagcgaactagagtagaaaaagatgaatggttgttgcagacaggctgactcttgcaaagtcatattctctgatggaagcagaggcaaagcctttcctttctgaatattttgcttcctgctcggagtttctgagcacaatgtgcagagttctacaacgtcagcttaatattgcatattttattctacattttcccccttaaaagttgcaatcatatgaagctttagctttatctttcaatgaaatgaagtagacatttcgaaaaatcaaaagaagttgacatgagcattgctttggctagaacagtccttttccatctgacactgatagtagttttattcctcatcccagatagatacatcatcgactgcgtgcatatctcccaccaaccagcgaccatcctctcctcaagaatcacacaatacaggtgattcagtcaacctctcaaatcttttcagaaatccaaacaaacttgtaaatggttaatttgtgcactcactattttaaccctgcccaaaatctctatccttgcagtttaggccggcctaccaccctgaaggtctat

SEQ ID NO: 111791 - DNA, 813 bp, Setaria italica
  Intron number 1 from transcript Si034809m (locus Si034808m .g) derived from phytozome v7.0 (chr-ID scaffold_9; pos 44 077389 to 44078201 reverse strand)
tcccgaccgccagcggtggcgaatccggcctgcaggtacgcctctcagtacaccctcctgctcctccatgtctcgctatgactatgacgctgacaattaagttactactaccccttgtttgattttgatgagacataaatggtagtaggatttagttaggggtgttcaaacgagtttttacgtacacaaagccgtccaaacctgcgacggaaaagtgaactcaagacaacccatagcaagttcagattctaaacagaacccgttcaattctgtcatttacttctgcttgttctgtgcccgagtgcactgtggtaggttcagaagaaactaatgaaggttcagggctacgatgatgcccttagcttcttcataaggaatgttatcattatgctctactactttctgttaaagaaaaagaaccagtgaacagccagttccaaatactacaagttaataacaaaaacctggggcgacctagggaagatcactgtcgcagtgttttgtttcccaatcctggcagggggtctgcatgctcacaatttttaaaagacaataaacctgagatatccgattgacccagtataaaaaatcggaaacaacaagagaatcattaactgatataagccgctgccgttcttgtgaacaagtcgtgcagacagttggaaagaggaattgatactagtccttaaactgcaatttttcttctacaaccacacaccaaagatataggcgaacaacaccccagctgtttgctgtaggacctactggggtacggatttttttcatatctaagtaatgttctactctagcagc

SEQ ID NO: 111792 - DNA, 736 bp, Setaria italica
  Intron number 1 from transcript Si016982m (locus Si016982m .g) derived from phytozome v7.0 (chr-ID scaffold_1; pos 74 15681 to 7416416)
caatccagggtctcgcttctcaacactcttagcctgtagaaagatcatacaccaaccaactctgaattcctgcgattagcatccgccttttagaggattggctgatcatcgaaacaattttgatgtatatatgagacaaagtgtacagaaagatactcaatgaaagagcaaagttttgatccatttgatgttgtcaacattgtctgatctttgtgtgtttgttttttttttgggtccaaacttgacacagaagacagctaaatttctaaactataaccttaaattgggagattcagataaagtattgtgttgaaaaaaaagtccctttaactctttatttatggtattgtaaaggaaattagtagttgtttgatgagatggacactgtcaatattcacatgcgatgtggctcaacaacaggcacaggatccttctgaattggatcttgctctgcttaactgatagcatgccaactaaattgataattgattacctctagaataagatgatattctgattcttgctgccaatacttggaacatgattatgtggtttggttagatccaactcttaagaaacttgagcagcatgtggatcatcttgaaattgcaaacttcagattccaaatgttggaagcgccagcaggcaggacagtgcagcatgaagaaccatgaatgctgaagtaaacttttcaatagcaggcaactcttctcacaatctgaatctatcattaaac

SEQ ID NO: 111793 - DNA, 484 bp, Setaria italica
  Intron number 2 from transcript Si038871m (locus Si038871m .g) derived from phytozome v7.0 (chr-ID scaffold_9; pos 80 65466 to 8065949)
ttgtgatttgcccaacaagggagcttgccatccaggtatatgaatgacgcaacagtatttctctttgatccatttacatgttttatgactgttcaaggacttgctatgagtgaagcaatcataacatttatttttccaaactgagataaggttattctttgctaaggtagtgctgtgtaaatatgagaggggccagaggctagagtagcccctgcgttatgagaacgctaggcaccggggttacaatgctgtgtaaatatggtgcacaaagttgttcattttgacagtattttggagacaaggccagaaaaccgcttttcacactattgctactgtcaaatactagctagttgtttagctccaaaaggcatctatctgtcatatatctaaattttgtatgattgctgagactattcatttgtagggactcatacttcactgtccttaattagtgtttctttgatgcatttgtgctagacacaca

SEQ ID NO: 111794 - DNA, 1056 bp, Setaria italica
  Intron number 1 from transcript Si017166m (locus Si017166m .g) derived from phytozome v7.0 (chr-ID scaffold_1; pos 28 229964 to 28231019)
ccgtcgtcaacctcgccaccgccggcgagctcgcggtgagtatcctctgcttcttcagttttaactgaaggctctgcatttcttttcctaaaggaatcatggattgattatgacaacaaattaagtttgtgcgttaaggattcagagtagatacagaaaaagaacgcaattaagtcaactttttaccaatcgcaaaagagactgcatctaacatatccagcccttggatggaaccaaatcaagggacatgaacatgtgggcagtaatgctcgatgtgtcatgaattattgaatactagtttaaaatgtattgataataatgattgaatactttatatgccatttttttctgaataatagtggaacagaccagtagtagtgcgtagaacagagaggcagagtacagaaatatacatagtaaactggaattagaatctttagctggaaaccaaaaatgcatgttggtcgtagatgtccagcttcgagattcaagatctagtctgtcagtactagtagtagtatctcagtgggtttggtgtacagcgagaaatgccaaatcaggttgagcgaggacagctgtaaatggaaagttccagaaaaaagcttgcatggcccgaaaggaactcaaatgttcagacaccatagaaggagttgcatgccccgaaaggaacacacatgttcagacaccatagaagaggtagcaagtccaatcaacccacaccactcatcgtcagcctcagcgccgtttcccccaattccacatagtccacggcaacagctaggttagtagctggctgtgtgtctcacctctggaggttgtgcaggtagatctgctcagcaaaatgtccatagatggccaacgaattactcctacataaattttcagtactgacatgcgacttcttttctagggaaattctatgttcttttcagctccgaatcgaatctgtaagatggtaaacagagaatggttaatcgtttgtttggctaatcaagtgagtttcggtggctttgctttgcagctgtcctcgatcagcctggtggcggggctgctggt

SEQ ID NO: 111795 - DNA, 1020 bp, Setaria italica
  Intron number 1 from transcript Si040111m (locus Si040111m .g) derived from phytozome v7.0 (chr-ID scaffold_9; pos 48 3989 to 485008)
attctggtgggtggtggtagacggccgacgacgaggtgggccctcctcctcttcctgctcctgctccgatttcctctctcggattgaggcatggtggtggctggattagggtttccggttcggggtcgtcgggggagggctccatggccggcgggcttagactgtctagcggcggtgcggatcgagggtggagaggcgaggcggcgtgggcgccgcgggcggcggacggggtagggccgacggcggcgggcgagcggcttcctcagttagcgaattagcagttcattcccttgactagtatacacgattatggttgatttgttccataggacttaggtcaaacagaatatcaatttatatcctttcattcactgacctacattttttcatttagcttgtatataaaggagaatgacgaactgcatggtttgttccgagggctggttgaattgattcctggctatcatcttctacaatatattggtgctacacactttacttgactgaaactacttagtgattctaggcctatttataattttgaagagggttgtgaaaactgttgtttttgtttatcagtgccatttcatgaaaaaaatgtttggttttgaaacttccactgtttcaaacaaaagttatctaacgaaagcatgcatttaaggtcctacggtcaattagacgtgatgtggcatatgtggcatcgaatagaggctgcatttggaagcaatttgaataaattgaaggattcctttaactttcagaatttttttttttttgctttaattgtgaatagtggagtgtgaaaagtgacacgagtgcctatgcttctttgtgattcttccattatagcttaaattcattaatgcaaaacctttcatgtaacagttagtgctacattctgcgtgtttaccagtgattagtgttatttttggtttcaagactgacttatcgacttcataatctagtatatatatatactattgtgctgcggttcaactgatagatgctcctgagtgcagg

SEQ ID NO: 111796 - DNA, 1060 bp, Setaria italica
  Intron number 1 from transcript Si018185m (locus Si018185m .g) derived from phytozome v7.0 (chr-ID scaffold_1; pos 55 338 to 56397)
gtcgctggccttcacgtcctcttcctcgttcgccggtgagataggattccgtctttcttttcttctctgtgttcgtatgctagcgttcgcgcgggccatttgtttttggcctttggggaattagtgggttctgcttacacgctcacacggggaaatgtcattgaaattatgacttcgtgcactgtgcgttggcactagttttgcataataggatgcttcgtacgagttttaatacagacttcagtaaatggtaccagaaaggcagaaatgtatcatatgcatgaggtggagcttgtatagtttatcgctctagtccaatgtagggaacagaagaaaaattggggacttatgttggtttaacctgtggaaacagaattgtaaggtgccctggttagttgtctgaaaatattgaaatttgtctggctggtattatgaaaatctgaaattcagttattgttgaacctgttggttgatacggatggttctgtgaaatctgaaattttgtatcatggagtctgagcattcctgtaggctgtaattgatcatggatcaacaaatttttatttaataatctgaataagagacaaagttaatttgtagagtacttgtagagccagttgtgtgttagtgtccagactccaaacatgaaactgaccgtgctcatatttgatcgtttcagtgatctttttttttttgagttatgagaaggagcaaatataaaactctatatttgttgtcatccccatgtaccatctgatggattctagaccgtatgcatctgaattttttcctgaatcatgtggacatcgcaaactcttacaaactagctacatagagttgcccttttttctgtcctgaatcatctagatgtcgtaaaatgttacaaaacagctacatagaattcgcctctttgttttctgccctgaaccatctagatgttgctacatgttacagaccattggattgacattttcttttgatcggaatggaatccaatcctgctcttttatgctgctgttccccagccaaaaccgcgttgccaccgaacgacctgctcaga

SEQ ID NO: 111797 - DNA, 465 bp, Setaria italica
  Intron number 2 from transcript Si036328m (locus Si036328m .g) derived from phytozome v7.0 (chr-ID scaffold_9; pos 53 361652 to 53362116)
agctgcacacggcgctcggcaccgccaagtggcaggtgaattggctgctctcgtcgttcatttcgtagttataccattccgggatccgattgcggtagttcccttgctaaatttgttactgttttgtaacataatggatatattctagacagtaacagatgtaatactgctccacagaagttcccttgcttaaacgattaactgacaattgagcgtaccatagtgtttgattcatttcttctgcttatgagttgccgtatttgcaaaactgttttagaaaccaaactgctttaaggaccacatttatgtgaatgtatgtgattgaggttatatcatccattttatgtcaggggcccaaaccattatgaacgttgtttgtaattatagtacagaaacttgaacattgctattggattaaaaaaagaaaagctcattccttgatttgattttccttcttttagcttg

SEQ ID NO: 111798 - DNA, 1030 bp, Setaria italica
  Intron number 1 from transcript Si016544m (locus Si016544m .g) derived from phytozome v7.0 (chr-ID scaffold_1; pos 27 526336 to 27527365 reverse strand)
gagtcagacgaggcggcggacagccgaaatcacaggtacaaactgttgcatttgcgcgagatacgtactgatttggcacgtctcgtttcgttagcgcgtaatccgtagtttgaggattgtgaattgtgattacagcgaaaacaatgagattactctgtggttgcacaattacgtagatgaagctgtgaggtgacgtggtgggcaaatgtcagcgattcagcggtttggaatcgagtgctacgaccgtattgactaaggactggggagtgaggtttcgcaccaatttctgccgttgaccgcttccgtgcttgtcatttgccgtgcacacggggggtcaacgtcaaatgcgtgtcatcctgtgactaactgcagccagtcgtgttataggttgagaagtctttgcttattcttgcaggaactactagtttgctgttatctacatttcaaaagaaaaaaaaattggtgttaccttagtttctagaaattccctgtaagccaatttattggattgatttttcaaagtctatttattggattatttacaactggtattcaaaattttgttagcattaatgtcagagaagtatcaccaaagttggagaataaggacttatgaagattggattgttcttggtggagggtgaagtttttatttacatccacgtctattataactagctactatatggccattataatggttaaatgtcttttctgtgtttactattgatatcatgttttagtattctgatgcctgaacacaagagtaaattaacttcagttcttcactcagttagtgtagatttttttaaaatccctcaaaacatctaaactctccaatagtccaatccacaatcaggattaatctgtctttgaacttccacaattttttcatttctttgcccttgacctttatcagattgtctatttgttttttaatccactttgcctccagatagtcttgtgcaacctttaggtattgtttaatctgatattcattattcattatttgttggtgtgacctttaggc

SEQ ID NO: 111799 - DNA, 908 bp, Setaria italica
  Intron number 1 from transcript Si018982m (locus Si018982m .g) derived from phytozome v7.0 (chr-ID scaffold_1; pos 34 400394 to 34401301)
catcacgcgggcaaaagagattgtgctccgaccaggtgtgccctcaatcttggactactcttggtattacggtctaggaatttgaggatttggtttgttaattgggggttagggtttggatttgctggttttttatgcgattcaaatatggatggtacaggatgaggtataggtggattgccagatgatttaatgcctcaattttattatgggatgttggaatcttgacaggttcgtgggcaggttgaaggagcggctgctagtgccagggaccgctaagatgcgcacgaaattttttctgtgactttttttcttaaatgaacctaaaacattttgaaactttaacagggcaaaggatttgatgaataagggggtgtttggatacgaggtgctaaactttaacagtgtcacatcggatgttcggatgctaattagaagaattaaacatgagctaattataaaattaattgcagaaccctgtgctaattcgcaagacgaatctattaagcctaattaatccacaattagcaaatggttactgtagcaccacattgtcaaatcatggactaattaggcttaatagattcgtctcgccaattacactccaactgtacaattagttttgtaattagtctatatttaatacttctaattagcatccaaacatccgatgtgacgggtgttaaactttaatagggtggagccaaacaggccctaaatatctagataatgttttggacttctgttgttcctatagctaataaccaatcaatctcttatattgacatagttagacagcatatgtattaaactatgattactaatagcgaatttttcatcttgggtccttgcatcaaatttcaatatgcatatccatctaatgtcgctattgtttttcctgcagctta

SEQ ID NO: 111800 - DNA, 330 bp, Setaria italica
  Intron number 1 from transcript Si036002m (locus Si036005m .g) derived from phytozome v7.0 (chr-ID scaffold_9; pos 56 729944 to 56730273 reverse strand)
gaactcgacagggagttcttagggaaaaaggtgaggcccttttcttctccctcctcatccgtccaccattgccaaactgtccgtcgcgtagtcttagctccgattggtaagcttcaattgttgcttcttgatctgttttttgttgcttacgctggacgacgcttgatgcatacgagatgatgagttcgatgcagtttcttgatccctgcatacgatccaccagctcaggcgcatagaaattattgacttttaactcgctttgattgcgtctgttgtttcggttgcacaggggaagaagaggctgaaagggcggtgaagttaggagcgggc

SEQ ID NO: 111801 - DNA, 670 bp, Setaria italica
  Intron number 3 from transcript Si034166m (locus Si034166m .g) derived from phytozome v7.0 (chr-ID scaffold_9; pos 50 378237 to 50378906 reverse strand)
taacaaggcgtgctgaacaggaggctttagcaaaggtatatacataaagaacattgttaggcatattcaatagatgacactaaatgatcaatcttaacacggcaccatttaattatgactaaacagggagcataagaaatatctaaaatgaacactgtgaatcaaatggtacttatctgggtatcactggaaaatgtagtggatattgtcgattggtactaggaagtggcaatcacctatgctacttatttttttcagttcaacccagaacaggggatggatgtctttcttccttttggattttacaatggaaatttgccatgataatctcacaagtcacataataactccgatattttgtttcttctaaaaaacaattcctgtattttctgttttatggagtgatctagaagacactgttcacttttagtttcactagtcagtactgcaatgcccatagggagttgcacaaatctactgtatggacctaaccatgtctacaacgtgcactgactattaactcaagaaatggcttggctaaccatttttactttgatgatatggcatgtgattattattatattttaccacatctactaaaagtaacctactcacttttggtgatgtctatgaaggccttgcaggaaagcacagactcacttgataacga

SEQ ID NO: 111802 - DNA, 363 bp, Setaria italica
  Intron number 1 from transcript Si016426m (locus Si016426m .g) derived from phytozome v7.0 (chr-ID scaffold_1; pos 17 0998 to 171360)
tcgcctactacaagaagaaaccaaaggacaacgtatgtatacactcattggacctctacacaatcatagtcgactttgaatcttcctcatatttctaattaatggctggtgtccgatagatcgacaacattaattaacgaatgatgcaacatatggtgtgagtgtatatgtgcatccaggttccgctcaagtcgctgctaatagacgggaattgtaggggtggaagatagagggctcaaaacacatcatggccaagtgagtgagtttatttgctcctttaatttttttctttctttgcttgatcacaatctgaaaattctcatccctctttcatattccccccccccccccccttaatttcag

SEQ ID NO: 111803 - DNA, 799 bp, Setaria italica
  Intron number 2 from transcript Si015927m (locus Si015927m .g) derived from phytozome v7.0 (chr-ID scaffold_6; pos 30 861655 to 30862453)
gctaacaaaaagaagggtcacaagcaggcagataagtaagaactgataggcttgatttcctttttgccctattttgttgagtcaaggctgcttttcagctttggttaataggttgcaaaagtttaaagacgtgtttgcatattttcaatttgatgttgcattctttttttaaaaaaagaaaggcttggtagattcctttgcttttcaatttctttgttatcgtagacatggtgttttcagaaaggtacatgctgatatcatggtgcagttctggatttgcaaattaatttttctctctactgatccccccgtttttaatttggagggcatagttttctttggctcaaaaagcaatgaggtagctaatgtgatcaaattggccccattaattcttaagaatgcatgcagctctgttctctggtttgcctctttctccgcatacagtcacgcaggtcaccggatattaatgagtccatagcatacgcataactgccagtctctttggaagaatcaaattgctttgcatgcacatggagttagtaggggtatagatgtccatgagtgatttgtaaactgaacatgcctatcaaaactgaacagccaacagaaaaaaataaggctgaacagagggaatatatttatgtgctgtctttcatattatgaaaggtgttccctagtgcctaattttctgtcatgtatcagtttgtatttagtttctggtactgggtattaatagctttctttcttataattgccttttcttttctctgatgtaggaaggctgaagaagaggtcagta

SEQ ID NO: 111804 - DNA, 1003 bp, Setaria italica
  Intron number 1 from transcript Si017340m (locus Si017340m .g) derived from phytozome v7.0 (chr-ID scaffold_1; pos 32 319308 to 32320310 reverse strand)
caacctgcgtatcctggcgctgcagaactgcaaaggtgcggccatctcttcttctgccgctacccatatgtgctgtttgtctatttagtggatgagattagtgtcttcctggtgcacacggcaatttttcttgggtggcttatagtgcattttggagtacaccgttagagactggttcaattttacttggagagtcttcgtctcatgtactgtactagtattagggaattacttgtactctactttgtagtcctatttatgctactttgaagataaatctgggaaatgttggggttcatgtgtgttaggtccttttgtttgtgatagaactttcttgcctttgcaaaggggaatcctatttactacttttgcagcttagaaattaaaatgttttattgattaaaccgttttatcactatttttataaaagataacactttttaacttatttaaaaagtatgaacgtacatctttgaaaataaactcctttgaaggttcatttcatccttggcagaggcagggtttattttctgaaatcaggttatgtattttctcaatattgttaaattggagttatgaaaagaaggaaaaagttatgtgcaaatatttttcttattggaatggttccatcagtacagttctcaaagatttcccttcaacttttaagattgcagatactcatctttcgtttcaactttgattttgtttgtgtaatttggctatgtatgcctggtactactattctgggtaaatagtaatagctacccaagttatggtctcctgagatatccaatttccaacagtggttgtgggaggtcctggaattttgttattgtggctaatattactaatttgctatccggaaaagttatgatcgtcatgcgagattgtggatctttgttttggtgcactcatttttgtgagaatcccctgccattttcttaaacaaattctgttgagtattacagtttgtgccggttcatgtgtctctcaggtatctctg

SEQ ID NO: 111805 - DNA, 962 bp, Setaria italica
  Intron number 1 from transcript Si017215m (locus Si017215m .g) derived from phytozome v7.0 (chr-ID scaffold_1; pos 24 697136 to 24698097)
tcgcctcccgcctcctccttcgccgccccaccgctgtatgggacatcctctctttatctctcatctcgcgggctgatctgttgtgatggttggggctggatcatctccaatcgagtagcgttgaatggtttgattccgctggtcccttcaggcgattttgatcgctgtatgggtgctaggcgcatgaaagaatttcttgcctcgcgtaatgctgattaggcgtgcagagggatcgctaagcaagcattggaattgcctccgacgatttgttatcttgtagctgcttgcttacggtctaaaccggcgagttgggtttgtaatttggtacaatctaggggatccctgatgagctttgcaattacttagcggtgatctgccaatattttgctagtgtttgatggccggctcgaatgttgatgaatctttcagtgtgaaattttgacatgctatgaaactgaaattggctgcaggtgtgtttctgtcaaattcttgaattcattttccaaatggtcttgcttggcttgggtagttgggtatagatcatgagttgaaagctgatatgccactgacatctcgctcttcacgtagtttactgttaatctgttatcccatattgaatgttaattatctctctaaaaccacttgcatggtacaatcaatattgttatttgtgggaaaatgcttcgttgacaaccaaaaacgacatttattggcaaatagaagtcgacatcttggactacactgtatcagtttgttttcccttcttaatctgagaatgaacatgcaaatttctgtattattgcttatttgttcacaccttccacagaagattagttttccattttcaactagtataaaattcaaactttgtgctttattcttttgttttcacaacatatatgttttgtttttgtgcatttttgttggctgatataatgctgcttgaatgctgcttgcagaca

SEQ ID NO: 111806 - DNA, 895 bp, Setaria italica
  Intron number 1 from transcript Si019152m (locus Si019152m .g) derived from phytozome v7.0 (chr-ID scaffold_1; pos 27 654302 to 27655196)
ttcacagtggatccggagccgctcatacaacgggcgtgaggtcgtccacagggtattggagcacgagcccaccgcgagacgatggcttccctctctctcctttctctcttatccgcgtcagcaaaacaaatctacgtggcatcatatgaacgggtcattaattgcctttgtacgtgccctcatgggtctgactggaaccaaccgctttctttcccaagaagtgtaaaggaggaggagaaacttctccggacacacatattttacaagtttgcttgtccgaagcaaagccaagctgcagattgtttaagcgaactgttgggatttggggagatcgccatccaatcagaccatttatttattcggttgacgataccacgaggacctccctaaatcaaaaacaattgcggaaagatacggggcatatatgtgacccatatgaatcaacgagggttggataaaagttgaagggagctccatgtgctaagctagcgacaaaatatacaaatctttgtacgtatagaaaagaaattgagccttgcgagacttgttatgtttaagaaacaagaggtgaaattcattgagtttaaccttttacacctttgttttagcctaggttacctgcacgcttatcatccgatttagttaagacatgtttgtcaaaattcttttgcagctccgactccctctaactgacacaatgagccagtgtgaaagccacttttttctaccttcgtcagctcccgtagagtcgtttgttatagtactctcttgacatgcatgctcacagctaagcttgctggagctatgctagacacgacctaaatatgaacattggtcgtctgcgtttttattggacctagagttggtcaagatactattgcaaggcaagttggag

SEQ ID NO: 111807 - DNA, 778 bp, Setaria italica
  Intron number 3 from transcript Si039557m (locus Si039557m .g) derived from phytozome v7.0 (chr-ID scaffold_9; pos 51 632357 to 51633134)
ataataagccttatcttaggcaaagggctttcacagtaagtaccaatctttttgtctttggagttccatgagttcagcatggacctattcctgtttatatgttgaatctgttgtgcctgtcaatagttgtggcacacgcacaccctgatgaagtgattagtgtctgtttttctttgatcctctttgcaacgcttcagagttcagactacatccattcagttgcgtacttatatatgctcagtgattttcaggcctccttataatggggtgtgggggttctatgaagttcaccctaagccttatgaagtgatgtagttctgcattttaaatctaatcgagatactccggaaggatctaatgtggctgccacttttgggacttcggttcctggggacagcctgcatggtgccattccatgcagtggtagaagaaatggtccacgctatatctacattaagcgagaatggcttgtcccattttgcaagcctacatagattttgtttaaggcctacttcttgtttacctttctaagcattaacgtcagtgtttctgatgtctatagaaataaaactacaggaatcagaacttctattttatatcatttatagaactatttaactcaagaacacggccctgccctgcccatgaaactatgaatatatttggatctttatgtatactgaatttatttctgatgtttactttgtcagtgtttcaccttgttcatcacatgctctttcttgtcttattgcaaaggcagtttgctacttgaacaatc

SEQ ID NO: 111808 - DNA, 584 bp, Setaria italica
  Intron number 3 from transcript Si019628m (locus Si019628m .g) derived from phytozome v7.0 (chr-ID scaffold_1; pos 36 517927 to 36518510)
caatttcaaagtaacatgcggcagatatgagtaaatttactagcaaaatcttgatttaccatggtgcatgtgctgtgcgcctccctaatacaacttagccctgcccctgaatcttaggagatttgttagtcacatctctgtttacaaatgcgtcgctatggcatgtgtcagttaactttgtctttgactgctaatctatttataactgctgaaatagcaatctaatgcgcaccttaaacgctggaatttttaaaattaaggtagtcaagaacgatgcaatataattagtttatccttcttttttatcttctccaacttgcagtttgtaattttcctaatgttttttgagatttggatgcttttatcgtattcttaaacaccatgaggttttatatcaacacaccaaaatttgctgtatccatcaaatcagaggagatttgactgattgctaatatcctgtaataaatcagtaatgtaaaatatgcatctatactttgcctgacatgtatagcttttatagtgaacattttacaaacatttattcatgtacatctatggaaacattctaagttgcaggttgacat

SEQ ID NO: 111809 - DNA, 702 bp, Setaria italica
  Intron number 2 from transcript Si017350m (locus Si017350m .g) derived from phytozome v7.0 (chr-ID scaffold_1; pos 25 567364 to 25568065 reverse strand)
gcgtcgttcaagcaggcccaggttgtcaactaatctcatcttgttgatttatgtaatttctatgtaaaattggaccatttgatcctgaaattgcaattgcagacatatttatctaatccatatagagtgtttgtccgcagaaggaagcaatttaccattagtatcgcctactgagtacagtggctcgtacagagtgaagtctcttctgcaatttacggtttttaatatggttaggggtagtgggtaatgattggtgagtccgggtttctgggaggcttattagttgtagttgaatggagcaaaatggttatgaaaaaactacggttgaatatgaatcgcatgaagttcccaatacttaaagaatcatccattgtccgtgttcaacaactacttcgaaatcaaagtagaggaaatgctcacttctatgccttatatgtagggacggagccagtagggtggttgacaggggccatggcctctctttttctaccgtaggtctttagactatgaagaaattagatgcatgtatgatcatgaaactagtttgggtgttttctggttcattacatggtaaatgttcgctgcgaatgaagcccatgttgattttgtctgataagttccatcgaattattttgcgcatcaagattaacaggatactgatttataggctttagctggtggacccttggtgcaagctcgaaa

SEQ ID NO: 111810 - DNA, 1026 bp, Setaria italica
  Intron number 1 from transcript Si034364m (locus Si034364m .g) derived from phytozome v7.0 (chr-ID scaffold_9; pos 42 934497 to 42935522)
ggacaccaggtccatcatccgccgtctgcctatccctccctccgcttgctgttttcgttttcgatcgatccggttttctcaattgctcttgctgctgtgctagatttggctatggttaggcgttgggatgattattagcattgagtttgattcctgttaggtggatggggcccttcattagctgtgcactatcgtgcgctttggactgtgctccaaaaaatcaggacctacttctgtgccattatgtcattgctcctgagctgcatttggttggagccttggtgctgccacttgggcatgctgtacgacgaggggccaatcgctcggccttttctgctgccagtggattccagcatagtttcgcaacaaagcaagacacattccttgcttagttgctttccattctagaagataagaaacaagaaagacacattggattggacttgcaaaagattagctgtcgctgtacacttgtccaatagatgccttcacttgaggaagtcagcttgcattctttggtgccgcttattgtagcacaaggtttggagaattgctttgctggaatccattattcggcccaaacgaaacatgcatcttcaactgtgatttagagactttgaaattacacggtggactattaatttggaatagaagctcaacttttttcaggaaatttactaaaacatgctatgttcatgcctcctttttcttccatttttagtgttctgttcctttttcatctttcaaattttctgaatttaacaacctgttttctttctgagttgaatttaccaacaataagtgaaagccaatctcatttatgtagccattagtgtgcatacagtacagattcttcaatatcgagaaatgtacatgccatgactgtaaacatttaattaataaaaatgtctttgctactttgtttttattggcagtagttctcaaatgtgattttctgctggctgcaatctaagaataatttcactaatagggttcaattctaggcgctgaggttactgttgggaa

SEQ ID NO: 111811 - DNA, 968 bp, Setaria italica
  Intron number 1 from transcript Si015749m (locus Si015749m .g) derived from phytozome v7.0 (chr-ID scaffold_6; pos 28 6811 to 287778)
aaacctcctcccaagttacaggtaccgacatgtctgcttgttttcagacgtacatgcatctctgccttgtagtttacaaaggacgtactgtctttaattttggccgaattttttttaaaaaaaacacagggtttgttcgttattttgtttgctttttcatcttgactagaatcgtgcccgtgcattgctacgggcaaaataaattttgtctataagcatcaaacattatcgtgtgaagtatttatttctgcaaactcaaacacatgcaaaatgcccccaatgtgaagcaaaaaaataagtttgcaaagagtaataacataagtacatttggatattctttatctcaacttgcaaaagaataatcatgtgaccaattttcaaacaatatatggcagttaatcacctttacattgtattcgtttctagcaagctctaacggcgacttgaacaaccttcaatattgaattcagcagcacaataatcatgtggatacaagtagccaaagaccacccccatctatcccggatattttagggtgcgcggacgaggttccttcgatcgtggggcgcaaagaccccgtcaccgtttttgtcaggcacgaagggctccaaatggatgaagcgggaacgatggagcggaggaactgtgaagtacgacatttcgtcgtctctttgcgtttttagtgtagagagttgtgagaagacagagacaccatctggagtgtcccgtggtcgtcgctgtgtacgtctgcctgcacttttctgaattatttatgctagtagaaacgatgccttcttcttggtgctgcctccaggcttgcagccataaagccacctgcaccagcagagctaccgccacaagcaccagcattagtagtcatggctcaagtagtgttgcaggcgcgccatgtcctccatgaacaagcgccagcagcagtagtctccgtcctgcttatcgtctgtcctctt

SEQ ID NO: 111812 - DNA, 829 bp, Setaria italica
  Intron number 3 from transcript Si017231m (locus Si017220m .g) derived from phytozome v7.0 (chr-ID scaffold_1; pos 13 32989 to 1333817 reverse strand)
atcaaacgtccggtttctgtttgacgtaagtatttttttcctcaccatttcctgtttccaaatcatactgaatctgctgtcatttctgtccaaccataatagccaacatgatgcaaatattcgacactgcagataaaagttgtaagtgccagattgctcgtatagtatcatgaggaaatggaaaatttatatttgctaaaagttatgtctttcaaaatttggtgatcagaaacatagtttatcatgatgttcagaaacattagtttatcatgcatacagtgacagtctagtactgccatctcctgaaattgacattaaattggaattcatcggaagaacagaaaaagggaattttgtgaggaatatgttctcacatcaagggttcagaaaaccagaactcgtttaattgtggcttttcttaatctctactacacattaatacttgcttctgccttaaaacggttcttgcttttgttatgccagtttctccgctaccaataaatttaatctgggattaactttgttctacaaatttggttgagttttttcaaattgtgatattaacaaaaaaattaacaatatgtgtatgcccataaaactaaaacaaacaaaactgggagaaaacgctcaagctagagttcaaaaaaccattccgtgtccattgtaccagcttgtttccttccagtataacatgcatgcactacttgtccctctgcatagtttagcagaagttataaacaattttcatgttgccacattttgttagctaacttttgaactctgtaataatgcagaaacttattggctggtattaatattgcagttctgt

SEQ ID NO: 111813 - DNA, 699 bp, Setaria italica; identical to SEQ ID NO: 111367
  Intron number 1 from transcript Si037318m (locus Si037303m .g) derived from phytozome v7.0 (chr-ID scaffold_9; pos 54 501521 to 54502219 reverse strand)

SEQ ID NO: 111814 - DNA, 836 bp, Setaria italica
  Intron number 3 from transcript Si018592m (locus Si018592m .g) derived from phytozome v7.0 (chr-ID scaffold_1; pos 26 143214 to 26144049 reverse strand)
tctgtccgggagggagacgctcgtccgcatcactggtacatagccttctcacgtttcacctgcaagtcccgatgtatttgtcatgtttgaatgcaatggtgtctagttttgcatgtctgtttgtgctactaactagtcttatgttatttctatgaagagatgtagctatagtttctgaatatactgcatagtttggcgagttgagcttggcaatccacttgatttggttccttcatttgtattatgagtttgtagtatctggttggaagaaatgttagaggttatgctcagtgtttagctgaaagaactacttttgtattattcaagcacggcccttaagatcgcctccctttcatttacatgggagcgtttcgagtcatagctgtgcaagattgataatgagggaccagagagtttttctttggaccctctctcttcctgttttggtaggtgtctccatcttgctattgtgtatcctgtggtagtatacttggtttcagtcagttgcttttctgcgctgattgggctaagttattcctgctgggtccatttgctaaatttaatggaggcgtctatattatggaagtgaacatgaacatgacctgtgccattttatgatctattgctccagtgtgttctgttacaagctttcagactgccattatctattgtttagtaatagccttttgagttggattgaatcgtcttatttaacgatcataattaccagtattgttttcttaaagacgcaagtattttttaggtaatcaagaaccatacttttgttccatttgttatatttattaacttgtcaaatgttgcattgtctaggtgga

SEQ ID NO: 111815 - DNA, 677 bp, Setaria italica
  Intron number 1 from transcript Si038604m (locus Si038604m .g) derived from phytozome v7.0 (chr-ID scaffold_9; pos 32 258759 to 32259435 reverse strand)
tacaccgtcaccttctgccccggcgtgcccaccaggtaggaaccaacgatactactaccaagttaattttagtactaattttacatttcacaccaagtaaagaatgagtactcggtctggagtaagaaatggaatgtcatccttcattcccagttaaaaatgactgacgtaaaaataaaataaaatcccctcaaagtatcggacgagattcaatgcaaaagaagtggcatgtttgacttgattctttcatttaaccattctgttagtacttcatgaccggatttaggtaccagttactgctgagtgactactgacaactgacgtggggagggagggaggggtagttgaggcatttcgaggaggaaccggctagttaccaacggctagtgagaaaacggctaggaagggaagggggaggcagtcacgtgcgtccagctgtccacgtggacataggacaaggatgctgtacatactccgtttagccgtttggacccccacacatgggcacggcccagaacgaagacaatctagagcatgttttatccatacaccgtactctaccaagaactgaagtaccaactcccatacttgttttgcttgctgctgaccgtttctctccgatatttgttttgctcgtaacagcgtgaagtcgacggggcagaacccgcaggccgccg

SEQ ID NO: 111816 - DNA, 666 bp, Setaria italica
  Intron number 4 from transcript Si013756m (locus Si013756m .g) derived from phytozome v7.0 (chr-ID scaffold_6; pos 35 504845 to 35505510 reverse strand)
ttcgagctcactgggcatacgggcaagataagacggtgcgcttctgtttctgttgatgtttggttgtgctagagatgtttgttcttcccactgtacaagattttttgcctatgctttgaatttcaagagttatcaatatgtccaactttagtggatgaaatgcaactttgctgcttaatggtctgaaccacatggtgtttatctgtaattaaattaaatgaactgttctttggtgagttgagtgtagttagtgcactgttctgaaaggttgtgccacctagcctgcctaatcacaacttttagagtgacagaggtagacaagctgtagagctcgtggttacttgcgtgattacacatgaatgttgacgtgagagggctgttatcaagaaggctgcaatgaagcttttgtgtggtctaccatgttgcacttatttcacagtacatgaattaattgttgggcttattttctgtggtgctctttaaaagagataatatgagaattttttttcaacttctaaaataattttgagctaatttttttttcaactagtgtcactcctatatattcttaaatgttgctaggtgatatgcatatcatctttattggttcttgacacctataagctgtttattcttgcagcgtactctggtggccacttggaaagc

SEQ ID NO: 111817 - DNA, 643 bp, Setaria italica
  Intron number 2 from transcript Si015044m (locus Si015044m .g) derived from phytozome v7.0 (chr-ID scaffold_6; pos 75 52202 to 7552844 reverse strand)
cagcgttgaggacctcatcctctccgttggatctggtataacccctacctcgctctcatgctcctaagtggatgtctgatgtatgtgttggttgatagcaattgctgtagggataccttgtatggtcttgtagattgtttgatctttttgatgatacctgctgtatctatgaatctttgcctttcaattgagcaatagtggtaacattcttaatagtttcattacgttgcactggtaggttaacatagtactcagctgattaacattatcactacctttttaatgtaactgagcgattcatatatggatcatggattaacgatcacgtagtaactgtagttctctccttgtttgattctatctgtttctggatgcgagtaagtttcaatttgggccggtaaatatatcaatttcatttattttatattatcattctgtggttaatacctatgtttgttgttaaacttgatacatgtgacaattacttctttggctctaagttcctatgtatatttagtaaactggtagcaaattatgaaatttcttcaactcttttctctagttcacatagattgtatacttactggtgtgttgaactttgtttctaggtggtggtgctgctccagttgctgccgctgcccct

SEQ ID NO: 111818 - DNA, 721 bp, Setaria italica
  Intron number 3 from transcript Si034110m (locus Si034110m .g) derived from phytozome v7.0 (chr-ID scaffold_9; pos 55 701861 to 55702581 reverse strand)
gtcggtgtccctcaacaaaagtttggattctgaaggtatcatttatattaaaatcaattgagtgtgcaggattagattgttcaatctacaaatatctaaggtttcgtgataaatacattgctgaaaacgaattgatacagcgtcatgccttcaaatgttaaatacatcaaaagaagcaagctgatagttttttagaaaattcttcatacttctctagatgtctagagctctctcagatgatgtcttttgcttgttcccaattatgtttttatccttggggactggggcttctgaaacaaaatacatcttcttctggaaagtgaaaacatacaagggctatgcatttacagtgcatctctggtgaaaatgggcaaatgattaaaaacggtgaaaattcatcgaacagcatacattagagttaaaaaaaataaaactcggcaaatccatagttcatgtcttggtatacttcgtcgcgaaagttgatggtcaaactctttctagtttaatttatacgaaatgaccaaaattcaggtggatatgcactagatgacacagtttgtcctctagtgcatattcaaccgaaaatgtaaaagcctaaaagggaaataccaaaagaaacaaaaggatgcatctctattttaagagcaccacatgaagttatcttatacaacatttttcctgagcagatatcgttgtccagttcgtaattagctgtcctcga

SEQ ID NO: 111819 - DNA, 879 bp, Setaria italica
  Intron number 1 from transcript Si035436m (locus Si035436m .g) derived from phytozome v7.0 (chr-ID scaffold_9; pos 38 109942 to 38110820 reverse strand)
tcctccgacgtgccccgcgactgggtccgcgcaatgtgagtaccgcctccttcttccgccccgcagcgtcactggcttggagagttggactcctcccccccccccccccccctgcttaatgagccacctataatccagctctcaagccattcctagaggggggagaaatatccaggcaattgctagtggtaatttatttatttattaagcagtgcaagccgcgtctcggtgccgtagaaactggaaactgaaggcgaagactaggaggggtgtttcgggtacttgggagcacgatgatttgcaggctggggaagtggggcagggcccacctgcagagaggaagcttctcctggctgcctttgttttttcgtgtcttttggggtaacttcagcgattccaaattttgcggtaccattagtaattgctacaagtcttcagaatatgctgccatgggtgcactggctctgaagccttgagcccttgactattggcttcctggatctggttccaacctgtacctgttgattgccggctgtccaattagcactggtcaactttcctcattcttcttaagaaaacagtgattgcacagtggatttttagcaaaatataaacgtttctggtagtttgtctgaccaggttcgtactatgcctttattggcggtttcaaagtcaaccacaaatgattaatttgaatcggtgacatttccctcccagttatggcttgatcatttcaaaatggtcaacaaaacttttctgtacctgttttacttccggcggaaataactgtttcaatgctccagtagtttttactgctaaacggaaatgaaatgctgcgcatactgacgatacattggaacatatgcaggacagaggagg

SEQ ID NO: 111820 - DNA, 757 bp, Setaria italica
  Intron number 1 from transcript Si013859m (locus Si013859m .g) derived from phytozome v7.0 (chr-ID scaffold_6; pos 32 82638 to 3283394)
cccttttcatactgggtatgtctataatgcctaatgaaatttcttgccctcatgacatggctacaaggctattatcagtgcggagtttcatattgtagtttccaagactgacatgtcatcaaaagaggtttgggtagacgaatgaaacaagatccctcaatgcagagttttgtttcgtggtttcatatgcaaggcatttcattagacgtgatgagatgagatgaaattctctaatcctcaatgctatttcatcaggtttcatagtcttggaaaaagtgtatacagagtttcatcctgatgaaactccttctcccctctctctctccgtaattagcctgccatatcatcaaaatttttgatgtgtcacattattaaataaagaataaaactcctgtaaaaagtgggaatagcctaaatattgcaacaagttttattttcttctaaagaacatgttgcaacaaattttcaaatgcgtactaaatagttagaatcgtaagttgggatcacactttcgcaaccaagattagcccggagcacacaagttacacactctcaactgcgtgtggaggccgagccactgtggcatgctcaccaccgactttagtcgtgacgtcaccgaccggccggccgaaacgagcggccgccagggcccagggccctgccaagcccaaccccacgacttttcctccgctcggacacatttgtttgggcaacacaagcagacgccgccacacactgaatcggatcgaatcggaat

SEQ ID NO: 111821 - DNA, 489 bp, Setaria italica
  Intron number 1 from transcript Si036402m (locus Si036402m .g) derived from phytozome v7.0 (chr-ID scaffold_9; pos 53 78105 to 5378593 reverse strand)
cgccgtcaccggcgtcaaggaccaaggagattgcggtacgaaattaaacacgcgccacctgcacacacacacacacacacacacacacacacacaccacatgcatgatgaatgtaaaatgaataatagtttcaactgattttaagtagaaattggaatggaaaatcaattgaagttaggttaaaacatactgcatgcgtggacatgtctccatctcgctagctttttcgtaacgcacgcgtgcggtcaaaacggaaaggttaaagcggaacagacagtagactagtggagattgttgtactgatagaagactagagtctactggtgcgtgcacttttggtaatttgaatcaataaggaagtttgttttttacatcatcaattagacaattactggagttttttatgtggttatcagtccaaatacaacatggcagcatacatgcactgtcgcaggttgttgctgggcgttctcggcggtggcggcggtg

SEQ ID NO: 111822 - DNA, 949 bp, Setaria italica
  Intron number 2 from transcript Si014096m (locus Si014096m .g) derived from phytozome v7.0 (chr-ID scaffold_6; pos 10 160007 to 10160955 reverse strand)
gccaagaagaacctcttcgttaagagaggtgggattgcaatctactgttgtgcgcttgctctcttgctgtcgcattagtattttgcatcatacatgggaagtttggacctgataggttagcattgttgagcttctagttggttggaagttctattgggagcaacttgtgatgtgggtaaattgagctggataaagaaactttgcaggctttagtgaacattgtttgtcattgatggatgatgtggtgggtggcagggtaggcgtggagtacagttgaagcatcgaaagcttagtggagtttaatacttattttttaattaattcatcaaacttgataaggaaaccccactatttaggtcacacaggacctgtatcctgcatctgctacttgatgggagccttttcatttattgttacacatgggaccaatggagaggaatgtgagcttgaagtagagaagttctgctctttatttgtttccttaattttcttactcaaacaaactttcaatcttcgataaatgtggataattattgggtaccgacgttcctgttcttttgttaagcctcatgcacatagaaaagtctgaacaataattgacaactttggcattgtgcttttaaatctgattgaattttttcctgtattatgcatttgatatgatatgcaaggagaaataattcctatttggagatttgaggtttcaagaaattgttgtgaattttagagtatgttttattagttggtacaaaacactcgtttgagcttctgatgtatgatccattacaacttaactgaaaaattgtggttacaaatttgtgtgatatccgtttatcctttcatttaatattttgttatcccttttgatgagttgtttgattggtataattttctccatgtttatcatgcatttgaaagaatttaaacctattttcaggtgtgggaactg

SEQ ID NO: 111823 - DNA, 1025 bp, Setaria italica
  Intron number 1 from transcript Si018414m (locus Si018093m .g) derived from phytozome v7.0 (chr-ID scaffold_1; pos 32 531846 to 32532870)
tcacggaaaacaacatagtgtacaaggtaaccgtaagcggtagtcctgctgtgttgattcgttggttgtgctggagatgtgaaatattggtgctcaatgggtgtgaaattttcgcaggcgactagaccttcctacttgccgttcatggggatagtcaagaaagagattaaagtgcctctccatttgatcgttgatattgtagttgagcaaggtagatgagagcataggaacctattctgatttcgactattgacatagtgacatgttacttcttgtttaggcaaaccagtagtagcaatacaccttcttggtatcctgaaattactgcacggtgcctttccatattcatatagtgcaaatctgctttatgatggatatgaagctttggaaacatctatttttttaaaaaaaaaatcacctctacactggcttggtggattcatttgcgtaaacctatcatttctgttacctactttggtcatgtgctgattttttgtttgttaaacttcactgaagaaacacatgttagtgaatttatttatctaatgtttaagaaaatatctgcttttcttacagttcatatctcattgatgaacatgaaacagaaagttgtgaaatgaccttgtttgtatgtttctgaaaaaaaaattcaattatgcaggctgtctacaatctgcttatagcttatacacgtttagaatagaaagcatagcccatgggaaacctgctcccgttgatgaactgcaatttcatggtgtccatgatccagatcttctgagaaaggtatttgctgtgcgccattgctaataacggaccttataagatgtgtgttaccttacacctgttaatctgctatacaatatctttagtactatttttatgattgaaaataatgatccagtctgggattttctgcagtcacaaaattagcacatgtatacatgttcttagctgattgtttggtgctgtctgtttcattatttcgtgaaggttattatcagagaagcttccaggagaacacaaga

SEQ ID NO: 111824 - DNA, 803 bp, Setaria italica
  Intron number 2 from transcript Si038525m (locus Si038525m .g) derived from phytozome v7.0 (chr-ID scaffold_9; pos 17 028551 to 17029353 reverse strand)
gatctacttgtattaagacttcacattagctaagggtaaggaccccacctccttgctatgttcttttatttttttcctatttgttgccatgttcataaggttttcgagttgagtgtttttttttgtttctttcagagaggtaggcagtttggcataaacttctaagcattttaattggttagttacgcctttttccagtctgatataggcaatttatgcgatgtacttgtttatgaaagaaaaaaacaatgtactccacttgtttaattcccctagatcagtctcgcacaaagccaatgatgcagcaaatccatgctttttttggtgctggaggatgaggggtgacgacttgtttcgtatgtatttagacttatcatttggtttatggtactgagttagatatgtagactacttgcttttttttacagaattggagttcatgtgataatggtgttgatagtgtgatatttgtgtgagctagggaaagtattgttctcagttagtcaaagtatgcttaggcaaatcactattatcagttaagcaaagtaatattattagttaggtaatttttttgttacaaacaagcaaaacaataatttgcaaaggcaattttttgctggccttattttcttagtgcctctgttgattatcaggatacacaagctagttcttcacctcatccaactaattttttcttagtttgtccttttattatttgctacatcctaactgatttggtgctttttttttccctcaattgtattgtaggtcataaaagaagctcatttgttacgcaggtagta

SEQ ID NO: 111825 - DNA, 421 bp, Setaria italica
  Intron number 3 from transcript Si016827m (locus Si016827m .g) derived from phytozome v7.0 (chr-ID scaffold_1; pos 29 943194 to 29943614)
aaataaggtctactttctattattgttcagccttttccattcttcctgataagaataagatcataacttctctgctgtctgcgctgctctctgattctgagtcaatttagctgtctaataatggaacattttgattgtttgttatcttggtcagcttttcttacacatctagaacagttcaggctgacaatgaaatacacaattatttcatgcttgcgaactcgttttgaatagaaatgatatgggggatcgctccatgcaaattgaagttcgctatcctttaaatcctgatattatcgttaatatttaaacagccttgtagtgattttattttagttgaagaattcgctattacacaaggaaaataattaattttacatccccagattgcttcacattcctggtgcaatacttgctgcgg

SEQ ID NO: 111826 - DNA, 653 bp, Setaria italica
  Intron number 1 from transcript Si034630m (locus Si034630m .g) derived from phytozome v7.0 (chr-ID scaffold_9; pos 40 979687 to 40980339)
agcacgctacgcagacccacctcgcctacctcagtgtctgactgaccccattctccctttcacattttaattatgtctttgtttaccattaatcattgctagatcagaaacatcgtaaaatcggctgcacaaaaacaagttcttttttcctgatttggtgtggaatcaaccgaagacgggaagcgagcacgaaagaagttcggttgaacaggactcataatgaaaaggacttttgtggcggctcatctttttctactcctagataagaacacacccacttcttgtaccaccgaaaacaaaaagtgaagaaaagaaagaaagaaagctgggagcgttggggcacgtgagcgttatcatgcaaatcaacttgtgtcagccactaagcacaatcacagctcacatgatcacatccacacatgctttactcactcctgctcctgtactacttgagtgagccaagcaaaaagaaaataaaataaaaataaaggtgctgttaaatcaaaaaatgaataaatagatccaaaccaagagaataaaaaaatgtgataactaggaaggggaaaatataataaaggccttccatttccactccctgacctcctcccccttcctccggagctgcgaaattttgtgaccccagccagacgacgcgg

SEQ ID NO: 111827 - DNA, 938 bp, Setaria italica
  Intron number 1 from transcript Si019415m (locus Si019415m .g) derived from phytozome v7.0 (chr-ID scaffold_1; pos 28 607450 to 28608387)
tcccaactaaggtttttcttggtgttctcccgtaccagattgtgatcgattccgagcatttgcacaagctttaccgtctacaacaccgcgacatgaatctcatttccgtatggtgcttgtaagtccacatgtaccgtatacatgagttttaaatatatgcgtattttatttcaagtacctaagcaacctattctgtaggatgcaatgtagagaggaagaattgatgcacgacaggttcaaggtagcgtaccttgacctagcacgaataagcaagccagagcacaagctcaaaatgacggaaatgatcaaagcacaaatagaagtagtagagacacaagcggagaaagatgctataaaaataaaaagcccacagagaagaaatgcacaaagtgtctgtatacattgtaaaagtaatgaagaaaaaggctgacaaggattgtatcatggctccttacggttttgaggaagctagttttaattactacatataaactaggtgctatttaatgctatctataatataaattattttaatataatgtagaaaccattggatttgcatcattattttacccaagctaggagaagtaatggtccttgactcagccagctatcatagagataggtacaaggatttcataggcactatacaaaagtaagacattccttggaagtaattaaatgcatgtttatattctatgcacctaagttgtattactaactcgtgtctttatatcctcaaagtgcatacaagctttacatactaaaaggcggggtttagaatccaaaaaggatgaaagctattaaaataatatatcatagattcgtaagaacataaaaacttagttttttcaatatagtgtagacttgtcattaataacaacccattatttttctatttgtttgcagtgccacaagcaacctcccggctctgtgct

SEQ ID NO: 111828 - DNA, 797 bp, Setaria italica
  Intron number 1 from transcript Si019862m (locus Si019862m .g) derived from phytozome v7.0 (chr-ID scaffold_1; pos 28 840053 to 28840849)
agacaacaactgcacaacttgcaagaaaatcataggtatgatccagaaaccctgaaaaagtttcaagaacattgttcattagaaacttgtttatccactattcagagagagaagcacaatgcaaaagtaagaaatatccaaaaacagctacaacagtagcacattcaattattatgtgaaaggctagacaccaaaatacttgaggaacatagaattgggcacctggaatattcgatgtaaataaaccaaaagggctattcatagttaaatattgcttttgtaataacctcattcttggatctaaaggggaagtatcttttcagtaaaatacatgatccaaaatcctgttgctagttttaagctaccaagtattgcattggtttcctgggtaaccacacaagaaaattctggaaaccaagctttgaccctaagcatatccctcttgcatatggagattgctgacaaattacccatgtatcaaatcagattccaatgctgctatcattgtagactacgaaaacattattgataaaaagatcacctatggtggccaagatctttggctagacagtgtatctataattcaaaataagggtgtggatgtacacctagaccacccaggtttgaagtcctcgtcgagccgaatttgggtgcctattttcttcttaatataaagccacctaattcctcttaggttggcctagttttttatccataattctaaataacacaatataaaatgtattacatatcaattggttacaggcagttgacgggagaggatctttctgggctta

SEQ ID NO: 111829 - DNA, 598 bp, Setaria italica
  Intron number 3 from transcript Si034160m (locus Si034160m .g) derived from phytozome v7.0 (chr-ID scaffold_9; pos 48 379927 to 48380524)
atccctccgtacaccacttggatcttcctggacaagtacagtgctgttgcccccttttgattacatatcattaagctgccttgcaatttttcttggcgctaatgggttcatgtgccaagttgatcttatgatgagattatggactggatagtcgatgatgcatgtgcttttatgatgctcaaaaccaatttgggagtactttagtcgtataataaaatataaattttggacaaaagagcaaatttccatacccagttttgctttgggaactgcaggagcatctgcaatattcatatataatatatgtttactatcgcaaatacgacgtcttagatagtggtatcctttgtgttcgtatgctttataaatgggatgaccatgggcactattttgtgacattcacgattgttctaagaagatttgactgtatggctgatggttcatgcaaacccacctgagtttatttgcttgattaattccattagtagtttatgtgcatgcaatgttgttgatatagcatgtcaaaataagtattgtatattttttttacctttgatattttactctcgtttaaacaacacagcacagaaaccaaaga

SEQ ID NO: 111830 - DNA, 780 bp, Setaria italica
  Intron number 1 from transcript Si018411m (locus Si018411m .g) derived from phytozome v7.0 (chr-ID scaffold_1; pos 87 66117 to 8766896 reverse strand)
cgggtaataatgatatcaccctccctgtcctttcttccgccttttattttttgatttgattgcttgcttgctcatgtagatgtaggtaggttcttggaacctctaggcatgcctggtgtagtctgattctcgaacgaaccctcgcaatcttaggttacccactttggattgtattgtgtttgttctgctggaggaaatatgaatgttgcttgggctggcactgcacaagaatttgggcgtgtgggttgggccttgataggttacaagctgatgccgttccatggcaaagctccgatccgagttcttggttgggagtagcgtgtgagcaggggtccgttatttaggattctgtaattgattgatgtctcttttagtctagttatcaactgtgttgtgcataaatcaattgaattcggtgcttggccgctggttcattcttgcgttgtaaaataaaagaaaaaactgtagcatccttacagtgagctgtgaagtgggaattttgaggatgtggattgaggaagcattaagtaatgtacattagaagtagatgggtctaccaggtactggaatccaacccagctaattttcttatcgctaaaatggactgaaaagatatcttgtgattctagttaaatatacttcttttcaggtatccaccttgacctaatgaatcattacataaagtctttactcattgcatcatcctaaatcaagttctgtttttattaatggttatctgagtctgtcactaatagtgcgattaccttcttcaaggttgtg

SEQ ID NO: 111831 - DNA, 514 bp, Setaria italica
  Intron number 1 from transcript Si038526m (locus Si038527m .g) derived from phytozome v7.0 (chr-ID scaffold_9; pos 53 88851 to 5389364)
gaagattggagataagcagacagtaaaaggtatgctccaaaaaaacttgcatccttctcagtcttttagcgtacagtattcaagaaatctacttaacccaagtgatttacttaacccaagtgattttactgaagtcgacaatatacgatacacattgctactgtcaaacactgtgatttagtcgactgactaggagataacagataagatggcctcatgagctgtatggctgattatctcaaataaagcaaatctgatttcccttactctgtacattagagataaaatatgtcaggagaggacactaagattcacttttacctttgattggctcatagacaccttagtaatttagtagttggtccttttggtgaatgattgtgtcatttccatgctggcaccatgtacttcgtattattcttacatcagctttttaccagcagcttcttccatcagtccatcaccttattttatcagttttttactctcgagagccagaagtccagaaccgaag

SEQ ID NO: 111832 - DNA, 656 bp, Setaria italica
  Intron number 1 from transcript Si017677m (locus Si017677m .g) derived from phytozome v7.0 (chr-ID scaffold_1; pos 17 80338 to 1780993)
ccagtaacggcagcggcaaccctctgaatcgccgggtcggtgagctgtgaattttgtgttctttatatgcgcgtcttgatttgacaggtttggtctttgtttgactttttcactactgtgatcgctgtatgatttgggtatttgcgtactgcgatcctctgaactgatgggttttaggcggtggcaatcacgttcttcttcgtgagatttcattttgtcccgttctccttgttttatcttgtgggaaatgaaatcttgagcagcgttctgtttctgaatcatttgcagctgcagaatcatcgtaaattgtgatatgaataaccttttccccttgagatgacaatttgatcttgttagtttattaagaaatggttgatcggtgggtgctaactggagattgttgaatgatccgtgctaatggtactgcaattgccaagaatctgatacgtgaatcgatgtgaggttaatgggctactgtgcttgatgtcaacaattcattttgtggacctctatcaagcttttagaattttagaattaaaacgttgtgctagcggcagttgtgtgtccatttattggttctggtggtacggtgccaaattgacattgcctttctgatatcagaggaggaatagcttcaaccaagggaggcggaggtt

SEQ ID NO: 111833 - DNA, 957 bp, Setaria italica
  Intron number 1 from transcript Si017456m (locus Si017456m .g) derived from phytozome v7.0 (chr-ID scaffold_1; pos 35 8226 to 359182 reverse strand)
catcgtcgcgctcctcgcgtactccgacgaccacggtgcgtgctcatttttgattaattattcgtcttcccctgttactttacttttctgctctattcttttttttttgtctgctcgtaaagaataaataagtgaagctttgaccctacgctacgctacgctgcttggtccatctgcttcaaacaaactgtccctgttacaaacttgcttcttccttgccctttttaatcactgatggctcctcttgatcgattagcttgtttaacctcatgtaagttctggatacccaccagtttatatacaagcaaataagaactaatttggattagcatgaatatttcttacacatacatgctggcaaaattttcttttcttttttggcatgcacgcattgacgactttgtttacccctcagtacttatttacaagtcatgctttatatatactttttttttcctttttgagggaaaagaaatagctttattatgtagactcgagcagtgttgctagtcaccgagggggaaaaaatattgcaaataaaaatgaaaaacaggagggggtggttgctagttgctacagctgcaaagggtgcgcgcgtgacatcactttactcccctccacctaacgagaggagagaggaggagagcaacggctacacctcccgcgtatttatttctttttgtaccatctccactcctttcgtcaaagtagaaccaaacctgcagctcgccgatcagtttggtcgtcgctgtcgattcccttcgctttcacagttcaccccgcggttaaaacatactagtaaacacccatgcatgcatgttcctagtcgtatcaaagaaattacagtgcacagtgtcctcagcaaattaaccattgaggaagagcaagtaataaattattgttactgcgtccgtgcgtgcagaggaaggcggcgcgctggtcctggagtacctcgcc

SEQ ID NO: 111834 - DNA, 827 bp, Setaria italica
  Intron number 1 from transcript Si017048m (locus Si017048m .g) derived from phytozome v7.0 (chr-ID scaffold_1; pos 67 6458 to 677284)
agaatcccgccctcctcaacgataagaaccccgtggtacgtccttcgcccttctcctttgcttgcttggggggaaaatgcgatctttggtcggtttcatggttcttgaatctcttgatgcttgctgcggaggatgagcgtattagattcgagaggaaatgatcttgttgggtgtagaaatgtcagttttttggttgtgtattcctggcttggttttcttagtcggttcttggatttcgacccggcggcattggctaatccgcccttggcaatgcttttctactagtcctctttttatgaacagatttctggggcttagcttgcgccccctcctttgattgcttaattgttcatttgctccgttgtgtagccgatttgtttctcctgctggttcagtctgtctctgcccgttttgatgctttctgggccaaaagatgatactggtgatggattgggaaaggatttttgttgtgtaatcttgatttcttcggccttgttcaaaaaattcccctattcggtacgcccccactcgctctcgagatttgtcaagattaagttgtttggtatgctttgctttgatacttcttttaaaatctctttgggcatttcaggggggtcgctttcatatccccttttaccgcattgcatttgttgattcagacgtctctgtttcgtgacctgattaaattggatatcctgtggatccgtgatgcacgaacctgattttatttactagcaatagtggcttttagtcccttcccaacgcaacgagtcatttacaacgttgtgctatcttacttaacttctctctgaaaacataatttgcag

SEQ ID NO: 111835 - DNA, 870 bp, Setaria italica
  Intron number 2 from transcript Si014301m (locus Si014301m .g) derived from phytozome v7.0 (chr-ID scaffold_6; pos 31 192459 to 31193328 reverse strand)
actcgccggaccgcgcgtgctcgctcgccaagcaggtgagccgctgcttcctgctcagaatcttcgcgactattgcaacatatgcgtttagatctgtagtttggtgggggataatggtagttgctcgtaagctaaacccctaagatttgtatgccaagctgtgatttgatgttttgcttgttgatgatttaggctgattcggttcctttaaaccaatgtatcatgctttattttagattcctctatgcaatggtagattaactatgcttgcgtcagtaagattcagatcctcaacatgtgtgctgtttggtagtgtaaatatttttcggttatagtcacattttggcatgtgttgactgttaagcgtggtcagatgctttggtagctggtttcttggcaacctgcagtagtggcatcccatgccgccatgctggctcaaattgccgaatgcttccaagatgtgattgttaagtatcttgcacagtgtagtcccacatgtttgcttgctactgggcaagtagtcattgcatgtgctgattgattaatatcaagagagttccatgctacctttcagaatccgcagcaacttgctaaatccagattcgggaattaaaataaaactgtggctgtttttgttggtcagcttgtgcatctagaggtttaaaattcatagttccaaactgtgatgaagcctttcttaatcttctgactattttatggcgttgaatgcttattcatgtaaaagtctttctgatgtagagtttacaatccaataaagctttggtgcaagtaatcactgattagccaatagagttacagctagcacataatgttttatgtgattataccctacttggttccaggccttcg

SEQ ID NO: 111836 - DNA, 806 bp, Setaria italica
  Intron number 2 from transcript Si040271m (locus Si040271m .g) derived from phytozome v7.0 (chr-ID scaffold_9; pos 57 638595 to 57639400 reverse strand)
acgccgtcgtgtactgcttcaaccttaaggtcagcgaaatgtcacgtcgattttacgtcttgtcatgtttacttccgttacttacgtacgtgctccctcgttttcctcactcatgcatttgactactgcgaggtgcaaacggtaccttttcccgttcttgtagcgttctagtttcacataattcaaattctaatacaataaaaccctattctcctttaaaaatcatggttaaaaatcactcggagtaattaggatgcatttggttttaaataaaagatgcaaacatttgctgcacctccatggtaccagttagagcatgatctttaattacaggcatttcaacttttcaaaaaaaataattacaggcatttctgaagaagaaattcaggatgcaaatttggcagaaaacttgcatcacttagtgccattgtcatcaatttgtagcaggctatcatacagaggctgaggagatacctgaaaaaaaaaactgcaatgcagcatgatggcagcagaaagcgaactgattgtttttcctcccggagcgtagcgttgcgtgagatctctgaaaggagcgcagtgggtctcgtacgtttccgttgggcaggcttggagtatgtagatggagtgatcgtatacgatgagccccctggtaggctggtaccacgtacagacagattagctctttttcccggctgtccttttctcccttgtcctcggaatctgctccggctgtgttgtgtgccgtgcatgcgcgatcccgaagctctagctaatggtgaatggtgttctctgggttgtacgtgcag

SEQ ID NO: 111837 - DNA, 923 bp, Setaria italica
  Intron number 1 from transcript Si035266m (locus Si035266m .g) derived from phytozome v7.0 (chr-ID scaffold_9; pos 11 302208 to 11303130 reverse strand)
actgccaattttaagcatagcgtaagccagtttgatatcttgcttgttttccaacatgcattgtttttccctttttgtttgacatgattcctttgttggaattaataagtggatataatggctctaaacctttagtactttggtatacttgattcgagctatagccagaactttatattccttcaacttgcctgtgatatgagaagcttaaaacaatagcagagtaggcttgtatgtcgccctacatcacgatcagcttcaacttgcctgagatttagtgcttttcatgtatgagtcttcttgcacatactttgctttagatctttagtactttggtaaacttgattcgagctagccagaactgctagtgctaactgaagatgatgcagatttccaagattcataaatgacttcagtgtttctgtgacatgtacaatcttaaaacagtagcagaggcttgtatgtcaccctgcattaggatcagcttcaacttgccagagacttagtatgtttcctgtatctgagtcttctagagcatactgttgatcactgctaaataaagtaaataccatctgcatcaatcccacgcacatgatttctcatcaaaatttatttagccttacaaatctccaatggttggtaaatcctgtcagtcagaatattatataaagcttgttattgattgttgtgccaaatggttttagacttttgataagtcagtgtggccacgccccagcttattttttgacaaaactaatttattcatattagcttctgacatagctttgtttcacaaccaatctttacttctgtcgattttgtgcatgacagtatatgctctctggtgttgtgcctgctatttcactttgttactctgaattgtgctgtttacatcaatattcttgcaattgttactataggtc

SEQ ID NO: 111838 - DNA, 491 bp, Setaria italica
  Intron number 1 from transcript Si020023m (locus Si020023m .g) derived from phytozome v7.0 (chr-ID scaffold_1; pos 15 72138 to 1572628 reverse strand)
tcagggatttagttgtaagtttcttcaactcccctatcaagaaactataatgcgcgcaaagctagcatgtagtgatcagcgatatctgttttcagttttgagttgctcaggcctctttgcatattactgcgttctatttttacagtctatctttctttttcatccctccccatgcattttttgacctgctgttcacttatccagtgagaacttatataatgcttttaacaaatagtattgtgtttgatatcttcttttaacaacattttttttattcagtgtgcctagtcccacatttttttgtcacactttttcacgccatgtgctggatcactaattcattttcaaagttctaaaactgtctcacattttttttcacagcgcccatggtcttttttttgttgctcaggttcttttttatgatgtctttcatttcattatcccttttttatgcagataccaaatttctcaaagcgtgggacgaatcgatt

SEQ ID NO: 111839 - DNA, 939 bp, Setaria italica
  Intron number 2 from transcript Si035797m (locus Si035446m .g) derived from phytozome v7.0 (chr-ID scaffold_9; pos 10 732057 to 10732995 reverse strand)
gacgcaggtatggtttcctacaacaaacactttcatgcttcagttttctagtacaaatcttacccttgagtatatcataaccgaataaccatatcagttattaaggttcaacttgcacatttatgatatcttgctatcaagctatggtatatgcggtgaagggataggaagtaatatatgcttggtatggcatgattataactgcaagtgtgtaccaaattgacctgaatgctgaataatgcactttagtaagaagccacagcacatttaaataaaattacctgcaaatttgacacacaccacaaaaagggatctgcaatgtgttctcaaggataagttctaatttaccatcctctactttcatgcaagtacatattggaccctttattacaaaatcagctatttcacgttctcaaatttgagaacctgtgtaattttcatctttactgtggtattggtagtggtttgctcatggcatgcggctgggctagatttgcttcgtcagcaaactaactagccatgtcaacacgcaagctacctcatacagtgattcacaaggattacagggtaagagcatagataattttccttcatcttgcttttcatcctcattccctctaccctgtatgtacctgaataccaataagtatccacataagcaatcaacattgcaaaaccactttgaatttgagaaccatcttgaagaatagttgcatattgaactggtttaaaaaatgggtagtaaagaaccagttttgttgaagaggatataatctgtactttcatgaaactagaaagggataagttggatatttccttttctttcaataccattctttactttgtttttacttcctctatgtcaagcataaatgagataaaacttacatttcccttatttcaggaccggtttattgttttcaactatctttactagtg

SEQ ID NO: 111840 - DNA, 701 bp, Setaria italica
  Intron number 2 from transcript Si037170m (locus Si037170m .g) derived from phytozome v7.0 (chr-ID scaffold_9; pos 14 159981 to 14160681 reverse strand)
tttgttgaaggtaaagtattgcagtgccggattagttttgacctggaactatctttgttgttgtgcaatacccaatgctgttcaaattttaatgacaacatagatggctgattgatcatgacttcagcatgttcttggttcttctgattcagaaatgagtgtataaagatgcattcgtcacatgtgtactctggattgcttattttctttaatcatgtggctttgttcaaacatgagcatacttttgacttcatattatttgttttttttctactgctcttggcaacccctgatcatgccagatgatgttcctgaaaagttgtgctttctatttgcttcctcctttttgtatgtgctagtttgctcccgacatagagtccatccgattttcattgtgatgattataaccaacaatattttgaaagtgttcttttaggaagatgctatatggtccagattctagaatgcatattggttcatgatattgctgaaaagtagacattggtccggattctagaacgcatattggttcatgatattgctgaaaagtagacattgttattggtagcagattgtgaacactgaacagtattttctaattatcagttaaaatagattgtgaacacatattttagttgcttctttaaaaaaaagaattgacttaatcttgtccttgatctttctcttatgcaggataattc

SEQ ID NO: 111841 - DNA, 951 bp, Setaria italica
  Intron number 2 from transcript Si015198m (locus Si015198m .g) derived from phytozome v7.0 (chr-ID scaffold_6; pos 34 317028 to 34317978 reverse strand)
cacatccttgacctccaggggaaggtcctctactcgcaactttttttgttctttacttttatttgggccggtttggttgttcttgtgcttgcatgccttattacttattagcatcaagttttttttggacatgctgggaaaatgttacacagctaaaggttccgagatgaatacgcagagaacatgcgtatataagtagctgtgggattttttttattttttagtactgattaatactgtatttatagctaaaaatatactcttaaactaccaaattcaaaaaaaaattatagtcatcatccaatgcgaggatgaaattcatccaattgttggacgaaaatagttattatttgtttgatgggcactaattttgtcggcctaggacgaaaataggtttcattgcgcccgctagacaaaattactgagtgaactgttagtgtcaatttagatgttaaatacatacgattttaggggttattagaacacgtgtgtaaataaagtgatctaattaaggtaacgtaaatctcctttgttggttaagtaccttggtcacgtccaattgtgtgtaaactcttgctgaatgaaatgcttgtctaggttaatttttcgaaaaaaatctaattaatgtaagtaaaccaacatgcttagataccatcttctagcaccgttattgttccattagtttgatataatttcattaattagtaaactatcacttttggtgtacaaattaaacacatgcttatgtcttggcaatgtactactctaaatcctaacctagctaacatgctattaatagcatattgttttgaatgaacatgcacgaaattgtgcctatttcattggtagctaccaaaaacatatcaaactagtgatactacaagatgtaatttacacgtataattcatactcttgatcatgtttttggtgatatgcaatctaggaatcgac

SEQ ID NO: 111842 - DNA, 676 bp, Setaria italica
  Intron number 1 from transcript Si017903m (locus Si017903m .g) derived from phytozome v7.0 (chr-ID scaffold_1; pos 52 6564 to 527239 reverse strand)
cacaacagtgccgaataaggtaattaactattcgtttatagtactgtactgcttgttcctttttgtatttctacatgtgacagtttatatttatttgatcttaaattagtttcttgtataggtgacatcctcttttgttcatcattttgttgcctatgtttagcttgcattgcaatcacaatctgctgcaaccatcatgcagttgtcagtctaccactgttctactctgaaaatgcacctctgtcaatacatctgttcactgttaacctgtgcttataaagattttgatctcgagcaacaaaactggatgcttgcactttctttttttctaacacacaggaaaactgtgtgtcaaagtaagataattggttccaaatacaatcttcttgaggtcgggtcgtctttgatatgtaataggtgtttaagttcttaaaactgtagctctcctgttaatacaatgatacgcaggtctcctgtgtgtttgagagagaaaaaacttcgttaatgatcctatttgacacttttcatttctttaattacaaaatctccttttatgggttggagtattgactagcgactagtgagaatatctagtatgcattcgcactctgcattcaacttttcattagaactgcgaatatttttttcactttgtgctgatgggccttcaatacag

SEQ ID NO: 111843 - DNA, 417 bp, Setaria italica
  Intron number 2 from transcript Si014361m (locus Si014361m .g) derived from phytozome v7.0 (chr-ID scaffold_6; pos 84 38943 to 8439359 reverse strand)
ccaggcgctcttcccatcctgcacaaagctgccaggtgagcgaatgataaccccacatgtctacgttttggcataatcgttcaacattattgtaggaaataatctatttttgattatttcgtttgcgcggtgaattgctggggaaaagataactcaaaaggaacgaacttgcgttgccaaaggttgtctattcagttgtaattcctagattgctttgggcatttagttttagtaagatgcagttttgggctgcttgtttagtcaagtgtcctgtgattgccttaagttattcttcaaattgttataatgtcctaggtgtagcatgctgagtcagatatgtatgtaaatagtttgcttatcgtagcacataatgaaacctgtttcttgcaggggtactacgtttgatccatcatcttc

SEQ ID NO: 111844 - DNA, 614 bp, Setaria italica
  Intron number 3 from transcript Si019416m (locus Si019416m .g) derived from phytozome v7.0 (chr-ID scaffold_1; pos 39 214158 to 39214771)
gcttaaaaaagcaaagcgcaagtcagctgcagcaggtagtcttgtcccttagcgtttagtagctgcccgattttttcccctttaaatagctgatcaatttgtttatctctaagcacctaattcgctggaaaaagaaactaagcatgatacaccaactgcaagttgtgtcagggctttctttgaattagcccttgtttacttcccaagttgggaggtgccaaattggcattttgccataaatgcgacactgtagcgtttcgtttgtatttgtgaattattgtccaaatattgactaattaggctcaaaagattcgtctcgcaaagtacaacaaaactgtgcaattagtttttgatttcgtctacatttagtactccatgcatgtaccgcaagtttaatgtgatggtgaatcttctttttgcatagtgtcaaagttgggagtttggagggaagtaaataaggggttaatagagctatttgtttcagtcagcgatgatgtgtaccactctttgtttctgtttgacttcttctcacgggtttatgctgatgatacaatatcaattatcatttcgctatttcaggagatcgtgcttctgagccaattggagcataagaa

SEQ ID NO: 111845 - DNA, 520 bp, Setaria italica
  Intron number 2 from transcript Si036303m (locus Si036303m .g) derived from phytozome v7.0 (chr-ID scaffold_9; pos 47 455172 to 47455691)
agggtacgtacctaatccaatcgccaactccctagcaagcttttgcatatgcatgaagagactaggtgaaatcaaagaacaaatgatgattagacccccttggcttttgccatgttcatctacatgtagtagtcagtatcatgtcggctaggtgcatactttttcactgcttgcgcatgcacggttgcgctactatttgcaacctgatggcctgatcttttctggagatgtttctgatgcgggttcgtggcacgtcaatattgtttatcgcatcggtgtgtggcttgcaaatggacgcaagagccgctttaataattttgtggcgttcttaaagaaatgttctttaggcatacttggcatggttgcgccaagtcaattgatccgacaatgataggcgcgacgcgtacgtgttgatgattgattcatctgcgcccgatctgtgtggcattagctattttaatcccgaatcctatttctaattacttgtgcgatctcgatcgtctgcgcatggtgcagctgg

SEQ ID NO: 111846 - DNA, 829 bp, Setaria italica
  Intron number 1 from transcript Si039498m (locus Si039498m .g) derived from phytozome v7.0 (chr-ID scaffold_9; pos 17 26512 to 1727340 reverse strand)
ccttcgttggcctcctcggcacctacagggtccaggtgtgctcgctcgcccatgcctgtttctatagtgatttcgttgtggtgtttgttctgcttgtggttggaggaaggctgatagcaatgccatgagagttaaagtgcaaggtgagaggcaagcaaacctctaatggaacatttaaaacaaattattctgcaaataatggcataattggatagcatatatgcctaagcataaatcatgtgttctttgaaacggatagaaacattgctatgatagttaacaaatacatactctttattgaagacatcgtaagcaagatagtaaactgtatccaatgcagaagcacctaatctgggtaagttgtgatagttctttccaaaattctgtaagatccaacttgtccataactattaatttgcttaattagcacctaaggatgtagcttaatgttcctatgaaaaattgagaaatgttaacaatcagtttactgcattatagtagatagggctgtttattaatcctgatgaaaagaatagagtaaggaattatcatataactattaaaatcaagccagcacaaaatattttctatccatcatgctctcacacataatatttaatggataaggaataatgttgaaaagaaatggcccaattttcttagataattttttgatgcatcacttatattctcagcttcaattcatttgacctataatttgagttattttaatttctaaatgcatggaattgaattgtatatataatggttatatgaatttctaccaaattatatcttatactgacatcagtgctactactcaaggatt

SEQ ID NO: 111847 - DNA, 907 bp, Setaria italica
  Intron number 1 from transcript Si013663m (locus Si013663m .g) derived from phytozome v7.0 (chr-ID scaffold_6; pos 56 41938 to 5642844 reverse strand)
acacaaggtcagtgttcttcagctaccactaaccttttttacccttcattttccggggagcacaatcatttatgtggcatctaattttcatacacggtttacctgctgcaacattgtttgtataatgtgggttcataacatcaccaatggcaaggattaaaatgtttcggaggaatcaagtttagcataggcaccgtagtcatagactacaccccctctttctgaagtagtttgcactagatttatttgcattatctttgcgtacgtatacctgttaactgtcaacaaactgataacactgcttcactaatgtctacctaatatgtccacttgttgttttgttagttgtaatcttgagaaactctgtgcggtttgtcttaactattaacatggttcagttaacccaaacctcaaattatacacaatgaagattctaagaagaattcaagcatattgtgaaaatgtccagcttcaataggatgcatcttaattttcatagcttggatcaagtaacaggacgaattctatagaatggacattgatcagtgagattagaggcacatatattaattctatacaatcttcagacatatctattcatgaaacagttttcacatggaaaggcagtactagcatcagtatgcatcgttcattttgagcatacgcctctgtaggagaagcttgaatcttcatgcatagagcagcaacatgttacatagctagaatgtaaaaaggaactaactgaatgttatctataacatttcccctcttaatttaatgacatgtagttccctgtgtgttcgataaaaaaaaagggtacacacctatggaagttggtgtacttgtatggttaaatgcttgtttatgtgcagatatacttcacgtgttctcttctttgccgagaaat

SEQ ID NO: 111848 - DNA, 856 bp, Setaria italica
  Intron number 2 from transcript Si039837m (locus Si039837m .g) derived from phytozome v7.0 (chr-ID scaffold_9; pos 58 005000 to 58005855)
ggcagacattggaagcgggggaaggattggtataggtatgcttccacagttgattttcttttgtacacaagaacattgcagttgctggtgtggcagtttcacaagtatctgttttcttttggttcttatactttgtgtcattctcatgagataaaactgtttataacctactcttcaataagatcctggacataatgctttgtgtgcaaccacttccacggccttcccatagtatgatgtctgttcatgcaaactaaaaaattaggccttagggaagaatccctggtgggaactggactttgagtctggaaagtggtgtttctttgtgattcatgtgggaatgaaaccattgtgaaacctgaaaaatcttcaatttgattagttccaggatacccattatcactttggtgccatctgctttgtttgctctggagtgttttgaactattaatctgccattattggcagaaacagggcttcaagtagggactaggaaatctgcaatcatgtcctactccttcaacacaaagcatctatatttttatcttagttctcgtattctggtgtgctggtcagtaactaaatatagctcttatgattccaggctctgtcatattcttttttcctatgggaaactgtcatgtttctctttggaatattctgtagtgctagcatgacagtatagtcttctaatgtaaagcagtcatcataaagacttggataccatcattgttgatacctatttctgtaaagactattgttattcttggcatgcatttttactagagttgcttatcatcattattactgtgtgatcttgcaaatattatatatccatctcatgctgaacaggcttg

SEQ ID NO: 111849 - DNA, 928 bp, Setaria italica
  Intron number 1 from transcript Si019542m (locus Si019542m .g) derived from phytozome v7.0 (chr-ID scaffold_1; pos 15 116504 to 15117431 reverse strand)
gaaaactaggagtctcaaatcaagtcagttcttctaaagaactcactagccaagaaagagcatccttgacatgccctggtagtgagacaattgatgatgtagctggttctcaagttattcttgagacatcatcggatgatgtgctgacagttccattgggacctccgggtggtacttctgctgcagataggatttctcaagatgacaagaacaatgctgattcgtctaaattagctacgcataaaaaaatcttggtggttccagatatccaagtgtcacctgctagttcatgtggcaagactattgatgatatagttgaatttgaggaactgtttggtgcacaggataaggaggaaagagatgcaaagttccagccaaaggtacagacgaagctccttaaggccaccaaatctcaaaagactaaccaaaaggttgaagcttcccctgtagacgaggctacacaaaaggaaagccgtgataatattcagacaagactccattatgatcagctacaggaccctaaatgtcatggaagcgtgcagaccccagattctgaaggattattggcaaccagtaataatgatattggcaatttagctaacctcgacagtgtccttgaggtgtcagttcaagaggaaacaatagcgaagtttcgtcctaaattgcgaccgaagcctgcgatggtttcatcgaaggttgttgggactaatgataataccactgcagctactctgatggttggaatttgtgccgaaaacaatgatgtgccaacaaaacctaaagatcaagaaaccatcaccgctccagccacttggtcaccacaggtcagtgccatattttgaatattccattaattaatgtgttgatatttcatatggtaattagtagcaaaaatgtttccttatccaactgtttttggcattttagg

SEQ ID NO: 111850 - DNA, 954 bp, Setaria italica
  Intron number 1 from transcript Si036678m (locus Si036678m .g) derived from phytozome v7.0 (chr-ID scaffold_9; pos 65 66042 to 6566995)
ggctgatcgataatcctctgtggaggtatcttcatcttttctatgtgcccctgaagatgctagtcctgtgatttttactcctccaaataggtcccttcgttttaattgcttagagttccccttagttttaaatttccggcagcattattagaagctcttttagcttctcagaggcagctgcctacttgcctagcctgctagccatatcctaaatgagaccacactgcttggttagttccaaacttgttcgcaagttcttcatctgctgaaacatgactcttttctttaaagcttcatggtactggtgtggtacatgcctggttcttgaagatttggtaggcttttcctgtttccaattaactttggggttttgagtcttttaggaagagtagctctcctcccatctcattcactttgctccaaaagactcagttagtgagtggtgtttgcttaatgatggggttatttctcctgcgtctcctcctttacgccctgggtttaaagtttcactttctggactgtgtgcttctttagcctgtggcagatttggtttgttcccaaaggctatggatgaagcatatcttctccagctgtaatacagttccagcaggcctttgcctggacggtggatcgttcttttgcccttcttttgatctgtagatagggatagtgtggctgttcttgaagggactggctgcttttcatctcttataggattaccagttgagatgatattgttttccctcaacctcaaacaaaccagctgaggggtatatatgtgaaataaaaggtgttgcgttcttgatcaatatttactctagtgtacaatgcaccctttgtaattatgtgtccttaactcctaatggtgcaatttagctgtagtttttcatccatcctgtttctatttattcttcaacaggggattaaggaacgttggtgcttctggacaattgg

SEQ ID NO: 111851 - DNA, 895 bp, Setaria italica
  Intron number 2 from transcript Si017793m (locus Si017793m .g) derived from phytozome v7.0 (chr-ID scaffold_1; pos 23 811579 to 23812473)
cgtcgtgcaaggttgtgaatcgggtacctttctcatctacatgtctctgttcatcttgtggggaacggggggaattgaatcattttccttcaacttggaggtctggattttagattggctagtagacttgcttgctatgatttttttactccctttttcagttatgttccatgaagcattttattcccttgttcagttatgttctataaatcagtgagaggattcccatgtcttcccctttgctttgttagattggaattatcatgttcttcggacacttttatcttctttctgctcttttggtatcagatttgaatacagccgtcttttttgacaatgaatgaatgacggcatgatgccttatgtgtgctcaactgtctacaattatcctgaatgctttgatcatccagacctatcttacatgcaccacacatgcagttcaataaatcaaatctcttacctgaaactcatagaaagttaagtttgggctgttggtaagttaggtgaagcattagaagcaatctgacttttagtttcatgctggttactattctacttagtcttatcaaacagaaaagttcattttagtaagttctctcttccttcactattgggtatttagtttcagcagctaagtaatccttggcaagtgctatttccttggtctcttcctgttcagtttcacgctggttactattctacttagtcttgtcaaacagaaaagtctatttcagtaaaattctctctttccttcacttttgggtatttagtttcagcagctaagtaatcattggccgtttttcatggctttcctgttgtcatatccatgatcacttttctttatgcaagtgcaagctattgctctaagaggtttcctttttcctgcatgcaggct

SEQ ID NO: 111852 - DNA, 944 bp, Setaria italica
  Intron number 1 from transcript Si039733m (locus Si039733m .g) derived from phytozome v7.0 (chr-ID scaffold_9; pos 91 88195 to 9189138)
caacaaatctaataaatctaactgtagtggttggtgtattgattttgttttagaaagggagtgtgtgcgagttgtctatttcaagaatagattggatttatccggccgcactttagaatattttttagtatttttttgataaataagaaaaggtgcacgatctcgacgaattacttctgaataactttagaaatcatatggaagaaccatagcatttcgcgactcattggtaaatttactttgattctctatagaccaataatgtgagaccattgacacggttaaagctaaactgcttgaagtccgggcaaaaggggatactctttctacaactacattagtctcgaaatgctttaaacgggaaatagctagtgtggaatttatctgatatagaacactcatatcgataaaatagtttgaactatttactagaagggcatccagccctttttccaatgccgaatcgacgacatatgtataaaagagaaagtttttggatttgaagaaaaaataaaaggaattgtatcaatttagattttccatttatttagttttttttcttaatgaaattgaaattattaactaacagagcaaacacaaataaagaaataactttgctgaccatgatatatttttatctagttggaagaatcctcttatcttaatattcatctagtcttatatatgtttgggtatatagaaatacaaacagaaaacagaggataggctcattacataaaaaaaaatatggaaatagccgtaatacatagcaaaagagaaaaaaaggagcgggagagccaaatgaatcgaaagattcatgtttggttcgggaagagatcataaaaattgtaaacttaatagcaagataatctactttccttaaaagatttattagataataaaaaatagaggatcttaagtactattcgaaattcggaagaatt

SEQ ID NO: 111853 - DNA, 473 bp, Setaria italica
  Intron number 2 from transcript Si037686m (locus Si037686m .g) derived from phytozome v7.0 (chr-ID scaffold_9; pos 50 769660 to 50770132 reverse strand)
gaattttcaactactcaccattgtctactcagtaagtcttctcagaatgtataaaatgtttttttttccagaatactgtgaggaatcctttgctatcgtgtaaaatgtcatgactttccacatatttgtttacatctccgtcatcttatcatgccacaacctactgcaggccgttattatttatcatgcataatcaagcaacactagtactctagtagccatgtgattattaactggtgaattcagcatttactgaagctagcagatatgggcatatcataatataatttaactgttaacagttcaaatatgcggaacttgcctgtgagaaccctatggttgaggactatcaaagaataccactggtgacttgaaatattcaaaatacttgcccctagaaattttgaacctaacagtttatttcatttggaactgcaggctgcgcttggcacagcagccaagtattggctgaa

SEQ ID NO: 111854 - DNA, 938 bp, Setaria italica
  Intron number 1 from transcript Si013777m (locus Si013777m .g) derived from phytozome v7.0 (chr-ID scaffold_6; pos 59 67308 to 5968245)
tggccaggtcttcgccggcgacgaccatcagccaggtatgcccgaccattccctccccttcctgctgtgcggaatcgaacaccccaaaccgtaatgtgtgttatttgtattcggatctgaacttgtattctacttctatctacgaacttcgatttttttttattgttttggcaaaaattatactgggtccaccccctgttctgaaacttctgatggtgtttttggtcagaagggttctggattcatcagtggaagggaaaagggggcactttgcattttgtgatggtgattttagtttttgtcgagtcgttctgatgatgtggaaactgcgagttgtttgtaccatttttcgttgccactaaactgaatttgtgttgtactactgttcttttgcgggaaaattccaattttttggtattttcagtcgaagatactgaaaagaaagcaaatttgattatgtatatgtttctaccatttatggaagatggagattttgatctgctctgtaagcccaattgatatttgggtggcattagagtctaggtggttcatctaagaaactgtttgtctctcttacgcttccatgaataaggaaagcgatgtctcagtttggatgtttgttcaccaaatatatccaactcgcgtccctgtccaactgtgatcatgtatctgacaatctcatcaccgcggttatcattttttttttcagttctgatgtgatatgagctgagatggcaaagtttgaccaaatgttactgtgactctttttttttttcggatcaaagattggcttaacctgcagtgcgacttgtccttgtacagccacctaacgaatagagccacatgttctcacaattcaacgcttccaacttacttactattctttattttacttcttggcaggacatatagctattgctcttcttcctcggtggagt

SEQ ID NO: 111855 - DNA, 1049 bp, Setaria italica
  Intron number 1 from transcript Si034668m (locus Si034668m .g) derived from phytozome v7.0 (chr-ID scaffold_9; pos 97 04517 to 9705565)
cacaccaacttcgtgcagcaggtcagccacggccccgtctctcttagtggcctggctagccttttctattgctcctgctgctgcttccgctgccgctgcgtgattgattgggagcccgatatggcgcttctcgtgggcttctgttggagcagtcaccgggttttgggtgggaaattcgtgctagcttcagtaatttttcagtttgatgttgattgtggaaacagagctaccatcgctgcttgctgattattttgccggcgtaacgtgaggaacttttgccaatcctctgttgttcttccttgcattggcatttagtttgagctacaaaaaaatgcaactattagttaatcacttaatatgtatacatagtgttccattcctgttatgttcattactgacatttgtaatctggacatgcttatgttctgttctgttcagtgttcacgcctcactcatcatgtcaatgtatatttcgattgttgatttcatcgagttgctgcttggttgaattcagctaatctgagatgtctataggcatatagcacatcatacaaagcaaagccatgcaaatttaaccttacttatctaacaatttatctatatatctatacatccaaaagaaggctcactgttactcgcatagtcctagtaacaaagttcctgggtcgatggggttaaggaacgcgagcaaggaatgttgtgtgctacttgggaaaggttttgagattgttcccgtgttcctagaacaggaatgttcctgggacaatgtgggcatggttccacattcccggtgactactcatatcaactgggtagaaacagaaagttcacgagctgaagatttgtagcacaaaaacctagatttggaagaaaaagaaagaatatctgtaggaaaagaaaagaatgaaaccctatgtgatggctaatactatttgattctgtagtccacatgtctgtgtccactcctgtgtttatttctagattctcacctctgaattgtcttttgcatccatagcctggctgctcaagtgagttttctggaattgaatt

SEQ ID NO: 111856 - DNA, 608 bp, Setaria italica
  Intron number 2 from transcript Si019682m (locus Si019682m .g) derived from phytozome v7.0 (chr-ID scaffold_1; pos 29 475502 to 29476109 reverse strand)
gggagtcgcgcctgctcctcaattccttcgccgaggttccatgttcttgaaacagaaagctgatttcgttttgatttgggatctgtcgttgtgttcgccagtgggattccttggtagcaggggttaagaagcaggatgtggaacactccagggtccacggtccagggcaagtttcgactctaataggctaaatcctatcgcaactaatcctttttagttaatattagcgcaactatccgtgtttgttcgaaaataaaatgtttggttaatggaataacgaggaagatctgcccgtttcaatgtccaaacaaagcataaagctattgtgattggcaagaaatatcttttaggatatcgtaaaactttcgttccttgtgatttatgagcttagtttgtagcaatgagctcctaaggttcttaggtgttaatggctatgcgctggggactagaagtttatatatcatattatcatcaatgtgggaaagggaaaacgaaggaacatcatgttctgtttggttcttacattgcgataattttttttaatcttgatttcatattctgctttactttatcttgacaaggttggggcctttgatcacaagtattac

SEQ ID NO: 111857 - DNA, 659 bp, Setaria italica
  Intron number 2 from transcript Si016784m (locus Si016784m .g) derived from phytozome v7.0 (chr-ID scaffold_1; pos 28 282859 to 28283517)
aactgatccgggaacagctcaacaccttgatttcggtaaccatttactttcatgttgcagcctttatgcttggaggctcatgtgtagataggatgcgattggataagcggtctttaagtttcatccaattttgattcctattgtctgaaatcgtctaggtggccctttctgttcttggttttctaagtcaacgcacgtgcgatggatgctaagttactaactgatggctacaagctagctaaggtagtcagacaatgaactaaacactgaagacgtaaactatttaaacttttcaggactaatgctatgaacaaaggaaaaccattgtaagaccaactattgtataaataatcttccaaacctgcattgtattcttttttctacatttatattggaaatttggatctttggtcatcataaatgcaatttactctatagaaagatgttgcgattacaataggaaatactgacggattgaatcatctgtttaacttgttacaattcatatactggaatcctggtcagactaagtaaaagaaaaaaaaacagatttctcaatgagtgtaagcctcatctccaagctgaatttgtttttagttctttccgaataatgattgtaagtttgtttctgtgacaggatatacgtacacctggagacc

SEQ ID NO: 111858 - DNA, 1025 bp, Setaria italica
  Intron number 1 from transcript Si034409m (locus Si034409m .g) derived from phytozome v7.0 (chr-ID scaffold_9; pos 51 744968 to 51745992 reverse strand)
ccagatcgccaggtgcctcctctcctgcggcggcggcgacatggcccaccggaatgccctgggcgccgccaccgcggggccggcgacgacggcggcgatccaggggagctttccgcccccgcgcatcgcggatttccagcggtgcggcacgcaggtcaatgctccgtgagtccgagggctccaccgagcgccgccgtcccggccggtggtgcgcgcggcggcggcggcgctagctcctctctgatgggatggacgcgtgccgcgcgtgtgcggtggctgcgtgcgcaaatgtgccgtaatgactttggacgtttctagcaagactgaagacttgataaaaggaatgcaacagtttacaggctgtatggagaaatagaatttgctttgctcatgctatgattattgattagattggacgattctcaatggaattagaggatgattactatgttttcgtgagaaatttttgtgatcgaaatcctttctagaaagtctgtatcctttagtgtaaagtcttcatgtcaagcgttccaatggaataaaacatcgacaacactcaacagttaaccgtgagatcataagcactctcactcgacaagatttgtgcaaagcacacagtaaaactagcaaggtgcatcaatatgaatagcaggattcataacacgaataagcagaaaataagtcaaagtatatgcaataatttcctcaacatacactggttgcaacatgtaactactctcttttcctcacaaaaaaaggtaaaaaacatgcacaggctgaaaactgcaaatcaaatttcaaaccacatgggcttggcccggcctacaacacccgtaaaaggcctctcgagcaaataccccagtgggccctaactccggcccaactgatctactagatctcgcggcgaagaagaaggcgaaagcatggcgtcactcacagcctcaccggtcgacccacactggcacacaacggatcgctggctcgacctgtttttccatcgaaaccgctccggaaccctagttcga

SEQ ID NO: 111859 - DNA, 855 bp, Setaria italica
  Intron number 2 from transcript Si035541m (locus Si035541m .g) derived from phytozome v7.0 (chr-ID scaffold_9; pos 22 936391 to 22937245)
agggagcggagttcggggtccccctaccaatagtggtacgcaactgtgtgcttacgcgaatctttccaattcagatgagatgagcaatcttgtttgcttatcaagaatgcatccaattcaccattcaccaaattaaacgaaggtgttaaatttctggaagagttttaagcaattgcagaaaaatgattatgtgctgactagatgatggttagtttcttctagtattggcagttcattcagtgaagtgtagagttcaatttggtgaggattgctcctttggttcatgtttgtgatgaagtgcaaacttagtagtagcataacgtgtaggatatgttgagtactaactgtatgcttgccaaaatcgtgaacaattgcatccaccttttgtcacatactccccgtttttcttttcatatttctaaagttcactggcagctgtatctttatttgatttttggcggaattagctgttaaactgtccctttccccttctgttcacattctcggccatgttttatatcatgtgttgctgtcgtgatatttttgtttgattcattgcattgtaaccatatcttgtagcttgcaagggaccgcaccttaactaaacgacatagtctttatatcaggtgctgcatacgtatcctttaagcactatggtctgaactttcggtgcaaaatgagaaaactgtcgtgaacattatgtgcctagtgggcagaaatcttgtgcagttatggtattgtaggatatctgttggtgttattggattggaattttggatatatgtttgtctgggttaacatgctcgttttcatcctacaggaacgaaatagcaaggaggtggattggaaaaaaga

SEQ ID NO: 111860 - DNA, 1008 bp, Setaria italica
  Intron number 1 from transcript Si018557m (locus Si018557m .g) derived from phytozome v7.0 (chr-ID scaffold_1; pos 66 36043 to 6637050 reverse strand)
caggatctccaccttccccagggccttctccaccggtacgtgtctctcagtcttctccgtctccaccttgccctcgggcgcgtgcactgccgtttcttgcgctccggttcgtgggatcacggctcctcgctgttggaccggcacgatcttgttgccctgtgtgcgcaaatatcggatttgtggaatggtccttgatttggggaactctgcgcgtatcagcctatcaggcggcagatacgttcggggaatggggtttacgacggggtttaggcgccgcccccgccgctctttattttcggttgttttgattcttgcggtgaaaggtataatcttttctgaagatgaatgctgtgtccgttcggaatgatttcgcagtgacatgtatgaaaaaggttttgcctttggggtgtatgttacactgcttctttggaagattgatttctcagatttagattagccttagatgttgatgggtaaggcaatgtttcgcagcctgaaattaatttttattgtaccgataccatgttgcaattttctgactctgtggaattttcagactggtatttgcaggattcttagtacattagaattggatacatgcatcaagttttaggaataagtttgtatgaaagatttatgagaaaaagactaacctctgacatagcacaaactacagacacaggtttctaataacaagatggaatgccacaacactgcgattctttaccttttatcttatgaatagatagctgtattggtaattattgtgcttcagaagaggcgcagaagaaatggtctcaggaatcgatttctactgtggggtttgttctgtaaaaagtggttgagtaaattgatggtttccctcgcaggagattgattttatatcaatatttgactaaatgttgattgctgaaaacatcctttcttcagtttgatatatagattcaagaagtcaggggtcggtcagcatctcacgctctgaatctttctcaattcccttttttagtg

SEQ ID NO: 111861 - DNA, 672 bp, Setaria italica
  Intron number 2 from transcript Si014060m (locus Si014018m .g) derived from phytozome v7.0 (chr-ID scaffold_6; pos 17 252220 to 17252891 reverse strand)
gctatataaaagcagtcaggtttgagactcagtctgttcaagttggtgatcctgttcattcatttgttttccctagagaagggtatattacaccaaccggttattgcagaggttcagtaatgtaagatctctcatatattatcacattatgtaatattgtcgtttaaataaaattaataatgtttttcttcttcaataaacagagatgtttgttgcagagttctatttcatgattgcgatatgcatgagtacgcttacttaggatcaccattgttcaatttgtctggtgatctagtggggataacatatcttgatcagggacactggcaagcatggactgtttgggagctactagatacttttaaaaaatggaaaaggtagtatctgtctcatatttgattaaactcaaagaataatctaatttgaagtatcatgtattatttttcttagtatttgataaaaccattcaaaaatgaaatatttagaattgcattcttcaaaaaattggtcattgcatattacgtattaacatgtgcgtagacacttagtcgctttgtccatctgaatagattacttttattcttgatttgaataaattggcttcaattatctaactttttttatttggcatgtgcagtaccattgtttccaagggaattgaagaacctgcag

SEQ ID NO: 111862 - DNA, 728 bp, Setaria italica
  Intron number 3 from transcript Si036408m (locus Si036408m .g) derived from phytozome v7.0 (chr-ID scaffold_9; pos 10 991513 to 10992240)
gggcagaagccaattaaaggttcccctcatcctaggtatggactgaagtatgactagtctaatcttcattgcatgcatgctctttattaaatgatgctttgaaaattgctgtgatgatgccacaattaatgccaacaatatttttttgtcagcattgtgataatatagtacaggcgtgtatttccatgacatactcaagtgccttctgataaataatttgccaatgataatcagcacacgctttatccaagtgcatctctcctctgatgctatctgcatttgttttctatcctcaaggtgcttcgacattgaagaggtgttgataccttaattgctgtgacattaaattattgctccatggatgatgttgttctttctttcctgtgcactttatggaaattgatcaatcatggtgcttaaagtggacacctttttatatccaggattatgctgtgatgatttgttatctccatattccctccactatgtcaattgttcacctgtctctagctttaatatcttgatgctaagttgcgtattaatagtaaccacatgagtatagttgttccaatgatgacccaaatcttttggctctttttagctaacatcagttgcagaagcacctagtatatttctattctttatcatcagcttacctttatgctactttgatatctgcataaggccaactcactgtttatttgaataaaatgcaggggttactacaa

SEQ ID NO: 111863 - DNA, 758 bp, Setaria italica
  Intron number 1 from transcript Si019585m (locus Si019585m .g) derived from phytozome v7.0 (chr-ID scaffold_1; pos 38 978075 to 38978832)
atcgtcgccaagaagcggattcgtccaaaagccaggtactaacattaaccagacctgaacttcggctcttcgattagtggtttgacgccaacctagctgcagatggattcctcggccttgtatcttggctttttatcgtactgaatgttaccccagtacgaaatcccaaaaatagttttggtgttgtcttcttctattttgctgtctagtgttgttggtagtttttcagctccttgtctattaatatctgcttgacaaagttcttgccggttgccttttacagaatcctttaaaaataaatatcacgggaatcggattcaaaaactcattctgcgaacgggcttgggaccgattggtcagtaggacttaaattagtagcatgggctaagaggtcgcatgttcgatccccggtgggatgaattcgggtgaattttccaggatttattcctaggttgctttgagtgcacacgcgtgcgtgttcagcggtattgcgtgtttcctgcgcaacgagggaagtaggctctccaatcttttttctagcgtgtgtatatgtgaaaaaatcattctaatcaaactgtgtgacaaatggcaataatgataactgctaagccacttgtgctaaataaaaatccacatgttaattgcactggctatgatgtgaaactgtacatcattccctcggaaatctgagatttttttctgctgtcaaactaatcaacttcatttgtactgtgcagtttacgcagcatcaggtgttc

SEQ ID NO: 111864 - DNA, 1044 bp, Setaria italica
  Intron number 1 from transcript Si035012m (locus Si035012m .g) derived from phytozome v7.0 (chr-ID scaffold_9; pos 56 456757 to 56457800)
ccacctgccggcgaccttgcccaagtggccgcaaggtttggggcttcctctctctctctctctctctctccttctccctccctgcgcctttcctttccctgctttcgttcactgagcgtgatgatttggttgtggaaccagttggtgggttgctgctggctgttgggctgggtgtgtgtttcgtggttgagttgcatctgatccgtatgaattactgctagattcgttgcggtccgttgataatcagccgattctgtgtgttcgtttcccctgtttctcacggagagattgatccattatgactggtaggattggtttggtagttgcttcaaattcttccgatctgactgcagtatgatgaaatccacttattgacaagttcttcgaagttaagagcgtttgacttaactgtagttgaacctatggaaataaaataaatacaaacccacagaagatgccaatctttgcaatttgagtgatattttggctgtttgcgccatcgatttccttgatccatgagcttaatatacatgaattattgcagtattatcatggtactgccttgttcctatgttattttgtgctagctagcgacaaagatgttaaatgactgaataaagtggtgaaacagtttggctatgatcagtctgctttactttgaaatcttggcaactatcttgcaaggtagcaactagcaacctgtatactcaaaggtttcgctcctcttgagggggtctgagtatttttttttttcaatcatatagtatcactgtataagaaatatctacctgtttacttatttgcagggagcaaaatatgtgattaacttattttgtacatgcgactcagaatcgtttgtttgcattgatttaaaactggaatcctgttcctagtcagccaacaaaaaaatagatatatgtattgcagcgcttggctttattttgccggatggattgctttcctgagcattagaatcttttactaactttcttgagcaactccttaacaggaggggatttcgctaagggcacaatctgcatagga

SEQ ID NO: 111865 - DNA, 736 bp, Setaria italica
  Intron number 2 from transcript Si013562m (locus Si013562m .g) derived from phytozome v7.0 (chr-ID scaffold_6; pos 32 274851 to 32275586)
acaggcgaaggttcttcatcaatccaagtgagtttgcttctcctggccttctgataaagttctatgtcggtttgtttctacaagattggcatgataatcttttcaacacataggcaccagtggccctcttttagtttgattcagggtaacagaggcaatggtaaaatcataagaacttcatcagtaagtttgtttgtgttggtcaaaattcatccaatgttgcaatcatgcaataaatattcaaatggctcgatgacgaagcagttatcttcagtttattcctgaattgcgcggaccttcaatgcatttctacaaaaatgtaatatatttttttataactgaaattttcttttatgccggtttcttttctaaccatagttaaatgttcttccatttaattatttttgctactttttttgtcaccgaatacttttaactgtttcaccctgttttttgtttcttaaaccaaagatttacttgttttcagttctgcactatgttacagatgtttgaatttataccaattgatttgtgttgcacacggacccacgatacgagccacatgctccctcgtgtgtcgtggggcgtggcttcattgggtacatgtttgaattcacaccgcaatcaatcacaaactcccaataatgttcaaggttcctttcatacctttctaaccttttgcatttccatccgtattgcagcatccgtcgtggatccactgcacctgcagtacttc

SEQ ID NO: 111866 - DNA, 572 bp, Setaria italica
  Intron number 1 from transcript Si035219m (locus Si035219m .g) derived from phytozome v7.0 (chr-ID scaffold_9; pos 58 779798 to 58780369)
cggcatcctcttcggctacgacctcggcatctcaggttgcttgcttgcattctctcctcttgtgttccatcttgtcgcttgcaagcaattcaatctaagctgcagaggaagaaatccaattaatcttatgcaatgggatttttctttcggttttcaccatccaattaatctaagcttcagagtactcatgggtagatccatccagtccaacagcaactagtattaattttgatggtcgtaacaaggaacagctcacgctccacaacaaccaaatcagagatggatggatggaaatgaagagctgaattcaattcaagctggaaaacccaaccgacacgaccactatagggtatagtacgagtcagttacataagcaatgcatgattgatggatgcttcactagttcactgtactgcagcagcagctgtgtttcctggatgcttagcagtagttgattcatgcagcatgcatgcctggctcggtctggatgtatcttctttttctattttatttgtcattgctcaagagtcaaaacaagtaaccaagtgccactgccaggtggggttacctcc

SEQ ID NO: 111867 - DNA, 985 bp, Setaria italica
  Intron number 2 from transcript Si035219m (locus Si035219m .g) derived from phytozome v7.0 (chr-ID scaffold_9; pos 58 780644 to 58781628)
tcctcctcggcataggactcggcttcaccaaccaggttggtaacaggaattctctcgctcgttgcatagcattaagaggaagacagcgatatacacataataatgatgctgggtttgcatacacaattcctgtacatgcacataattaatcacaataatgataattttttttaaagtaacactaggtaagttaagaggtcgcatgaacacccggaattagatgggtggagttcagtccttttactacttctcaactagtgtgagtacctcatcactacttcacgccagccagccacaaccaatgcaaatagctcctcttctcttctgtccttgtcaagatcggcaagtggcccaaacctacccacattcatggggttcctttaatgtattaccccaaggaagagaaaaaaaataaaataaaaagaaaaggcttcaaattctaaagccaaagtcaagtgagcagtcttttttcatgggtatcgctagcattgaaaacacagtccactaagtcaaggttcaactcttcatgcggcctgagcgaattaatgatttcgtaaagatgaagactgtaattgcctttttacagaaaagaaagaattgaagtgaacaaaatatttctactcctattatatggtaatgaagaacagatatactggacagcaagaaagtaacaaactagatcaggattccaatctgctacagttatacgcctatagagcagataaaaagggaagagttcgggattcaccgaaataggattttcacacctgcttttgcaaaaagaaacaaaacatgcagattccccaggcactttatatcatctaacctttccagattcgtaatgtgcaagggacattcatgctcgctcaaagtatatgttaaggagagtatatatatcaaacttggaaataaaagcaatactgaaaattaacttgatatatatggcaatatccttttgcagtcaattccactgtatctatcagaa

SEQ ID NO: 111868 - DNA, 850 bp, Setaria italica
  Intron number 3 from transcript Si018869m (locus Si018869m .g) derived from phytozome v7.0 (chr-ID scaffold_1; pos 22 638427 to 22639276)
cttcagcatgtaagttttactggccctccagcctcgtttctaggtttagacctacgaagttctcggtcattgattgatacattcttgtcgttgtagatttatggtagtctttacttatcatcgttgattgattctcgtcacggtagcctttacttgattgattctagtctatccactgcacgtgatgcttgtaattgtgaaaccacctgtaatgcatgcttgtccaagcgtgctatcacactgatatttggtgaaagttaacttgtgcagtcacattggtagggtttctgtaattgctattgtgagtcactaattttcaatgtcctttgcttggctgataattgtcatgttattagtttaattcctgccacattttttattggaacttaattttttttgaatatcagagttagcaggtatttaaaaaatctcagcaaatcactctttaccaatctaccatgatcagtttctcttggtgtactttgtatggtagcatgcacaaatttttgaatatcagagttagcaggtacttagttgtttggtatttgagaagaggtattggatttttatgttgttaaactaaaatttttgtgaattgtacctccaaaattctaaacaggcacagattttggatgagtgagtactgtattgtggtcatgttacttaataatgattgttctttgctactttatgtttgaacaagttggatattgacatcaatgtatgctgtgcgctatgaactttgcactgattttgcttctaaacatcatttttttttcttgtctcctgaatttgaatttgattttgttttgcagaaccactgttttcagccactcccagactgttgtgg

SEQ ID NO: 111869 - DNA, 902 bp, Setaria italica
  Intron number 1 from transcript Si016707m (locus Si016707m .g) derived from phytozome v7.0 (chr-ID scaffold_1; pos 27 671245 to 27672146)
gccgcctccgccctcgctcgcgctcgccgtcggaggtaaggaagcctctccctgtctccaaccccatcctgcttggatattcccgcagcagtgatctctcgactcgttagcccttccggatacagtggaaaagtttgccagttctgtttctgtctcgatcgttaggcctcttgtattctgagtcctcgactcctcggattggtatgtgatgtgttgtagtcagctgtgatatcttgggttcttcttgtgcccccaaaaacgtgttattagaagagtagggatatggacggatcgctgttcctctgttaagagcttggcaatttgctggtagtgtagtttgcggcctgattgaaaggaaagctttcattcaacgaactgagcattgttctaggaggaggatatggaacaatgggggttgtaggattatggtaggtggaattgtgtcatgtagcatccattctaagtactctatggtttggggctttagttggtttattgatagaaatcatttactccctccatcccaaattactatttgttttggcttttctagatacatagactttgctatgcatctagatatatgctatgtctagatacgtagctagagctatgtaactgaaaagccaaaacgaatagtaatttgggacggagggagtactaggcaggcaatgagtatgttcataggaggctacaagctcgtcatttttcttagcatccctcctatgttttgctaatcccacctcctaaagatgaactgtgtgctggctgattgtttcgtcatttatttttggttgctcagttttaaactaagttttgatatttcatggtctcatgtaattggggttgcatgcttacccaaatgtatgcagctcagcttgttatctgtggtctgatcaacc

SEQ ID NO: 111870 - DNA, 486 bp, Setaria italica
  Intron number 3 from transcript Si016707m (locus Si016707m .g) derived from phytozome v7.0 (chr-ID scaffold_1; pos 27 672711 to 27673196)
caagaggccacgagctgtttccaacaggtttctattttcatctacatattgatgttttacttgttatgaatactacttttgttacttgtgctatagtaccatttttgagattctttgttcctggttgagtatacacggggaaaaaagaacagataacaaattgagtgtgatcataactattttgatttctaaataactattttgatagcaacgtactaatttcatacgtataacttgttggttttgttccatatattgaaaataagctgactagcttgagcagatggtgaccacaatgaaggatagaagttactgttcataattacttagtaaaggctcttctacagttaatagagttacggattgatctatcagttccttgtcttttgagttttgactgttttatgtttttttcatttataataatcaacagttgtgcatttgaaattaattgagtatggtcatctgctgcaaatattgcagttt

SEQ ID NO: 111871 - DNA, 758 bp, Setaria italica
  Intron number 1 from transcript Si020462m (locus Si020462m .g) derived from phytozome v7.0 (chr-ID scaffold_1; pos 37 028409 to 37029166 reverse strand)
ggttggcaccaagtttggcgtttacaccagttcaagtgagtgagctttgagttgagttgcaatgttcttttcatattatttgtgtgacatacaacctcagtttattcagttttggaacttggctggctacacaattttcatttaagtaattggttggcttgggtgcccataattttaaacaaagtcataataccctggcagaactagttacatttgaattaacaagagcaactctcacatctgaaccaaagttgattcaacctgtgtggtgggggttagtccatggctggtattctgtataacatgttttttggcttaaaagagaagtattttaaagtcaaaggaccctaagaaatctcttcttagagtctggcttgttgctttctaggttttttagttagtcttttttccccttcttttttgtacatattccctctgtgcagtttgttttcatatataaaaaaatgagatcagtaggggcttcccctcctgttaacctcaaaaaaaaagcactttaatttgcctcctccaaatttaccatcttagcatgctttgtttactttatgctctgcaatctgattataagtattgcttatgactgctatggactgtcttttttgtgcttattgatcactacggtttcccttatcttgtcatatcagtttacatagggcgtgaacgcgatccactttcaatatctgaaatgttgattttttttttcctacacagggaatagagctgtcaaatccattcgccca

SEQ ID NO: 111872 - DNA, 839 bp, Setaria italica
  Intron number 1 from transcript Si036865m (locus Si036865m .g) derived from phytozome v7.0 (chr-ID scaffold_9; pos 57 095183 to 57096021 reverse strand)
acgagctcgcctccaccgggccccttgctgcgcaggtgagactgagcctcctctccgtctctcgagagtccagatcggcctgttttgcgctgcgctgatctggatttcgctttagtcgagtggatcagcgacaggcttgagcttatataattggagattgtggtttcctttgggctccgtagtgcggatcagcagcacaattgtcgcgaagtggccttactcttaaccttttgggtacaaatggtttccagatcgagagggagtgaaattggtgttggatctgaacagcactgctggaatttgtcttgcctagtgattgctaattgaggcttacatgaacagtcttgagctcaatattgttgctgtatctgagcctttattttgagctgggacatcaaacaacttacgcacaaaactagtctagatagagctgttaggggtttgttgttgcttccctggtggctggtgcaataatatttagtgatatgtgctaatgttacacattgtctattcgtttctgtgttctaattggagagctatagcaattcagaaaagaaacttgcccaaatactttaagttgcagttcagctggaagtgtgtggctactttttactctaattttgctgtgttcaattcatgttaactacttgattgtaaatactcaccctagtgattctccattcactacttaccatatattggtaaattcatatgtcactgattgcaagcatgtatgggttgttatctgattatccttttatttttttcgctttggaagtaatgtggtcagcttttctcctgcagcttgctgaaattgttaatcaggggaaattggtttc

SEQ ID NO: 111873 - DNA, 923 bp, Setaria italica
  Intron number 1 from transcript Si037742m (locus Si037022m .g) derived from phytozome v7.0 (chr-ID scaffold_9; pos 57 58149 to 5759071 reverse strand)
ggttccgccagcttccggccgctgcccctcgggaggtaagcctgctgatccgtttcctcctcgctcgtggttggatcgtttcatttagggcctgggatctggtgtatgtggttgggttgcatgtatggattgggagttgtgaactagaatcttcttcagctatagtatttggttgggttgttaaaaaggggaccattgcctaatttatctttaccgatactgactgttttccccttttagcttttgccaaccatgagttgcttctgtatgcaacgtacgcgcaaatttcagtgctaatctgtaatcaaatgatggttgtctgatatgaagtattgcccactgaaataatcccaatgcgcagatttttagattatggggtactatttattttccatcctttctattgagtatttgtgagttgttaaaggcatttatcttgtatcatgatatttgaaagtgtattttgaaaccgtacgtaggcacgatagttcactgttcaacttggtctgtgaaaattttgctgcaacattttgtaacctaccttgttcttgtcaagtagcaggtcttttggttctcttatttttaatatattgatggcataacacttcccatttggtctgttcttcatcaatatattccattatcattgcttttatttccaaacttaatggtaagatgtgtaagaaatagtatccatctttgccattgagaaatagtatcttcatcaatatattccattgattgtttttatttttttggacacataactcatatgctactaaagagtgggtgactagctggttgctgttggtattatagcataatttgagggtgcaagatccgtggttttcttaatcctcattcggtgattcaataactgattaaacatactctattgtaggttgaattgcctgccacttctg

SEQ ID NO: 111874 - DNA, 729 bp, Setaria italica
  Intron number 2 from transcript Si038289m (locus Si038289m .g) derived from phytozome v7.0 (chr-ID scaffold_9; pos 18 974292 to 18975020 reverse strand)
ccctggtcagcgacgccgttggcgtgtccttcccggtgagtcctgtccgtctctgttctgattgcctgctctgtcctctgcgtacgtatgccagcaacctgtttgctgtattgcccgagcaaaagaaagcgttcatgaaacggggaaagaaataacgattttctagcagtagcgagtagcaagtgcgcacaatgtggaagcgtgtttggtgattggctgcaaaccaaacctaagaatcagtggatgttcaggtccttgtatttgtcagactgcaaagtggaattcatttcagcaggttcaggtctttcatagtaattccagacccaatggggaattgaatttatagtgcttatatgtataagctttccagaactaagtgttactgctaaatatctgcatggatcgaggcatgcttattgtggttcttgggataaaatagataattagggagtgtggcaaatcagatgatcatagtgcacacaccaagcggcacaaaaactgataaatgatttgagttagcttttggacgcttagacagaaacttgaaccgtgcaactgctggaatctatgaaagtgtatcttctgaacattccataacctctcttattgcatgagtcatgtatcttgcacccctctttaactttataacatctagtcctatctctagtgattttattgataatttttcctgaactcttattttatgctcatgctgattctagatagaag

SEQ ID NO: 111875 - DNA, 923 bp, Setaria italica
  Intron number 1 from transcript Si018022m (locus Si018022m .g) derived from phytozome v7.0 (chr-ID scaffold_1; pos 55 07025 to 5507947 reverse strand)
cagaggaggaggtggagcgggtcaagctcgagcaggttctttgctggttccttctctgactttgatctatcgattcgacgcctcgtgctgtgctctgtggatgaagtagggtatatgcaattatgccactgttttattgggaaattgtgtgcttcctggcagcattggtgagattttggggctcgaatcaagaattgtagttagctgcggactactttgatggttacttgtttaaggaaatgcacttgggcagaatggatttttgggcactgggagctgtgcttttatgtttcgtttatagaggaattgtggagaaggaatgcaaacaaaattgtagggagctatttaagggtatatctttgttggtagttcagtacttaatcattctccactctccacagtggcgttgccttgttatcagagtcaaccattgctcatcagtgattttgaacatgtgcataatttctgtttgaaacttttcctccatcacttgttctttccaattgagaggcatcttattacaaaatatactttttttttacgaaaacattacaaaatatactttctatttactgaaggctccatgctcttattacgacttcataattcataccttctggtactgatgctcccgtttaaataactgacatgaacagcatacttttaactcctatttgatttaacggagctttaataaactgccgtcttcaagtatagtgtgctggctaacctgtgcaatctttttgtttgaattaagttgtttttacatggtgatgtggttaaattggttgtgtgttttcttgctcgtctctaaatggtctagaacatgtgccgtggttctgaattattggtctttctctgtttcttttttatgaactgactggacaggttaagaagaggctagagaaaacagcaaggtattt

SEQ ID NO: 111876 - DNA, 636 bp, Setaria italica
  Intron number 1 from transcript Si035646m (locus Si035646m .g) derived from phytozome v7.0 (chr-ID scaffold_9; pos 57 360588 to 57361223)
gtcgagcaggtccgccgcctcccgtccctcctttgctccttggaatcatatccttcattcgccagcaatccgttggaatcgtacctgaacgaattaaaaaaataccagacctagcatatttaggaaggtctttccgttatttattcgtagaaaatgggggataatcagacagaatatccattgacgtctctgtcgttgtctagattctgttcctcttggattgtttttgatggggaaaaatcatgtgttcggtgggtgtcccccgtccttgcataagctttcgagatgctgcgcgaatcggattggaaggggaatcaaattcagattggaaattatgaccttatgatcaccaaatcagataggaaaccattctgacacaaggaacaatgatccacgcctagatgatgtttatgaaatgcttatgactatggttgtcaggagtttctctcaatacatttttttatcgaaaggaaaaacaaaactctgctgtcgcgttgtgatgaaatacgaatgtatactagcatcagatgtctgctgtccagttgtttgaaccgctctgccttctgcataacttgagttcgtaacgtgaacgctcaccacttcttccactttcagatcaaacgggagatttccact

SEQ ID NO: 111877 - DNA, 929 bp, Setaria italica
  Intron number 1 from transcript Si018604m (locus Si018604m .g) derived from phytozome v7.0 (chr-ID scaffold_1; pos 36 55779 to 3656707)
aatcggccggttgcatatcaccgcctcccatcgaggtaagtttttccgcagtaaattttaccatcatgaaagaacagttagttttcagcagtattttcgtttcttattcgagagtatagtttcggcatgaaacgaagattgggatgcaagtgtagggcatgtttggtcggagggactgggatctgtaatctactaaagtaatattaattaaacagtattattagcaattttgatctataggacctgcacgtcacagcccagtcttaatctactattagtccaagtttacggaagatttggcagaatgagtttgtcgatcgtaggactacacggatggcgtgcgaagccaatagagatatccatgatcgtcagtgtgaatcaagaacatgtgggaatatgggatctgatctataaggtctgggctgtggctgtgaagggtaaggcggggcaggtccgcaggtactctagatcaaaattgcgaatagcactatttaatttgttatgagcgctctgagattcatgctaattttcatgggagggagtattggagcactcctcacaaaggaaaaaggaatgtgattttttcctaaccttgggtcgataattcaagatacagctcaaagtttgggatcattgttgaaaaattttgcaactcagaacatgcacatatatagaatgtaataacggaaaagcgaatgaggggaaacaaacttacccaaaattttaacatgtgaaattatttagtgcagcaaatggaaacggtgtgcattttctttataaactgattccgattaacgaaccactcatctgtgactgaattgaaaataaattttctcttgtctcacaacacaatatcaaaatgggtgccttagatttttgtgttggcgctctttgctgcagatttgcgctaactacatctcggcagtgtt

SEQ ID NO: 111878 - DNA, 910 bp, Setaria italica
  Intron number 1 from transcript Si035163m (locus Si035163m .g) derived from phytozome v7.0 (chr-ID scaffold_9; pos 46 154434 to 46155343 reverse strand)
catcactgcttgccaccaggtaattcctcttaatcatacaatttacatttggttttgttcttgtagtctgagcctcatagggggggatgcacaaaactgctgggtatcgatcttactttactttagtagttaactgtggtctctggatgtgctcttgataattgttgcaattattggattttgactcaaaccagttgagaaaaatttaagtttctgttgggcaatgatggaaaataatctgctgcactttttgttagatatccatgtttcttcagtcttgtacttttacatggaattgcacttgtgcagttaatcttgaacacacttatgatgactgtttcatcgcgaaccaactgtaactaaataagttcagacataccattcgaaaactcacttttggaattaataatcaagtattttaatgtttgaagtcactgagctgttaaggatccaggaccagattttttctctctcaacttgatgcagaatatccaaataggtagtcctgtttcatgtgggttgaaacagggctggatccaatttgcagtatcctgccctgtccagcccaccattggtatagcacaaagctgaatacctaagcattatctgaataatagcagtgaggatatagtgatatttacttgagtttttttatcacaattagttagcagttcacatgcaccataaataagtttattaacagttaaaaaggctcactgtgctggtgttttttcgttgctgatgtcatgtgcgattggttgtttatttatcctcacattggttaccatatctttacctttgttttgaaccttaatacggaagattatgttcttgtactcttgcttctttttcaggaaataaccctttgcttatccgcattctgtagttcctggagtggattaatcaaaat

SEQ ID NO: 111879 - DNA, 710 bp, Setaria italica
  Intron number 1 from transcript Si040159m (locus Si040159m .g) derived from phytozome v7.0 (chr-ID scaffold_9; pos 18 302458 to 18303167)
ggacctcctcctctccgatccccaggtcagggacctttctcccacatcatcctcatgctttctctctcatcagtattgcacgatgtgtggctcgtagtatgaggttcatgtttctcaagctcattccgtttgagaggtcccggtaggtcctgtggttcataggtcttgttcgtgcatgaatctagggttcgctagtggttacgtgttggtggccatcggccatagatgggaggcccccctagctggggtatatgtgacattagtacttttttacttgtggtaatttaggaagcctgcaaagccatggttagaatatctatagtggcatcgaggtcaaaccctagatttgcttccctgtttttatgcgtcaataggctaggagttgtgcatggtcatgttgcagacttatttttttaatcaatttacctttttctttgtttgattagatggtggatgacatcctagacagctagtacgtgaaagtgtaggacatcatagcaagtgggcggtgtcggtgagagtggtcccacctggttgcaccttgtggtaattttggcaggttgtatagcaaggttagaattggtggcgtggaggcgtaccaaaccctagatccacaaccctattttgtagtaggctttgtaattgcatttgtgcatattgtcaacttgatgtttttattaatttacttattttcttcatttaggtggttg

SEQ ID NO: 111880 - DNA, 1043 bp, Setaria italica
  Intron number 1 from transcript Si018660m (locus Si018660m .g) derived from phytozome v7.0 (chr-ID scaffold_1; pos 24 094058 to 24095100)
gttgtctccacagacttctgccattggggatccaagtaagtgattaattagttctagcatgtctacatgtttgttctttttgcttattttagtgtagaaacaggcattcatggtatcatacataaacattggttaatatgaactaaatgagtttaatacaagtatagtttgttgaacagttgagcccatgacatctcttttatttccctcacctctttatcatccctttttactgacatctcttttataagaacatgatttcttgtcgatactggaacttagagcatagaaggaaaagttgatttcttctcaattatatgtcatcattgttgtctaaaattgtctcgaattaccttcctggtcagagcaaatggtataacttttctctttttttttttggcaaaacacactacaaacacggacgtccactcatcaatatgaccctacagctatgagcaccttcaaaaagattaggttggatcttgagactgatgaagtcaccacaggcgcctcgtgcattgcatacaactaaaagaatatagcactattgattcttgaaataattcaagaaaaacaagcacctatgcttagcctatgactcaaacccgaatgagcaggttacaccataaggaacataaccaattgagatacactcagtttaccgtagcatttgtcatgcgacactaatgatccctctaattaacataacattaaaattttatcaatcgaaactaattaatttagaatacattcatagtcatggcatacttttggaatgacttgggagggtttgaagttgcatatatgtttgtggcttttggaatggtcaagcatgaatccatgttttcaatatatcgagtgatatataattttgattcatccacatgtataggcgtagcatattatgccctcaatgcaagaataaaattattggtatgcctatttctataatctagggtgtagttataagagtacaaatatgtcatttaatattgtagctataagagtaatcatcattttcattaggtacaagtacacatact

SEQ ID NO: 111881 - DNA, 1016 bp, Setaria italica
  Intron number 1 from transcript Si040229m (locus Si040229m .g) derived from phytozome v7.0 (chr-ID scaffold_9; pos 15 577431 to 15578446)
tggacaggttcaggaacattgctccgcccccgccggtgaggcattgtccatcgcttccttctctctgattctctgtacaaacctgtagatttgaatttgtgaagccatttgaaaagtctagtggcctctctgcagtttcacatttttattaagaattacaaaagataagatagttcgtttgcaattgggtaggacatcctacaacactgaaaatccaaaacttttataccctgaaatctaagtatttggaaaataatggcagtctcttgttaatgttatcatagtgcattggcttttttttaaaaaaaaatgatagctcaccgctgactgcccttttaactcacagctgcagcttatccactatcacacactagttcatagtgaaatagtttagttatcctctgcagctgcacttttcagctaaaagaaacaagaaattgaagattgtactgcactaaattataacgaaacaccaatggagacagctagtacaaaaaaaacaaaaaaaattgtcttcttagaatcaaagatcacagatcctcctctccgcatttttactttgttaagacttctcagaatcaaagatcacgtattctcctctctacattttttactctgctcagaggaaaagaaaaccctataggaccataacatatcaccttactattcttggaacttggaaacttctgcttggtatgaaaatagtcagattgtgtccttatgttcacagctgcagctacagtttttggcatagcacattccttttttgcatcatcaatcctctggaaaaactaatagagttgtgcaaagaagacatcataatctactgcaagtttttgttagctgcattcatactaaactttgatacccgcggtcgtttcatctctacaaattccaatgcataaaggcacaacttgcatggttgtgattctgcattcatggtgtcacggcaatcatgtactgtttccatccctgtttcaggtacatcagcagccactgcaacttccacctccgcc

SEQ ID NO: 111882 - DNA, 404 bp, Setaria italica
  Intron number 2 from transcript Si014887m (locus Si014887m .g) derived from phytozome v7.0 (chr-ID scaffold_6; pos 37 2471 to 372874)
aagacaacggcgttcttgtttcaagtaatgccccagacattattttttccagcttatcttcatttacatttattcattattagtgcacataaggggtgtttctctatagttatttgagtatttctattccataatgctgtaagtcattaaagtgctctaaattattagattagcttcattgaatctaaaaggtagaaaactgatgcaaccttgccctatgcttaattaatcaaaatcaattgtaaagttttaccattcacattactcggtgagtgcatatattttcaatatcttttttttccaaacacgcaggagagctgcgtatcattgtatttagtatattttcaatatcaattgactaagaggtgttgcagtggctggaagctcatccggagtccacatat

SEQ ID NO: 111883 - DNA, 849 bp, Setaria italica
  Intron number 1 from transcript Si019266m (locus Si019266m .g) derived from phytozome v7.0 (chr-ID scaffold_1; pos 34 365322 to 34366170)
ctggcagaaaggtagctcatttgatatttttctctttgaaggttacttgtttgttaggactgatctgctatcgtgccatattcatatgaagtggactgtcggttctgttcttggccttctgtttgcttaaattgtttgttttgcttagaaggcattcatgctgtcaattgtaggaattctggattctgaagaacaagggaggtctttgcatcagtatatcatcaaaggcgatgactattaccggtattgatgatcggaggtactggagccaccttgccacagaggaatcaaggtagctttttttcccctttaagaatttaatttgcatagcttctcttagcgaatgaatcccattagaattggcattgctgcaaccacttccaaatctcaatttaagttcagcttttgcagcactactgatagtcatactcttgttacactgtgcacagattgtgacattaactagaaaatgctcacggacattttaaacctaatagtgatattgctattatttaatcttttgtctgattgtgaaacataactccttattggctatcaagtttctggtataggaggggtataggaggctgacaacaaagacccttgtccatggccttgggagaatatgttccacaatatttgtccattggtgatatcaagagtgttgttaattcagtattttcgctctctatttgaaagagaaaagttatcttatcatgttgttaggggcattgatggtcatttcactgatttttttttcttggaactattagttccttaattagtgcacatttcttgactcccctgcatgttcattaggccaaccagagaaagtgcggatctaagctt

SEQ ID NO: 111884 - DNA, 711 bp, Setaria italica
  Intron number 1 from transcript Si017318m (locus Si017318m .g) derived from phytozome v7.0 (chr-ID scaffold_1; pos 35 109014 to 35109724 reverse strand)
gacgccaaaggggacacacattaccgtggtaatgccgtgttagtggcaactttttggcccttttttggttgcctttttttttcaaccttttgtgtggagaaaacgtggggttactgttttctcaccgttttttggagggagctgaaacacatgcgtgtgatgcgatagaatctcctagaggagaaatggtgtggcatgcgacggagaaatcaacacagagcactatgaataaataaaagaataaacaagtagattgggatgtgaaactcaaaacaaagtgtaaagggtgtgaccaagaaatacactatgatgatatcttgcattcttctgtaaaaaaagaagaagaggagacgatattttgtctcccagctaaattggatttggatccgggacctggttagtttgggatccaggaaaaacaattacatcgccgtcgatgaccacataccagtttgaaatcaactgctgacgtgtagacctcatgacaaagacaaggcggtacgagacaatttgaactgtgctggatctcaactgttccatactgtaggattgttaatccaaccatatgtacacatgcacgcttaccgggttcgggcgcagcccggatccgcgacgaggcgataagaacgatcgagaggtctccgtcaagcgctagcatcaagcaccaccccccgagtcaccccgcctcctacattagtttacttgccgccg

SEQ ID NO: 111885 - DNA, 591 bp, Setaria italica
  Intron number 2 from transcript Si017439m (locus Si017439m .g) derived from phytozome v7.0 (chr-ID scaffold_1; pos 34 024108 to 34024698)
aggagccgtggtgatttgcacttgacatcccctgaatttttctcatgcttgctcggttaagtctaaatcaggatgccacgtcgttttttgcttggtgtggagaagcatggttctagctctaggttgtcacatcactatatgattttagttgcctagcactattctaactatcttcagaagattttaaacttacctgatttgagggggaactagcttttgggtgcttaggcaagtggttctgcatctgatcattgatgtaagctaacttactggacctagataacatgactttctgggtggcattttgattcaataattgcacatcgtcttgctacttgtgcaagtgtcatactgtctgtgcttaaaattcatggcctatacttgtttaatagctgttttccatctctatgcagtatgtagcatgtatcgctcctatttatgtctgcaagttgtgttctgactcctgagttttgacaaaatgtgaagtggatatccctgctctatctaaaccaagggtttctctgttctttttctcacatatcacttttcattccaggtatattggggtgtacggagtgcttgttctgctca

SEQ ID NO: 111886 - DNA, 589 bp, Setaria italica
  Intron number 1 from transcript Si017900m (locus Si017900m .g) derived from phytozome v7.0 (chr-ID scaffold_1; pos 38 345423 to 38346011)
attgttcatacgaagtgtcaggttggcatagaagatcaagcacatgcggaaaatgatgcacgtgtacgttaccaccaaacctaagaacatggtcggtctcggtcacttggtaatgcatttgtttttgcttttagttggacactgaagcatcttgagggattttctttctttaagtttgatagttttttgggatgatcttttagggtagtagttggtgaagtctgaagtcgtttgattcaactggtcttggcccaaagaaacctttgagacttttgattgcaatacagtataagcccatacttttgctttttcttcctttaatgaacttctgaaacaatcgtaagcccatatagactgcttttggattgacaaaacaagcccacggcctacacgcacagcagcagtacagagcgccgtgaaagaggcctatcggtatgagactgagcccaaatacgacacatcaaagttcaagtcacgcccatcacctgtacggcatccgatccggagcgttaatttctcatctacggtgactgataccgtgatacgccatgaagttgctaagacttgcagccacctgacacgacgcaaa

SEQ ID NO: 111887 - DNA, 540 bp, Setaria italica
  Intron number 1 from transcript Si039726m (locus Si039726m .g) derived from phytozome v7.0 (chr-ID scaffold_9; pos 35 814982 to 35815521)
ggcgctggagtccggcgcggatacggcagaggggggttgcgggagagtgtgggaagtcggggatgacgggcggggcccgcggggcagcgagagagaggaggaggcgcgggagtgggccggcgcaagggagacgggccggcgtggcagcaggccgagcggagaaaaacgggcagaggcaggagcaacgctatgtcgggccgagctgggctgggaagagctgacgggccgaaaagaagaaagaaaaagaaaaggctgggcgggaagagcggacgggccgaaaagaagaaagaaaaagaaaagaaagaaagatttgaaaccaaattcaaaattgaattcaaacaaataaaaacagtgcaccacgaatctaacaataaacatatatgattcattaatttattaaagattttaattgcctaagaaaattaaatgcatcctaaggaatttaaatacaaccttagaaatatttagacacatgcactattgcacttaggtcctggtaaattttattaaattgttgaaaatcagcagaaatatcccggc

SEQ ID NO: 111888 - DNA, 852 bp, Setaria italica
  Intron number 1 from transcript Si033873m (locus Si033873m .g) derived from phytozome v7.0 (chr-ID scaffold_9; pos 11 654912 to 11655763)
catcgtcgccgtcgccatcggcacccacgtagttggtaagtcctctattgcgccgctttaaccaccctcggccgctgtagcctcgtcttaggtgcttgggtggagctccaatggatgcgcgtgccgcagtttccgattctgatctgaggtgggtgtacactgcaagtctgcaatcgggttcgctcggctggtggaaatagggggagttggtataagggactcggatctctagcgactcaactatagaattggagggagcttatgatcaactccgttggatcccattttaagactactgcgttgctctgagtaatgttcccctgttgaaagcagtaccatgaacctgcagtaacagtttgattagtttataggtcagtttcatagcttgatatgtgcttaagtgatgattttggcagttaaaacacctgggggttggtatgaagtaccatttaacagcatgctgtttagacttgcatttcactaggttttataattcagttgctgtaccatgtagccatgacgcttatctgtgaataactggcaaattctttgcttaggatgctcaaaaacatggtatcatcagaacaagttggtcttgacaaccatgaaaatttggatgctacaaccgttagtgcgttggttcatttcatctttttactcttttgttggggaaatcatttggttgttgctttgtgataaccagaccacttattcttatcaaagagtgctgtgctaagtaatgttaatgcataattactgctgaagtttgttgaggaactcaatagagtgctttagttgctgcacacggatcttctgagttgtcttaattttcctatttgcttgcagaatttg

SEQ ID NO: 111889 - DNA, 1031 bp, Setaria italica
  Intron number 1 from transcript Si017324m (locus Si017324m .g) derived from phytozome v7.0 (chr-ID scaffold_1; pos 17 044208 to 17045238)
tcgggtcgtcggagaagcccaacgtcacgtataacgtgagcttcttctcgtttttgctggatccccacgttaatttgacttttagtggatctggtgctaaatagagcaggctaccttgttgcccgaatcatagctcagcaattagtttattcgtaaggttggtccctagattttgtcaatgttaccaatttcagtcgtagggctggcagatttgaagatgtcattgattacagtagtctcccgcaaggatgagatttttaggaatagaagagttttcaacaacacaagtacaactaagaggcaggcattaaacatcgatcaggcaagcaaacaaaattgggatgatttactttgctctgaacttctagatatttacagttttaaatctgatagcatcatattttaggaaaaaagtggaaatttgtgcagaaaccagttgaaagctggatgaacttgtgttttgttttgcaatctgggcttaatttatatagaatattgggattctgtcgccattagcaccatcacaattcctcctgaattcgtagtttgagaggattttaaggctgtgcaccacatcagatgttggatctgtgctaacattattatgagaatttttgtgaatatgagatcaaatttcctccttcagttttatattggcacctaaaaaggaaatgtttccaggattttgttgaaagataacagaattctccatgcattggtggaaaggcacacaaatcaaagaagtactcaagcattgtacatgtataatctttttcacatggtgccattgcaggagattggagtaggtgtagatactgatttgtgttcagtggcaggggtgctgcataaaactataaaagtgaaatatagggatgtggtggtgatgcctgtacataaaactataaaagctattattttaagtagatgtagagatgtttgtgcatttggtttggatgtgtgacaatttattgctttctgatggggggtggtgtacaggatattggagggtgcgacatccaaaagcaagaaat

SEQ ID NO: 111890 - DNA, 778 bp, Setaria italica
  Intron number 3 from transcript Si020415m (locus Si020415m .g) derived from phytozome v7.0 (chr-ID scaffold_1; pos 37 563424 to 37564201)
aggtaatatcttgcacatggtagctaatgaccagatttgcctgaatttaaattttgttgacaggtacatagaagaaaagaggattgttgttttatatgatttaattgtctgacttaaaacttttgagactaaactgttttgatgtatcaatatcttcttatggcttttgttaaaccgttaaatctgcatctgctgccccctagaatttggttcagagtgcgaaatatgtgttcctttcgaagaaaataggttatcaaagattggtgtaaagttcggtacacaaattccaggatgtgagttatcttgcaggcaattgtcaagttgatgatggtttgttttgtccaagttagtacttgactgatgtcttgaacaaatgatgtcatgaaaacaaactgcatgatgttacttatgtagatctcaattgttttatggttattgccatgctttaattgtttaaataattttccagtacaaatgacatactacatatctgaaaaattatcatctagatggttacaattaaaattattattttaagaagtcatgtgcgtgtcgcacgtgcatctatgctagtctttgtaaaccttgcaaagaaatactttaggggttatctagactttggttatacttgaggaagtaatttaaattttttccttttgaaaatttattacaagtctgcgtgttagttttgttttggaagctacgtctacgtgttagtttttttgaaagatgtgttagttttttttgaagctaaacatctacgtgttatattagttgg

SEQ ID NO: 111891 - DNA, 716 bp, Setaria italica
  Intron number 1 from transcript Si033876m (locus Si033876m .g) derived from phytozome v7.0 (chr-ID scaffold_9; pos 48 464963 to 48465678)
caaagttagctgagaggtacagatgcattattctgttttctaattaatttgattctgttattttcttgtggaggtgagagactcttcattgaatctgcaattagcgtggagaattggagatactccctccatttttataaggcgtgccatttatgaatcaaatcatgtaaccttcaaccaacaattagcctcacatactgtaaatgttttaccattggattgacatttgaaagtacttcttacggttatgatctcgttgctatacttttcctgtgaagttaacatcaccactaccaacaggaaagtatattagacatttagcaaagtcctgctcgtggaagggtagtattcctgcatgataatgcgtatcagagaaattaagagtcaaagtttattttgggaaataaactcatctggtgcctcttggggagtcttcagtccacagtatttcatccacaatttgtaattgatattagtgttttgcatagcttgtctgtctagtcttaactgattaaacttttgattttgaaatgtctgttatctcgaaaagtagaaagcatattaatttagtagaatgagtgagcagacatgaaataagcttccaaccttcacagaattgttatattcaatctgtttctctttctaaatgattacataacattgagcattttcttgttgtagatacccccacattggtaaagaccacttggtaaagc

SEQ ID NO: 111892 - DNA, 706 bp, Setaria italica
  Intron number 1 from transcript Si038796m (locus Si038796m .g) derived from phytozome v7.0 (chr-ID scaffold_9; pos 18 398197 to 18398902)
aaggtgaagatgatgatgaggacgacgatgatgatgagtgatggctatggaagggcctcccctttttggatcttgatgccaaagggggagtgagctcaccatagaccatgtggtggatgtggtggctactatctatccttttatcttttcgcgatggactttagtttgttggcttgtggacatgtaagacatttatgtggtgtgatgtgtgtgtgccaagtgagattttaaaatttgtaagacttatttatgctttgctatgttagtgtagatatagaacttaatgcttgtgtgatgatcatggtttgatgtattgtttatttccactttgttggtgtgctatattttatcatatgcatcatcatgatattcatgctatactttgcaccccacgaatgcaaggatacagggggagctcttacaataggatgatcatggtcattttgattctattttgaaaaatgcacatattaagggggagctcacatatatgattggattcaaaatggttatatattttttgacccttaattgtgttgtcatcaatcaccaaaaagggggagattgaaattcacagaagaaattcctccagtcatgtcacactggaatgcaaaggagagcctttgtggaatgtaggaccagaattgtgtgcagctcaagtgcctaacaagagttatttcttcgtagaagagaacattgactcaaa

SEQ ID NO: 111893 - DNA, 999 bp, Setaria italica
  Intron number 3 from transcript Si013723m (locus Si013723m .g) derived from phytozome v7.0 (chr-ID scaffold_6; pos 17 27391 to 1728389 reverse strand)
ctccaactcagggtctttgtcgaagtgcgcgataggtaagatcatccatctccgtaagaggatatttatggcttgacgtatgagcagaccataactaacctgggctagaccagttattagtgaatcgattggaactcaaaactcaaaagtggtgatatgctgatatatatcttgtctttgttctagtgttttgagtcatttattgcctttttctgcattcatgggagcttggattttaacagatcgcaagttgttagatttttgccccacgacaatcaataatgcatgtttggttcaaagcaagcaataatttgcacttcagccataaatttgcatgcttcctatggtaaccaagtggcattctctgtacagtatattcagtgtgcaactgtgcatgtatggcaacatgtgtggttgtaacaatgtattaagtcatgatacgtccttcatttagtcagccaacattttacatgttcattatgaaatagcagtaatgataggaggtctgatcagtatttacatgttcttatggtaaccttgaggcctgagctcttgatggctatgttgttatttgttaaattatcatcatgagattgccatgtctgtggatgcaaaaatttacacatgtcgagcaatgacactaatagatttgcatgtttctttactccggcttaagagatcgttatatatttctaacggaaagagattgtgttatgaaatgcgtcatgtatacagaattcttatgtacattgatgacttggtatgattgcttatttctgaagacattcatactattttatttaaggtagataaacgaggatttgtaatgatttgattaatcataaccggctctttgctgcagacttctctggaaatactgcaaacttactattaacttgcttaggtctgcaagcatgcatgctggtgcatggtaaattaggccattcctaactttcatggttttactctgtatatagacgaaaggaggtgagttacaag

SEQ ID NO: 111894 - DNA, 960 bp, Setaria italica
  Intron number 1 from transcript Si017205m (locus Si017205m .g) derived from phytozome v7.0 (chr-ID scaffold_1; pos 68 64792 to 6865751 reverse strand)
ccgcaaggaggccgagaactgcgactgcctccaaggtaatgtttgctgcccttctcctcgtagatctgttcgttccgttggaaatgctcgtaaattcggcgcgatttgggggttgtcagcgtgcggatctagtgcatttttatgaggtcataagagtgataagttgcaatgttgtggttcacggcttgtagatctagccaattgtttgtgcggtttccccgttatttttgtgaatgcattcaatttattcccgtgcttggatgaaatgcgtggctcggtttccacggattagtgtttgccgtgcagtgctatgcggttgaaagtaccgagatccagtttattctgtaattgctcgagtggttctggtagctagcagtaagcttgttgtgttcagggcatttaatatggcatttctacttgcatggttagactttattgtcatgatcctcaaccacaaatttggccactgttgttctgctcggtggctctcgcgtgctactaacaaggctttattatgccatttgactatagagatgtgaactcatataactgatgagtaattgcaaaagttttccttgcaatctgtattcaaactctgttgctggttcctggttgtgtaaggtttctaaatcaactgttaacttattttctttaggttggttctgttggacttatctgatactcatatttcactatgtatgaaaatcgtgcaaatgctgtgcctatgagaaaatccatttgtcaggccagcaaaatggttttcaactcatcttggctagtggttccgaaggatatgtgcttgggattcatgttagggtgttgcaactaggatctccattatcgtatatgttgctatccttttaatttatacgtgctccagctatgaaatcgtatctgaaataatcttttttgttttcttctgcaggatttcaggtttgccactcattgggtggaggtact

SEQ ID NO: 111895 - DNA, 686 bp, Setaria italica
  Intron number 2 from transcript Si016336m (locus Si016336m .g) derived from phytozome v7.0 (chr-ID scaffold_1; pos 36 999846 to 37000531 reverse strand)
gaggagaggtgctcgcccaaggagatctgcgacaagtgagtcagcaggcccttcgcctgaaatccttgccttccagtcgggcggtgcttctcttctaattgggaattcgatcaattggtaatttgggtgcgcagatgattcgttttagtgttatatagtttcgtttgggctgtctgatttcgggagttttaggtacagggcgaactggcgaggcgaggtgaattgctgattcttttgcgctgtgacgtcaattcgctagacactcttcactgccttatgatggttgataattgaacttgaatacaggggaaattacgtcgaataaattggtttgcgatgaatttcagttaggcacttaggctctgttattcctaaatcacattgaacacaagtgttcgtgctacaatattgaaccaagtggatttgattcttgcaatagttgaccgatgacttaatcgtgatcctgcagttctgtttcattgtatcttcattggctacagtttgattagtgcttgatcatttgacctatccctagacccattgatttttactgtcttgtatacatgaagtattcaactatcactcttgatttgctagcttgtttcttagctgcatatatcaaatgaaagaaagaaagaaaaacactttcttcatagaaacctttctttactgaaaatgcaggtacc

SEQ ID NO: 111896 - DNA, 583 bp, Setaria italica
  Intron number 4 from transcript Si014320m (locus Si014320m .g) derived from phytozome v7.0 (chr-ID scaffold_6; pos 34 200938 to 34201520 reverse strand)
gctctccggacaaagcttgcaacctagcaaagcaggtaggtattgcatttatctttcgatttgtcgtacaagtttctgagttgttattatcttgtttcatttgtttgaatctagtctggaataaaacatgcaaaattgcacttgttatgtcttccatagttcatcagaacagatggctcatgtagggctttagtttgagttggattgtgatgtcctgtttcagtgcaacagttgtgcatcttgtctatggtgacataattacatattgcattgttcggtacagtgcttggttcttcatacgttggtatgataggcatttggtgcttatttgctacgcatactaatctaggaagcagtaaaaaccttgctagcagtagtagtagttctcttcatcatacatttcttaatattgttttttctataatgagctatcaagctagaagaattgcatagtattttcccctgattgagaagacggaattagtagaacagtttattttctaggtgttacaaatgcatgatacaacatgacatactattctttgcaggcatttgacgaggctatctctgagttggacaccct

SEQ ID NO: 111897 - DNA, 1007 bp, Setaria italica
  Intron number 2 from transcript Si018968m (locus Si018967m .g) derived from phytozome v7.0 (chr-ID scaffold_1; pos 31 452099 to 31453105 reverse strand)
gcctcttggggtgccgacgcagtctgctcacccgggtacgcccccttcgttcgatgcagctccttttgtgcctgctgttatcttacttgtcaagatgtaataatatggttttcttgtgttgcgaagaaagatgtagtcatggacaaacggttgtttaattattagcgtgcgtaggcatgtttgtagacttgttggagctccgcccgatttgtcaatagttttttgtgattagatatgcgctgtagatccttttggggaacttgtattgattatgcttctgttaatccgttgctaaactcaacgtttgtcaaacagaaaggcatggtttatttgtgtcaattttagtttctcagtgttggaacattatgctcatggagcgttgcttgttagcaccagttgatcctagtttctgatttggtactggtggtatagtattatgctcataggatgccaagcatatatattgacatttttgtattttgtatctgaatcaatccttttccatcaagatataatttccagtgatgtttatccaattgtacgatgtactttcaatttcttttgagataaggatcctggatatttaagcagattgcttgcgcaactcttctgtaagatcttatacagtgtacaaaatttcagatcattctttcttttccagctacaaattcttttgcaatatgacttcaactgacattcatatatgaccgattttagtcatcaatggccttaacatgcactgtttgccagattagagcttccttctcttgtacgagtattagactacgtagtagagataaggaccgattttagttttcttgatgtgaacacttgtattgtccatgtgtaaaaaggatgtaacgggcagaactggtacatgtggaattagttctttttcatggttgcatttgtggttttgatttataattcgagtttgtctcacgcccctttctcgcgtcatgaattactgaaatcttgtacttgcggtgcagctcgcttctcaccag

SEQ ID NO: 111898 - DNA, 731 bp, Setaria italica
  Intron number 1 from transcript Si017842m (locus Si017842m .g) derived from phytozome v7.0 (chr-ID scaffold_1; pos 11 318469 to 11319199 reverse strand)
ggtcaaggaagtcgccgcctccccggctccctccggtagttcaacacttcaactcgctccctaatttctcaattccccgaatggcgttgggacggttttttctaatcgataagtgaacggcaccgaggttcctgctttgtggagtaggattaacgccgttttgcattctgattagtaatttggcatagtgaggtcctgagtccatttcagtgatcagtatgctaactacctgagtgggcttctcttgtgtaacttgatagctctatctgtgaggctactagtagatgttggcccatttctagaattagataggcacatcacacaaggcggcatttctctccaatgctgccgtgctgcaatcatggcttcacttagctcatagctcccaaaagcttgtgtggccttgccactttgatgtaatttgatgattgatgatcattattttcagctccgccattgattttgtcaaagtagtggttcatgtgaaagacgtgcatttttggataatgtccttcaccttccttgtggaaattaaaatccattgtcatttccatactagcttggcttagtaacattggaatgaccgcttgatgattcccaaagtttccttaagtcacattttgttttctatatatgttgacttttcttctgctctgttgaaaccatgccaattttatgtgcattcttcactggattatcagcagggaagagtactcaagcaactagaaggg

SEQ ID NO: 111899 - DNA, 988 bp, Setaria italica
  Intron number 2 from transcript Si035685m (locus Si035685m .g) derived from phytozome v7.0 (chr-ID scaffold_9; pos 49 357787 to 49358774 reverse strand)
ttcctgctcaggaggtataacgctaccagttttaggtgcttctctttagatgcatggtatttccgttgatttgttcctgggtcttatttctccgtgtcccacttggatgtttgcccgtgttctacatgggctcgctagtagttatgcgagttcactatcgcctagtcctgctatgttggctactttgctattagatttcagttctgctatactagtgcgagggcctgtcgttacatcttatttaaaacagtgaatccatggtgttccatcttgcacacaggactcgaattatttggcacaattaattcgatatttgatagatgttcatgagtctccacaattgaccattttttgtttatctatgctgttataatatgttgatgtacactatatctgttgataaagcccacttagctcagaggttagagcatcgcatttgtaatgcgagggtcatcggttcaaatccgatagtcggcttttttttccctattcatgttccctaaacaagaatttctcttcttctctgaggtaaattgggaatacagggtctgttatgtcattagaccttacaattttgctggatacaaatcataaaagtatatacaaaatatttggaagttgatgaaattacatttttggtgatacttttagtagattttactctgtatcctttggtttgattcagttagttttgatgtattctgtaatgtaaattgaatgcaatttattgtgtaaaatgaaattcaataaaacaaaaagcatgtcctgttaactgttatcgagggccttgtttaattagggcatcagtgtagaggtagatgtagttaatgaacagtagtatctcctctcttggatggtgacctctgcttggtctacttgactggatatgtggtctgttcactgatttatattttgatattttgaatcttaaaactgcatgttaatatttttgaatcttaaaactgcaggttaagctctacttgtagcc

SEQ ID NO: 111900 - DNA, 813 bp, Setaria italica; identical to SEQ ID NO: 111791
  Intron number 1 from transcript Si034808m (locus Si034808m .g) derived from phytozome v7.0 (chr-ID scaffold_9; pos 44 077389 to 44078201 reverse strand)

SEQ ID NO: 111901 - DNA, 785 bp, Setaria italica
  Intron number 1 from transcript Si018501m (locus Si018504m .g) derived from phytozome v7.0 (chr-ID scaffold_1; pos 48 26995 to 4827779)
acgtctcctccgcctccgcctcgcgcagggttagggtttgctctgctccccatcttgtcgcttttgtttttttcctgtgagatttggtagggaaggcctgatctgtgtcttccggtgcctgattcagcgtctcttgatcgatctgcgcggttttcttgtgatttttttggggtgttgattcgttggtgcggggaattccacgggccgtggaatcgcgaaggggacgggcgcttcgaggttcgtgtgttgattcggtcttcggttgggggtttcttctgttcaggttgagtcttttgggtggggaaatgaaaacgcgttcttgtttttttcttcttcttattttttttaaaaattgtatgaaggttgtttctcttgtccaaacgattaggctttacctgtcttttttttgtctgattttttagagttcgtagcgctgctaaatgttactagtgattcaagtgttttattccatggaaatcgtgcgtatctagttgtaagcggtggattagttaaattacttggcagatttggtgcatattgtcctcgatttgcatcaccatggtttttttttacaaagattggaattgatataccctgatttgtttaggaatgtcgttttgatttgtattacacaacgtattttgtgatagtggcttccgcgatgctctccctaaaaattaggatctcgtttcatcaagtacaacatctgcatgacttatatttgctgaagtgacaaatcgtgtggttatttacatcgattgtttaatgtgcagcttatagtagtc

SEQ ID NO: 111902 - DNA, 726 bp, Setaria italica
  Intron number 4 from transcript Si017607m (locus Si017607m .g) derived from phytozome v7.0 (chr-ID scaffold_1; pos 98 92788 to 9893513 reverse strand)
gggcctcacagttgttcaagacagctatagacacggtaaacaatgcgtcatcgaacaatatctttattagagggtggaaaaaaacagtttttctgtttgtgctttactgaaactttggtaggagcttgcttatagtagcatgtcatttaaatgctctgctttctgtttccactttctttagattgagggtgtaactgtcagttccctggatgatgtgcccaccgaccctgcttcttcaaatcaataagaaatacactggattttgacttttcagatgacaacgaaggtaaattatcttgatccaaatacattttgaaagcaataactatgcgacctcaagtctaacatgaaattgtggctcattttattatgtcaaagagttcataccactctgcggcatggtagccttcttgtacagaggagcagcatacatgctaaaatgtttatttttaatggcaagccttttcatgttaatgaattatcacagcctcaaaaaagaaaataaaaggattactgattagtgattagtgaatgtgtgcatcagctttatgcatatgaatctagcataggcagattattgacattcgttatgatgctatcatcagagcataagttcaatttccatcatagaagaaccatcagtcagtttggaccctatcataattctcatataaacatcccctaataagttagtcataactagttctctggtgtggatacaaatcg

SEQ ID NO: 111903 - DNA, 848 bp, Setaria italica
  Intron number 2 from transcript Si037418m (locus Si037418m .g) derived from phytozome v7.0 (chr-ID scaffold_9; pos 42 858773 to 42859620)
tcaggccaaagaagagcgggccgtccgggagcaaggtacgtatacatgtgccacaattgcatgtcacgtgagaattacttatgaagttttcttatcctgtatggccaatgcgagctttatttccctgaattcgttcactcccgcacttgcctaagtttcacggagtttagttcatccagagaaagaactgcacttagatacagcagtgctagctgcagccaattctgaacacatgcaggctatagcaggacgtatgagtcgctgaattttgagttaggagcaagtgatgctatattcttttgtagttttgtaccatgaagagttatgatctcttgcatggtgatagttgttacccttagcttcgattatcagatcgtcagctccactatcaaaacactgtcgccatcatgagaagttagttggagatgccttccactgcggtttcactttcacctcctgttttcttcgtcactttgcctccaaatgacctttattttcaccaggaactgaaaccgtgcagctttctattccttttaaccttttgtcttgtcaggcagggcttgtttacttgaaacgcatttagctagctttcacgcaacgccaaaactctcccagcaaagctgtttacagaggctaaatgtgagccagctaacaaaaagtaggattaattgcatgggcaccaaattatattgtaggctgtcagttcttaaagaagcccctggaacttagctgcatcacgttgctctccttgatacttactacgtagctcatgctacgcatgcatctgcatgttccgtttctgaagctgaaaactctctgactgtctggccattacctatgtgcagggg

SEQ ID NO: 111904 - DNA, 825 bp, Setaria italica
  Intron number 1 from transcript Si038128m (locus Si038128m .g) derived from phytozome v7.0 (chr-ID scaffold_9; pos 55 280673 to 55281497 reverse strand)
gccgttcccaagaagaaggtgtgttcacttctccccgctatacttcgcgttcaagcctgttacttatgtgcctactaggtgtgtcgtctgttcgtggtaatcgtggctggtgatgcgatatagtgtgctgcactctaggtgtttgttgaattgcctgtgagcagaaatgtgtgtcatttcgacctttgtgctagcggatcataaaggtagatggtgttccgtgtttaggataatctacctggagcattaagtaccttaagtcaaaggggtacgatagtttgggctgatttccaaatgcgtgcaaagatgatcaaaatagtctaagttttggtattaataacagagcaagtaaactgttttttatgtgtttgatgttttgagtggtaaagtcgatgtaggtgtaactcatcatgatactgtttggccagtgtgataaatcagggaaacagataagaatcaacactgaacaaccattcagaaatcgttcttatttcaggcatgttatgatcatctaacacctttcaacatttggatgtatgcagtggactgattttatagaaaaatcattgacttgtacctctgtcataacaacatatgtatccaactgtcttaaaagatgcatcatattttggcctggtatatatgtttgttcgtcagtccaatatgcatcgtttcaccagctttacattcttcaggttggaatttagaaaattgttctttggtttgtgcttgttgccttttctagacactgatgtcagtagatgcccttatactctcttatgcatgtcaggtctccaaatacaagaagggcttgaggaacggacc

SEQ ID NO: 111905 - DNA, 909 bp, Setaria italica
  Intron number 2 from transcript Si035517m (locus Si035517m .g) derived from phytozome v7.0 (chr-ID scaffold_9; pos 42 694549 to 42695457)
gcgcaccgcaccgggatcctccgccggcggcgcaggtcagtaaaacactaaacagcgccgcgagtcacgtgtcggtagtacgtgggtagatagcaatcctctgctctgctctgcttttgacagtggcgggtgagctgggcggtgtgctgttcgcctgtcctgaagctggcgactgggggttgggtttaatgcactcttcgtcacattttgctgttgccgggttggtagtttctggtacagagtacaggctgcaaattcagattagtgggggctcttggaaaaacttcccattactgttttaccgctaccttttaaccgaacccaattgcccgtccactggaaatggttgggctttaccattttttttctgcggaggtgatgatgatagtgcagtagtcactctgattagttgggctgctagtaatcactctggactgcaccaatacacaagacagggtgcaagttcaggtttctgcactatacagcattgcagcaataatcctgttcttgagactcctttttcttctttctttcatataatcgacatgttttaccgctcgacatgttgtgagaatgattaaggggagactcagttggactggatcgaaacgaacaagtttgggtgtcacgggacgagagttatctggttcaattatgcgtggaatcaaaatgcgtacacgagaggagaatatgtatctatattacaagtctgaatagtcggttatcaatcagagaaggctatctgtcactctctactgtacattgattgtcacgttttctctgtaaagcaattctgttcctgcatgaactgtattcaatcgatgcttactattctcagaagtttataattcacctcttctttttatatatttcgttcagagctggaggagggcaaggtgagcgccacaa

SEQ ID NO: 111906 - DNA, 713 bp, Setaria italica
  Intron number 1 from transcript Si019621m (locus Si019621m .g) derived from phytozome v7.0 (chr-ID scaffold_1; pos 41 37975 to 4138687 reverse strand)
aacggtcgagatattcagggccaaacctcccagaggtacgtatgttatattgcaacatatcacaagttggacatcgggtaggtgaagctaggctaggtagctaaataaaattcgagaacaggccttccagaactgaaactacaacagcacagtttatttaaaagatacagttttcaaatacccggacatcctttcttccccagttaaaagtatagaaacacgaatggccaaatttcattccaccataacctaattactcgattatgtgtttcagttcgtacaaaaaacaacattgcacgtttcagaggaccagattcattcaaagcttagtgagcctggacgactctggcttatactttttttgaattattttaatgaaagctaaaaagacacgtagtgttgatatggcctgatcactaaagaaaattttcctatcaatatggccctgagctgcaacactaggaaatagttttcaatgctctgtctaactcttttgatgatgcacatctaattaatggcaacatgtacagagcttttggtatggtcctttgttctcagttgaagtaaccacttgcccttgtaaccctactgccatctgtcaaactcaaatattttcaacatttgtccaactcaaatagctgccacactaggaaatagtttccaacattctaacttaaatattctttccattcctgtacaggacatctggtgcc

SEQ ID NO: 111907 - DNA, 1007 bp, Setaria italica
  Intron number 2 from transcript Si018183m (locus Si018183m .g) derived from phytozome v7.0 (chr-ID scaffold_1; pos 66 02534 to 6603540)
ttcgagtactgcagccctgcctgcaggttagatccacatcccgagccgccgatcgattggtctcttgtttctcaaacacagttcatttcttcaggatttttctgccttgtgtttagggctttgcacaagtacaatcagtcactgtcctttcagatattcccttggtttttaatttcctggctcaagaatttcagatcaatgatgatccatatatgcgcagatctcatgaacgaattcccccttttctttgattctcccagcgatctgtatgtacagaataatggagtatatcccttgattgtttttttattgtttgctgaattgcaaagagttcatggtcaaaataggcatcacatatcccccttctgctctttgtaatttgttgagaactagctaattgcacacttattttcactacaagaattaggaagttatgcttcttctaactgagaatttgggaattattgattgatcttacatggtgtacataaagcgtctattatgcgagaaatttgcatgatcctatgttctcaagtatcaatctaggaaaaatatattagctacctttgtttcctcatcagctctcatgatgcaaaagtgaagtggtttattaagcaagttaatcatataagcactgagacggcagattagaatgtgtgtactctgatttcttggtttagcgtgtattttaacttttaagtagcctatgaacctaagatcttataatccgtgcaaaacctgaaattccagatccatgttgatgctagcagttaaattaatcaaacaaaattccagagatgataaattccatcgagtaattttcttactgagattcatcattagccaccgatgcttagctatgatgagtgcatctgtaaatcgcatccagataactaaattacagactttctgacatgcatacatatatgtttgttacgacgatgtttgacaaagttaaattcaatttatcagcttgaaggagctgattgagcagtatcagcacgcta

SEQ ID NO: 111908 - DNA, 595 bp, Setaria italica
  Intron number 2 from transcript Si019484m (locus Si019484m .g) derived from phytozome v7.0 (chr-ID scaffold_1; pos 28 083946 to 28084540)
agcttctttggcagcctaatcaagtatataacgaggtattaatgttgtttgaagacttgtgtcttgtttgtttcttgcataattcttgattatgctggcatgatgcagcctccagtcgtctagaacatctactctattgtttgtgtcgtctaatttgttcttcattcagtgtgatgatatcacttgaggcaaaatactaacttctaccactactcctgaccctaaaccctgagctaaataggtctttagtagccctactttattaaaaaaaatcaagtagccatttctgaaagatgaacacattcagctgcttgttgttctatttggaagccccatggccatgagtacttacgcagtgaaggtgcagtcttcaggttttgagcctttaacagggaagtgggatgttttaaacttgtccttgatggactagcaagcacgttacatctgaatcagcatggacttttttattcacacattgcaaattttgttcaatttacttgcacatttgctttttgccctctgatgctaatatcaatgctaacagtttgtaacatgatcttttgtgttggcaatcttcagtggtccagttcttgct

SEQ ID NO: 111909 - DNA, 396 bp, Setaria italica
  Intron number 1 from transcript Si035914m (locus Si035906m .g) derived from phytozome v7.0 (chr-ID scaffold_9; pos 71 60470 to 7160865 reverse strand)
tcgaccggaggcgcggcttcgccttcggctccaaggtagggaggagcttctggttccctgttacggtgaaagctttgtgtctaaacgggtgtagacttctattattagaatgatgaaaaataagttggatcttatctctaacttctttgtggcgggcttatccatttcctgttttttttttgtatccttgcttgcggaggaaggatttcaccctgcttggttttgatgtgattatcatgcaatctgttcattttatatcttctcgagattcggcttgtcatgtatgattcgtttgagcatggaaatggggtggttgcctgatgcttttgctcgttacgcgcatggtctcgagcggcagcagctcaactctaggaccaagaggcgaagtagtgtggt

SEQ ID NO: 111910 - DNA, 919 bp, Setaria italica
  Intron number 1 from transcript Si036797m (locus Si036797m .g) derived from phytozome v7.0 (chr-ID scaffold_9; pos 53 642855 to 53643773 reverse strand)
gccgccacgctcgatctcagcgaggccttcgagatgtgcgtgctctcgctttgcttacgttcactcgctcttttcagttttcctggcctcctgccttttcgatctctgaacttttttttcggcgatcgctttactttttttttcgatctcttaaccaaaattgtaaaaaaaccgtaggcgatctgattaaatgtttactccactctgttataacaaacaacagtactaatacttccgatgttccttggcacggagcgttacaaattgttgtgaattacgcaagtttagtcattagctaataatgcctattggtaagtttcttcaatgtagaaaaggatatggtttttgcttcttggtagcacaagtaatcaaattctcttctggtagattgcacttcgttataaaataaaaaaattgttagttagccaccctctcatgtttacgtagacatgatcagtacatataccttttgttaccgaacaatgatttcaagtttgttaagggtttcatgggaaacaaaagagtttacatacagaagagttttagttagaaatgttaactcaaatccaatgaagataaaccatgattagattccacaaagaagagccttacatgttcttttgttctttcttttattttttctcgaactaagcaggagagctatgtatcatttcattacattaaggtagaaaaagagtacatgagtcaagatagacccactcgagtacaagagcatcacacacacccacgtaccaaaagttcttttgttctttcagtaattttcttctacctttagcttaatttattttttgtatttgtggtatttatttttgaacatcccttttcctgaaattgaactgataagtcatgtttcgtgtaaccagtgctaaggctgaatctcacactgctgacctcgata

SEQ ID NO: 111911 - DNA, 715 bp, Setaria italica
  Intron number 3 from transcript Si013576m (locus Si013576m .g) derived from phytozome v7.0 (chr-ID scaffold_6; pos 34 873310 to 34874024)
tggagtgctcgagaaaaagtaataagcgtattctggtacggcccatgctatttcctatgcttaaaaggttttgcttcagtccatggtataagcttcagttatttcatgtcccattgcaccttctcaagcagtatcgcactataagttcatcatgctaaaaatgattttgaaacttgatagcaaataaggattattcatagctgtattaagataaagtgaaacaacatagggcatgcctagttttaagaattctttcatgcttgaaaaaattatttctaagatcattattgttagcattgaaacttgaaagcaatatcagttagattagtagcaaaaaacgtttctttcgggcagaagccatgttttgatctaggtcataattcttatatttgcttgtaatctaggctcaaaataggttagatggaaatccttttgtgtttcctgtgatcttccacccttccttttatggttccagtatcagtacagtggggtaatgcaataacattatgctggttccatcagtatattaagtcatgtgtaggattttcattgatctgctcagttttggtttctgttgatttccatttccatcaatacaattagcatgtttgaccattaaacatctaatattacctatggcgcactatcaattatcatctatgctattctatcaataatattattggctaacatggctttaaaaaataggttttat

SEQ ID NO: 111912 - DNA, 742 bp, Setaria italica
  Intron number 2 from transcript Si018512m (locus Si018512m .g) derived from phytozome v7.0 (chr-ID scaffold_1; pos 41 427794 to 41428535 reverse strand)
tcttgcagtcaaagtgcccggcgcccctactgaaggtaacagatactactctgttctttttattattttacagtttttgcaaaatgatgcgtccattttgaattttttttagcatgtctacgttgccaattttcggttcattggtatcagtacagagttatacaccaaagatcgggataatcatatgttaaaatttaggcctaaaatagggctgcattgtgcctagatggtgacagtagtgtgttagctttcttggcagcaaaatggtcccaacttctaaaaaaaacatgaacaatgatagatcagacagatttttgaagcctgaacgctctgcgttttcgtcttggcacgctgacagtcatctgcaagtgacactcacgcgtaatctgaattactaacgtctctaggccaaaataaaatataggtgtgggagagagtgagatgggccaggtgtcagccaattttgtatccatcaggtccatcttaactggcatgcctattagatctcagtaaatgatgtggagagtcatcagttgtgcactgaaaattccatccgcaaattcggaatgctatctgaaattagcgcctgaaacaagttctgaactgaagaaaaacttgggtcttgtatgcattaccttttgtcctttaagctgtgcgcgtgattcgcttatctttcgtcgtctcactgctctgcttccatgttgaaggtcctgcacctgcttctggatcggcacctgccgcc

SEQ ID NO: 111913 - DNA, 307 bp, Setaria italica
  Intron number 2 from transcript Si036184m (locus Si036184m .g) derived from phytozome v7.0 (chr-ID scaffold_9; pos 78 58127 to 7858433 reverse strand)
gaatcgtgacattcttccttgtccgagtttttaaggtgggtttctgcgcaccatttccctttataatcttccactgttgttgtataccatgctgttctgtcttatgatcttcctgttttaaccaagtgacatatacatcactatttcaagtaaaccattattatattgcaagaacaaatgtggaaaacattctgatttccagctttgatttagattattgggatgtctggtaattttatttaatttttccgtatctaatggatttgttttgttatcacttgtaatgcaggttgttccacctgtcaag

SEQ ID NO: 111914 - DNA, 642 bp, Setaria italica
  Intron number 1 from transcript Si017674m (locus Si017674m .g) derived from phytozome v7.0 (chr-ID scaffold_1; pos 24 913044 to 24913685 reverse strand)
tccgccaccgccggtgatcgctgtaccggtgtccggtgagctgctcgttgactcttagtgctaaaattgcgttcttttccttgataaagttgcgttcttcgccgatttactgcctcccgatgcttgcagcgtttgactccttgatgaattcgagttcatgatgcttcctggtgcttcaaagcagaactttttaattgcgaatttgttttgccgctgtttgttggaggtaaaaggtgtgaggctttctggttcatgtccttgctaaagttgaagtgttgatgtttactgatcctaacttgtaaacgcaagagcttcgtgctcttgatttggacggactattttgtactaattgtatggttatgaaatttatctgtgttctttgttttggtgcttcgacgtggtgcaaaatttcagttcttggtgctggaataattcagcagctgcgctgctttggatgtttcagtttgataatcattttggtacggtgaaattgcgattgcagcttggcaattttctctggttcatctcttaattctgattgtgttcgttaggcatacttgtgacttgtcttgtcgatttcattagtgggtccattgatttgtcttgattaatttcttttgtcctccgtttcagagaagccgg

SEQ ID NO: 111915 - DNA, 527 bp, Setaria italica
  Intron number 3 from transcript Si039913m (locus Si039913m .g) derived from phytozome v7.0 (chr-ID scaffold_9; pos 44 281840 to 44282366 reverse strand)
ggcattggtggttctgaggaagtggagcagcggaggtcagttcatttgaaatgctgtcaattctgatatcctatcacattgtagtgtaaggcttaccaattcagtagccacgacaaatctgcaagtgagcttcaataatatgaacttggaaatcaaattgctactatgctgcagttttgcagatttggcttgtggatctgttttgtgcaaattgtgagattcaacaataagtccaaattcttcaactgtatcagcatagaatataaataagtgttagtttttttgttaaaaattctaccatgtccccctccatttttaagattgatggtaaaactgatgactgatgctatacattaagccatacgtgccaactatactctctgtatcttttaagtgtggccttttaaattttctcagcattaattaacaaataagcagaacacctttttgttttccatgtatggagttcatccgacagaggacaatacttaccttgtttcatcatgttttagataatactaggaggg

SEQ ID NO: 111916 - DNA, 731 bp, Setaria italica
  Intron number 1 from transcript Si036249m (locus Si035973m .g) derived from phytozome v7.0 (chr-ID scaffold_9; pos 58 539038 to 58539768)
ggctgacgcgccactcgctctcgccgtgccttaaggtccccccgcccccaaacttggcttaacattacgatctgctacagtagtgtatgtgtgtgtgtgtgtgtgtgttcacatctttagatgattggagaggtagggagcttctagcttgcgtaaagcggtttcagacatggttaggtgcgggccttcaaaagagcaattgcttttggacctttggtcttctctcttccgtgggttgttgtttaccaattgctactagtgcagtgtgcgtcaaaacttattgcctacctaaatgaacatggtccatggcattatagtgctctgattcccttactaatagtttgtttcacctatgtttaccacttttttacatggatggcactatggccacccctcctttttttttaatcctaagaaaagaggataacctatcaaaaaggaaagaaaagtggataaaatattgctctgaatttgcatagactccctagcgtggtcctccagataaacccccatcttgctttacctccctggcccgagaatcggaatcgatccccatttgattgcttcagatggatatatctacaatacttttgtagttccttgtaaagatgccaaagaatcgagacaacttcaatcacttccactgtgattactttcaccggccttctgattctaatagatgattctttcatgtttttcttaatctgcagatccggaaccacatttattca

SEQ ID NO: 111917 - DNA, 900 bp, Setaria italica
  Intron number 2 from transcript Si019383m (locus Si019383m .g) derived from phytozome v7.0 (chr-ID scaffold_1; pos 34 549448 to 34550347 reverse strand)
agggaagctgtgagtatctcttctttctagcgccgagtgctagttgaatgcttcatcgtaacaaaatgcagagtttctgtaagcatggtaggatcttgagaaaacagttggatagttcataccgattgatatgaaagcgtgtcaggatttatgatgccatatgcaaaagggctggcggtttgtgtgtgcttgcagtgctttattaatcatcagaacatactgtatgttgattacaagaaatctgttgaataattcgtaatttcatatcgtatagcatattgtgttgcttaactagtttttctacccgtatttgttatagacttacagtagtttttttgtgaacaaatgtaacagtccctacgtgtcttgccgtattttgaacacccgaagtccccagccattagatgggcagtcctaattatgtccacatgttgtacaagatgtcctgcagttcttgcacgggttgctgactgagaaatgtggtctttgacctttggacacttcaaaggcagaaagtattccacgttttagattttgagcaaggcatgcgccatgtgcatagaacgctgactccacgtttactttgggcacggactcgctggacagaaatttcacacgccttagaatttgggatcatcctctgatctttttccacattggcccacttgaccattgaaatttagcttagctccaattatttagcattactttgttccagaaaacatcaattatccttttagtaaattcaagcaatctgagcatataattgtttcctcttctcatactagaacttttctatattttatacactgaagcttcatagtctgtaatacagaagctgatggaactgatgccactagttaacatatttggattctcatgcaatttcaggtgaaattg

SEQ ID NO: 111918 - DNA, 762 bp, Setaria italica
  Intron number 2 from transcript Si016348m (locus Si016348m .g) derived from phytozome v7.0 (chr-ID scaffold_1; pos 39 076154 to 39076915)
ctcaagcgcctcaactttgagctcgtccaggttgtgtattcttactcgttgcgaccctttgggaactctacttaatactaagttagtaagttattttgctctgttcggttcaatgtttgaggagcttacatgtgaacatattgaagcaaccctgatttgttgagcttttcggaaggctcttggcaatgattgaaagaaatagctgcatttcaagctaatggatattagtaatttttactcgactttgagcctagcacacttaaatgcttttggaacatttcaagcttatatggtgatgatgagtgaggttccaccaccgcttggttttactatcatctgccagatttattattgttttggcaggctgattgtatcacatatttttttgaagaactggattgtactgcctttgaacttcgtttaattttaaaatcctaggagaccaggttacttcattcacctgctaagtttgtattggattttcacacaacttcaaaatatcactcgtaggatcataatcatatttcatataacctgtttcatgaagtctttacatatattcttcgtgattcatatcatctcctgtgtatgttttccacttttgcttatctgcttgcccccatgattttaactccaggagggtactctaatgtcccggacatggttctagcctgctatcatttatgctgttttcaggattttatttctggcttctaaaataaattttaactgtgaaccagcggaaagagttgtgcaagctac

SEQ ID NO: 111919 - DNA, 630 bp, Setaria italica
  Intron number 2 from transcript Si015193m (locus Si015193m .g) derived from phytozome v7.0 (chr-ID scaffold_6; pos 19 193725 to 19194354)
tttctgagagagaccctgctatagcaaaatcacaggtatgtaatctttttcttgttatatgctagttgggtttagtggggttgtctccagctttcagtgtttgtagtccttaatatttactaataaattcttgtaaacttgtataaaggaaaattctggtatgaatgcaaagtactgtcatcttgaatagtatggattcaattttatagtgtgaggcatgctgttgaatttgttttcacatttcctaccatcataaggtcttatcttaatagcactattagcaccacttgttgttaggcatgctgttgtattttatcacctcattgttaggcaccacttaatttttatttttccagattggtgatttagttgttatgaaaaaagaataataccagcttaatacatagtcgtaacctttgttttataattgtctaagattgaaatatttgattttctaaaagagcatgtgtttgttgcaacatttaccgatttataatcttaatgtcatgtatgtcttcattatcattataattacttactactgattcctactgcttacaatatcatgcttcatgacaacttaatgatgaattttgacagactttgcaactattcattaaagaggaatct

SEQ ID NO: 111920 - DNA, 784 bp, Setaria italica
  Intron number 2 from transcript Si017038m (locus Si017038m .g) derived from phytozome v7.0 (chr-ID scaffold_1; pos 33 50940 to 3351723)
ggtcagtgtgctggcttgcgggttgcggctgttcattaagcgtgcgctctgttggttgctctaggaagtcaccactcaccacagagcttgtttagcatttctttggtgtgcatctagcgtagtctgttgtttctgttgttacttgatccaatggccaatgataggtttgttaaattagtctagagctcaatgtttctgaaaagtgctaaatgatcacatactaatcttcagatgcttttttgctattacgattttgtgtatgtctgctagtaggctagcatgttggctggttagctcggatgttctgcgtatatggattcttatcttacattcacagtctgaagcggacaaatcgcttcgtatgatgtgtttcacattcttaatctggagttcctcatgtgcatagacgcatattattttggcatctgatagagatttttagcgctgtacttgcattgcatggcggtatatttagtaagttcaaataaacgtttgaattagttcccatgttacaagtagcatcaaagtaggtgacctgaaacttgcagttactggaaaatgttctagcaaggctgcaaagatactatgcttcctttgtcaggcttttacctgtttgccccttcatcattagttattgaattttgtactgacctctgtagttacatcatggatatgaaagaacatatttttatgttacaattaaaatttcgttctgtccagattgtactaaactatttcttgctctgcagagtataggactgtctctggtgtggcaggaccactg

SEQ ID NO: 111921 - DNA, 410 bp, Setaria italica
  Intron number 2 from transcript Si035683m (locus Si035683m .g) derived from phytozome v7.0 (chr-ID scaffold_9; pos 44 960368 to 44960777 reverse strand)
tgtgtcgtctatttccaaaggtgaggatgagctacatgactctttaaattaaaataaccatgttttaattgtgtatgtacagcctaaggaagaagcctttgtttatgcagagtcctaatcactaaatattttgattgttgcatatgtttaattgtgtatgtacgaaataaggtagaagcctttgttgtgcagagttctaatcactaaatattttgattgttgcacttgcacatatgaagcaaagtgtatggcagtgtagctatattggagattagtgtttgctgtttttatctagtcatcttgcaccattgtttttttctgtatatactgttttggagttagtaaggtggttttatcttgtcaattaatgactgtatggacttgtcaggttcgctttattattgggggtg

SEQ ID NO: 111922 - DNA, 703 bp, Setaria italica
  Intron number 1 from transcript Si019629m (locus Si019629m .g) derived from phytozome v7.0 (chr-ID scaffold_1; pos 33 345413 to 33346115 reverse strand)
gggtattcaaatctcaaagtttgacttgaagtataagaaactatgtgagagatgtatcattttgggaacaatatatatgttgccacttcaatttgtagaattttatgaccaaatttagatattattgtaattattatttggtaatttgaagatataagtttgaactgtcccaacaagacaattgaacttttcatctatctccagtaaatgagctagaatggaacataagatcctaaatataatttttgtgcattttttgtatcttattagatgcacacatagttcaatttcgaattaattttgataaccatgtagaaaactattgaaaattctaccaaacaacttatataaaaaatgtaccggtgtatataagataattatttttatgtcttacttcacaatggtgcaaaaaatgaaaatagaaaataaaaatgttaagtagagtagaaatgaaacaaggcctgcataagaaatgcataagaaatattttaagtgcaatatgttgaaccaattgaaatattttgagtgaccaattgaaatattttgaaccaattgaaatattttgaaccaaatgatattttgaaccaattaggtgtacaaatttgtgttgatattcataaattcatgaataatttttaattgcaagtactacaattttgcatattaagagcgactgaatctgtcaaggaggattctgattccg

SEQ ID NO: 111923 - DNA, 395 bp, Setaria italica
  Intron number 3 from transcript Si015562m (locus Si015562m .g) derived from phytozome v7.0 (chr-ID scaffold_6; pos 19 423667 to 19424061 reverse strand)
aaggcctagagtacgtgccaaacttcgatttgaagagagaacaaatgggtaggaggcagaaggagcgtttgagaggcgacttggacgagtcacaagggaggcttttagcagattatgggactggcgattttgatggacaattcaaaaaatcattgctccaagtgccacaagttcattaggaattctacaagccgtaagaagaaatctaaggggaaaaagaaaaataagagttcttccaacctgagagtagtcgccgaggtagtagtgtgcatgttaaacattttaagatgtagtatacttgtacttatgccttattgatagtatattttctttgttactctactaatcatgcaaagaagcttattactaatgagttttgtttattctatttcagg

SEQ ID NO: 111924 - DNA, 616 bp, Setaria italica
  Intron number 3 from transcript Si018249m (locus Si018249m .g) derived from phytozome v7.0 (chr-ID scaffold_1; pos 39 967086 to 39967701 reverse strand)
gatcttcatcaagctgaggtacattatacaatcacacaatcttgtatatgcaactgtgctcttcttgtcttatgtttactgaatctgcaagtaggtattatctcctttatctattttgacatacattatctatttctaagtaggtataactttactgaatcatcaagtaggtcttataccatccctttttcttgcattatcttttgttttcttagattacttcctaactttgtatctttgtctagtgatattatggttagtgtcataattgtacacctggggtttaacatatccaagtggctatggaaatcgagtcttattcatttttgtaatagaaactataggaaatcttgtttacaagaaatacatagtgcatctttttcttgtttataagaaatacattggtcatatttttcgctttacttcttaaatgtgctttcttcatgttgttcatttgtgacaaaatgaaacagctaactggagtggtcctaaatattaaataaaattgatttgataaaagtattattaatttaagggacattatacatcaaataatcaaactcattgattttctctcttgtgcatttttatgacttcaagcttgctgtgcgaccag

SEQ ID NO: 111925 - DNA, 712 bp, Setaria italica
  Intron number 1 from transcript Si016349m (locus Si016349m .g) derived from phytozome v7.0 (chr-ID scaffold_1; pos 32 086724 to 32087435 reverse strand)
gctgcatccaaggtctatacctcgttgcttccggttgttttcacgatattttaaataattcagcatatatagttccagatttactccctccgttccaaattataagtcattctaattttcttgaagagtcaaatcattttatgtttgaccaaaattatagaaaaaagatcataaaagtttatgacaccgaatagatatactatgaaaatatatttaatgaaaaaactaatggtacatatttggtatcatgaatgttagtactttattgtataaatttggtcaaatttgaaatactttaattttctaaaaaagttagaatgacttataatttggaacggagggagtacctcgtttggttgcctttgccacaccaaatgtgcggctgctataaaaaaaaataaggttattgtttcacttgtgataagctgcggcatgttacacattttctagttgctagcaacatccacgtacaagctacagcttcattttctagttgcttcatgtttttgccgctgcagtttggcttgtcatgcaatttatggctagctacagcttgaaaatatttattgtctcacagagcttgtgaaagcagaagaatctttttcttctaaagcagccttattaatttctttagatttagtcttacttcctcaccttatttatttgtcatgaagcagcttacgattcaacgcccaaacagaactgtacaaga

SEQ ID NO: 111926 - DNA, 535 bp, Setaria italica
  Intron number 1 from transcript Si039522m (locus Si039522m .g) derived from phytozome v7.0 (chr-ID scaffold_9; pos 62 80293 to 6280827)
ggggttcaacgccgactacctccgagtctactacggtaaagcgattcgttcccttttaaagcgtggaatggggaagttaagctgaaacaggatccgtacctcctatatgtccataaccatgtgttttcttttgttgttgtcaattctgcacaaggttgtgatcttgcatctcactgtagaggatctgtgtttcttttaatgaattcgtggttttttttcctgttgtctgtgattgaggcgtctgacagatgtggaagcaatgtccaatagttgcttgctacaagagttgttctttaactccttccactttcttgcaattgtttccatacccattttcttcagacctagcacattttgtaattcatcttgtgtaattagacatgctctttacctgattgaggctttgcatttagaaacctactcaactatgtaaggagactagttagtctttgattttttgctattgcttgtgctaactgctaacaaccagtgatacgattgcaggaaagctgttcccatacggtgatttctttaa

SEQ ID NO: 111927 - DNA, 754 bp, Setaria italica
  Intron number 3 from transcript Si018952m (locus Si018952m .g) derived from phytozome v7.0 (chr-ID scaffold_1; pos 40 306308 to 40307061)
caagtgtcaacatacaagactatactgattaactggtaaggtcctcacgcgtcactgttcttgaaaagaaactaagtacacatacccacatgcactagtttgttggaatagcaaaaggcttcgggtctccattattgcctatctaggttgttcatgatatcacataacaacgttttagatgctatgctaatgattgcgtgggtacccagtaaccatagtcataactcctgcaatctttattttttgaaaagagggaagacgtcctagaaatctatggtaagatgtattaaagaaagacatgtttaagtagataatgtttacattttgaacaaccttcttgcgttgaataaacctagtctcacttcattccatttatataacatcatcctcttcttttggtggtggtggtggtggggagggggggggggggtccagttacccctgacagtcaagaagctattagtttattcccccctttgcgatgggaagaaagtgtgggtaaaagtggtaactaaactaatgtcagataactccatcccagttgctgcaatcatgcttcagtttattgtttgatttattgattggaagctagaaaattcttataatcagttagtttttaaatatcctggacaatggccatctcttcttgcagattgtgataagagttcttcagattctctcctgaaacctcgccacctttacttgccatttgctaatgtaatggtcccagttacatttccattttttgcaggag

SEQ ID NO: 111928 - DNA, 865 bp, Setaria italica
  Intron number 2 from transcript Si017030m (locus Si017030m .g) derived from phytozome v7.0 (chr-ID scaffold_1; pos 28 866159 to 28867023 reverse strand)
aaacgggaggcatcagttgccatcttctcctttgagtaagctcaattttcagttttcatttttcctgaaacgcctgtatctgcaatactctttctgttttcaccttatcactgtgtaaatgtagatgctacagtaatttctttcgcaacattagattggaggtagagattgattacaatgaacaaacactgtggaacgccaattcccaagataatgaacagatatttgcaaaacggagtactactacgtgttaggtctgtgtatcatgctagtgtctttttgtagttgcattgtaacaagcctaccatgaaggtctttagtaattcttacatgatgcatcctcattccattttgtgtggcatccttttgcgctgagccttaacctaaaccctatgaatattgtctataacatttgaatgatgccagatctgcagttattgctttttttttgttcgcttgatgtatgtactgattactaagccatgaacatttcttagtattaaacgttcactacatcaaccatgcttactgttctagttactataatacaagatgttagtctagcaacttgtgcagttacctttgtttcggtttgaacaatactttaagtatagcactgcaaaatattaggcccatttagcatgaaactccaggctccagctatagatattcttctttgcttgttgcttccaaagcaaggggcgtgcctttcaggtaagtaccctattggctaaccttaagatggcctgaagatatgattctattgttctaatttctaaatgcctggcaattatttcttaatgtattatttcaagattcaaaatactcatagtagctttaacatgtaaaatcatgtttcaggtat

SEQ ID NO: 111929 - DNA, 841 bp, Setaria italica
  Intron number 1 from transcript Si019228m (locus Si019228m .g) derived from phytozome v7.0 (chr-ID scaffold_1; pos 85 67868 to 8568708 reverse strand)
cggaactacttcataggtacgtatgttttcatgccgataccgtgtacataagctcagcatacagccatgcatgatgttgttatttcatagatttcacatagtagcatttaattctaattggaaaaagtccgctttgtccaatcattatttgtctttttttatttctcaacatacaaattaaattttaaatccaaattttctgagtagatagggaacatgatagcgcatagtagaaaaatatattaagatattttggttattttcatagatcaggaatatttagtgatacaaaacttcaatcgtgaaaaaattgtaatgtattttgggcattatgttataagtcactcgacaaaatttgaactcaaaatccaacttgtacatgaagaaataaaaaaagacaaattttattggggtagattgggcagctaaaatagttgagtggagtaaattaaacctaaattttggtcacaaggttaaacggaagtggacgaggtaagtaaaatgaacccttttttttactaattttaaggttcacggagcacatctagtctcatctggatgaagctgcttcttctctctatttatctaagcttaatgtaaatccgaatataagcatactaactagtgagaacgaaacttcattacagagagacagatgtttaaacggataaagtgaaccactgaatgtagtaaaatagacctgtcagttttaagcatcgagacgttaaaatcgagaggtcaacagaaacaaaaaaacgcatgctgctgttatcaacgacgcatcgatcatctctgcatgcgtgcagggagcgtgctgagcgggggcggcagcgtcccgtct

SEQ ID NO: 111930 - DNA, 996 bp, Setaria italica
  Intron number 3 from transcript Si017327m (locus Si017327m .g) derived from phytozome v7.0 (chr-ID scaffold_1; pos 23 957523 to 23958518)
cacggcgcgtgccactagggcacttcatttctccggtatatttagcgatattgttggcttctttcattggaatgttattatgactgttgagtgttgactgctttcactgaattcagaaattcttagtgccggggattcaatggattgcacagaaaaaatccatcatatataagagccttagatgcgagtactttgcattaagacttaatttgcgctggaacttaggctgtcaagcaaacttccatgtaataaccaatatattactcttttagagaagattgagatgaagcagcaactgtctaaggatctggttaggttgcttcatgaaggtgggcatgtcaatctacctctgacagtgaggatatgtttctgctcacactagatcaaaataaacatgtccattgagaatatccaaaagattctttgtccaacttagatttgtataaggttctgctagactacaaagagagtacagaaacatgatttgttgaatctattatttctcatggcactaagatattttagacatccgactagtaagtcaagactttacatgtctgacataaagtttcgttatgagatgaataaattggcaattgaattatatgggacactgatttccatctgtttccacctttgactgctttgccaagcccaaattgacccactatgcgtgtaattggatgtactttcaaatcaatgcttgtggagtgaaatgtgaaagacaaaaaattatatatgcatgagatgctgataggtttattacgcttttaagaactcatgttaaaattgagttgtattcttaacttgctaaatagatgatagtggtatataattactacagtgtctaaatataccaacatatgcttactgtttggtgcttttattgataccatctcatctaattgtaaaacaatacaatgatgtccatcctttgctgagccatgtacttttactataggtaatagcaccatcgaaggtgctatcaactggctt

SEQ ID NO: 111931 - DNA, 829 bp, Setaria italica
  Intron number 2 from transcript Si038670m (locus Si038670m .g) derived from phytozome v7.0 (chr-ID scaffold_9; pos 54 894817 to 54895645)
cagtcatccacgcgaacgtgtatcagacaattaaagtatgctatactagaaagggtttgtcattttttttcactaacagcgtagtgggtattatgtagaaaaaatttgattgtagattggtatgctgctcctatgggggtgtatttgcacatcttttgcctcagtaatgagttaatgtgcacagattctatatgacggagctaaagagctagcccaagtggaatcagattcctcaaaatatgttctatccccagataatcaggtttgtgcccttgttttcttcagtaattagagttactttttggaatatagaaacttggttattctgaaatgtaatgattctaatgtggtacggctgagatgattgcaatggttgaatcagtctggaactgtgctgatctcaaatgcattattatgctttgcattgtcatttgctaatgaaatgacatcccttgaacattaaattgaacccaatggaaaaggggagaaacaatgtgcagccattcatttttatctatttctccttagattttccagaaaatcatttatgtctttataactggaaaccttgctgatatattcgattgcttgagggaaaaaggctaacattagtatgcttgactaattgttgtttgaaatgttgggtatacagaattcatctatcatgaggtattaaacatttttttttggtttgtagttctgaggctaaacaattatatgtcacctttgtaggcattgcgatgcctttgctagctcatagaagcttctcatcgtccaccttgtcctaacttcaggagatcggggagaaactatcagaaattggtgcaaa

SEQ ID NO: 111932 - DNA, 607 bp, Setaria italica
  Intron number 4 from transcript Si016750m (locus Si016750m .g) derived from phytozome v7.0 (chr-ID scaffold_1; pos 41 830783 to 41831389)
tgccaggccagacgtggttgaggtaaggtgtctcgtattatagttatctattcatctgggaagtttaatgtctatacttgattgaatttgattcctctgcttcctccagtatttgtccatctagcgtttcattgtgccaaaacctgccttgaatccagagacgtgtccaatgatgtactattaccttccatcgttagatgattcagtccaactaaaactgctaatgaaaaattctttccaatttcaggcatgcaattttatccacatttttgttctttgtccctagtattgcatgctaagtttgtgtggcacattataaaaacctttctgttttacttgtttaataatatgttgctacaacccatcttgcactgttgtggtttgggtacattgctagacacgtttgttggcattttattttcactcttaaaaaaaagctacgatggcatgcactgattcgcacacacctctgcaggccaaggttgcaatattaaactgaagagcacgttaaacaattttgtgcatttattctaactctttatgttatgactgtaagattgtttatggatgggtgtcgtttgatacaactgtgctcgtgttgctaggt

SEQ ID NO: 111933 - DNA, 736 bp, Setaria italica
  Intron number 2 from transcript Si035285m (locus Si035285m .g) derived from phytozome v7.0 (chr-ID scaffold_9; pos 31 909505 to 31910240)
gacacagttgggtgagtgatcatgttcaactgattttcatgcgtgccttttaaggtatctgttgcttctcatacactaaatgactaaatacagtgatgctactgaatgtctgaatcttatcaaaagatcactagattgtgtcgtgaatagaaacatcacttaagcattattggaattttattgtctctgttcttccagtaccatttttcttgaattcatgtctcactaccacagcaaactttattttagatgaacaatggccacacctaactgaacatggagaactgaccagaaaaaaaaacatcatttgccaaaacatacaatgtggcgcccttccgtatagctcagaattgtctcctagtggcccaaatgccaggaaacatggtggccttttgttttaggatgaacagagtttgtgtcacttaatgcatcactataggcttaggctgctttatggactgcaatgctagctttgactgatgtaagttttctcctttgaaaaagaatgagggaaacatatatgcgagtcttgcagaaatactaaaatttgatttatcaacttcttagcttgttgtttgtatcagttaacatcttctgatttgtgtccaactcattgagcaatgatgttactgcaacagtttaatgtttgctcacttgagtttgatctcataacacatttaaccatttttggtgatgcaaactactttatgtaggcccatcaccagaacagtttcag

SEQ ID NO: 111934 - DNA, 709 bp, Setaria italica
  Intron number 1 from transcript Si037055m (locus Si037055m .g) derived from phytozome v7.0 (chr-ID scaffold_9; pos 22 194663 to 22195371)
tacaggtcagtactcagtaccactgcccgggaatcgtcttcagtatcagttccgaactccctttagtactggttgtgtagccggtattgctatattggttagtaccgagtgaaataaccggtactaaattacctgccacgtcatgtatgatcgatatctttttcttttcctttcccgttcttatttcttttttttcttttctttcttttctcatttttccgttagcacattagtatcggtttaaaaaccaaccggtactaaggggtaggatcaatgctcagttttccagtagtgtacgtacgcgcaaaaatctatgtctgtacactgtactgcattggcttcttttcttcagtaactgaacgatgctcatgagtaaccgtagcccttgtttagttcacccccaactcccaactttgacacgatgcaaaaagaagattccccatcacatcaaacttgcggtacatgcatggagtactaaatgtagacgaaattaaaaactaattgcacatttttgttgtactttgcgaaacgaatcttttaagcctaattagtcaatgtttggacaataattcataaatacaaatgaaacgctacagtgtgctacagtgctgtaacagtaatttagcaccttcaaattttggcgccgtagtttctttgaagccattttgacggactggccaacttaactgtgccgtgttgcaggggcgag

SEQ ID NO: 111935 - DNA, 998 bp, Setaria italica
  Intron number 2 from transcript Si016377m (locus Si016377m .g) derived from phytozome v7.0 (chr-ID scaffold_1; pos 31 884060 to 31885057 reverse strand)
ccggtatgttttagccactctcttgtcaattaagacttaggcgtagattcaaaaccgcaatgttaacctgccagttaaatgttctgctccagaatggctgaatggttcttaacacttaggaatccttcttgttatcttgtaactgtctgcatatcgtatggttggttcccagtttcaaacaaaaaaacactggaaatatgtttggaccagcaaacttggtacatccttgctgattcctgaaatagcaggctggaaactgagagctggtgtatcaccacttaatgaaccttaggaagaacaacgagcacggttgcattcatgaacatattagaaatgggattgaatcatgaaagcatgaacgttgctttgaacgaaccttctattgggagggtaaacactgccttgtaaactgttcatttataaccaaaatgatatggatgacatcataattcataaccttgaataaagttgaatcaatacatttgagcattaatcttggctaaataattctatgtcaggtctgttgcgcacatgctattggtaaaatctcaacagtcatggcttagtgaccacatacagttgaataaataaaatattccagcattattgatgatattaatatgccatgaacaatgcaatgccattttgtcgaggagctaacatttactaagcataatgtaacatatgactgtcattattcctatatagccgaaagaacatgatatgggaaacttgagagactgtgttagctaagttatgcatttgattttccttgattaaatgagcgcttctactatattttccttacaaaaattagtagtagtagttgacttctctctttatgagcaaattgttcctccttatcttgaatgcttctttgatgccaactaatctcggaataccaaatttctgacttaatcgcaatggtattctttttttagtgctaaggaagtatctcatgagttgattttatgttattttagttctgcagtttagaa

SEQ ID NO: 111936 - DNA, 749 bp, Setaria italica
  Intron number 2 from transcript Si036445m (locus Si036445m .g) derived from phytozome v7.0 (chr-ID scaffold_9; pos 11 951742 to 11952490)
cgcatcccgtccgtcgcgaaacccagcgctctcaggtttgatttttgtttatagtttcatctgtgttaatcgtcgtttatgctaattatttaagcgcctttgcttcaaaagatggcgatggtagttgctttaggtgataggtactagttgaccgcagcgagaaattttgctattttctgccgcataattttgtgaggatgttaggaaaaggatggagcgcggttctttctgggcatattgataccatcgtcatttgggccttgggggttaccgcgattttaattcttatcttactggagaccaagattgatgcgttagtcgttgagtgtttggttacaaaaacctggcagtgaagaacaatttgatcctaattttgaattcaacacattttcttggtttgagaattgtattgtgttctgcagtgatttttttgtatagaacaatgggaaaataaattgaggatatggtcatctcagcaaaagcatgggattaaattgtgctatgctgagacaatctatcatgcatgaggcagtttcttcaaccaaaatcttactggaaggggcaaatattccccacttctcagtgtcatggaaattctcgatatttaatccagtaattttcagcacaaaggaatcattaacaagcatcttgctgcatgctactaccaaattgtcgatcaaagctttcttagagggaagctaaaccaatttgtttgctggctgcctgcaaactgtaggtgcacaagatcc

SEQ ID NO: 111937 - DNA, 781 bp, Setaria italica
  Intron number 1 from transcript Si035600m (locus Si035600m .g) derived from phytozome v7.0 (chr-ID scaffold_9; pos 14 488353 to 14489133 reverse strand)
agcacccaccaggtatgcccgacccttttcttctcccccttctttgcgaaaccgagcaccccaaaccctattgtaagctatttgtattcggatctgacccaatcacaagtatatgcatgattaatacctactgacttcgagtttatgcaaaaattgtcacccataccctgtactaggtcctcccttgcgagttagttgggttggttgcttggattggtggtttgttgaactgagggttgaagtaccaatcggagctcttagtctgcaccgcttaggtttagcctgcagggggtatttcttattgaataggggcatcagtgaccgcagagaaatggaagtattttagagaaaacatgtacaaagtagattcatttccaactttattaacctcgacaactaggttagtgtcacttgatgagacttaactggcgcaaatttcttgcggcagttattactaaaccttgcttcaatcaaatattataagaaaaaaggctttactgaatgaattagtcagtctggtatatacatatatatgtatagaagctctatggtgcattaatagttcacctgatgcataatatgcttgtttgcactccagatggggtttggcgtggcctaactgtgaattgggtagttcaactagttatgcatccttgttgattggagacaatagcattgtcattatatcgtaaaagaagacttttcttttgatgatgtttattttgtttattcttgatagcactgacatgcttctatgtgcacaggtgacactgtacatctg

SEQ ID NO: 111938 - DNA, 1022 bp, Setaria italica
  Intron number 2 from transcript Si017922m (locus Si017922m .g) derived from phytozome v7.0 (chr-ID scaffold_1; pos 33 173998 to 33175019)
aatcccgagtagtaaggcctccgatcctcctctccccttacctcccccgctcgtccctgtgatctgtgtaggttctcgctctcgtaatttgctgtggttgcgtagtttcggttgtaactttcagggtctctctgatcaggtgcgcgctggtaggtctcaccagctttcgatctggatctgggtacccgtgttccgaattaggatttcgtgaatggaaggcctatctgtggccgcggctaccttcatggaggaacttatgtggtttagcttgttgatgaggggtgtgtttgctcggtttaaattatgctttgattcgtagggcgtggtgagaatgcactgttgtgttaaggcatatgtttccgggaaaaattctggaggcagggaacatcacaatgggaacacagtcatcattgtgttatatgaattatgtttatatttcgcaatgacttcttttttactgcgtgaacacgtgcaaaagaatcctgcatttgttaaatggtttgcagattttgcacttatgtaaagaacactaaagttatttcttatcaggcacagaagcatttgattctctatatatggccgatatggagtgcatatgttgaaagtgttgagtaccaaatattggagtattgtcttgtttaccaaatcttaatagtaccatagtagcattgctgaaccatcaaaaagactgataactctactactaaaggaattgatcctagaaatatatgtcatttgtgtatcacgcatgatagattggtctctttcttcatatgcgtactcaaaatcttcgtgggccgaaacaatgaaattttggaacttaaaaaggtaaaacaattctgaataggactagttgagcacgtttatgttgtaatactggtaattctttcttattggtgaagtgatggcagccatcatgatctgctagtaatgcatcctgttaatgtaatgcactacttaatcctgttttcctttttgcaatttcagcgactaccttttcaagcttttgcttattggtgatt

SEQ ID NO: 111939 - DNA, 743 bp, Setaria italica
  Intron number 1 from transcript Si018486m (locus Si018486m .g) derived from phytozome v7.0 (chr-ID scaffold_1; pos 33 158559 to 33159301)
cgaacatccacctccagcgctcgccgttatctccggtgagtttccccttctagatctagcgttcctctggagtctggattgatcctccccagttattttcctcgttgatttcctcctccccacatgttcttcatttcttgaggagtagatggcagcatcgagcagcactagtgctagagtagtatctgcggccgcaaccgacatcaaggctccactatgtgatcgtgttgacattttagagaaacctaaatctggtgtaagcaatattttctggaaatgcaattattgctcaatggagaagttcactagctacactagggtagtgtgaactttgttatgcattgctatttattattcttaaaaaaatgctgaaacatatgcgcatattggagttttcaggtggaaatgccgtacccgcctatccatgtaacatagggagtaagcgctcactacgctgtgctgttttgattaatcaaatcagaaaggtttctgagtctgaactgtattgtttttgtaatgtatgggcttaagccacaacctgagaatttctccatacttatttgtattcattatagaaatttaagaattatcggcagtagtatgaaaatgtttgcttctcctgtatttcacttatgaatcacatcttaaggttacatttgatccattgagcttaaataaattagaaccgaaaagctagaagtttttattgattcaatatctggttttgtgaagaataaggcaag

SEQ ID NO: 111940 - DNA, 598 bp, Setaria italica
  Intron number 1 from transcript Si016212m (locus Si016212m .g) derived from phytozome v7.0 (chr-ID scaffold_1; pos 33 810460 to 33811057)
tccacagccccgcacgagcgatcgccaggagtaagttttcggtttctttcgtgaccccgtgcctctttagtctttcctcttcttcatgaggggcacgggagacttgcgctgtgcagcctggattatgcaggagcatcacgaccagtgctcagttactgtactcaataagcattcatgatataaccaataatatcatccatatcagccaaagcgcaagcatgaatttgcatcctctttgtatttgaattctgaaagcaattgcatttgttatacgtacggaaattgtcgcatctatcacaattttcatacccgcaaatgctaaactgatttacactccatacaaaatttccttttcctctcaatcaatgtaagtgtttctagattttctttttttttttataaaaaaattagtgtgtgaatatcagaacaacagtgtttggggtaaaacagaaaatcccccctttgcccccttcacacttctaagcgtgagaagtattttttgcatcttttgcgtagaatgggaatgcttgcatcttacacttgtttaagttaaacagcttgtgctttctgttatatttcagtgagggatcataccagc

SEQ ID NO: 111941 - DNA, 623 bp, Setaria italica
  Intron number 2 from transcript Si018652m (locus Si018651m .g) derived from phytozome v7.0 (chr-ID scaffold_1; pos 40 731210 to 40731832 reverse strand)
ccctgcggtatagctaatcagatagaatgtaagcttacagttttcatccgttttgtcaatgtcataagaaatgtcatatgttgtgatgcaagtgtaaaatggctgtacaactatcaaaacatgattgtgttttcctttatcttcatgcagttgctggacactgttgtgctgcaagtgtaaaatctgacacaactagttcgctagttactgttaaatacactgatttactttgaaagatcagctgagagaggatccctgggatgttgagggaattaatccaaaacattgtctgggattgaatgttatacacggttgtggctgagttactgtaggttgtacttaattgatttcccctttttgacttctttccagtttccacttaactccttagttggagaatttgtttagaatttctgcatccctacttcaaaaattaaatccaaggctatgctcgctgtgtgtgtctcaattgaccactgaaagattatcagagataaaatatgagatattctagaaattttctgtttataacttgtttttttttacagttgcttcctggtaattcatctttcttttttaccatcccagaatttgtagctgaaagtttcttcgagaacaagcaa

SEQ ID NO: 111942 - DNA, 1004 bp, Setaria italica
  Intron number 1 from transcript Si016352m (locus Si016352m .g) derived from phytozome v7.0 (chr-ID scaffold_1; pos 23 50764 to 2351767 reverse strand)
gcggggggagggcggccggctctaccgggcagagggtatggacttgttggcgtcctttagatttgattagttatctctttttcgtgtcaggtttcagactgccgcagtggaggcccggtggcaattatttagcagtagcaagattttggggcgcctaattagatatactcaaattatttagatttgggagattattacttaatcttcgaagtgaacctgctgcctaatgttaggtgcatgcgaattgtagcctctgtttatattttatgcggttgccatttgtaatgctgtgtgacaaccatttctgcatttcctagctttgcatatgtgaaacatttggcctttttagagtggttagtttttgtccattgcatatcgatggagggcaggagatgcttacaatacttccatgtagaattttttttagttggacgcccatgcctccatttagttttctgggattgtcaccattttcaagtggaaattattaattgcatctagttccatatgtgaattgaagcttctgcttttatgttcttgcatttgctgtttgtatgctgttatttcttacgttcctggctgtgcacatgtgcaaagttgtcttttcagtttattttgtttcaagtcaattatgtattttttccttgggataacataccactaaatatgacaggcaatggaaaatactccggaatacactcatgtacatgctgttgggtgtctcaatttagtgttgtgattgtcattttttgaatcagaattgtagctcacagcggctacgcatgtgaattgtagcttctgtttatatttaaatgtgtttttgtaatgtgtaatgctgcgtgattaccttttcttcatttcctagctgctcagatgtgtatgtttcaatatattaacagttaataattggtttgttcatttgtttattccgtttgcttattgtaagtaagttctgatcaccacttggtatatccttctcaggtttaccgacacacaaagccacc

SEQ ID NO: 111943 - DNA, 583 bp, Setaria italica
  Intron number 2 from transcript Si018503m (locus Si018504m .g) derived from phytozome v7.0 (chr-ID scaffold_1; pos 48 27197 to 4827779)
ggccgtggaatcgcgaaggggacgggcgcttcgaggttcgtgtgttgattcggtcttcggttgggggtttcttctgttcaggttgagtcttttgggtggggaaatgaaaacgcgttcttgtttttttcttcttcttattttttttaaaaattgtatgaaggttgtttctcttgtccaaacgattaggctttacctgtcttttttttgtctgattttttagagttcgtagcgctgctaaatgttactagtgattcaagtgttttattccatggaaatcgtgcgtatctagttgtaagcggtggattagttaaattacttggcagatttggtgcatattgtcctcgatttgcatcaccatggtttttttttacaaagattggaattgatataccctgatttgtttaggaatgtcgttttgatttgtattacacaacgtattttgtgatagtggcttccgcgatgctctccctaaaaattaggatctcgtttcatcaagtacaacatctgcatgacttatatttgctgaagtgacaaatcgtgtggttatttacatcgattgtttaatgtgcagcttatagtagtc

SEQ ID NO: 111944 - DNA, 647 bp, Setaria italica
  Intron number 2 from transcript Si040207m (locus Si040207m .g) derived from phytozome v7.0 (chr-ID scaffold_9; pos 67 39559 to 6740205)
ttcactatagccaatatcatagaagaatctcgaaagtaagatctgcgtctttattctatttactgtataatgcaccttcatctgtaaccatgttggaataatgcttttaaaatggtaacacatggttaaataaacatacgaaaaaagattgcgtaactgcatcaaatatgagggggaaaaggacttgacaagttacccgtggcaaatctttgcaagaagaagagaagaaaaatcaaccatagtccatggccttgggtgaagaatgaacaatatttcaccatcatattttgcttttgcttctttgggccataccatacgagctattttccattccaccagtatgttatatttcatggtttattactttcctttctcattgtgtaaaactttgttttattttaaagctattgggattgttatatgttgtatggctgaaacaaaacttaacatctcccccaaatcggatgactaactaaattgcaagttgcaattatcatacatagcattagtaattttgtcaaagtaaactaatgatatttctattgcttatggttgtctcatccaattctgccataccattattttgatgagacttctggttctttcgtgcaggctttgggtgcattgcattgctttatatatcataa

SEQ ID NO: 111945 - DNA, 875 bp, Setaria italica
  Intron number 1 from transcript Si014107m (locus Si014107m .g) derived from phytozome v7.0 (chr-ID scaffold_6; pos 66 08013 to 6608887)
tcaaggaggtccgcgaggaggttgccaagtacaaggtgaattggattttctcccctcgcgtgcgattttgttgttctgaatatggtggattgggcgattcagaaacagcgcgattttctactgttctgtatgctgtttctctcttgtgcgatgcttgtggattcttgtcacacagtagatccaaattcacatcaccagttttttttatatatacatcacacctagtttattgatgtgatgttcatagttcaatctgtgctgcctgtggctgcttgccaattaagatgcactgatatgtgcttgtaggttacttgtacattgcgtttttgtagcagatttgggttgttgggatgtttgggggttgcagattcagaatactatcttgttaggtatatggtgcttgctattcttctttgtgaattcgggttgttatctgctttgaaacaggtatttagttggctttaaaagtttttactctgtaaaagttgtatgttctgtaatctgttgcattgctctgtcactaatgttgtagggcttgtggctactgttcgtagtagatcaaaattcatattggactgtctgttaatacattgaaaataacagttttctcattaaaatattgagaagaggcatgtcaagtggcattctagtttatgatgcatagtattttgaggttcatcaatctataacacatgttgaagtatgtacattgcacttcattggttttcttgtctcaggcattattgctgtatggcagaagcttaataagaacatcggtaattcttgtagaatacatcatgtcaatttgttctgactgtgttttgttttgccataatacaggttggcgctcctgctcgtgttggtctggttgctcc

SEQ ID NO: 111946 - DNA, 666 bp, Setaria italica
  Intron number 6 from transcript Si016198m (locus Si016198m .g) derived from phytozome v7.0 (chr-ID scaffold_1; pos 35 590709 to 35591374)
caggtatgcatctagcagttggttccatctgctggagttcatcatatgagacatacagtatagacagtagaatttattagccaatgtattccatggtagcacgttctgccatttgacttatggaatggacatatagaactcagtactagcagtggtagctgtccatgtgctgccattggaagaaagctttcaacaatagtatttgtgccatgcgaataaaagcacttgtatagtttcaacagaattttcagttttaactgaattttcataattgtgttttgaatcatgctattaatccgtatacttctagactaagcaactgctaattcatcaaatatatggccgactttttcctttacataccgtctaatcttttttcttttgttgcttctgcatcctttagaaacttgatactgtgcattgttgtgcatatgcgactaatttttttatccatttatacttgtatttttttgataaatttaatttagtttggcatctttagttccaagttccttttctgtggactcggcatctgtgatgattgactatttcaattttatgaacttccttactagtgtgcttcgttttttttgcgagttagtgtgcttcgttttgacctctgtctgttgctgtgttgaacatcaggctgtagtagaaaagaagctt

SEQ ID NO: 111947 - DNA, 992 bp, Setaria italica
  Intron number 1 from transcript Si016538m (locus Si016538m .g) derived from phytozome v7.0 (chr-ID scaffold_1; pos 41 503947 to 41504938 reverse strand)
ccttcaaggttccctcctccgctttcccctctattcacgcctccctgctcttgcgtgtgatcttcatcccagcctctgctgtgcttgcttgcttgttccaaggtttactttgcttggcgtgctaattgcggaaccaaactgtctgattcactactgcagtagatccccgcgtcagaagcttgctactttctgtagggtttgggcgtcaatcacctcttcttgttgcatgtctattattgcgctggtatatgtggtttatgatcagcgattttgacatggaaaggtggcttctttaagcctcctgctgatgcgcagatttgatttgttctcggctcaatccaaaatccccatctcctcatgccctatccttttctgtctttgtaagggacgatgggcccttctcaggcttgagctcccaacgcttcaagtggctccaatttttcattttttggaatccgaaaaatccacctttccttccaagttcttgttcttgctgcgagcagaatttgtccttaactgataccaccttgcttgtggggtcgttgtcacagatatactgtcctgcaactgttgcctcttagttcagctggtgtggattactattgctttctcggaattattatgttctattgacaaagacaacaccatgttgtgtgatgtagacgcgttttgtttcgcctttgcatgatgcatgatctttttcctttcggaccctagtttgatgggtacacgattctagacagtatctggtaattgacttgaacgggtatcaggttcccactcagacgtgacttgttttactctgatttggtcgtggctggttgacatcttctgtttctctgacggtccagttgggctaagtgtaaaagcaattacttgctgatacctactgctctgcaggctgtgtaaagtgctgattctttctacacctgcattgataacaatttttttccatactcgttggcaccaccagattagcaagagagtattca

SEQ ID NO: 111948 - DNA, 754 bp, Setaria italica
  Intron number 2 from transcript Si035275m (locus Si035275m .g) derived from phytozome v7.0 (chr-ID scaffold_9; pos 35 879912 to 35880665)
caccgcagcctcggcgtccacgtttccttcgtcaggtcacctcccctcccctcatctgcttctcttctcttctcacacctgtccacgtacgggagcgcgtggccatgcctcggtgcataatagtaatactaatctgctgcagcgggtgactgttcgatcacgtgtccatacgtacaactgcacattttttatataatactgtagataaggttacatgaatgcaaaatctgaatttcttgtgttctggtttgcctgccacgcatgttcagatttcatgtaatctgtagtcccatactctgttgtggtatggtgccccatatgcagattaatacacagtttgtgtgcgaggcatgaggcaaaagtccatttttttttgtgttccttgtttatagagtaattttttgcactgtcattagaactgtttgacgcacattttgtaaacttcctgtattatgaattcatgatcctgagtaatgttactatcacggacttaatgttattggcatttgactttgagtagatacaattaatatgacctctagtccaagttgacttaagcttctctgaatgcacgtgactttgctttttttccttctggtcctgaccacctaacatcgtatcctttggaagtgtttaacaatttttctgcaacattgctgctttatccaatttcatatcgaacaactgaatcaatactgaaaaaacttctgtaattgcaggtcaacaaatttggattcgtggactccagaacagt

SEQ ID NO: 111949 - DNA, 770 bp, Setaria italica
  Intron number 3 from transcript Si039618m (locus Si039618m .g) derived from phytozome v7.0 (chr-ID scaffold_9; pos 89 12206 to 8912975 reverse strand)
cagatgtaataagcaaactccacgtttttttccaccttgataaatgcaatggatgtgtatttagtttgttgaactgcacttccatcatggccttttacctgcctttactgtgttgttgatattcatttgtccttcaaattactatcagtttaaaatcatttaagtctacatcttatatttcccttttatgtgatatttgtaggagtgcttgggactgaaaggctatgttgttgttgttgttgtattatgtgatatttgtagcttgagatatgatgccaattgatttaaaggtttagcatcccccattcttttaaacataacagaaaattcttaatgtaccatgtgtgatttctgatttgatttagcacagcataattttttttacataatatttgcgccagattttcttcacttgaaaaggctgaccttgcagttaagccatctataagatagtgcattacaaattgtcatgagctaagctttgttgtttcactcaagcaaaagcaaggatatttatgagaaaagatacatgtttaatttctgtacatggtagagtactgtttgaggttttgagtcagacaacatttgtgctccaaatttggggggcaaaataatcctagaatacttcgcctccatttctgtttcaacattttgtcttaatcctgctctatattagcttcaatttatcttcatgagtggtgatatctttctttctttcctcctgaaaaaatgtagccaaacaaggtttcagaagctttaggtacaccgct

SEQ ID NO: 111950 - DNA, 746 bp, Setaria italica
  Intron number 2 from transcript Si039618m (locus Si039618m .g) derived from phytozome v7.0 (chr-ID scaffold_9; pos 89 13108 to 8913853 reverse strand)
tggcgaagttcctcttcactgtgctgcaaaatacggtctcctctctgcaaatgctgaaccctatattgacacatttgttgatgttttagagaaatatatacatatatataggtcaacagctcactgtttgttgtgatagtgtttttgtttcatgtggtcatttctcactttgcagaattcttcatatctatcacaatggtaatctaaatttgcttgcaagtttataaagggcaaggaaaattgatgattttacgaatttttgccttgtttttgttcttttactgcctccagtcttgtaactcttttccttttgactctgactgaaatgatgctcaaaacatccctactttgcctttggatgccattttgtggcaatttagaggagctcagaatcagttgagtttggtgcttgaggtgatctagaagatggttctgttgtaccatttaagtgtcctcgtgaatcaatatatgttgttactctgtgcctacctgtaacattgtgagaacaattacttttcttttccaaaaaatccgtaacgtattgtgtgcattcaaatagtcctatcaccaaacatcatccctagtaacgatgatatgaatcgtacatcttttaagattatatccttgtattgtttgtcaattccttgttacattcgtacttgacccttatatttcttatattaatggtaagttaaggaagtggtagatattaacttggctcttttttttcttttttgatccagggc

SEQ ID NO: 111951 - DNA, 763 bp, Setaria italica
  Intron number 1 from transcript Si019612m (locus Si019612m .g) derived from phytozome v7.0 (chr-ID scaffold_1; pos 25 276364 to 25277126 reverse strand)
ctaccgctccaaacgctcttctcctgcaacagtaagtttttcgcaacctttttcttcatgcatatgtcgtccctatgttattttgatccgtggatcagatatgtctacaaggagattgacaaaagcatggtgtgatgtgttttgacagcgcaacaagtgccgccgataatgccaccgatggcggtgccggcgcctgccaatcctccagcgtcaccaatcaggtgatttatcttctttgacacaccttattctgaatgatttgttgcagtttgtgttgtaatcgccacctaatatcctttctttttgtcttcaggtaatatatgtcatagcagtagcaactaccaagaggatcagagcacggatggtttgtgtcaacgttagccctaggggtagtggggtacagtcttgttagttttaagttggtcttaggataatagcattgtttaggtagaggggaattgtacttattggtacggatcctgtaatgattccgttgatggatgcaaccgtcaaatgcggatatatattagtagatgttaaataaatataatggtgctctatgttatgacaccttggatctgacgatctgatatttgcttctgaatttactagcaagatgcccatgcgttgctacggcgaaacgatgtgtcttagtgcacgatgatttttatcgtgtcgtatagcgcaccatattttttatcatgttgtgtaacttttttatcacctagcttgctccggcggtttgttgtgtgtgcggtctcca

SEQ ID NO: 111952 - DNA, 848 bp, Setaria italica
  Intron number 3 from transcript Si038755m (locus Si038755m .g) derived from phytozome v7.0 (chr-ID scaffold_9; pos 46 93352 to 4694199 reverse strand)
tccgcttccttcgtcctaaattaccattcgttttggtttttctagatacatagcttttgctacgtatctagacatatatacatctagatccataacaaaagttttgtatctagaaaacccaaaacaaatagtaatttgggacggagggagtactaacaaagtttcagagaactagtccatgagacgattaggtcttaagttggcaattctatgacattacttctactcgactcctgaaagacatcaagaggatcttcagaaatgccaccaacttgattttactctgataccatgtataactcattaattgctgattccttgatactggtttcctgtgcattggaaacaagtagaagttacagttcataaaaaaggcggttgaagcagcaaattctttgatattaaaaaactttgagttccattttataatttgtcaaaatggttcttgggttttatagacttttgtattttctgattgcaacattaagtatcagaaactctgcaatacaaggcaaaggatcaatcccgttctacaagttaagctgaaacaaagttttccacaaacagcgaccacatgaagtgcactctgcggtttactccactcgacctatacatttacacatgaaacaatgtgagaatacattgcatttcctttagcatgaacactgcagcttttgataatgccattaatggccaagaacatgtgctggcaactggcattgccataacagttcctagaatatgatatacatatgcaggcttccttctgatttgccattcttttgttagattctgacggctcaacgccgcaagccttgctggtgcactggcgcactgtcacaggaagc

SEQ ID NO: 111953 - DNA, 644 bp, Setaria italica
  Intron number 1 from transcript Si035022m (locus Si035022m .g) derived from phytozome v7.0 (chr-ID scaffold_9; pos 34 19461 to 3420104 reverse strand)
ctactgtcaccaccgcctccccactctccaaacgagtacaccctccgtcactctccggttcttcaaattttagatctgtcacgatctattcgtagaaattctcatgatttatagatgaggtctccattgaagcacttatatccaagttcaaaatcatggatcaattacactgcagagccgccagttttttctattttattttggattggccgtcccaccaaactctggaatacagtaccactgttgttcctcgaaaaaaaagactacactgtaaataaagatgatcattttagctacaggactgttagtttagtatctttggtcgatttaggactactcttgtcattaccttgttcatacaattgctcataatttttaggtggaactgtagaagtaatatgggatttgccttggacttaagctttggaatagtgcagtagccgcctctaggctttgtgcatcccacaacaccaaggctggaacaatttcctttatattaataaatagtaatatgagattgaggtcttaatttgtggtcttgataattatttgtaaagatagtggcccacttaggtgtcgtggcttctatattctgcattcactgactataattccatgtctctaacaaatgaaactagattcgt

SEQ ID NO: 111954 - DNA, 302 bp, Setaria italica
  Intron number 2 from transcript Si019631m (locus Si019631m .g) derived from phytozome v7.0 (chr-ID scaffold_1; pos 33 599201 to 33599502)
tggcgttcgacgagcaggctgcctgtgacctcaaggtttgttcagaccccatccatatgaacacatgatattactcgatctgttacaaaacaaacttatttatttttggtcgaatttaaataaaaaaaagtttatgatctatctggtggaaatagtttgatgctatagatacttctacatttttctatagactttaccaatgttaaaagaaaagaagtttgatataggacaaacctaaatcgactataatttggaatggagaaatcccttaccaatttgtcgctgcgacttgcagttaggtg

SEQ ID NO: 111955 - DNA, 881 bp, Setaria italica
  Intron number 1 from transcript Si013420m (locus Si013420m .g) derived from phytozome v7.0 (chr-ID scaffold_6; pos 33 665833 to 33666713)
acgtgcaggcgacgccatcgctgctcggcgaccaggtacgtgcacgctacgagcttgctaccaccggcggcgctgctgctaagctctagccgtttcttccattcatctaccaagtctttatttttctaagcctactaggtgttgtaatttgtaaacatttcagtcttagctagcagaaatctaaaaccatcagctaggtttgacattattgaaattaggatctgcggttgaagatatcaaaaggggatatcaaaacacaatctcctgcactctaaaaatatcatgcagctgcagcctgcaggccgtgttgtgtgtgggctcgtataccgtgcccccacatgtcagtgtggctcacctgtcctgaacggggccagcagccagccaagggaaaaaaaaatctccggggtcctcttctggcaattactgtacgacaaggacagcgatcgcgagatctggtagagatgagatcatgagaacgggcggttcgagaattcttggtgatttaaatatttgtttgctttaatttgtcttgagatatatttaaaaaaaattaatttgtctagagattagattgagattgctatctacttctcgtccacgttcatgcatgggtattagcatcgatctctgcatgatgacaccatgtcaacatgttcgttcgtatgcggtagattatttcaacaccttcaagccaaataattatttttttcaaactaatacaagccaaataaacaatgtcatcatgcatgaaccatcaggatcagtgggcccgcaaagcctcacagcaacttgttttcttttctgccccccggaaaaatcataacaacttgtggcagtgcttattctcaacttttgagtccctggcagggagaagacactga

SEQ ID NO: 111956 - DNA, 481 bp, Setaria italica
  Intron number 1 from transcript Si035879m (locus Si035879m .g) derived from phytozome v7.0 (chr-ID scaffold_9; pos 27 13322 to 2713802)
tgcacgccgagacgccggcaatcctcaggtttcaggtccgtccgctaccgcgccatctctgtcctcaactgtctgcttcgggctaattttaccgacgaacgaactaacttgtatttgtagcgcttctcttttaggaattgtagcgcgcgatttgatgtttctcacttgggcctcgtgttcctgacgttttcaggattagtctactttgtaggaataggaaagcctggtagagggaaggatgtgatttgattaaatcgagaaacatgagatgaacttggcttcatctttaagctcctaaacctatggatgggcaataaacagagataaaatgtgctttgcaaaatcattggtatcttagtcttctgtatttgcttatctttgatgtttcagctgtccatttgtaaggttctgaagttaaattatgttgtctgttgaaattgttgcagaggttgcaacacaagttgctggacaatttcttctc

SEQ ID NO: 111957 - DNA, 969 bp, Setaria italica
  Intron number 2 from transcript Si016638m (locus Si016638m .g) derived from phytozome v7.0 (chr-ID scaffold_1; pos 12 27357 to 1228325)
tggttgatttcttagctgttctgcccctccctcaggtacatgacataccatctacttagtgaatgtttcatatttgagttactccctccaatacaaatacttaacgttttggaaaagatctagtcaaccttttgaaatttcggctatcagtaactttaaaaggtttgtaaaattgtaatcataaaaatcatgtgtgtagatatgtcaaaatagtttcctaatcttataattttttttcagattttttaaatatattttagtagaaagtagttgtcaaagatacatattggacactttgccatgtccaaatcatcaagtacttttgagttgaaggagtatctaacaacatacacttgtttgttttgttaggatacatgaaaactttacaattatgatatccatgtacttcagtttgttcagttctaggttacgcgtatacgttaaagagaggctacaagaaaatgttgttaccaattttgggatactttactaaatttcaatgcaccaatgacccataaggcatggcatacatgtaccgttggtgcaagtgtgcaactaagtgaaaaattggaaattgagatagaattgtctttgcttgttggtgctcattccggactgtttttgggaggtgcgctggttgtggttgcgtggattttagagatggcacaaatgcaaccttgtttcgttccgggtgcgttgggtgcgttagggagaggcatctttgatatctcctttgttcatatatttctctcttcttaatgaaatgacatgcaaccctcctacgttgttcgaggaaaaaacgggatagaattgcctttgttcgaggaaaaaaggggatagaattgcctattttgtataaattcctgttattcattgaactttgctattcttaaattccatatagttgtaattacctgtgatttttcactatcaggtatttgtgttggtggtgctgccccatcttgaagg

SEQ ID NO: 111958 - DNA, 508 bp, Setaria italica
  Intron number 2 from transcript Si018226m (locus Si018226m .g) derived from phytozome v7.0 (chr-ID scaffold_1; pos 28 021919 to 28022426 reverse strand)
caccttcttggtgagttcacctggcctcgctgccttttgctctcagttcagggcgacgatattgtttctaattagttatatagctgaaattggcattgttctaaagcactcttacgattgttaataagtcaggcaactaattgaaagctctagcattgtccctaagctcttctttttattttcaaaaaaagaagaagaagttccaagtctcctcatatgatcatgtttttccttaaaataatctgtggatattaactcaattatcagtatggtgttagtaatattcaaggaaacatacaacagctagcatagcagtcctcaggatatatccatcatgataatctagcatgactgaagggaaatcacaatgcaatttttgtttcgttctcatgattgcacttgtattcatatatttatacctacctagtctgttataattatcttatattttcccacattcaaacccttatggattattttatatttttcatgtccattgttccagtca

SEQ ID NO: 111959 - DNA, 771 bp, Setaria italica
  Intron number 2 from transcript Si018223m (locus Si018223m .g) derived from phytozome v7.0 (chr-ID scaffold_1; pos 33 749595 to 33750365)
ttgcatcccagtggtaccgattatcaccgccttcttcacaccatttcctgttctgtggtaaaattgatcatggtttcagaagttttgtggaatgcatcatgtgaatatgtgattcttttattcatggtgaaatgatcagtgtttcatggtgaaactggccctaggagagtgcttttgaatcttataagcggcatatgctcatttagttatattatctcagtttattttgaaattttgagatttacgttaagtggattagtgggaggaagctggcaaatggagacttacaatttatgctttgttatggaatcttagcatattcaagcctaaaattagctggcaaatgtagatttacaatttattcttgtcatggaaacttagcatattcaagcctaaaattttaccttgaaatattttgtgctaagcgtgcaccctgagggccatagtagttcctttacttgagggtcgacgtttgagtgaattatacatctcagaagaattagcctgttaagcagataacttggtttcagatgaacatttaaatgttgggcctcctgtcaatggatcatttatgcagatttaagtgtcatgttattttttctgtttctgtttgtaagctaaggaatatatatcttttggagaaagtctttttatgcctaattttgaagtgcaggtgtagaaatgtataagattgtgtatattacttttgtattaacaaagctacttgtcgttgcagcggcttgaccaattccaactacacagagctgagcc

SEQ ID NO: 111960 - DNA, 955 bp, Setaria italica
  Intron number 2 from transcript Si034542m (locus Si034542m .g) derived from phytozome v7.0 (chr-ID scaffold_9; pos 14 585217 to 14586171 reverse strand)
tcgccgtcgacttcccccacgcagtcttcctcagggtacgcctgcttccgctgccacccttcgcctcgtcctccgatcgcggtagattcggttcggtagccgatgagtgggctcgtcgggggggggggggggggggttcggattcggggttagagtttagggttttgtgtggttgaggcggagggtgcttgttggtttgggttgctttactgtgaatgctgtgaatgtttccccccctgttgtttcggcaaaatcatgagtctgtagactgtagattctgagatgttactgatttgatcgtgaggcagaagcgcaaaactagagctgaatgttatggagcagttgattaaattcaataacttgtacttctgtcgctgtaattcttctgcgcatgagccatctgttcataggattgttttggacttgctgtaacttccttgtacattgttgttcaaattgtactaagtttaatttcaaaactctacagagtatccaacttgtcagggtgcataattgttaagctaatcgtagctaactctatgatctggtatttcaagtctcatgcttatatgtttcaatatttttttttccgtgtggtgtttgtttagtattgtgttcagttgtggtaaggtcactccgttcaatgtcacgctagcttgtgatttgtatgcagcttaagactttttttttttagtacagcacatttgaaaacattgtcaacctgtttccttattggtcctatatctagcagtttcactgaattagtaaatcattggacatttggactgagtaattgctgatgctattcaatatttcttctttgtggtcattatgctcagggtgcttagtgtatacagtaagttcattaacagtcaacgaaatcaaaatatattcacttatttgctggtaacttctgtcaggttgaagctgaagaacaacctgaaatatcagaggc

SEQ ID NO: 111961 - DNA, 873 bp, Setaria italica
  Intron number 1 from transcript Si016145m (locus Si016145m .g) derived from phytozome v7.0 (chr-ID scaffold_1; pos 16 328952 to 16329824 reverse strand)
ccaaccgcgctggcatcgtgcacgtcgtctctaaggtttggtctcatcgccttcccgttttggtggtttaatttgtgttcgttcctggatggatggcttggcgggtgcatggttgagttgttccttgcgctgctctgctgtttgatcttgtgcttggtttattgtgaataccctcgtcgataattaggttaggttcctgagttttcctttctttttcggtatctattaatccaagtgggtttaaggggtttggaacatgaagggtcgatctctacaaatcgtgataattctttgagatctaaccagagcacgtattaaaactttttctggatgggattgtcgtcacatgatttattcttactaatacatttagcaactcattgttgaattcttacattaaatgatgccaacccattctgatcaacgaccttcatggtagtgaattatatccgtagctaaaagacttgctaatccaaattaagcctgcatgttcaattttaccagttattctttttctaaatcaaaggggttgaatactctaaggggcattggagctgtccattaggagaaaagtgctttacttgcatttccaagttaataggatgtgtatctagtgggatctttcatatttatgtccgtccatccaagaacatgatttactatataatgtatattacgacttgtcttggtagtatggcactttgtatatgcattgtttgattattgtgaactgtctttttcatagaggggttttttgttttcagaaaaaaaattaaaggattgattgccctcagttggtatattttttccacgttaacagcaacctttttgtcttcctaactttcctttttcagattgcagtccgatttgtat

SEQ ID NO: 111962 - DNA, 799 bp, Setaria italica
  Intron number 3 from transcript Si034256m (locus Si034256m .g) derived from phytozome v7.0 (chr-ID scaffold_9; pos 58 694351 to 58695149 reverse strand)
aggcccaacgtctaaaaaatccatccagtgtaagtggccattttatttatgtagttcttttgaattcagggtttgactggttccttaccgttactgctgcttttgccaccaagcacctcttggtactactgctaagctacacaggatgtacctgccctcgtatttgtgcattatgtgatgttttcagttttgattcagtagcacggaagctcagactttcagtactgtttgggaaaagaaacatcttcactttcgagcggtgtattggtagagcataatgacagaggtgaattgggcactgtgactaagagaaaactaaagaatagctatgacttggtggcgccaagtggaaatattcatatttcactagcagtttgtggacttcaggttcagctgattagttacaacctgtgttgagcttgagagggctgcaaccataaaattgctcaaaaaacaacccccttcatttccattacttgtaacgagaatatcagagtttagttacattgccagataaaggaagcagaggaaagagcagacaccccctaggagttctaacctgattcaagctaaaatcctaggtgcaattctgcatttttattggttcgttgagcttgtaatccaagcattggtgttaaaaggaattagattaataggtgtgcatgtgtcaaatactcaaatgctatatgttacacccttttccttttctccttttggttacgatcaattaaaatacacatatattttgtaacaaaccttccaagtttaattcagaaagttctttgccaggtactgtata

SEQ ID NO: 111963 - DNA, 767 bp, Setaria italica
  Intron number 4 from transcript Si018256m (locus Si018256m .g) derived from phytozome v7.0 (chr-ID scaffold_1; pos 42 014802 to 42015568 reverse strand)
gcaaggtaaccaagccattcatcatttatgcatcagttgcacaatataatgctctgcaaactacctagtaagcagccgtttgcttttagcaatcatcttttatgcacagagtacagtgcataggtgtattcaaaatggggtgctaaaagataaatgcaaacaaatccagtgttctaaattcacaaatactcacaagctgagtgaattgtctactcgcgcagatcccttgagatcttctctgcctatgaacatggccccataagataagactattgttctgtctcaattactttttagtttgtaacaatctcccagaactgtagctacccgattttctgtctgcactagactgcagagcagttcctgtaaaaataagcaaacattagggatctgctgtttgttaccagtcaggttgccatatgtttattgaagaaacctttgaggaatacaagcatatcgtcctgattacaagttagtggatgtgctgttttaacacctgctgggccttctagtcaggtctgttggcacatcatggcatgagccattttttcccctgcagctatctatttttgatgttctaattgtaagctctatgctcttatgagcaatttttttttaaaaggcatgatttgtggctaagatgaaaatttttctcagggggggtgggggactagaagattgactttgcgccttgttgagatttttttaaaaaagcatattatttgactgcaggtgccttatctccagcttagagaaaacaactggac

SEQ ID NO: 111964 - DNA, 902 bp, Setaria italica
  Intron number 7 from transcript Si034413m (locus Si034413m .g) derived from phytozome v7.0 (chr-ID scaffold_9; pos 20 756105 to 20757006)
tttactggttatcaggtaatggcacccattttgagacaacatcctccagattccaagtaatgaattcctttagtacgtctttgattcggatgctttcgcattttaccgtcctgacccatgccagagtcacgtgctggctgatactgtggctgtcctataaggtagttccccagatgagaatttttccgacgactttgttgaagcttaccattttcttgcgagtaaatttagatttcttatttatagagtatataacatcttatagataataactgacataacatgtcatatgtggaaggaaactttctagttgcaattgtaacttgttgtgcatatgttttatgtaaaaatatagggaaaaagcaaatgtattcaggattttttacgtggattgttttcaatatagcaaatgcacattcagcagtctgtgcatatgttttttatgtggaaaaaagcaaatgttcacattgacacaatatagttgcatatgtgcatatatgccaatagattttttacaggatcttgtcccaaattcaggagagacaccttgacatatatactatagtctcaatgtgaatatattcttgatgctatttacctgctggccctgttttctgaattcaatattgagcttagttttccatgcgaaactttgagcatgtcaaatgtttcttacaacaatcaattttgcagaaactcccttgttttctcttttattttgggtgctgattatttattcagattgaatacattgcttcaatgtgattatttctcaagttagcctttatttatgtatttaagttccaaacaaatgctttgtttttctgttagttgtgtgctaagtttcttatcattcctttctgtcagttttctgctggtgggattgtcaaaataccgaagtt

SEQ ID NO: 111965 - DNA, 816 bp, Setaria italica
  Intron number 1 from transcript Si020135m (locus Si020135m .g) derived from phytozome v7.0 (chr-ID scaffold_1; pos 87 5807 to 876622 reverse strand)
gacactcgacaacaactcaacgaagaggcgtcgaggtatgcccttgacaccatgttgcttatgatgttttgattgctcctgaaaagaaattaacattccgagttctgtattgcgacttgttaagtaatttacttgaatcctttggcagaaagttgaccttagaggctatgcccctcgagcacttgctacttgcagcagttttgaaacgagttttcccgcatttcagcttcagtttttgtaaggaatcagtagcctaagagggggagagtgtaaattaggcaaacttaaaaccttaatctatggcttccactacaaagcatcaaatataaactaaaacatgctatcaagatgtgcaagattgatgcttaaataccatagaataattctaggtaccatggcttggtcacttgaataccatagcttgaatacttgaatatgatgatttgaatatcaagaataccatagcttggatacttgaataccataatttgggccttgccatggtttggtttgcacacttgaacctagaaagacaaaccattagtcccaatgactatgttgtcactcaatcaccaaaatgttgtatagggtcatgttctctacagtttgtacacagctatttttttagataaatgatactttgctggattattagttgatatgatgtgacacatttgaattatagatgctatgtatgtctgaagaccatgccttgtgatcttggaaggtgatcaaggctgcaacctacccgtgcgcattggtcgctgcttgtttggatgcggtcctcaaccaggcagcaatcctggttccaggccg

SEQ ID NO: 111966 - DNA, 620 bp, Setaria italica
  Intron number 1 from transcript Si017391m (locus Si017391m .g) derived from phytozome v7.0 (chr-ID scaffold_1; pos 70 29676 to 7030295 reverse strand)
gggagcttctgcctcggcctgctcttcaccaacaggtaaaccaaccatccaccagctgccgccgccgctgctccaaggctccaattcatctctggcctttgattcgagattcctttctagctcagaattgctggtttgagcttggcctggttcgagatccgcggcgtttgatgcgcctctgcatctgcatctgggcgctgccgcatcggggggcttattcatgtgccgctgtgaattcgtgctccccggatttgggcgcggtgcttttcgatgcgtgtttctggattccatgggagttttgctagcttcgtgatgatgcagctagacgattgctattaagctggtatttttattgctccatgaactgtgaaatttaagtgggttgccacatcaggacattttttctttgccaattcagtccgattatggaccgtcctgtgcagaatccagatgcacttgcagtgttgtactctctgttgccttccgtttgtaacgtagggacatttgcagtgtaaccactatacggacatgattgagcaattcaaccatgttaatttccttttgaatctgatgctacccgatctatccttgcttacattgtcatgatcatttcttccaga

SEQ ID NO: 111967 - DNA, 998 bp, Setaria italica
  Intron number 2 from transcript Si017877m (locus Si017877m .g) derived from phytozome v7.0 (chr-ID scaffold_1; pos 87 43155 to 8744152)
cgtccacctatactccaggtttgtgtgctcatggcttatcttctctcccttttattctgttggcagaagcagatattttgatgattgcaatatacatgtttgcatgttccagtttgaatgtgaagaaaatgctgttgctgttagtttccattgcctgttagatatcttgattgagttagtatagaaagagggcatcgtgcaatgaatgcagcatttacaccagctaccatatgtgcagcttgtccattaatctcaagtttccaagcgtttgttttcttttatagcataatgtatatttttttattgccacattataatcaacaagttttctgatgcgtatgctaactcaagtcggttgtgtctttctgattataatgttgtccattacaattatggactccctcgcatcaaaatcatccagaacttccatatgttattgatgaattagcaggaatgaaaagatgatcagtccttggtttcctagatatatattatgtcagtgtggggcatagtctggggtccatgtttatgtcttcactttcttagaatttgacatggtcctgacaagttcatatagcttttattgcttgcagtatgacacttcctagttcgctttttgtgtaggcacacatgcatataatgttgctcatggttcgtttattttaactttcttctgcatttcattggcttcaatggattaactttagttctaaaaaatattaactttacgatgatcataattctaaatttaggtaacttccgcccttcttgtttcattaaaataaaaagggaattgcaagcaaatatatgttacttggatagtgatgatattcatgttacttggatagtgatgagattcatattacttgggggtataggttgtgtaattagacaactgtttaaattgtgatggtgatagaagtaaacgcgggaaatgggaaacagacaaacagggaaaggtaacaatatactgctttggttcttcttgcagtgcccaa

SEQ ID NO: 111968 - DNA, 923 bp, Setaria italica
  Intron number 1 from transcript Si033944m (locus Si033944m .g) derived from phytozome v7.0 (chr-ID scaffold_9; pos 14 070639 to 14071561)
tccacaggatccgctctatcgtaagcatttctcccctccacctgtctccaaatgctccctgtcgctgaacattagatctcagagagaagaacgtgcagctctaagagcaacgttagctcccgtttggttaactattggctacggaaggatataatctgcttcagcgtctactgttaaatgcacatgagcaaaattcgaaaggatcatgtcaaatttcaagctgcctttcccacaaacccgtatttttattgtttgctaaagactagtagttgagtagtctatgaggcaatttaaactgttaggttgtggttaatctgctaatgtgcatgttattgctaatattggatagtgagcaaaagctgaagataaagctgagctgggatacaaatgattcacacgaatatttcctatgtcctagaatgcttaggaattacattctgtttttcttggtgaaaaatgtggacctgggagagagctacgacttatgatctattaccacctctttaggtaaaggtaagagtcgaaggtccacaaggaaaactaacaacaactgatatatttggataacactgagacatcttattcgcaacttgaagagtaaatatttttagttcactttggttcataaatgaatagtatgatagacatcaacatggtctctagagcacaactttggccactactttctgctataatattattttttttcaaacaacagctataatattattatatttgtcaaaattcaaaactagtaagttgtactattatcaaagcacttttcacagaaatctgcatatatctttttcatacatatattcttgatattcatagagcatcaatctctgaacagactttatgccaaaactattatgcttacgagctcggtatgttgaatttttatgttttctgtcgagcaatag

SEQ ID NO: 111969 - DNA, 737 bp, Setaria italica
  Intron number 1 from transcript Si035495m (locus Si035495m .g) derived from phytozome v7.0 (chr-ID scaffold_9; pos 29 30303 to 2931039)
tgcggcggccctcgtccgaagccgcgctgcgattggtgagtggagttcagtctcttttagctctttggtaatagatttcgaatagcaaggtacatgtgggcgttggtgtctagaagaggtttaggaggggacagcgagacaaaaatgagtaaaggtcatgtttttctgaaatagcagatggtcatttgctctgttctgtcgagaaatagtctatcgtctgaaatagctgatgagcattttctttgttgttgaggagtagccactagtgtggatccattgggaaaacttgttcagtcctgcagttccaacaaaaaaaaaggagccatttgtttgctaagtttgtgctacacatgctttgtgtttaattgaatttgaagacttgtgtgaaattaatttgttccatggattatttttatggttgcgcaaacaagacaaatgacaattcaaacttggtttgcatcttcatttcattatgggttgcttatttacaatgacacaaacaatacgatttcataggttaggtagactttcctttgtttattgtacttaaaaaacgaagtcatctagatgactaggcctttttctctatccaatatatggtccaaccaatgtgggatgcctatggagtttgattcgttaaccctattttcatactgtattcctttatattacatcactacctgcattttactaattgccatgcaattgctgttacgtggtgtaggcaacaagcgcaa

SEQ ID NO: 111970 - DNA, 857 bp, Setaria italica
  Intron number 1 from transcript Si016073m (locus Si016073m .g) derived from phytozome v7.0 (chr-ID scaffold_1; pos 32 194805 to 32195661 reverse strand)
cagaaggcgacattggagtgtgttgcagcaagcaggtgcgatccgccgtggcttttgggcaaatattattgtcacgcctttcatttcaatttcattaatcagtcttggaagctgggtcatttgcgatttgcgagctcatggttttatggaatggaagatttttgaatattaattcacttaatttacctgcctactcctatgtggttaccctacaaaggataatttaaatatttttaagccacagcaatttgttacctttctacagtcatacacaccacgtagaaatttccttcgaagttaagtatggattatagtatttctttgccatctatatagtagtttttttttccacagttgatgctcatagttccttgtttcttttctttcggctggtctctgtttgattgatggtagtttcattttattcacttatatccctgtgcttagttttcaaatggcccaagcctgactcaacggaacatgagcatctttatagggagcctaacatttatatatatatatatatatatatatatatatatatatatatatatatatatatctggttttactgtccaaatccacgggcatatgatgactcagaaatcggagttgttaacactatgtgatatgtctatgaacactatcagttgtttcattaatccgcaaattagcataactgacaccgtccaacagaatggctatatgcctttcttgcatgtttgtactgtttccaatttttaatttgttcaaataatggggtatgttcattgattttttttatcttgcctttgactattttgtttgcagtttcttacatatttgcttttgttgtaggacttctggtgtaacgcaga

SEQ ID NO: 111971 - DNA, 704 bp, Setaria italica
  Intron number 2 from transcript Si016665m (locus Si016665m .g) derived from phytozome v7.0 (chr-ID scaffold_1; pos 39 820222 to 39820925 reverse strand)
tcaggcttgctgaatgtatgtacttacacgattgtacatgcctctttcttgctatcattatgtattcatgttgtatgtttctatttgtttactactccctccatcccaaaatactattcgttttgacttttctagatacataacttctgctatgtatctagacgtagtatatatctaggtgcatatcaaatgttatgtatctagaaaagtcaaaacgaatagtaatttgggacggaggtagtaccttaggtccagagtatatgttattcttgaatgaacagattcaagctttcataaccatcgctaggcatattttaaagggatatcacttaaaagttatgaaaggaattgtcaacaaaagaacaccaaaatatcaccgcaattttttcatgctcaatttgtacattggagactgtatcaacaagtaaatcatgacagtggtatcgttactttgtgatttggtaggttactggtttgtttgtttagctgcatttctttttgtagacaacagacgagtatttcatctttgaactctttgataaccgtttcatactcgaacatctttaggagcctgcttaactcaatatggacttgcacttttgcttgaggtttacgtaacttagtatcctatttattttttatataattcaattcttctttcctttgcagtcaaaccttaatagttccgcgtcaaatcttacgga

SEQ ID NO: 111972 - DNA, 846 bp, Setaria italica
  Intron number 1 from transcript Si016665m (locus Si016665m .g) derived from phytozome v7.0 (chr-ID scaffold_1; pos 39 820990 to 39821835 reverse strand)
tcttcctcccgcgtgacaggcgcgggctcccatcggtgagcaagccatagccccgctttgccctaatttccccgacatagcctccgcgattccgctcccatccaactccttcgcgcactgttcgcgtcctttgatttgattctacgtgtgttcctgttcgtccgtgcagcgattgcttgtatggagtgggattgtgttatgcgcttgctggaatttgccttccatttgtggacgtgtgttatattgagatcggcgtgctcgtgcgtgcagggttgaatcgagggaatgggattgtattctaggggttcagtagtttcagggtctactttgtgtagtgtgttgctgtcttgttgtgctgatcaggttattctggaatgcagtcgcggtggtttacagcagaaagccagaaatcaggcttgcaactcttgtacctattccgggctgataaaaaatttggcacgttttcatacgatgctgatttatgctgcagtttagatattgtgagaagtaacattcagtttctgagtaacttccttacattgttgcatctatcctttcctggcttttaaagtgagcctttttatatttttatagaagtttctcttttttttggttgttcatgttggttttcatctcgagccagttgggattaaaattttttgttaccgttgttgttgatgtggcatttcaattgaaaagttaatccgattagtggtatctttcattgctgtacttgctattgtttaacttgtttaaatattagtcatcttcctaggattccttattgtgctggctacttacaatcatatccctgttctgtttcagattggaagagcttgctgcatt

SEQ ID NO: 111973 - DNA, 669 bp, Setaria italica
  Intron number 1 from transcript Si016091m (locus Si016091m .g) derived from phytozome v7.0 (chr-ID scaffold_1; pos 35 495302 to 35495970 reverse strand)
ggcgtcgccagaagaagtacaagcaggtgagatgttttggctgtctcttgaccgctcttcgtacgcttattttgccttttgggttgctattatagtttggattggtttataaaagaagggttgcgcagatctggaaaaaacacattagagtttggattttatttgcttctgatttgatagttctgttaactagccatgcgtttactaggactaagtgccttctgttgtcagtttataatctggtgagtagaatactcgagtgtaagactggaattgtaggtctgcacaaaattttatcagcagttccgtatctctgctctttcgattggctaaatgtttaggagtgattaggtccctagttttgtcctctacgtgacaagttaatttcagattccttttaaatttagtactgatctactatagttcttttgttataatgctaaattttgaattgtgacaatttcatgcataaacagttgaatattattggatgcagcattggttagtatggtttagtatcaaccatacaagtcgcaactagttaagagcccaccggctagcacactcaataagttgattcgttttgttctgttaagggacaaccctcccaaatatccagatacagagtgtgatgccacatgaaaacaaatgcaggttttctcagaaaac

SEQ ID NO: 111974 - DNA, 658 bp, Setaria italica
  Intron number 1 from transcript Si016754m (locus Si016754m .g) derived from phytozome v7.0 (chr-ID scaffold_1; pos 26 126706 to 26127363)
aactggatcaacggtatggcagctacctctcttgaactgccccctccggccagcttcggctctttctgtgcctcgctcttctaatctctctctgtcttcaagccacccattcaattcatagctccccagtccccatgctggtagtactacgagcaattgaagtgtgtgtgtgtcagtcagatcatggacagaaatggtagtgaacagaaaattaggaatggagatcatatatgccagtaatatgaagctaatatatcggtaaaatcatttgtgtcttaagagaacagcaacaaacagcctggtaggagagggatcaaattaatcttgtctagcctcggtagttaacagggagctctgcagtttttttctttgtcctgtcttcagaaaagtctaggctgcagcctgttaagttgacagtagctgacggtgacaaagacttgcagctaaccaagccggggtggtggttatatacaataatacagctgctatctagctctttgttcaagtgccaataaactaattgctcttttttgttcttttgatgctgattgctgtaaaaatttgggttctaacatggttttgtttcttgttctgttcttgtggtcggttctgattgctgggacggtggcgaaactcatcggtgacagatccgaacggt

SEQ ID NO: 111975 - DNA, 400 bp, Setaria italica
  Intron number 1 from transcript Si039230m (locus Si039230m .g) derived from phytozome v7.0 (chr-ID scaffold_9; pos 23 580763 to 23581162)
ccgtcgctcgtgtaagcgcgctgcctccgagtactagtgatgccatgcaccatctcctgtacttcctccatttatttttataagatgtgatctagtttaacatgatctcctagattgcattttgatcgtttatttaccttatattatagttatgaacttataataattggagagtacatttgattacgaatttaaccatatcaagtttgtattataaaaataaaagaaatgttggctaaattattagtcaaagattttaaagtttaaatcttgttaggcgtgtgcatcttataaaaataaacggagggagtagtatttagcattgaagaaaattccaggccggtgactttagcatttggatgcaggctcctggtgaacacaaacttgatagcggcgtcct

SEQ ID NO: 111976 - DNA, 980 bp, Setaria italica
  Intron number 1 from transcript Si019192m (locus Si019192m .g) derived from phytozome v7.0 (chr-ID scaffold_1; pos 35 529559 to 35530538 reverse strand)
gggctttaagatcactgttcccaaaccctactaaggtttgtctaaatcatctttccacgtacaaatttcttaattgtttctcacattacagaaaactcattttggaagtcacatggattttctagaatttttggtacgttctattggttcagggtatagtgaaatttctgcatatatccatccagattttttccctagaaaaacaaactcaaacaaacatgcatggtaaaaaaactttattaaagatgttttcatcattagcaaactactcctatagagccctactctttgtgcgcacaccacctgatataggtttatcaagaaacaaagctaagcgtgtcaagaaacaaagctaagtggtattagttcttcaagtatgttgaggaaggtagatcatggaatttatgttgggcaattattcaagtgttttgcatgtattaagtggcccgattcaagtaaattgacttcttaaatataaacatccaacaaaatagaatgcaattctacagttagcgcacatatgagtaatttccattgcaggaaacttaagactaattatgacacacaacaaaatgttgtttttcttcgctaaggggttgttaggatagttagttttaggaaaaccagtttccattagattagcttttctgctaacagccaaaaacgttatctgtttagtgagcataaaactaggatagcaataaccagtttcctataaacgtgaaacagtgagttttatgaaaaaggactctgcattgttttttctcaaaatagaacaccatatgaataatactcattttttttaccagacaggattttctataaccatgatcttaaaactgattctctggaaactaatcatgaaacacattttacttaaactgggctctaaactcttcatccaaacaaccactaaatttacatttcttatattcctagtgaatgagatgctataaattgttgcaaaattattctccaga

SEQ ID NO: 111977 - DNA, 840 bp, Setaria italica
  Intron number 2 from transcript Si014752m (locus Si014752m .g) derived from phytozome v7.0 (chr-ID scaffold_6; pos 28 863925 to 28864764 reverse strand)
caggttggtggtccactagtccctggcctatctctctcgattggttgcttgtctgtgcgtggctgatacatgcaggcgcttgtttctcttctgcggttaggacacctaaaaataatagattggtgcatctgtattctgtatgctgtgatcctagcagttttcattttggttcaacgagggaaccagttctgcaatgcttttcctgttcctgccctgttttgaaattgtgaagatagaggcctgtaaaacagtgttttgcctgatgaatttagtgtagtataaaattgaaagtgcgcttaagtgcttgatggtggaatttttattctttttaatcatactaatgaaagcactacatgctgctgcttattttactgaacttgcagtaatgttttgagtatgttaaattcatataagatatgtagtcttgctggtgtgcattctttttttcaaggggtgttgtggagtaggactccaggtgtatggctcatttcacataacccctggtgtgataggaacatgatataccttttgtaagagcaggaattttgctggtctgttatttatttggtaaagtccatttgcgtttgcgcgctttaaatttcagctattgcaatgttcatttctggttggattatattaagtaactgttgcggcctgcgggtattacctattcttgtggagcttctgatttctttaagctcactttggcttagttgtatcttagtctttcgttgtgctgtcctatagctatactttctttgacaatttgcatgcaacatttctaactcaacttactatttcaaaggctagcgataggttcaacataaactctcagcttga

SEQ ID NO: 111978 - DNA, 778 bp, Setaria italica
  Intron number 1 from transcript Si036116m (locus Si036116m .g) derived from phytozome v7.0 (chr-ID scaffold_9; pos 44 548681 to 44549458)
ccgccggctgtgttccccttcctcctcgcagcgaggtaagcttccggccccccaccttccccttctttgtcggacctggtcgcccccaccctatgctgtagtcctgcaggggagcgcctcctgaatttgcaaaccccctgggtgcgattgcaaggataggattgctcgtttgcggcggtgtgggcttggtgcccgtatggtgggttctttttcttcttttgggaggtataccgacgtattgcggatcgaattggacggccttgggataagggataagaaatcgactggaatgtctgcaatcaggaagtgcctgtgttccaacaaccactgaataaacagcttgagcctgcacattactgtttacagagtacaaggtacagagttctgtcgttgcgctagtaaggttcagagatgagtaggttcagattagttgggttgttgtgcttgtaacttacacagccagtagtcattaacttatgcggatcttggagcaagtgcctttgttcagttaactatatcttcatctgatttactgctttctgggatcttttggctctaacataaatcggtccaattgtctttgtagaagcattattctatttctattaaatcgatacaaaacaatcggttctttttaaaacttcattcaattgatggatggatatttttgagatcttcatgatacttttcattctcttggagggaaattgtgtctctgatttcacaaaatattttgaatttggttgcgttgctcatcattgcaggccattattcgaaa

SEQ ID NO: 111979 - DNA, 864 bp, Setaria italica
  Intron number 2 from transcript Si036116m (locus Si036116m .g) derived from phytozome v7.0 (chr-ID scaffold_9; pos 44 549547 to 44550410)
ccagagagtacttgcagaactacccatacattcaggttagtttcacattttacatggtagatggtactatgcaagaaacctgcagctgcatgtatcttgtgagtgctgaaatgaatatgatgtagctgattgtccattttttagttttattttgtagtagtaggcttcatattaccaaactctgacattttctgcatatgtgtttgactgatgctgtgggagggttgcaatttggcatatgcattgctatatattgtttgttttcctctgctagttacattacggcatggtttaagtttttttttgggccttttaatgatggtttgaccttcagggcaaccatgagatggtataatgtccttgaaaagaatagaaagcagggcatgctatgcttttccccatgtcagtaagaggagaaatctgatcaaatagtatcatacaaatatctgatgctgatgtgtttcataataatgaacctcctttataaaatggtacaaaattttacataatttccaaacttttgcatcgcaattataacaatgtctttttttatgccaagcattttacattattattacaattactcttacagatgcaaatttttgaaagctcagcggtactagaagtcctgtaacttaggctggtcactggttcgttgtttacatgtttatttggaataaggtgtgtggtgtccgcgttttttgattttctatttgcaccatttggataacatgaaacaaattttgaatcctcatattctattgcagaagtttgacagtatgttcttacccccacagtcttgagaaatgagcataactttttatgggagtcaaattttactatttccatgcattctgcaggttg

SEQ ID NO: 111980 - DNA, 934 bp, Setaria italica
  Intron number 2 from transcript Si036847m (locus Si036847m .g) derived from phytozome v7.0 (chr-ID scaffold_9; pos 46 722331 to 46723264)
ttcagctggaggtggacgccacacccgctctccaggttcttctcgtcgatcactcctcccttcctagctagactagatccagcggaaagattttggttatttgctggtacaatcttctcggaagtctatgaagaatggaaacataatacaattgtgaaaaatcactgagagagaatcaaataccggaagaaataaaaaaccaacataaaagcatgagccaggcgatctgagtttttttttagcttcgtgatacagtgcggcacagtgatattacagtagccgtgtcagtgatatcacattcttgttcatgcggtccttgtacggcgatctgagagatgtacggcgagtagacatgcagtactgctgaactgctgagtttgcctgtaaaccctgcttccatgtctgtccttgactagtcgcatgcaaagtctgcaatgttctttcagcggatccagtgcaggagaaattacaaaaccgtgtaggaatcagggcaacgccgggtaatcgcagctgctgcgataacaggtggaagccacgcacggcacggtgcttcgtgcaggtcaacttccaggacggacggttacttagcttgtactgcccatgagtcatctcaccctgagctcgatagcggccggcagatatcgattgatccgtgctgctgcttagatgccaagatgtcactggtggtaaaagtcttttcatactcaagattttctcgtcgaagacgttgacatcaatgtcatatcattgcatctctatcaataaataattcttttatttctttgccagctcctgtactcttcttctctgtcaatgaaatatgtactgctaatctttcatccgtcctgatttcgctgatttggcagccatgttgtaatcagcgttgcgatcgtttacaggttcggtgacgtggccgagctggtggagtgctcgt

SEQ ID NO: 111981 - DNA, 816 bp, Setaria italica
  Intron number 4 from transcript Si035677m (locus Si035677m .g) derived from phytozome v7.0 (chr-ID scaffold_9; pos 10 635654 to 10636469)
caaattcactgctcttcatacagctgcagagaaaggtataaacaccaaacaaacttcactcgtgttttctttcttctggtacatatgtttggcttcctgttcagtctttattgttatcttgtttctctcttgtggtggatataccgtggaacatagggaattcctctggagtgtctttagttgaatctatatatacacgactgcagacgatggcatcatattcaacaatgaactaagcaagcttataccaaaatacgatttctgcaacgttgctcttgggtacattatgtagctcaaattctatagttgtcttctgtgactattgttgtcataaaccaagctatcctagttttatgatcttcccatgctcaactgccgtgattattatattatcattcaagaaaaaagtgttttttgacattaatctttctttgctcgcaaagtacaattcgacttaagattcctatgcttattgcatctgggattctggccattagtgttggtagaccttgtatttatgatcagtttgtaccttgctgatgttctgccgggatatcggtttcataccttattttgatttctgccagtgaaactaatagattgtccaaaaataattgtttcatgatgaacttaggattgctattggttttccctgtatgctcttcagtgaatagtgaaacagtaaatttatcaattgtagatgttgacacttggttgctgaattggtttcgtcatatatttctgctttattatgaccttaagttttcgtgtatttcttcaggacggtgtgcaatagcaaaatttctgctttctagg

SEQ ID NO: 111982 - DNA, 509 bp, Setaria italica
  Intron number 1 from transcript Si037470m (locus Si037470m .g) derived from phytozome v7.0 (chr-ID scaffold_9; pos 41 630628 to 41631136 reverse strand)
gtcacctgcaaccaggccagccgcgtcgaacgcctgtgagtgcggtgccggcgatctccccgcctttccttaccctgttcgtccaagattccgtcgtttctcctccgctctgccttggttatcgattgaaaggattggatggctgattcttctttaagggaacaatctcagcagttcctctgtttgagttgatcgcactgtcacccgcgtagatatcaaatctttggtttcgagatctaggcgacccagctgttaacaataaatgatctagtccttgtgttacttgttcttctagaattctccatctgttggaccccaaatcgcgcacttttacattcggggatttcttttcccccaaatatctctaggagcataagcataactaaggattccaagctttcctagttcaacaactgcatcttgtaacatcccgatgattatgttatctgactcttcctttgacaaatgtttcagggatttgggcaactccaacatctccggctcccttg

SEQ ID NO: 111983 - DNA, 540 bp, Setaria italica
  Intron number 1 from transcript Si035704m (locus Si035704m .g) derived from phytozome v7.0 (chr-ID scaffold_9; pos 43 259064 to 43259603 reverse strand)
tccttcgcaggcaacagcagcggttgattcctctggtgagcttttggccccactttgcagctggttggaagcggaaatttctctccatgcgtctatactgatttatcctagtataaaattcgtcctgggtttctaatgctcacatgggaagacacaatgtgtgcaccgtgcagcttcaccaaacctcttgctgagtttagaatatttttgtgcagataaattgatttgataacattgtattagattccagaatgaatttagtcttgcatgattagatgtctcaaaatggtttgaactgtttggagaacactgttcagatcttggataaaggatattagaaagcttgcattacccattgctgtgcctgtgtgtgaaagccaaaatgatttgtctcaagagtccagttttttgttatcatgatgatttcttgtggggcttgttttttctttattatgttgcttgaacagccgtttttgtatcttcactgtaacatcttttgttgcagttggctccgtcattgattcaaatctacgaggtgac

SEQ ID NO: 111984 - DNA, 846 bp, Setaria italica
  Intron number 2 from transcript Si014392m (locus Si014392m .g) derived from phytozome v7.0 (chr-ID scaffold_6; pos 18 067608 to 18068453 reverse strand)
attgtgagtatgatttcggatactactctgataactgatgccttgcaactgaactatcaaagctactttttgagccatttgtttctctgtgcttgcctttgttgccaatcttctaatatttaaaatatttaaatgtagcttacaaatataccccttccaattccaaatgtgtgttgttttaggttgaatgaacttttactgcctttcatttatactagattgggaaagatgacacacatatttgtgagggtagaaacacttattaggcaagggcaaggaaggacaaaaaaatggaaaattgcctattagttagagaatagtcgagaaggcttatatgatctacatttggaatcggagcgagtgagctgttctagtatctataagctaaatgctgtttctttttaatacaatatagtttcatacttgccatgtaatatttagctaagtttggacatatttttaaaattctgttcaatatctttccctacgaaaatatttggtatgttcgacgaattttctttgcaacaattaagggacagtttggctcgaatgttgtgcacactggcttctttcccactatggtgcttattttataaaagccatgaattgcagaaggcaacatgtttaattagcatcactaatagaggttcttaacagccagtaatttgtcatgtagttattttttgctttgatcttgcaatgcttgatgatattttcttgattatgattccaaacttccatttgtttttatgcttttagattcctgataatgatgcagattctttgttgcttctcttttctccctgacattaatgtcatattttccagcaaacaaaaggctagtct

SEQ ID NO: 111985 - DNA, 678 bp, Setaria italica
  Intron number 1 from transcript Si017825m (locus Si017825m .g) derived from phytozome v7.0 (chr-ID scaffold_1; pos 11 282949 to 11283626)
tgcggctgctctgcatcctactccggctgttccaggtccgtctgctcggaacctacagtcctcattgtttttcagatgcttttggcagaaattgcgctagtttatgtgtttttgtgccccagcgaaagtgtcaccctgaatcgatccagtcggtctgtaagaacatttgtagctccatttccttgaaaactcgtgcttttagatccgcattcttagcagaaagaaatctgagacgcccccacagcaactaattctggagcaatctgagccttttggatataaacgttctgttctcggttgtgttgttttggtcagagttgatgccgtccttcctggttgctttgagctgggatgggtatggatgttattgtaagggatgatcaggttttgctaatgaaaaactgaggaatgcccctccaacttctcaaacaaagaaaaactagtataggttgatgccttaaggacattactaattaagattaacggtatgtcggtgggaaggttaaaatccaggtgaacttttaaaaaatacttaattacagtccagctaaatgttgcacagtccattattctttcttgtatataagtttttttaagtatcctatcataagtccatgaattagaagttttagctgtccatgagttgtaatgtgacttgctgtatctaaattgtcagaa

SEQ ID NO: 111986 - DNA, 733 bp, Setaria italica
  Intron number 2 from transcript Si039085m (locus Si039085m .g) derived from phytozome v7.0 (chr-ID scaffold_9; pos 14 179510 to 14180242)
gggaatttggggaagctctcaggttctattcgcaggtttgcgtctcttattttggaacatgtggattcacttttacttttgttggtgtaaattgcgtaactgctgtagaaattgagtgatagctagtaagagtccattagttctgaatttaaacacctgtttttcttaccgtgccaagaaagcatatcgacaggacagccaaaagaaatacagaaagaaacagtaaacgtgtgctaggttggaattgaaccttgagctacaatgagtattgtttcacacctaatatacaatcttatgtatgtgctccctccgttcttatatgacatttaggacaagttcattgaactagatagcttgtcttaaatgtcatatattgaagaacagagggagtaacacttaatcaaaaacgtagatgtctctgtagttatgatgagatttttcacctaccttaaagtcataacaccaaaattaagaagtcacttctgcagcatcctactatgttccagtaactgatttcttacaaaccaatttcagaagtaattgatattttcaccatcgaagtttttgagcagttaggttgtcaaaatagtgccatatttagttatttaggcaaaactgatcccctcccatccaatttgtaatgatgaatcgatgatttttatgtggctgattgatgaatattctatcatgataataacagattatttgcatcatatcttgcaggcactgcgtc

SEQ ID NO: 111987 - DNA, 796 bp, Setaria italica
  Intron number 2 from transcript Si020376m (locus Si020376m .g) derived from phytozome v7.0 (chr-ID scaffold_1; pos 99 13390 to 9914185 reverse strand)
tcacaggtcctcaacttgctgctctccaagctattagtttgacaagtcagaatccttttatcctaaataatacttttacatcttttttagcttaactaaagtttatcctagcttatgcttttacaatttttcaagttttactaaagtttaacccaccgattaactctcttgtttggttgagttggtgctaaactttagccttttaatgcaaatatagtcataagcctaaaggctttcggtaagtcgtgtctctcagctgactatctagtctttattaattacactacattatgtatgtatatgctaataattggcctcgctcactgttgaaaaatcgattaggagggaggggagcacctctatttataagtgttcatgatcattgtgatattgccatgtggcaattttcacactcttgaatacaaaatatcctaactctagaaccctcctcatccttatctagtttcttatatttctaccatactaaaatatctagtttgagtattctacacttcaccatgaagcatgacaattatggctcatgtattctttccaattttctagaaccttcttaccttgccatgatcttatccttatatatggcaaagttagtctcttgagatctccacaatcttctagaatattccaaatacgcattgcatatttcaacactcaccccctgtacgcactgcattgaactagctgcatgtagcaaaagacttgttggatcgtatatttatttgtgtctgactctacaacagctacgagctcccaacccataccctgtgccacccca

SEQ ID NO: 111988 - DNA, 1024 bp, Setaria italica
  Intron number 1 from transcript Si034043m (locus Si034043m .g) derived from phytozome v7.0 (chr-ID scaffold_9; pos 28 978437 to 28979460 reverse strand)
cattacagagttccaatcaagcagaacaggtttctgtcactctttgcttagttataattttggtgagccaatattgtcagcatgcaatttgcccatgtattaattttatgccccatttgtactatgttctttatttggtttatttgtttgaagtattttctagatctgaaaaatgattgagaagcgtcatcactttacttcatctcttgcaatctggacatctgatggctatagaaaggccttaactattagccattcatttttccttttttcccccttcgcccacctgccctcgtcattttagccagtaacatggtagctgtactggaagatgtggctagataactctggtcgtgtagtagttgtgaaggatgaaacctgtactcttatattctgttcttcgtttttagtaccttaacatggtatgaatctctcatggcagaagactcaatcatatgtggtctacatacatgcctacttaatgctttcagttctccaactttattagcagaagtactgagacattgtacattaaaacctcctagtaatgaactcaaaagaattgtacctttggtttgtttacaacacggtcgcctttgtgtgtatttgcaggctatttctagaacaatatttacgtctttgatatagtaccaaagcatcactgtgagcatgtagtaattttgaccatgagatgctcaccagccactatagccttcaatgcgcctataaattttcttggaccaacttttgaaataaagtttaagccaatggatcttaaggtccttaactcatgttgtgcagcagatagcatgttattttgttggatgtcgataatagatcctttttttatcaagactgttgttggtcttggtagaactattacatttagtcagtaatgctaaggcagattactgatttgttcatcgactgttcatgattatcagttatgtctcgtcaaaccagcatgatgtacctttctttattgagggttccctgcttgaactactttctttctttttgcagg

SEQ ID NO: 111989 - DNA, 610 bp, Setaria italica
  Intron number 3 from transcript Si019789m (locus Si019789m .g) derived from phytozome v7.0 (chr-ID scaffold_1; pos 25 488760 to 25489369 reverse strand)
tcaggtaaatgctacacattaactacctggactgtttatatagttgtacctgcaaatgccactgagatagtggcacattggaaacacttgcaatgactcgtataccatgaaaaattaaatattagctccacagactgtctcatatcatttttgctaaagttactttgtcaattgtttcttgagaggagacttatttaagtgaataaaacttcccatctcttaaaccatttctgtgaatcatgaatagcgcatgttacttatatataccctatcatttatatatcacacacatatttttttaagaaataacagattatataccctggtcttcctgagtaactatctaatttcagttcagtaatataagaaatttcttactaccacaacatagaattgttaggtcaacagggacaaacatgtgtcattagttggtctttcagacttacattgtgcccaaataatttcaactcaaaataatatagatatccttagatatattctaattgtggagaataaaattttcctcttctgcatgttaaaactaatatagccatttcatctaaaaaacttgttctaattatttctcttttttttttacattttcagtggt

SEQ ID NO: 111990 - DNA, 782 bp, Setaria italica
  Intron number 1 from transcript Si014400m (locus Si014400m .g) derived from phytozome v7.0 (chr-ID scaffold_6; pos 28 223129 to 28223910 reverse strand)
actgcaaccccgactccgagttcgacccatccaaggtgcgacgtgatccttcttctttttccttgttctccttctcggcggttgctgcatgcgtttgatgccggcgtgctcttggttttcgcgtgccacacatccttggctggcttcacgttatggttcatgttcttggcgctttgctgtttgtttgacgagcatttctttttgtgctattcggaatttctggggcatctttaacttgtttatgttttgttgttccgaacatatccccttgtcatatatcgatacagtacgtatctatgtggacgatgatccaacatctcaaaatcatctttttggtgtggatttggaattcaaatcacgcaatagcgatgatgtgagaggaaggacaatagttgttcctttggcgtcactccagcagacgaccctgtcacccattggattcttgtcctctccaaaagcaacacttacctgcaaaattcgtagctacagtttccttcctcatactgttaccactctgttctttcaatgacaaaaaaaatgtatcagtgatttttcgttgttgttacaaactgaatttaccgtcatcccagttaaaagaaaaatcacccttgcaagagaatcacattattcctgcacgtcccaagcaagcacagttccgaatattcgttgcattaggcacggtactacatggagatgttgctgtcagtttgtcacgctaacatgacacggtgcgtgacgcgttggcaggtgagcgacctgctgagcagcctgcgcgccaagtg

SEQ ID NO: 111991 - DNA, 701 bp, Setaria italica
  Intron number 1 from transcript Si037216m (locus Si037216m .g) derived from phytozome v7.0 (chr-ID scaffold_9; pos 56 419231 to 56419931 reverse strand)
gggttcctcgaggacttccaagccagtgagtgttcttcctcccgctagggcacgcccgcccgcccgcccgcctaggtcgcgagcttcctcagccacacagattttttcctaaaaaaaataaatcgggatttagcctagaaattccggatgtttgcttatttggcatacacgagtgtttgagtttcatgattagatgatattgccatgtcagtacttcaagggcgtgctaaatgatccctaagactagcctacctgcatagtggttatgcaaattctctcttgttagaatttccagctgtatatttttatttggcaacttatacagccattagctttccttgatggaaatcatcacttgtgccttgacaaaacaattatttcattagttgctagatttgattaattattgcaacgtggcactagcagccctggtttttgttccatgcaccatttcacgggtattcaattctgtttctattgaatagtccatgtttccttgcacctattgataaactgaaatgtggaggttatagctgaactgggtagtagggagtattgttttgcaagagaatataacatatgctagaatcttgtaaatattgtttcgttttcttgatttgatttatcccttcagatggtaacattaccactttacaaattaccttgtttgattactctcaggtgttgaatcattgccatct

SEQ ID NO: 111992 - DNA, 405 bp, Setaria italica
  Intron number 4 from transcript Si017294m (locus Si017294m .g) derived from phytozome v7.0 (chr-ID scaffold_1; pos 47 63652 to 4764056)
ttccgcgggccgcagactccagtcaatccaaattggtaatgcattttcttggacaatgggcttcattgagttttgaagaaagtattaatcagattgccatgtatcttttcctttgagttgtataatgtaagcaactaactgtttataaagtggtacaacatatcttgtcatggatgttcttgctacggtcaaattcgactgataagactaaattctgaaaatccatagcactggctgttactattctcaattgtcatggatatcaaataatataatttctcaatgttttggtgcatgttgttgcttgcttcacttcttgtttctgcactacacatatggaaacctcatgtaactaactgcaatgtacattcggttccctcaggtttcatcttccaataggttaca

SEQ ID NO: 111993 - DNA, 1051 bp, Setaria italica
  Intron number 1 from transcript Si017349m (locus Si017349m .g) derived from phytozome v7.0 (chr-ID scaffold_1; pos 33 274011 to 33275061 reverse strand)
ctacgccgccggctcgctccatcgcttcttgcaaggttggttgcagccttcttttgttaccctcgtttacatttgacataaattttaccaagttttagcatttatgcttaatcgaatttcaaagatgatttttgtcgctctattgttggtttgatgtgggggtcatcaggtcaattattatcgacagagttgatgtagagcctgtacttttagcaagatctcagacaacaggcaaagcaagatctcatacctgtattgcacaatgcatacacaccacatgctgggttatgatagaattgcattatagccttccagcacgtagctgaagccttcaatgctagggcgtttcttgttctcttcatggcgcacattatgcacatagtttttttttcagtatacatttagtatgatcaaaatgtaattgttttgcatccaaacaggaatcatcatttgtttcgagagtaaaacaaccgtgtcctttttaaaagtttggttcgactgaactgaagtaaattaaaaccatcagctgaaatgagttgaaaataatctgattttttaaatttcatgatctggtgacgctatagtatacacatggaaatagcacatctgttgatattttttctccatgaagggaaaagtgtcatggcattattgtactaaatactgatatgaaagcagatcactagggccactagcactttaactcccttttttttgaggtggggtgggggcgattgtgcaggtaccccatgtgttcttgctatctgttgttgtcatcattatattcgacaccaaatcaaccttttcgtgaagccattttctgcttggatgtcagctcgaaacttccaatgggtcctggtgccatattcctgattcctgttagtttcagttcacacttagcaaatcataatatttagggaataggaaataatcagttctatttgttctgaacgcgtcgtttaacagttaacactttttggtattactagtagagatggtagctcatttctttgttgctatcacctacagagggaattgccgagtcacagag

SEQ ID NO: 111994 - DNA, 793 bp, Setaria italica
  Intron number 1 from transcript Si013452m (locus Si013452m .g) derived from phytozome v7.0 (chr-ID scaffold_6; pos 31 627445 to 31628237)
gccgcctagcagaggtatcttggtctcctactctccatgtctagttcggttgttgattgcgtggctgactgatttgaccgactgactgattgctgggttcctttcttgatctgttgatgcaatgccgcccaacgctttcttgatctggttccgtttcgccttttcttgatgcatttagtgcctcctttgagttagtgcctccatgtggctgtgttgctgtctggctcatgtgattctggtgttcctcctccgccaccacagctacccccgcgtctttccaaaggagaagtggggagaggggctcgtgattctgcagctgttccaggtagcagtgctttcgttgttaatctcttgtctcctggcacctcagtcatggccgcattcatatcgcccccatcttttttcatggcaaatgttatggcttctctgtgatttctgggacctgtttgttgtgctgtgccctttggtgattctttggttgatgcaacggactgggtgttggatctgtgctgtgtctaggcaggtgctcgcggctgcgcctacctccttgctccctgcctgcttgctaatcttgtgtgcagcacaatgaactttgagctcatctatgggcatttttaggtctcccagtcccaacccttgctagtgttgacaatttttctggtattttatttttttcttcatgcgtttcagtctcgtgttgaatccctggtagagctaccagttctttgttttctagacagcactatcaatacgtgctaatgtggtgttctttgttcttcattgctaatttcag

SEQ ID NO: 111995 - DNA, 908 bp, Setaria italica
  Intron number 4 from transcript Si018281m (locus Si018281m .g) derived from phytozome v7.0 (chr-ID scaffold_1; pos 29 902082 to 29902989 reverse strand)
aggtacatgcatttcagacccatgaattatattaccactgagatcatttttcttccaacaacgccatgaatcagcacatgtaactttgtcctctctttggaatcgtgtgaatagtgtgaaacaaagtattgtgattgaccacatcctttcagatagttctttgagccctggttgtgttcactcctgtttgggcttctatgcctcccctcactttgcttctagatatgctttgtttgttcaatagtatatatcacagcatggttccctgttttcagtccaacatacataggtggaacatagttgtgactgcctgttgtagcaaatgtttactttttgtgaaattagtttagatgtctcctttcatgtgtgcaattgatactttccagacaagtgttgtagatatccgcttgcacataatgtaagaaaatggaatgattcatgtacgatttcattgcttaatgggctaatggcacgccacttgaaactgcagtcttatgttcttttccacctgccatttaggctttattatgcctttatcttctactcttgttgtaggctgtttgggtcttcatcattgttttcttgttgtaaatcaacggtaagatgtttgacttggctatctgattgatggattgatcatcagaagcccaggaatgtttctacttaacctaaaatctactgaacgttgcaaatggcatatcacagttgtagtttgtatgttgttgtttcgtgtaatgtatctccctagtaattgtagagcattttacggggagaccaaacatttcattccaaccatttgctgttttataacagcacagaattggtgcatgttattgtaattatgccaatctaacttctctgttgtgctttcagattcttgattacctaggcaagtcctctgacagtga

SEQ ID NO: 111996 - DNA, 895 bp, Setaria italica
  Intron number 4 from transcript Si017098m (locus Si017098m .g) derived from phytozome v7.0 (chr-ID scaffold_1; pos 34 066164 to 34067058 reverse strand)
gtattgctttggaagatatattactgcttgtttaggtgagttatcttctgagcctctggggcattttagtttcgaccctcagaggttgttacatgcattgtaacacgtgcttaaaagatggatctgcactttctgttttaaaccagtaacatcaatcctattagatgcatattttatttttctcttttgagggtacatgggtcatggatatgaagcatgcttgaaatgcagttatgtggttttgaagcgaggcatgattttatctattgtttttgatattataccaagcatttgtaaactggatacttttttcgtccgcacagtttatattctttaacatgatgtactatggtatgtttggatggaggctatttacggtatgaaagggtttcttcatgcctgtgccctacattgttcaaaagtaacagcctattgttatgttgttatcagtgcattaaatccggcaaaagggggtctctgtagagcttccaagcctttgttatgcaactagatgaagtcactacccttcttcatccatgaactaaacagcggttcatcttgactttcgttatgttgactggaagatatgccagaacccataggagatgtcaacattattcttattctcctactgttttgttcttggtaaaataaaagaagcatcaacttgttaaagatattatacgagactgatttgttaacagtttggtagatatatttccgcgcagcctttgttttctgtattttccatcattgtttcatttggggaatttatatagttgcaatagctttacctgtatctttttcaactgctgttgcttatttactacatttcattgtttactgcaattgtaatataggtggtgaagaaaggactattgcatttttgaagagg

SEQ ID NO: 111997 - DNA, 798 bp, Setaria italica
  Intron number 1 from transcript Si017098m (locus Si017098m .g) derived from phytozome v7.0 (chr-ID scaffold_1; pos 34 067611 to 34068408 reverse strand)
cctcgaggccgtttcaaccccgcgctgccgctcaggtgttcgattcagctttctccctggcttgaagtattcgaatcgaatcgtggctaagctaatcctctctcttagctcatccaattagtttaggagttgtcgcgcgtggtgtaatttgagcggaatttagtcgtccctttgctttgctcacacgagaatgattccagtggaatggaaactttgatggtttcccttgcgacaggaggatttgatgtttggctatcttcattagttcccgggttctcccttactgaatataatctgacttgtttgctggtcgagctatgtgtagcatggttctattgcttgttgtagcggtgaggtaaacattgccttcaagaaatgacacttctatttccttttttctaagaatggaatcgatactgctaaagctacgaattcgttaagtttgtcacattctattggttgttcacatgcttatttgaacttggattttgtcggactagcaattcttaatttcgcataggaaaaatttttagatttaatttggctttcatctgagagactaaccattcatttgtatgttagtggtatctattaggttatacctccaaatcactactcattgtgtgactatttatttgttccataattgcctaggaatggattgatctgtttggcagtctgtttaccatctgagatatcttattaaccagttgaacttttgatcatttatttaaactctaatcttaatacactggtcctgcagataagcacaacttggactggtaatttggttcacgt

SEQ ID NO: 111998 - DNA, 865 bp, Setaria italica
  Intron number 3 from transcript Si039074m (locus Si039074m .g) derived from phytozome v7.0 (chr-ID scaffold_9; pos 19 387901 to 19388765)
atcaggagaggactgatctctgcgcggtgaaagtggtacaatacttttcaccctttatttggaggcctgtggacattgttgcacgttcctttttgtgcaaataaatgtcatgatgttgctgctctgtatttggaaatgaacattcaaatcgggattttaggatggtcagtcgaggctcaaggtgaagcaaaatgggttagagatggttagcaatacagcgcacgtgacggtgtgaccataccactgaaccgcgtgcgacacatgaataatcacagttcagtttgtgcacaagcccaggtgtttggcattcgacaaatgggttagaaatggttaattatgcagtgcgtgtgaccatgtagtaaaaaatgaaccgtaggttcagcaacatcaacagtctctaaacttcaaaattagcttattttttggtctttggctatttgagtaatcctcaaaactcaataattcttctcttcataactatatgtacattctggttcagtgtcatgatcatcatgaaccaatagttgccatccaattccagttaagcattgacatgtgaatgctataatctccatttatgaagcaagaacatgcctttaaggtcagtagatataaagtcatttgtggttcagctacagaagtttcaaaataatggaacaaacagttttagaaatatgaatctggaaaaattggatgccacttgtatgtcgcgattcatttgtgaaatgctctggatagactacttctaccttctgttattttctagtataaagtataagctcttgatattatgatgctggttgttacatagcttttgttattatatttgtggtcaaattgctacaggaagtccgactagggacaa

SEQ ID NO: 111999 - DNA, 673 bp, Setaria italica; identical to SEQ ID NO: 111540
  Intron number 1 from transcript Si019881m (locus Si019881m .g) derived from phytozome v7.0 (chr-ID scaffold_1; pos 32 070499 to 32071171 reverse strand)

SEQ ID NO: 112000 - DNA, 636 bp, Setaria italica
  Intron number 2 from transcript Si017853m (locus Si017853m .g) derived from phytozome v7.0 (chr-ID scaffold_1; pos 15 032906 to 15033541)
gttcaggcatattgccgataccgcaggaccaacaggtaaataaaatctctaaatgctgtttctttatactatgaagcaaaatgtgctgacacgaaatttagcatgcacaaaaacatttaccgtactggtgcatttaaattatgaatcgggagaaaagaccttgtcctcaaatattgtggaacatattatagttggcataggaagttttggtattcttttgagtgtattaacttcattgcttgtgattcagaaaaggggtatcacaaataactttcttgtatggaactttgttagttttgagggaaaaccagaattaaaatgtagtaactgaaaacacatggaattgcttgtgaattgtgatttagaaaaagggtaacacaaataattttatttgtaatttcctcggttttgactgtaaatgagaactaaaatgtagtaactcaaaaaacacatggaactgattttggttactctaccaaatatgaaatgaattatgactacttgtagtttagacctggttcagaagtcccatgtaatattttcttcatgcatgtgcttttctcaatgcaaacttttattatttttactagcattactccacaattttgaacaattttgattacagctggtgggctt

SEQ ID NO: 112001 - DNA, 651 bp, Setaria italica
  Intron number 1 from transcript Si037633m (locus Si037633m .g) derived from phytozome v7.0 (chr-ID scaffold_9; pos 50 892763 to 50893413)
ccctgattccatctgcttcggcctccaaggcacccgtaagcctctatccccattccccttacatctgttgttggttccttccaaatttcactctttgagaactatattgttatgctgttttcatttctatctaaaatcaccaaagccttttttttatcagagcacaggataaatatcagtggcatatcataagagggtttataatctgtcgaaattatgttttcttttttggtgcactgttctgagcaataccagactgatatttacgctgttacagaaattcagtattgcaagataaattgtttataatatggcataacattccacatttagaactgctgttttgtgctacggaaattttttagatgactcccgttcaaaaacaaagttagattagtcaattcgatttttggtagaatatggtgggtagcttggatgagacagtgagataattgctcttaattataccaatggatttgtgttggttggattggaactatttgttctgtattagttcaccatctgtgtctttactgtttgctagatgaaacagaagataagtttgatgttacattgtcatccggacatatagctaatttgttgtttttctttctttttttctattatgtaagcaatatcttgtgagaggga

SEQ ID NO: 112002 - DNA, 1036 bp, Setaria italica
  Intron number 2 from transcript Si019888m (locus Si019888m .g) derived from phytozome v7.0 (chr-ID scaffold_1; pos 12 821416 to 12822451)
gcctttctgtactccagctgccgaacagagtacaggcgaccgaattaggttgtgcttcgttgctcatcgtgttatgaaatgttcaaaataataataattattttatttggttaggtgaattgtaccaatttatacagaatgatagaatgaagtcatctacttaatacttctactaataggagggcaaaatagacgttttggtccctcaactttgttctgaggaagatcgtccctcaactttaaaattggccaatgtagtccctcaactttggtttttatcaaactcattcttgtggtgatgtgggggctccattttagtatgagactaatatgaaaagtccttctcttatctccttcttcctctcctcaatttccatcgttaagtacaataacagtatgatccaaaccaagtatgagcacataaatatttatacatatttattaagagagtatgaatacatatatgaagcatgtatattgtaccatgagtatctgagcacatgctgattttagcgtatgcatacatatattgagttgtatatatacaaaaggagtacgagtaatacttgtttgaatacatatttttttcatattgaattcatatgagtacatacatgacttttaaaagtatcagccatatcatgtgttagttaacaaatatatttttgcaggtatatttaagggaatatgagcccatacatgtttagcctacatgaaccaaggctaaaaaggacttttcgtattagtgtcatgccaacaaaagtgcatcatatcagcacaaggataagttgaccaaaaacagaagttcatggactaaattgacctatctaaaagttgagagaaatttgacctaaggtcaaagttaagggaccaaaatgatattttgcctaataggagtgaaccatatggtacgagcaaatatgttgaatcctaccatccagaatcatccatacatgcatcaagtgatgcatacaatcaaacacactcttaaatctccttgtggagccgatcagcttaaatctcttatatcgggagt

SEQ ID NO: 112003 - DNA, 801 bp, Setaria italica
  Intron number 2 from transcript Si018817m (locus Si018817m .g) derived from phytozome v7.0 (chr-ID scaffold_1; pos 16 767064 to 16767864)
tgcaaggttttaaagatctttcccaccgacttcaggttagtgttgggaatgtgcagtgtgctagagtactgcttcttttttgtgtgtggctatagtatgcagatatatgaacttctaacaagcatgctgatatataaaatcctagacatgcaaattactgtacttaaataagcaaagtatgtttattagttacttagttaggcaaaatactgttattaatcaagcaaagtattaatcaagctagaaaatttctacattatgtgtaatgctattgaattatcgaaaagggagcaaccttgttcaggggaggcatgctgaccaacaaagagagggagatgtgactgttaactaatttactagtgttggtatggacaaaaagactatggtaattgttgtagttaaatgcaaacatctgatttatttggggacatggctacctaatggccatgtatgtatttagtttatctgtatgttgctatttttcctttgatttgattgtgtacattcttttctctttgaaatgctaagattagcacggacatcctgtttccaagtaggtcactctattgtgacacttatttgtttcatatttgctctactgaggcaatcatatttgttaagaaataggctatactatgtttttagctagtctactctactagtatgtactgaacatgcatgcagtacttgttagctatccagaagtcacattgatctgtattttttgttacttgtgaactaatgtattcccatttctttcatatctggctgcagcttaggctctggctagaggacaaagat

SEQ ID NO: 112004 - DNA, 753 bp, Setaria italica
  Intron number 1 from transcript Si035265m (locus Si035265m .g) derived from phytozome v7.0 (chr-ID scaffold_9; pos 19 010340 to 19011092)
agcagccgcagcagcagcagcatcaccaccgccctgtatgttccccaccgccatctttcttgggaatttcatgatccgtgaaacggagtactgtgattggtgattagcattgatgattgctccctaatgttcatcatgccacctcccggcattttgatagtgatgattttgttcgtctgaccatgagctaaacgtgacatctgcactgacaatttgacatggtttatattcccctacctattcatagttactgctacacttgtagtgtgatctatgcccatttcagaagcaaaatatctcctttgttcactattgcaattcataaaattcagtaggcgagtttatagaattttagaactgacaaactgcaagttgcatgtttggctgtacataaccatcaagtgttcactgtccatgctaacactatcaaattctgaagttatctcagctttgcattggtttgtttgcagttttttcttgatggttgaagaaagtagtaaaattttagagttttctttaagaacctactatgtatctttgaaattagatcagatgaaccatatatcacgtttgaaatacatctgttgagtgaattggaaccgtgaataagtcattgcttttttaaggataaatctttcataactagcactcaacaaacaccaccagttactccgactgatcacaccatcctctgtgatctgtacaattaattcagaattggctcacaaatattcatgactgcaggctgatatc

SEQ ID NO: 112005 - DNA, 617 bp, Setaria italica
  Intron number 1 from transcript Si017343m (locus Si017343m .g) derived from phytozome v7.0 (chr-ID scaffold_1; pos 27 410306 to 27410922 reverse strand)
gagcaggagcttcgggaggccgggtttgggtacaggttagctcgtggtgccttgcaactgtcgttctgcatgtttgattcagcacagctcgtcaaatatattttagcctcatctgctttacacgatcaaattgtgggcagctcaaacattttcttcggctgttgtttatactagtagctgctaattcatctgcagcatagcattgggaaatgaggatttgtactgaagctttagttgagaaatgaaattattgaatgtacttatgtacagtgggctggttattgagctaatcaggcaatgaggatttgtatgggggaaatgataacgtttaagatatttgcactattgatttgaaaatgtgtgaaaactcttttttttttgtttttgtagatttgtagtattcttagatttgtcctttgggaaacatcttttatcaggcaggaaaatttttattgttgtaccaattctaactgtctgtatgaatcataaatcagtaattactcatgagtatcttttgtgcgcacagggtagtatactgatttgggcaattctctgtgtgtgtttttcatgacaaatgagcagggcaaagtacattgttggcactactaaagaactgc

SEQ ID NO: 112006 - DNA, 928 bp, Setaria italica
  Intron number 1 from transcript Si017548m (locus Si017548m .g) derived from phytozome v7.0 (chr-ID scaffold_1; pos 33 143680 to 33144607 reverse strand)
tgcgccctctgcttcgtgcaggtatgtgtgacctattccaattttttaggactcaaatcgcgtgattacctacacctgacactaaccgtactattaatcaagttttagtagtagcgtccgatcatcggcgtggcgtgtcgcgagtcgacgtttgactagcaagttgggatcatcgttctaatcgcttgcttcatgcgtaatttgattgaccgccagatatgtctacttcgagccttcaatttctacctttgaaaaaagctatcaaattcttatttggaattcagtatctaggaagctgtcaccttttcatattgtaaagagattacagtcagtatggtaggttgtggttgtccaccgtgggatcagcatcgaccggactcaaactaggatgtaaaagcaatctaacactccactaatcagtcttgcaagagtgaaaattaagatgccaaatcaagagaatgaaaccgtgacaagcctcgagcagtcagcagagtggactcgagaaacgtatagcatccataattccgtatgcggcataatgtaggggacatggacagtacgaggtggttcgagtaaattcgactgggacacgtaacgaactgcaagcgctcctacaaacagaaccgcaagttgcgcgaagcgtgcggtccacacgtgtcctgtgccaccccacatccagccagatctcgacacaaaggcacaaacgtgcttcttccctaccacaccctggaaggctgcaatcaatgtagcttgttcgaagacggtgtggtgtgtgatgcaaagcatgcagcacgagcacgagcctgctttttctttttggaatctacagtaccacacccttgcagaatcgtgaacagttctgacgtgttgctgttttccctgcggcgttgcagctgacacggttccagggcgacgggggctacgccgt

SEQ ID NO: 112007 - DNA, 351 bp, Setaria italica
  Intron number 2 from transcript Si016570m (locus Si016570m .g) derived from phytozome v7.0 (chr-ID scaffold_1; pos 64 7403 to 647753 reverse strand)
ggtaatctcatatacttaatgtcgtagaatttactgtttgatcttcagtgcaaacttgtttagatttatttgagcgactgtgcacatttttcggagtttaggggatttccagaatccagccctgtctatatggagaaatgaccaatgtatattgactattgagaaatgaccaaatagttagcatctgcacacattgcggttgttatgctggacctgaactagtaatccttagttatattctgtgttggaggatttagggcgttgctgtgataactggattcacaactcttgcattgttctgtttttgagtttctatgattttgttgcaggcgttgagtgtgagatcgctag

SEQ ID NO: 112008 - DNA, 701 bp, Setaria italica
  Intron number 1 from transcript Si015420m (locus Si015420m .g) derived from phytozome v7.0 (chr-ID scaffold_6; pos 29 354490 to 29355190)
aaaagagaaagttggactcgattttctaaagaaaggtaaggatttactaacaaaaccatatatttctatgcatcactagcatatgcattcaaattcgtgaataagtgtgaatttttctcccatcgattattttcatgtaaagaagtgaattctattttcggggggaatttctaggattgctgctgatgatttctatagatgttgttcgattcgaccagttggtggtcagatacttgcacttagttttttttctcacgtctttgcttgttgactaacaattcagggggcgggacagggtaagctctttggttgttttcagttataatttggcacatgagatttgatataactataccactaattggatcaatagtgacctatatagttaatattttcttcttaattagaatatctcaactcaggtggcttatttatttttaattttacatttcacatgaacgaagctcattatgatttttagtttgttcttgatattgtaaatgtctatgaaggtaaatttgatggcattctaatgtatatttattattgcaaagaactaataaagtctccttatgtagttggtgtcatagttagcacttatgaataattgatattcctctgcatttagtaattacatgtattctcgaagctctctttccatatagatgaagttaatgtagtactaacactttaaatttcag

SEQ ID NO: 112009 - DNA, 695 bp, Setaria italica
  Intron number 4 from transcript Si034746m (locus Si034746m .g) derived from phytozome v7.0 (chr-ID scaffold_9; pos 52 962862 to 52963556 reverse strand)
tctcatttgcattgttctctggaggcctctcgaatgtatgtacaaaatgctcttctttttgttagtcaatctattgaacctcagggcgtcgagacttagaccttttcatgttgagcgtaactattagtaccatagaccttatcagtttcttctttattctgacagacaattttagcccacctcgaacacaattattaactaagtcaagtatgagatatgcattttcattgctgaacaccacctttgccaatgtgcttttattaataaatagtataattgttttcttgtcggttgttgtcacgatatatgagccatgttgcttgctgaaatcataatagtcatcctcaccataagactacaaggtaaatcaaaggccaaaaaagttgaaattacctctctttaaatagcatttgttgctaaggaaggtgcccttgagcgcagcctcactgtcaaatttcaatttaatagttttaaatgtcacacacaactagccatggcaccttcttgtctcttcaaaacaaaagagaaccttcttgctttagagtttagattgtgttttatcatttatagatcactagttattcttccaacctttttaccattctcagtttcctctgtgtaccacagcagataactatctgcattttttgtgtaatacagcctaagctcatcgcgcactcaaaaagtgttacttt

SEQ ID NO: 112010 - DNA, 791 bp, Setaria italica
  Intron number 1 from transcript Si035288m (locus Si035288m .g) derived from phytozome v7.0 (chr-ID scaffold_9; pos 45 735336 to 45736126)
tcgccgtctgcggctccttcgagttcggcacctgcgtaagccccgccgccgcctcattaaccacgttcctttcttacctatatatactactctatttggcgccgtgcatttagcctccgggagagacgtttgtatgagaagatcagaagacgaccacatccttacagatttcaggaaccaggcataatctttcgtaaatctcttcgtcccaaatacgatggacagtttgcgttcgttgttctgaatttctaatatggaccttagcttcttggctggacgcctggacagataaaaaaaggaagatatgagtgtgtagtactgatgagagacagctaattgcagtaccaccccgcaccgcatcactgctgcttttctagagttaccttcctttttgtctcagttgtcaccatgtggtttactgcgatgccgcaagggacaaatgtctcaaaaataagaaaaagaaacattccaaaactacacggatgcgtttgcagtacacaaagcgcatatagtgaaacgaacagtccagcgtatatttgttagctatagccccctcgagtgaaaaaagaaatatcagattcggacgtgtcttggatccgtcttttatagctagaggacaagatttccttttccaatcatgttgtcggggcatataatactatatctgtgttccactagctagaacgtgctggtggagttttttctttttgtttttgtcgaatcgtgatgcatttgctcggccatgtttgtttgcaggtcggctattcggcacccacgcagtcagggataat

SEQ ID NO: 112011 - DNA, 913 bp, Setaria italica
  Intron number 1 from transcript Si020031m (locus Si020031m .g) derived from phytozome v7.0 (chr-ID scaffold_1; pos 55 15896 to 5516808)
tacaggtaaatgtgatttcagtcatttcacgagccttttctcttcttattttaccatgtaacgtatttaacacaacttcatattccattttgcagtacaattcattctttctggagcacaaactaagtactgaagattatatattaggactaccaaaagaatttagcctcacttacatctcctcgacagagattatttcttgaaaagcctgggtggaaaactcaagaaaagcaagacgaaactggccttccggttcctcaatgaagatgtcattgagccttcaaccaagaagacatatggggagctcctgaaagacctgaaatccatcaaggattttgcggtcgggattcttgtccccaagacctacatctggccactgaacaaagatcagtacctgtcaccatccacaagtttggtcaaagatgcgcatgccctggggctcgaagtctatgcgtctggatttgccaatgatatcgctacaagttacaactacagctatgatcccagtgcagagtagttgcagttcatagacaatccagacttctctgtcgacggtgtgctcacggacttcccgcccactgcatcaggagctattggtaagaactattccatgttggaattggaaggagaaaacctgaataattcatgtttctttggaaatgatagagatctgcacattatgctctaatatcatagcaattcaccttcttttgctcgttaataaaatctcttaaatgttttgctttttacagcttgcttggctcattctaagggcaatcctctagcacctcctggaagtaagctatagatgtttactatcacgacgtcatttgtaagtttattatcatcatccttagtacttaccccccctatacaaatgtagaggacaccaggccgctgatcatcacccaca

SEQ ID NO: 112012 - DNA, 918 bp, Setaria italica
  Intron number 1 from transcript Si013954m (locus Si013954m .g) derived from phytozome v7.0 (chr-ID scaffold_6; pos 33 646662 to 33647579)
gccgtgtggggcaacggtgccggagacgaggttagcgatctgccgctgcttcctctgaattctgacgcatgatcttcttcttttttggctcatgtggtttctgtcgaatcaagatttggagtttgtagttgcagcaaaggatgcatacgtaactgctccgctttcagtagattttagagtccaagataacaaatagcatggctgtaatttcatttttcagtttttggtactcctaacttaaggtacgcgtagacaacacaagcatttgatttttgacagaagcgcacgaagatttatgaacagcaatgcaacaaaaggaaacaagcgaaacttgatcgtgggtattttactgcaatttttttgagctgaatctgcagtttttttacaacccttctgattacctgaactttccactagaaatgcagatttttttcctccctttcttttccttttgactagtaatatcctgcaatataccaataatagaacagcatcatacaatttgatctatggaaaatcgataaatatatataggatctatcgtaggttcacagatataggtgatagcgactaggaaattcatgtccaataccatactgcaaaaaaaaatgtggcaactaactaatggagcatagaatccaaactagcaaaacaccaactgggagctttgccatatccagaggtcaaaagccttaaagctgaagctgtccactgaacaggcaaagaatatgctaaccctggtgtccacgcagcaggctagcttttgggtttatccgagtgaagtgagacgaggcacacgctgcactgatttcccagctccagtgccactcaattttctcttcagatttcgaaccaaattcacgaaccgatttgcattgtgcggcaatcatctaatcatgcacaaaaatgtccaggcga

SEQ ID NO: 112013 - DNA, 578 bp, Setaria italica
  Intron number 5 from transcript Si016491m (locus Si016491m .g) derived from phytozome v7.0 (chr-ID scaffold_1; pos 82 94773 to 8295350 reverse strand)
gcaaagctaagctcactgtcaacattgtaagtaccatccttatacagaccttttacttttggctgactgtgcagaagtgagttttctgaattttctacgtgtttgcaacttgcagacatgtgcagaacaatcagctatctgggacactcgatgtgctaaaagatcttcccctgacagacctgtaatttcttcatcacatttgcactcaggccttgtttagttgcccgacaaatcaaaatcactgcgccagcactgtagcatactgtagcgttttatttgtatttgtgaattattgtccaaatattgactaattaggctcaaaagattcgtctcgcaaagtacaaccaaactgtgcaattagtttttgattttgtctgcattcagtactccatgcatgtaccgtaagtttgatgtgatggggaatcttctttttgcatagtgccaaagttgggattttggagtaactaagcagggcctcaaacgtctttagttcctttctgtcaaataaaaactgcacactagcactgacactgaaatttgcaggaacgtagagaataatcaattctcagggtcaatcc

SEQ ID NO: 112014 - DNA, 930 bp, Setaria italica
  Intron number 1 from transcript Si013143m (locus Si013143m .g) derived from phytozome v7.0 (chr-ID scaffold_6; pos 33 296435 to 33297364)
cacgccggtgctcgccattgtcgtcacgtcgtgtgagaagcttttcttgcttgatcatctcgtttgattttgctttttattgactgcttctagcaattagtcagtgccactttttcagtaacaaaaggtgtgccggtaattggaaatgctcgattttactagctgatttcacgtgagtgaatggtggtagggtagcgaagacgttctgggacttgctagtcaattgttattgaccaggttgctaatgaggattttgaacccaatttagactgtcacatgtttccaccgttaaaaccttagatatagttgccgaatactttatggccaagctttgttgctttgtatgagttggggacatctacatatagaatactagtgctagaagttattctcgaatgctgccattcccttgtcttttgtaggtgaatatgcatggatttagcacatttggcacctcttactagctggagcagttttggtaggtactagtaacctttgtggtgtctttttgttgctaagattttgacagcctactcaaatgaattagcctgtgaaatcttgaattctcatatcgtagacaactaatttgcacaagccaaataagtcctttttgttgctaagatattctgtgatgtgttccatgatctatatgattcttgaccaaaaactatttactctggactctggagcctacctgcaacgaaccttttctttttaaaaatgacagttaattgacagtaaagcttatcttctcagttctgtttggatgctttcctttagcattcaatcactatccatcaatggctgaatcactagatgttttctgtttgatatttattcatctctgctgcttaatatggatggagattaagaggggctgaaagttatccaaattagttgtttcactaatctctttgaaacaggtgaaat

SEQ ID NO: 112015 - DNA, 802 bp, Setaria italica
  Intron number 1 from transcript Si040567m (locus Si040567m .g) derived from phytozome v7.0 (chr-ID scaffold_9; pos 47 251945 to 47252746 reverse strand)
gcgcaggttgcgttgagtatgtagcgttatttttttcccgtttctttttaatctctgcgcttagagcagtttagatcccgtgttggcttgctaacttacactgttgtttctaccgtcctttataaaattgacctttgttctcaatagatgtttcgtagccatacacctaatgatttccaattttaaggtgtcgagctaggatgattttaaatcgttacaatattttagtttagaggaaaaaccgttcttgtgatgttctgtttctacagttctgcgttattttccgaaagcacaaatctctcttttatgttgattactagcatttgtttgaagaagattcttagcttaagttcgctaaagtctcttaatcttgacaatagccaaatcacagatactgcatcacacttaagtatcctcctcatatagtcatattagcacccaatagagaatttgctgctcctgctcaagcagctactacctatccagcaagatctcaaacagtaaatgggagcaaaatggattgttcacaaaatggagcaacatggattcagggcctcatggggagcgcattccacttactgttgttatgttgttttgagctttgatcactttgattattagccaaattcgatagcttcacgtgataaaaaacaacattaatcctgggcacacttcacatatattagccttgttcctcacattctgccatcactctagaaggacgatgatcttctggtgccacttctgatagttctgacgctacttgatttggcctgtaccctgtagaacagaacatcaattg

SEQ ID NO: 112016 - DNA, 554 bp, Setaria italica; identical to SEQ ID NO: 111638
  Intron number 1 from transcript Si017965m (locus Si017953m .g) derived from phytozome v7.0 (chr-ID scaffold_1; pos 41 396617 to 41397170 reverse strand)

SEQ ID NO: 112017 - DNA, 712 bp, Setaria italica
  Intron number 2 from transcript Si035459m (locus Si035459m .g) derived from phytozome v7.0 (chr-ID scaffold_9; pos 39 585014 to 39585725)
gtcttcttacccgtttacttgcccgtgtgcagaaggtatcattaaagagacatcatgtgtgcttaattcctcagtctatccaaacttaaacaactttggccatctgactgtttattattatctatatcaattttgtagatcaaatgcccattggaatatatttctattgagataatcttaattaattggtttccagcctattctatttgcaacagtggagatatcgctgaatttttcaaacaaccctgaatactttatgacagtgcagcttagattggattctccttatattgcctcacacttgtagtaattttagttgcttgtgcatagagtcacaaacctatccagctagacgttttactctgatgttcttctcatttgcccttatgcattctgctgatgcaaagtgactgcttgatgcatttgcagttgtgtttgctctttggattggcaaaaaaggcgtgattagtttaataactttagttgcagggaagacaaatagaaataaaaagggtcaccagctgttcaatattcttttggcattacattgtagggtttcttttgttctttttaagcttaacaatcttactgtttaaattggattgttttgagctgacaagtgtttctgttgtgcttgtgagaattttgatgatatctcatatgctgctatactgggatctgttacgtattttattgtcttatcaggtgaggg

SEQ ID NO: 112018 - DNA, 788 bp, Setaria italica
  Intron number 6 from transcript Si036390m (locus Si036390m .g) derived from phytozome v7.0 (chr-ID scaffold_9; pos 47 610497 to 47611284 reverse strand)
ttgaagtacaacgccgactgcacgagcaactagaggtacgaaagcagaagaaaataaataatatcaccaactaaattaccaattctacattccttacaaatacataaacgtttacattttgttagttgatacatcagtaggagatatatagagtagaacactagagtaggttgtgtggcagaacatatagcaaaatggatccaaaaccagattttaagtatatactagaaccctcatcgaatgaatgtttgttttgtaatggaagtacatgatatacagagcatccaaataaaaatatatatacatagcttaatcatcatttagtaaacttcagggacacactcaagtaatgtataatgccacatgtcagtgaaactacgtcacaatcaccattccattaagaaaaatattacttatacttgctctgatcacctcaattattttagccaagaactaatttcatctatttcctatattactaaaacatctagggggaaaagtgtatgtgatgtatgcatatattttgctccagagcatccacaaagcttgtcctgcgtcgaggaattatctcatttatcttgtcatggtcatctagggtctaaggagatgatcatttgaatgaacccaatttaaacaagaacatgtaaaacggcgatgcttatgaaaagttcagaaaaactggccaactgtaaattcagaatttattctttccatgtatcaagctgccttacacataatgatgcctttcaacaggtacagagacatttgcaactccgcattgaagcaca

SEQ ID NO: 112019 - DNA, 416 bp, Setaria italica
  Intron number 2 from transcript Si035794m (locus Si035794m .g) derived from phytozome v7.0 (chr-ID scaffold_9; pos 90 70194 to 9070609 reverse strand)
ttcaatcagcaaaagcttcagatcatccaacagaggtgtgcatattctgaaacagatcactaagttttctttactagtacttcaaaactattagcactttcaataaaccaatacagaagaaaaatattactttgcacaaatggatgcctttgcagtgttacatgttgaataaaaatatctgtaactgtgataatatctgaaactatcaatcatcaaatccaacgtaggcatgtcatggagttacaaggatatgtattactttcaaccatacttccatcagtttgtaagcaaacaagtcataatgccataaaggataaccatagtattgttttggatataaatggaatcaaagcttgacatacacatacttctctaatgcagtgagctggagacctctctatcaaggctacaccaat

SEQ ID NO: 112020 - DNA, 972 bp, Setaria italica
  Intron number 2 from transcript Si017314m (locus Si017317m .g) derived from phytozome v7.0 (chr-ID scaffold_1; pos 40 877084 to 40878055)
tcgacgccaaggacgttggcggccacattggctcggtgagtccctactctctccctccctgtctctgcctgcggcggcgtctgctttcgtttgtacggccactgtgtgtgtgtgtgtgtctccgatgagtcctcggccccgccgccggcgcttgtgaccaccgcgcgcattgcccttgtcggtcgtgcaacgcattcctttatttttctttccttgcttccaaaaaaatatttttgccttagatttctcgtgaaagggaagttcaaaaatcaaaacagctgggcggcaatgaagccgcgccgcccccacaccgcgggcgctaggcaacacacgccacgcgcgtcggctgcagccccgcccgggcgcggtgcggtgcgcgatgattttcttgtccgtgcgcggtggatggttggggggtggttgggggcgcgggtggaggagcggccggtgtcggtgggatcgtgagccaagttaccacaaccctcgctgtgtttggtttgatggttggattggatattacggccgggcgggcccgtattacgtcggcgggcccgtcgcttttcttggtagctcgccagcccaacaactaaaccactccgcctgctgtcctcctagtactagtactagtcttctactagtagtcctggctttttttcctctactttacgcaaccgaaaataaacctggggcccgccagcccggcccgttcgtttcaatcacatccctcctcatgattgctgcagtgcaaatccgatttactcctacgtgatgaacagtaatagaataaaattaaaatgggggtgggggaaagatgatgatgtcatggcgatagctgcagtaaagctgaatgcgaagttgctgcagagtcggcagtgtcggtgtcggcgctgatgggagtggcgcaagattcagattctggttctgttctgacgtggcaatgattccttttggttgcagtgcgaggagctggac

SEQ ID NO: 112021 - DNA, 932 bp, Setaria italica
  Intron number 2 from transcript Si014932m (locus Si014932m .g) derived from phytozome v7.0 (chr-ID scaffold_6; pos 49 00659 to 4901590 reverse strand)
attggtaagtgaagtctcctaagttctaactttgctatattactgacaatgtaagcaaaagaaaacagactgataattatgccatctataaagcatactgaagatctaaaggaacctatgcaaatctgaaaattcagtgaactaatataactgacaagtataagcctaagttctaacttttttttttgggcgctacggtgccctttggacacttgtctgtgaacagtatttttttctttgcttactgatatatcttaccacagtgggggtctccccgctgtatagtttaaaaaaaaaagtataagcctatatgaagaccaacagaattatttaagtcatcgaatggagtgtctatgtagaacactgagtgctttgagaaaatatacgaagaacaataggatgcataaaacctgacagaactattcgttaaaaacattctgggggctaaattattcgaagataaagatgcacaacatgtgaatctcagtcaaactaggtaggacatgaagcctgaattatcttaaactacattttgccaggttaatgcattatttgcatgtgagccatagcttcagcaagtttacaaaagctaaggctagtgtttgggttgaggagtgctggatcagttgaactactttgacgtgcagtggagttataaatataattgtttaagctggttgtcgtttcatcctttttttgtcaacgccattttatcatgcagtatttaactcattcattggctaaagataagaggaccaaaatgtgtatttgatatttgaatacagtaacaggctatctaactgattgtccacacacgcagcaaagagaacactgcatcatgagaaacaaaagcaatacgaaaatcataagtcatttcccaatgaactgtctaatcttacacaaactcacagtggccctgctgcagaaattgc

SEQ ID NO: 112022 - DNA, 743 bp, Setaria italica
  Intron number 2 from transcript Si035323m (locus Si035323m .g) derived from phytozome v7.0 (chr-ID scaffold_9; pos 95 38207 to 9538949)
tgctgcaggggcccctgctcaagcgatctgagacggtatggtgattcctggcctagacgttcacggggtgatggctcgtgcgggattaattaggcgtgtggagtggagattcgaattgtgcgctagattttgttaaccgtagggtttatgcctggaagggttcggctttggcgctgaatttggtgttagtattggactatcggttaattgtgtagtagtaattgaagcgtggcagcggaaactttttggatgggattagatagtgtgtttctgtacattgtcttagtatatcatgatcggtgacttagttttacgaaaatcaccaggttataattgggaacagtgcattgaattgtgttttgctcacaatttggtattataatattgggttttagcagggagagaagaggaaacctttattgtcctaagaatagtagaagtgtagaacttattgaaattcttgccgttgatattgcggatgtatccttagattgtgagggtggcagtgtgaatggttgcgctggccacacattgaagagtaactctgttggtgttccttgactcgctacggtcctagatagtattatttgattgtttattacctgggaccaactgtttccatatgcacaactgtcatagtaaacatagttttactcttttcctgattaggtttctacttgcgagcgttatgcaacagtttcatcttccaaactcttatgatcttctttcaaacagctgcggaa

SEQ ID NO: 112023 - DNA, 1012 bp, Setaria italica
  Intron number 1 from transcript Si016586m (locus Si016586m .g) derived from phytozome v7.0 (chr-ID scaffold_1; pos 19 796963 to 19797974 reverse strand)
ggaccacaggagcttccgccatatcacgcgagatcgtaattatccctctcccgtcccgctttggatttgctcgctcgctcgctgctgctgctgctgctggaaatggatctggcaaaattgcttgtggagctggaaataccggtgtgcaatttgtttctctggagctctaatggcagtagagaattgtacggcgtagttggcttttacttgcgaaggcgcttgaatccggcattgccattcccatcgaattgaacgatggcttgttggattagccacacttgtggcttcagtctgcccttgattttgttgcatttgcttctcgattgcttactgtttatgtgtgcggatgccttgttcaagagactagtggcaatgcaatgaagtgggctgtgctttcttctgcactagtagccaaaccagtttatatctgttagaagtaacaggaccaaagtttacttggaaaatcaacgaaagttcctggattgagtatagaaaaatatggcaagatattgttggactaacagaaaaaaaatagatctaggaatggtgagagtgtaccaatatctagttcaatatggcctgtgttgtttgcttatggaactattgacttgtattcatgattcaccttgaaaatcaaacacatatatgtacattgccggatggactcttataaacaactgtcatcatgttattttagcatccgtattttattgatcactgcaccatgtacgggtcttatttgttttatgtaactgattacatatgtcgttggacctttgcagccttcttttatggtccatttattctgtcatttatgctcaatgattcagctcctgatgcctgtattttacgaacatattgcctatcccaaattgcttgaaactaaaaggattttgctgctgctgctgctgctattgtgttttgaaaatatatttcatgttgtacatattatccatgatagctaacttagaggtttacttgtgctttaataaaagcaggtctattatttgaa

SEQ ID NO: 112024 - DNA, 999 bp, Setaria italica
  Intron number 2 from transcript Si017943m (locus Si017943m .g) derived from phytozome v7.0 (chr-ID scaffold_1; pos 32 002223 to 32003221 reverse strand)
gcagcggttagcacctgatttctttgatctattatgcagtttctgaacgtcatttccttatctgttgttttcagtccacatttcagttggaaacttcagttgtagctaaacagtactgatagatgcaatagtcatgctagatgttcatccactcttaggttatttcgtttgaaaggaatatgtggtcccacttcagcatatggatggagactaacagcagtttatactttcgtgacttgtcaagatgatatcaccataattccactaaaccagtgcccgtgtatgtgaaagtagatcatgtggaagatacacttatttgcccacatctataaaaatactataatggtctattttgaactttaaagtagtgtgatctgagctggtctccctaagtatccttttgagttgttggcccatagaacctttgtatttgtctagtgtgtactatattaatataaggaaggctgaaaagtctctgcttttgcattaccaataagatttccagcctaaagttggcctgttcttgtttcatgtcgagatttgagagcatgtatatcgcttagaagggtcacatcattcatgtttttgtttaccttttcagttagtacaactaagatgctatgtttgagttgattgatcagtgaatgccattaactataccaaactgacactgccaatgcaacaaataatccccaccacttttttgtatgtcctgaaactaggaacataagaataagttttagttgtagacgactagcaaaacattgggctgttgttccaagttttttttatcttgagtgatatttattcgtatccttattgatgttttccactggaatttattaatcttttccattttgttggtaataatgattaaatagtgatatttcctaagagagttaactcatcaaatattgttttccttttcaattctattggtaataataattagattttcttacagagaaaagaagctacaagacgacgtaagcctgaaga

SEQ ID NO: 112025 - DNA, 978 bp, Setaria italica
  Intron number 2 from transcript Si035915m (locus Si035915m .g) derived from phytozome v7.0 (chr-ID scaffold_9; pos 41 076410 to 41077387)
gcaactcccggtactgctcgctcccgtgctacaaggtgcggccttctctcggttctcgtgtgctatgggtcgcatcctcaacgacttagggcttttataatagccttcgatgattccacgctcttgttgttcccatgcctgggttgccttctgcagacgcccacaatgtgtttgtcgaattgccgcagtggttctggaagcttatagacaataaatacaggccctgattcccgtgcaaaggtgtaaatgtaaataacatacactacaatattcttgtgattcacattaaccacatgggaattgttagctttggcgtatctatttgatgctgtactttccaatggccacaatgaaatactagtgcatttacgttgcttactaggatatcgagtttttctcattccattggttaatgaaaatcacggtagaaggctagaagctgaaacattgctttgctgtgctggaatttaacaatatccatttactaaattaaaggactaaaagagcaatccaaaagtgttaaaagaagtttatacatcatagtttccaatttgaatgttcccttttagtgaatctcaagtacacacactttggatcagttaacatctcaagtaacaatatgttgtagagttcatcaaagaaggtctaattgcaggcctgagtggatcaatttgtctgtttgagattaccaatcagtttctgaaagaaactatttgttcattcatgcacaaaacaagcttctgacttatgcaactgcttgtgttgtgattatatactattcaaactgaggagaccaagacattcttttatattcattgaagctgtcaagtttgtgtaccttcttttctatgctcgcagatgcgaaggaatatcagtgttttcagtgattgcagctgattttgcactgcggagccttctttttgttatataacttctaataattttcttgattcttgtttaataggggcatagccttca

SEQ ID NO: 112026 - DNA, 976 bp, Setaria italica
  Intron number 2 from transcript Si034715m (locus Si034715m .g) derived from phytozome v7.0 (chr-ID scaffold_9; pos 53 342585 to 53343560)
cattgcgtttaaccgtacaggaacacttcttgctggtaattatctgagcttgttcctctacaagcacattcaagtgactgtcctgtctaattatcttcccagttcataacttcatataaaacatgctggtttctttgatagttgtcgattggtgttttaagttttaacttgttgagagatttttttggttaacaagtattaaaatttcttctagtccggtgaagcaattttcatttctgtcattgttctcatctctacctgttcaatcagtttgtttactggcagcactagggggattgcctgcctcctagagtgggtccactgatactatgcatggaacttggaaccattttatttttcctgtccatgtggaacatacactcctatttggtgacccacaacctgtaaacatttaattcaggacaaactgtttcttttaaactcatagtttcctcatattgtaattactgtaacttctatcatgtgcactaaaacagaagaatatacacgggagatacagtgtccagggtattgggttctgttggtgggtgtcagggaatgggagggaagaatctgtgttaaattagtaaggcaccttgtattttgtatgtgcctttaattttctgtggtccacttctgcatgcaaatgggagaaaacggaaaggtagcaatatgagtttatcataccctgttaccctctataggtttagattgcgattgcaatatcatgatactgagtggtggtatgaaagggaatgctgtgtacatttgtcaagttagaagcttcttttactttatactttatatcttagttccatatgaagttggtgctgcatgcctataacttgtgatatatatgaatgccaacattatttatgaaatgcactgttaaatctttggatggtataaaatatctttcagctgtgaaattgtttgcaattgtcattaacagtgtctgttacatatttccagctgg

SEQ ID NO: 112027 - DNA, 878 bp, Setaria italica
  Intron number 4 from transcript Si034925m (locus Si034925m .g) derived from phytozome v7.0 (chr-ID scaffold_9; pos 32 949074 to 32949951 reverse strand)
ttgcaaaaaggatcgcacaagaaactgcggtgggtcaattgtaactgtgaaacattgctactgaagtcctgaaactagacgactttgaaaataatgtttcaatatgttgtgttcataggtcacagccctttagatttttgttactgcacatctcacggtgttaactcacacaggcctagtttacgcttgctataccaggcttcagaatctagtcatcatgactcatgagcatttatgttaattctcttaaggcttttctactatggttctacaaaagatgctttcaactaattattataatcaaaactagagaaacataatttgtttctaaaactctttttcctgttgatgtgcttgtggattgtgatctgttctcattataaattgtttataacacttgagttattatcccaacgtattgctttggaattggaagaacatatatctttgaccatttgagcaaacataagaatgctacagagacatggaagtgtatagttaccttctgtcatctaaaagggcagagtagtatatatataaacattaaagttggcatttggagttacatttttgttgtttgggtgctttttgagtgccattatgaatttctacatgttacattcatcaatgtgagtattgcagaagtgttcgtttctttattcacttcacaaacaccatcactatccgcttcttgtcttgcaaaaagttcaatttgtagtagaggaacaccaaagtatcttctgtaagcctcttcattttttttcttgtgacaaaaggcaataatggttgcaactgtaacatttatttggaatgacaactcatatggaacttgttctgattattctgaagcacttataattttgatcatgcagagattg

SEQ ID NO: 112028 - DNA, 513 bp, Setaria italica; identical to SEQ ID NO: 111679
  Intron number 2 from transcript Si014000m (locus Si013998m .g) derived from phytozome v7.0 (chr-ID scaffold_6; pos 74 79396 to 7479908)

SEQ ID NO: 112029 - DNA, 641 bp, Setaria italica
  Intron number 1 from transcript Si017287m (locus Si017287m .g) derived from phytozome v7.0 (chr-ID scaffold_1; pos 22 352447 to 22353087)
aaagggggtcacggggcggtcctgggggactagtcgttagacccggtattaatgctcatattagtaccgggtccaattccaaccggcactaatgcagtggacaaaaggtccattctccagtagtgactccaccgattcctggtacaatcctgtccgactcctgaactgctcatgatatatctcacaacctgatttggattttgatcatacttaagctagctaagcatgtgaaatgttacaagtcttctattgtgagaggtaggacttaatatgtagcatcgaatatttcgtaatccaatcttataagtttttaaaatcattttaaatagtttggaaggaaagttattgtaacttcaaatagttagtgtgctttaaaagcatactccattgaattaaataatacatccaaactaatatctaaggaatatatgccaaagggattatttcgtatgtcaatcctacattgtgttctacatcttcaacaagtgtcatgttgcaaatttgtttaatgtaaatggattacttgcttctacgtgcattacatgcttctcttagaagagttccttcgtgatgcttaccataatgcaattaacttgctttgtttttcttttatttgattgttcaatacacagataacggga

SEQ ID NO: 112030 - DNA, 908 bp, Setaria italica
  Intron number 1 from transcript Si033954m (locus Si033954m .g) derived from phytozome v7.0 (chr-ID scaffold_9; pos 49 615889 to 49616796)
ctctggggacggtggactggtggcgatcacatcaggtacctgttccttctattccgccattagtttcttctttctgttttcgagtcgtgtgaaatgatactgtttgcgcggtgccgccgccgccggcgggtggaggggtgggagagggatggcggatttgatttcctgttttggttggttttctggatccatttcggtgagatttagcgatcttcctgaatgagctgtgatgcgaacctcttctcttcagattactgaattttgggggtatattgggatgcttctcttccacgcaagcgtgtgatctttttgcttttttagctccggggcggggccgtggattcgctcgtctttgggtaaagtttttggttccttctgcacagcacggctgcggtgtgtgcgacttgtcccttcctaggctactgctttgcttccgattatgatctccctacgctcatcagcctcatcttgtcaccaatgaatgaatcgagctgcagggtccgggaaagaattgaattcgtctgagttttcagtgatgctatagactgtagtgtttgcactaattgagccgttatgttgtgtgcacaatcaattcatcattaacccatgttagatctgtttgtcgctgccttcttccagtctacctctttgattcttcctatacaaaactcgtactgtctttaattcaacttgttcattaataatttcatcttgtattttaagaacaaatgtttttttcccttcacggtgcttcactgcttctagtaatatctttgatctaccctaccatctgcttgtttattgtcggttggtacgcttgtgcgctgccttctcttccacttaatctggggaactgactacgatttgtaccagagggcacatactatcggctgattgtccgtgacacg

SEQ ID NO: 112031 - DNA, 453 bp, Setaria italica
  Intron number 3 from transcript Si034850m (locus Si034850m .g) derived from phytozome v7.0 (chr-ID scaffold_9; pos 49 139702 to 49140154 reverse strand)
gggtgcacaggaaaaattcgaagaaataaacagtaagaatccgtactttgacttttcaatccctatttagctttagaatttgtagacgctaatgatgtatatcataagatccttaatttggcattccacctcgcacgaaccatggtacctttggatggaagatcgtggccgttctgtccatatgtgtccagagtccttttcatttgatctggttgcttctgtttatgttcccatcatgaggtgcatttataatgttccatgtttaagttttgtaaccatacatgctctatgtttgacccattccgcttctgtttacactaaattatcaggcactaagggttcctgtaactgttgttttatgagctggtttcatttcatgattgctagatgaaaatatctgtcccttttctgtaatactgaattatctggtgcactggtgtacctttgcagcat

SEQ ID NO: 112032 - DNA, 783 bp, Setaria italica
  Intron number 3 from transcript Si034805m (locus Si034805m .g) derived from phytozome v7.0 (chr-ID scaffold_9; pos 70 70760 to 7071542)
ataaggttgctgtcatctcaggtaattttccaatgtttgaactgtgcttttgttctaatttccattggcatatgatggttaattcctacgttatgtcaaatatgtgaagtgctacggaatttccccgttttgagtatcagatatggtacattctagcttggaaatctttttttattgcacctgatggttgatggtaattctcgccaaaatattatgatgttagtagggttgcttccatatgctcgttaccttcttttaatagaattggcaagatctagttttcttttgctcagtttaaaccatactacattcatatctactcctacatatgttaatctagatgctataatggtagttgggctagttgcttggatttatgtaatatgttaagctaggatgttctttgtatattagaagtataatgctggactactctttggagataatactgctggaggaggaatataagacagtgtattgtatagatcccttgcattccactgcactatcctagacttgtggaaaaatgtgctggttgccatatatgcacgcatataatctcttatatgcttgttgtgtttccttgtttgaacctaaatacatgctgtttctttgaccatcttttaactgattaaatcttattgcaatcaccagcgcagatgtcaaataggaacttcttcttaaaaaatcttcattattgagggttgcttggatattttcatttgttcatgtcatggtcaactaattgtagcaccgttttgttcataggtggtggaagcggtc

SEQ ID NO: 112033 - DNA, 817 bp, Setaria italica
  Intron number 2 from transcript Si017389m (locus Si017389m .g) derived from phytozome v7.0 (chr-ID scaffold_1; pos 37 963960 to 37964776)
ccttccaggtcgccgtctcgctcaccctcttcgcggtaatcttctactcctcgctgccgcatgtccccttatctttaccacggatttgtagagttgtttaggttttagatgagcctcatgctccacttggttcttcctttgggcgtaatcatgctgtgaaacgaagcaaactcgataattttaattgcagaaatgatcgattgagacagaagatactggctaaatatgaagcaaaattgctgtttaagcttcctaggttgttctcgcatcccgttactgcatagccctgaacatgcttcagcatgcttcttttttttcccttctagactagtctcggcacttgagcatccatcctaaccaatgaaatatgaagaaaaacaaatcggatcatgtttaaagctagtagtgctaggagtttggtcagcaatgactttcgatgatctttgaaaacatgtcttgttcacatgctttgaaggttcagaagctgaacatgacattcaatatatttgttatttgtcaagtgggttaaaatccttgtctcagtatagtgggtgtttgtcaggttgatccatgttgattggaataaaactaattatttgaagcaaatatacatgagcccagggtcacaagaatataaactgatgaagtgaatatccagttctatgatcaaaattttgaaacccgcttgcgcttggtaccataatctttctcttgggatccttaaaaaaagagttcttcagtgatttacccaatactaataatctagatgtaagttcttcaaatgctgacatttccttaaacccacaggttattggtg

SEQ ID NO: 112034 - DNA, 989 bp, Setaria italica
  Intron number 1 from transcript Si017424m (locus Si017424m .g) derived from phytozome v7.0 (chr-ID scaffold_1; pos 98 47578 to 9848566)
actttcctttgcagcgtcaccagatcctgacccaggtatcaccctatgtatactttgcaggttcaattattcatttaatgttacttaaggacattttgatagtgtagtctggtacattttgattctgcaatatataactggacagaaacaagcatggatagtgcattctgttttttggacctgttgagtgcattctgttttttggaccttgaaccttgttgagtgcattgatttgcacaagtagccaagtagagaacattgactgctgacctctctagaaaaaaaatatatgttaactgagaatctgaaatccttgttttttaacacaagaagttactgattatccaaaatagtgtagcattttgatgataaattaaaatattcctttttgcatatgtgctttagatgcctgacaacaacatagacttggttaatacaagcatggagcaaatgagagagatgagtaggaaaaagagaaaaagggtggctgctttatttgtttctgctgtcatgagcatgattgtgcactggtatcagcgtaagagacctagacatattgttgatccgaatgaagtggctgagagagatgtagctacacgcaaacaaatgctaagaaatctgtaccaaggatcaaatgtctattgctatgatagtttgcgcctaactaagagattgtatgggtttgagagttccttcttttctgaagaaggaaaaaacttttacgtatccctcgtgtcagcaccataggattccaggggcggacccagtacaggcccagtggcgacacgaaccgccacttaaagtctaaattttcagtagaatctgacccattttcttgtagctccgaaggcccattacttagcagggcgccactcatgttttgggctgggtctgcgggcacgaccggctagggttttgtttgcaaaccccaatctgatccccaccaccacgcagccgcagccgccgccgccggcgaggggcgaccgcgg

SEQ ID NO: 112035 - DNA, 676 bp, Setaria italica
  Intron number 1 from transcript Si014136m (locus Si014136m .g) derived from phytozome v7.0 (chr-ID scaffold_6; pos 32 835560 to 32836235)
tcggcgccaagacctcctgtaagcttatctcctcctctcatctccgtactccgattgaccgatggagcgatcccatgcggtgcgatcgagtgctagactacagctgatttggtgtttcacctgaatacttgatcacttttttttttctttgcgaggcgtcctcactagtcgaattcactacgtcttctaggcttagagctagatctacatctagatttaatttcaggactgtcgggatgtagagaaaggtgattttcctgatatctaattgaggatcagaatgtatttgggatttgactggagaatttcagagaatattggtagcaaatagcaataggctccatgaacgcaggaaaatgggatcacgatctggttttatttttcaattttatttaattaccgatgcaatgagatgtggatcagaacagtaaggtttcatccaaaattcctaataatttggtatctgtattattctggggataacaatactgccatagactttgtttttttccaggagcaaattagctaaggttggggttatatattgtaattctgtttgactaattggaaatattctgtaccttaatctgaatttttgccaagtagcatctgataagtactgaaacggtgttttctatcaggtggatatcgtgaagcgcctggtggtgaaacggct

SEQ ID NO: 112036 - DNA, 1003 bp, Setaria italica
  Intron number 1 from transcript Si016901m (locus Si016901m .g) derived from phytozome v7.0 (chr-ID scaffold_1; pos 22 202287 to 22203289 reverse strand)
atcttctgggaggtaaaacgagaaaaaatgaaaagagaaaaagaaccatcttttccctgctttcttgtctgtacttttttctcacatatattcttgatgtacgctttctgactgttccttgatcagatctccccaagatctaagcaactatattctactagtggatttgtttttttttcaaaaatacttagttgattaaattaactagcatatcctttgatccagatttttatgcaacggaagttctcgttcagattttatttttattttcccttcaaactcaggaaattgttttttcttcaggcacacccttttcttatctgggcacatcgtgtattatgagttacccgcagcatgagtgcgcagcatcctaaaacttgcaagaattgaactttgactgaagttctatatatatttagcacggattgccattggatgttgctggtgaagagttttagttggtagtcttattcaagcgtaatgattggtgttgagttggaatacttcttggaggttggaggggctccacatgattctcatccttatccaatcctagtttttttttctcccttctccatctccttgctggatgatcttatctgcttgaagcaccatccttccctttccaaatgtttgattaccaatttggctgcatgtccattgcgtgacacatataccgatcctatctcattgcagtgggactcgaatttgccttccatgagttttctcaacacttccataaacttaaactttcgtgatttgactaccttagtactctcttacaagttgcacacgggtcccattaaaaagataccaaaatggttaactacaaatgctgcttttgcaacaagtgcccatcttccatctatctgtccagtttgttgtgaatgtgtaaaatttgctgctgctgttacttctgtggaatatatgtttgattatgacaagctattttttttacttttggacagaactactgttcgagagaggatacaatcttctgtgg

SEQ ID NO: 112037 - DNA, 931 bp, Setaria italica
  Intron number 1 from transcript Si016828m (locus Si016828m .g) derived from phytozome v7.0 (chr-ID scaffold_1; pos 40 129747 to 40130677 reverse strand)
tccttccagtcccgcccgtggccgcagagctacaggtgtgtgcgcacttgtcaattcagtcccctgcttgatcgccgcttacggatgcaattgatatttttaaaaaaatattagtatttaagcatgctatttttaattactagttagagtagcactgtgcttaatggtgatggagatggaatgatggtggtggggttgcttcggtgattcccctgtttttattaaagttctatgttgattagtgggctcggccgaattgtcaattccgtgattgggacggatgtgaaacgactgtctcggaacattgacgtttccggttgggagattttagctgccgttttttcccccccattatctcacgtttaatcggaatgggctagaatccacacctgcggctgtgctctgaaaataactggaacggttccgaagggcgtggttgttctgaaactgaaacgtggcgccgattagcatggcggtgacagactgacaggttcatgtactgccatttgacattgtggagatgcagaacacatatttgggttggcttctcctttcatcagtatacacaggatttctttactaaaaagtaaaaacaaagaaaatcattatcacgttatgaagcttagattttttttaccaaatatattggtcctactacagtgcattttgaaaagaaaaatggatcctactataccaaattgatcatttctgctttgttataatcgagtttttttttgaggtgttaatctaggttgacttcgcactaacaagaacttaaagacatttcctggcatgtagtagggatcatacttgaagaacacgagcagatatatttcaagtttatttgcggatcattatgtacaaataatgtgataacgatattctttgtttttcagggaaacaactgatacctacacgattgctgcatccc

SEQ ID NO: 112038 - DNA, 523 bp, Setaria italica
  Intron number 1 from transcript Si018087m (locus Si018043m .g) derived from phytozome v7.0 (chr-ID scaffold_1; pos 68 9937 to 690459 reverse strand)
tacatccaaacgttgactggcttcttcctcggttggtaagcaaccctcgctgccttggagggattaactcgagagttcttgctgttcttggtctcaggaccttttcttttgttgcggcagaggagcaatcagctccaatctttttgtctctctccattgatgtggggcgtgggtttctctggtgcgtggtgtagttcattttccaacaaatttggggtttgtctgctctctgaccgattcgttagggtgaaataaatagcttatagctagacatatagcgtaatttaggagggttcaatctggaagattcttgtttaccttatccttctttcttgcagcatgatttgtgtacatttcactctatagttggcctctttcagagaagaggagcggcaatctgaaactctattttcctatactcacttttgagttatgaacttctgatacactcacattccaccaaaatgaccaatttgtgatgtgctaatcccttttattttttttcatttatgcccttgcagta

SEQ ID NO: 112039 - DNA, 701 bp, Setaria italica
  Intron number 2 from transcript Si014270m (locus Si014270m .g) derived from phytozome v7.0 (chr-ID scaffold_6; pos 27 544144 to 27544844)
gcctgaggccttgtctccctggaggcacgtgagaggtaacagagagatagaggggaactaatttcttctttcttgattgattccactgtgtgtttatatagagctggctgacactactctattctaacaccctctaatccaatcctctgctgccgcatgggctgctgtgcctccctggctggccggcccactgcctgggttgttgccacccatagcaatgctttattatggtactgtttgtgtgtgttgtgttcatactaatatccatacgccccttccctccgagattttactagcattgatatacttttcgtttccagcaccatcatatgaatgaacatggttgttgcaaacttgtgaatgttcatatgcttgtgttgtcgagatgttaaaatgcaaagatacatacataaaaaaagagtcttttttgtaagatagatctcatcaactaactgaactactgaagaaattgatttcgcttaacagtatgtagaagaacatgtcctgaaaagtgaaaagtcatgtggaatccagtgtcatttcctgtaaaatttaccaaatgactcaattttagtattgttttgtcatctaaggtcacatggatttatatctttcacattgtcacacagcatgcacaatatgttttcttgagttatatttgattaattattttattcttattcttcttcattaggctataa

SEQ ID NO: 112040 - DNA, 331 bp, Setaria italica
  Intron number 4 from transcript Si036352m (locus Si036352m .g) derived from phytozome v7.0 (chr-ID scaffold_9; pos 52 569038 to 52569368)
tcaaggacccattcaggaggggtgacaacatccttgtaagcctttgcttctcttcttgttttacgtttcacttagaagtcatagacacgaccagaaagtaaaaaaggaggaaggaaaaaaggaaccaaaaggccattctcgaataattataacagttttatgttctggtgctaaccttgtatttctttttaaacaataaatataaaaatatcaaagtaaaagtatttttaggttgaaacatgtgggtaaaagtgttctgtttttcttttttgacaagcaagctatatggttggtttgctgtgtttcttattcaaactactctatataggtg

SEQ ID NO: 112041 - DNA, 553 bp, Setaria italica
  Intron number 2 from transcript Si013449m (locus Si013449m .g) derived from phytozome v7.0 (chr-ID scaffold_6; pos 67 36440 to 6736992 reverse strand)
gtgggaaagatcagataccatctcgcacgctacaggtaaaaaactaatgcttgtgcttgcttcagtgtttgcttggagcgctaattctcctacataagcaccagtgctgtgtctgctgctcagccactcatgtactgtcttgattcgtcattgtacattatttaaaacaccgctcgatggttcttttctcttctgtataattgtatttcactgccatcatctagattttggattatgaagtatggcaatttgaaagaaagcaatggaattcccaactttgatgtagtagtttgcaaatctgaaggcatgatcctttatagcatgaagacctcttaagctttcttctagcttgctccatcatgttaaggatctgatctttcaccccaagtaaaaagtaaatagaaacatgcaactcgcactgtgtcatacttatattttcacttgaaactattgttgaagttagataatttggttaccaagattaatctttttctactagctgcatatcctatagttcgatgattctaatccaaaattctatagcaggttttgc

SEQ ID NO: 112042 - DNA, 494 bp, Setaria italica
  Intron number 1 from transcript Si015485m (locus Si015485m .g) derived from phytozome v7.0 (chr-ID scaffold_6; pos 51 90798 to 5191291)
ccgagaagagggcggcacttgctcttgtcaagaaggtatgcaaccacactactgaggctttcttcctgcttcatttaatttgtttctggcttacattttcataagtcacacttgtgaaacatggggccaaagtagtaagaatcaaaggtaatgtatcaaatctaatcaaatttccaagaaggtggaacttaactgaaactcttacaaataataaaaagttgtgtataatatattttttagaaaatggaattattccagcatctgcgaccgcaaccgcacgcacttaagttcttattagcaaattcagcttgagagctgatcaccaaaatagcaataatagttcaccgttcttaagggaaaatcataagcaaagtctattattgcttctccattttcttgttaaaagctctgcaataattaaaaataatttcaacactttttgtactgtcaatgttccaggtggtggcagagttcctgggcacattcctcctcat

SEQ ID NO: 112043 - DNA, 880 bp, Setaria italica
  Intron number 3 from transcript Si036628m (locus Si036628m .g) derived from phytozome v7.0 (chr-ID scaffold_9; pos 48 37730 to 4838609 reverse strand)
atcgctctatctggtaagcaaataattactgccactactaccccaactaaattccttgctccggtgcctgttctttcataaagaaaatagttactccagctgctgtacttaccggtcgtagtgattagtgaagtgcagagacagatttccatgtgctctgttccatgtctttcgagtcaagcaaatagtcacccccaatgctgcaatgaattgtgtgggctcgagagatccgtagcacaatagaaaattgcattaccatattatccctaggttagaacgacagaggtgaccagtttatcacagttactaacgaataggcgaatagtgctaggagtgtgttgcacacttgcagtcttgcactgtagctggtcgacggatctgaaaggggtcaactgtggcgactggctgtcatgccggttgccggactggattgatagccgcccgccccttgcttgcacgtgaaagaaaggtcagcatcgcattattgtactccatgtatatcatcctcctcctccacacgcagctcggccatgatccaacccaggccgtttgcgactcagggagcgtccacctccataatttcggcccacgcattgaggcacgacgggcctgccaaatgagctgtcgaaactcgaaaacttagaagaagagaaaaactcgtgggatcagtgtcacgtagcagcaggagcatcgtccaggacgcatttttaattggacggagcgtcagctcctacgtgtaccgcaacaccattcaatcaaagaataaaaaactccgagaaaacagcgagaattgttttttatatttttttttgttgaaggaagaagaatttgtgttgtgtttgcaggggcgcacacgctggggttcgcgcactgcaacacg

SEQ ID NO: 112044 - DNA, 857 bp, Setaria italica
  Intron number 1 from transcript Si020494m (locus Si020494m .g) derived from phytozome v7.0 (chr-ID scaffold_1; pos 57 47408 to 5748264 reverse strand)
ggccatccggcggcgaggagctcgacctcttcgtatacggctggaacccccctacaggctcctgctgtactgcttgcttttgttgctgggcgctgcagttgaattgctataggcttggggaattgcggtgtgaaggatgggaaattcgggattgaaggaaggattagttgtttggctgacctatgcgcgggtgttgtcatattacagctccgcttttgcaataacttccctgctttccccatttctgctgcatgtttgagaagaaccctgagcagatatctcaaactgattcataagctgtgatagagaactcgtgaagtaggagtataagactcatggggcggagctttatgtggtgatgtttaactacttattagctgacccgtggacatataattatcagacctccatggtttcgatgaattgcatcagctcgctataatctacaacctttccctcttttgttggagggtgacaaatgaagcaattgccaatttttgtgaaggatgtgaattggctactaaaggatagcaggtcatatgctgcaacgggtgtttcttgttgcatgatttgtgctgttttaatctcgtctgctgacacaatttgtgtgttctttccatttactggagtaaataagcccatgtactgatgattctatctcatgcctgttactcctcagtcttttcaatggctttgcattacttcactcaaagcagaagtattattttatttatgattttttatgctgttgatattgtgtcatttttttcattggtacattcctgctttagattctaatacttcgaatttgattggttgcagacacattacgtgttgctcctttgctcgttcaaaga

SEQ ID NO: 112045 - DNA, 484 bp, Setaria italica
  Intron number 1 from transcript Si035630m (locus Si035630m .g) derived from phytozome v7.0 (chr-ID scaffold_9; pos 41 797362 to 41797845)
caaattcatccaccggtgcggccacacaaggccaggtgacaaacttatgagatggacagattgccctgatgatcgcgcggaatcaccaccccacgcgggcgcatggttgccgggcctgggtgccgatgccgatcgatcactgggtccgctgtccgctgatgtggcctgagtgttttttttccctctttttgaagggagaagacgtggcctgagttgagaacgagacgagagagggacccggatcagatccgaatcggcgcacacaaaaccaaacacccgccggccgccgcgcacgccacacacgcatccggcccggccgggcaggggcagcgcaacgaacccacgcaagcaacacgcggacacccagacggccagacccaattattcacccggcaccagctgccagcgagacaagcacacagcacatatccagaccagaccgcagtcaggcgaggagaccccgcacgcacctccagtcctcctc

SEQ ID NO: 112046 - DNA, 1000 bp, Setaria italica
  Intron number 1 from transcript Si018362m (locus Si018362m .g) derived from phytozome v7.0 (chr-ID scaffold_1; pos 17 628198 to 17629197)
agctcacaataaccagtgaaaggtatggtggattccctctttgcacattcaaattaagattatgaaattatgtgatgcatgacatcctttactaaaattgctaatgaaatgttgctcctcttatccgtattggaccttttttgtaggactaatactactgtgtgttcattgaatggtgatgttattgtacacccaagaaatgtaggatgtatcctaatctaggttgcaaaacgtttgtctagaatctagatgatgtttataacttatgactgcactttcattatcaaatcatcaaatgaaatgtggaattttagattaacatattctcaaagcatcaaatttcctttgctaggtgaaatatttctattctgaaactcttttgttttctggtggccatttcagacgctttagttgtcttggtataattagaacttgatgagattagcatatataacttagtacaactttattcttttacttgatacactggacaattaggatggccaaaagttgcggacaaccaacaaaattatttaacctgcttgtttagtttatgtatgcttgtgtttgtgtttttgttgaaaatatgatggattttggtgaatatataagcattttagtggtttcatgctatgtcatcttgtattgcaaattttatcacatagtattttagtatcaatagtaaaatgtggtgttgttgcacttggttggccacaataaggcttaggaaggcttcatggtacattctttcacccgctacaaaattgttctcagtcttcaatctcattctttgtttggatccataaatgtctaggtgtggatagtgagctcctattaaggataaatgtgtgcatttctaaagctgcgctataagcctatagtattgtggctctgcttcatactcataaaaatatcttgttctccagtatgacagccttatcactgcactttaattactttggcaggtttgaacatcgggaggaaaacagaaaagattgct

SEQ ID NO: 112047 - DNA, 541 bp, Setaria italica
  Intron number 3 from transcript Si018031m (locus Si018031m .g) derived from phytozome v7.0 (chr-ID scaffold_1; pos 26 6857 to 267397)
ctctgcaacccttgcagggattgtgctgttcaaaagtaatatgtttccttgcaacttctttgctttctcgtgctgtgttgaatgagtttcacctgtttgcattagaggctttccaaatgctaattaccacatgccaatccaaattagtttcttaagagacttttgaaactctatgattgattccttatgattgattgagatgttttgggaccttgctgagtcaatgtattgctttttcttagaatatgatgtagatatccttttctggttggtttaaaatagtgaatacattagtttcatgatttgccttttcatgaaatccatataaggctgctgtgactgttcaaactatccatcctatacttagctgcctagggttctatggcacaaagttccaatgtagtgaacttgctgattcagtggaaatttgttccaatattacctcaaaagggctgaaaattgagcctttctatactattaaatgttatatgaatgaatccttgcagggccaaggagctaccttattcagcgagttcggcgc

SEQ ID NO: 112048 - DNA, 600 bp, Setaria italica
  Intron number 4 from transcript Si021756m (locus Si021756m .g) derived from phytozome v7.0 (chr-ID scaffold_3; pos 37 29919 to 3730518 reverse strand)
ttctaatttcatcgattaattactccatagtgaaggttagtgcttgcatgttccctcacagctgtttgaacttcgaactgtcttgctctctatccctatgttgtttgtgtgtatactgtatacaaacaatatgactaataaacgtaaatggaagaatctgatctcgttgccaataaaacaatcactcactgtcttgttttgaagtttatgaacctattttgtagaatgtaatggtctaaacatttaattaaaagcaaggaatcggttcagtaattgatacacataatattgagtatgttaaagtcaagaaagacagaacacaaaacaagcaattttgtaaattgtaatgttaatgtgttgctaaatcagtgactttatcaatcataatgccgggcacgatgctgcttggtttgttatgtgatgatcatcaaccaataagtgacatcatcagttaaaatcaatttgacggctgtagagtgactagataacagattttcactttttgatgttttaattttggttactgtctgtttcattctttgaccatagttctatattttttcagctatttgctcattataagtattgcacaagcctcat

SEQ ID NO: 112049 - DNA, 557 bp, Setaria italica
  Intron number 1 from transcript Si024282m (locus Si024282m .g) derived from phytozome v7.0 (chr-ID scaffold_3; pos 25 186922 to 25187478 reverse strand)
gcaccgcaggtacgtgcccacgtgagatcaaaacccgggacctgcgtgtgattctgcttgtacaagaatgagcctggaagacttgcgcatttaattttgtgatcaaatatggggtttttccgaaaaaatggtgccgataatcttaggcttatttataattttacgtttatgttcatagtgacgggtcttgttggtggaaagagttgtgttgcctgatgcaaacagaacatacttcatcattgctgtttgccgtttgtatgtttattaaaatagaaagaaaattagaagtataatatatgcgtctttaacaacttattgattttacctaaaaagaacagaacacaacagacacgaaaaaacagaactaatatcgagactccagtctcatggatgctatcatggttgagaacctagtcagatacttagagctagtaacccttttgcagagtgagcaatcttttaattgcagtgtcctctttgtcacatgactgatgttctgctttatccaaatgttgaccccaggattgttgattattgcatacgtaagcggttgccat

SEQ ID NO: 112050 - DNA, 771 bp, Setaria italica
  Intron number 2 from transcript Si023753m (locus Si023758m .g) derived from phytozome v7.0 (chr-ID scaffold_3; pos 45 950721 to 45951491)
tttctggcttgtcggtgacgaaccacggtgcgtgcgtgcacgcatgttggaatttatttttgaactttgaacagtgcctttacgcaattggccttgcttgtgtcgctatagatgagaaattttataatgccatcgtgtcttgtttgctgccactgtcaatagcttacccgtcagggggagttggggtggatacatcaataggctgtaccagaccaggtttctttagttggctcgcacttttctctgaaccaataattgagcaaatcttgtggcaccggcttattactattttgtgtaagtggttcaacgacattgcttaaaaaggaagcaagccgaagtagtaagctgtactcatgtatggatttcccttttacagattgtttcacagtcatatgaattagtactttagattgggtaaaaatggtggttgatcagtagtcagaagtatgtgcgggcacttgagtactcatgtttacctaattattggtatgctatgcagcaacgtgttagtgtgacctacccccttagcttaagaaattgagtcattagatgccaacaactgaaaattcttcgttttgttgatggtaaactgtctattgggtgaacaaaagtagcacaatgaaactccttttgttgttttaagcatggattctgtctttagaattttatattgtgttgcatgctgcttaagtttttttgggtcctctggagataacactgttcttatacctcaaactgatttttgcagagtaattgacaaacttcaacaag

SEQ ID NO: 112051 - DNA, 796 bp, Setaria italica
  Intron number 4 from transcript Si023174m (locus Si023091m .g) derived from phytozome v7.0 (chr-ID scaffold_3; pos 10 826505 to 10827300)
acaggagatcggaggagaaagccaaaaggtgacaggtgtgttcctacttgaacaattgattaaaaataacagtccagtccttctgcatttacgataaagtttcatattctatcaaaacagacttctgacatggaaaaatgtatattatttttctatttacctagtcaacaagcttcttttccctacatcttgggtttttgacatgtctttgtattgtttctgccttctgatttgagggtagtattttcaaaatacgattgaattacctagtaaaggaccctcgatcaaagtagtgtgacaccaccagccaggtgcccacaactgcagcagatgattggcaatgagattagttagttggtttgttttggttcttcagaagaaatttagcttctttattagtcagtttgttaggcaccgagatcaacatcaagggcatctgttattgaatttggcaagcaaagatttatccctaattaatctaaaccagtagttcagggcttccttgagagggtgaacctccatctcattgcctaattccgcacttctctgccacatcaataacttaagtcattattaagatcaggaattttcaagagtcgtaacataagcaaatagtgctgcagtatagttttgttaactcactttagtgctttggaggtgaacacccagtgtacaaagtgaattcaggttgcaggaatttacatggcgtctgttttcccatattactatagtagtaaactaaagctacaatcatctggcaggcgatcaacggaaatttctcttgttattcgacaga

SEQ ID NO: 112052 - DNA, 431 bp, Setaria italica
  Intron number 3 from transcript Si023022m (locus Si023022m .g) derived from phytozome v7.0 (chr-ID scaffold_3; pos 10 92704 to 1093134 reverse strand)
acattgtggcgaagcgattgagcgggtgcagaaaggtgcggcttcttcctcccatttcacctggtggtgtatgtgcttggggttgtgttcggaagagtgtatgtccatgcaacttggtagtattagaagttatttgttaggaaaacaaagcacgctaagtaattaagtaatttatctgtttgatgatgcagatagtgttgtgttcagatgaaccatgtttgttatgaaacagttttaaggaatttgctttaagggactagagaaaagaaataagtaggctggaaaactgcagtgatcaaatttgacacaatcttcagaaataatggcaatgttttggtttaataaattgtgtatacgctcggaattcacagaatctcatgcattttatttgtgcaggttacctgccgacttctcggtgttatttttgagga

SEQ ID NO: 112053 - DNA, 937 bp, Setaria italica
  Intron number 1 from transcript Si013463m (locus Si013463m .g) derived from phytozome v7.0 (chr-ID scaffold_6; pos 16 13228 to 1614164)
caccgcgccgcagcagcaggcccagggctccgcaggtatccggatttggtgggggggtttgactttcccttccttttttttttcccttcttcttctgctgctgttgctgccgctgctgctcgtgattgggcgttgcgtcggtgctcgaatttcccccgcgctcccgcgggggccggattcggcgcgagttcgcggcgcgggggggagcgatctcggccgcggggtcgccggttgtgggattcgcgcggcgcggggggacggcggcacggctccgtctcggtttctaggtcaagattggttcgggcgccccccccgcgattcgttcgctccacgcgagcccgctcgccgtcggggaacggcgcgtgctcgcggagggcgggcgggcttgggggagggagggaggctcgcggagcggaggttgctgggattcggtcgcgcggggtgcggttgcgcggtagggggcaggggcaggagcgtcttttcttttttcttgctttcctttttaccagtgcacgggcgtccacgggacgttttgcaacccgtgccgctttgcacgagctggcggccgcgggtacgactggagtacaatagtctgtagccaatggggagctctcagcttcggttggggacggtgctgtacatggaaggattgaatttgagtaagctactgtatggtgcgatgagaggttgctgctgatgtcccaagcatcgcaagcctcatggtttggctgtacacaatgcacataggcttgtagtagactctggtagggctgtgatttggggaggtgtacagctctcctccttttatgtagaaatcatttttgcattgtgtatgagtgctatacctgtcttaagttgcacggcaacatgccaaagtatcttgttacaattcctgacgtggacttatgtttctatgtgtgtatgttctgtagatagc

SEQ ID NO: 112054 - DNA, 890 bp, Setaria italica
  Intron number 1 from transcript Si022989m (locus Si022619m .g) derived from phytozome v7.0 (chr-ID scaffold_3; pos 25 995688 to 25996577 reverse strand)
cagcccggaaggtgagatcatccttccaatctcccgcgatttctttcgatgtgctcgtttgttagggtttgggcgtgtcgaatccagtggggaacgggtgcctgcacatggatcggggtccttggatggtcgatttcatgggggcttgttcgattctctggtggggggtttctgattagggttctggattggtaaattggtgtgggataggcttctagcgccccgtggtgagggctgttggatttctcggtcggactgggccagcctgcccgttaattagggggattagggtttagggtggtggtccgtgtacttgggatcggtcgttttggttattggtttgtaggctgagcttaatttaggaattttattttgggtgtggtattgaggaaaagtggggcaattggagctcctggatttgtacttgtaagactagctgttccttgcagtgatgattgttgatttggttaatgtgaagaataacataaccctggaagttgtggaaatcgcatgcttttgcttgctgttggctacaaaaactagatttgtttgtaacatttgggtcaagattagaatttttgggttgtgaactactgtaagatgggattttttgggagcatagatatagatttgaacttttggggttagcattattcacttaatgttgggtgagagttatagctatggtgtgtcatctccacagaaacatgtgtgctgtttgactcatatgcctgtctaactgtgctaactctgtttcttcatcttttgtctaattgttatactgttagtgtttctttgtttatccagtctctgatacatattatgtctgtctgtgttgtcttttcggtaatctagaacatttggagcagagggcagtactgtggtgcttg

SEQ ID NO: 112055 - DNA, 569 bp, Setaria italica
  Intron number 2 from transcript Si014143m (locus Si014143m .g) derived from phytozome v7.0 (chr-ID scaffold_6; pos 35 294305 to 35294873 reverse strand)
agcttctgaggagaactctccacaaccagtcatctgtaagtaccaatatcagtgaactctttgtttgtatgccagcctcttcaaaatgagtccatatccaattcgggtagtgaagcctcaccattgtaatatggaatgtatctatctgtggatttactgttcatgttggaagcaaatcgtagtgaacgtgcttaagctgttaggatctgcatgatgtccgcttgacagaaatgagcaattaatcactgccgcatgtgtcttttatagggtttatgttttgctgttcttgtcttatcctattgtataataaatttgaaccagatagcttgagcagtatagtccttttcagttctgttgactggatctttactagttatcctagttgtgttggatccctccttttccaatcaaaattatgagttttggaggtcattaagttacttttgacttatgagttttggtagacattctatctttttccacgggccatgacccatgattgctgtctcttaacattgttgccatgttttgtagggttcatcgctgctttcttcacttcggggaaagca

SEQ ID NO: 112056 - DNA, 848 bp, Setaria italica
  Intron number 1 from transcript Si009700m (locus Si009700m .g) derived from phytozome v7.0 (chr-ID scaffold_7; pos 27 584809 to 27585656 reverse strand)
gcgtccccgtgccctggcccgagagcctccacaaggtgcatgccgtcggcaatggcctttcgacactcagaagtcagaacttgtcgcttgttaattacagcacttttttcagcatcggtcagtggtgtgtgcgagttctaatgctgccttgaaacttggtttgatctgatatatctggtgccgaatggcgatctgggttcgagttgcgtacattgtagcgcctgatccgttttctgaagcttagattggcttggtttcgtgcttgtagctttgtgctatgtatgacttgcttgtggctgctgcatctggaggtgcagacgtgcagtaaatgctcatggtttactgattcaaatcatgtgacaaatggatttcctactatgcacttaaaaactgtgagtcctggatactgttgagagtgatagattggctaaggatttgcttgctggtagttgtgtctatctacttgtctatatattattttttgggctaggacttaggagtggaaacatgtgcgcttagttactttacagtttctgtaggaagtagtataagattaagcaagtgatcagacattcgatggtagtgtatcgctcaatttggggctagcaaaacagaagagttcaaaacttaggcatgttgaattgttaattttgtatatgaccttaaacaagaggcataaaatcggtttggaattttaaatttcagttataattgagtgggactataaaatcggtttcaaagttttcatttaatgttttatcattggaatatagggatgtagattagctttccatttattttattgatatttattgtccatagtcatttttcctcctttcagatctggc

SEQ ID NO: 112057 - DNA, 421 bp, Setaria italica
  Intron number 2 from transcript Si007464m (locus Si007464m .g) derived from phytozome v7.0 (chr-ID scaffold_4; pos 72 91147 to 7291567)
gagttattacaaggtaagggtcattcgcttcctttgtatcatctaactactgcaattgaaaccaattatctctttgtgcatcagtttaccatgtttttgacttgtttgattgctttgagtgctcattgaagaaatataaaagtataaaacaaaaggaactgaggacatggtttaacaagggtgcttactcttatgcctgtccctggatggatgctcacacactgattgtgacttaagaagatgatgcatgtttatttgtcacatccagcttaaaccttttggctcagtggctgcttgatccattttaatgttcaatcatctgcaggacataaatgaacacatgattgtgtactaaaagcagttttttttttcactttctgaaacaggtggtcattcctcttcaccagctaagagcagctaa

SEQ ID NO: 112058 - DNA, 859 bp, Setaria italica
  Intron number 1 from transcript Si011122m (locus Si011123m .g) derived from phytozome v7.0 (chr-ID scaffold_7; pos 17 645648 to 17646506)
gccgccgcaggaggccgtgctcgaggccatctctagtgagtcgtcctcccccgctgctgtttatgagttgttcctccgctcgccgctcctgctagtcgcttcggtcggtgcttgctcggttgattgggaattaatagtttaatagatatagcgatactgaatcataggtttcccttgctttttctataatggaattgatgtgaaatgggatttaagtggcttggtgaattttgattgccccaaggcagtgtcgggctgtcggctaatttttcccaagtcttgtatgcattgtttgcttgctagcgtgcatgtatggccttctgaagattttctacctttgattgtagttttacatattaattcagggcttttgccagttcaaaagtctggcaatgtgttggtaggacagaagaaatctgttataagaaccttgtgttgcactccattgttcttgaacgtatgctatgattcatttctttttagtacgtttcataatctgttataacattgcgtggttgtttaattggtacctccagtcgtcaatattacaatttcatgattccaaagtatttactaagagaatcacaagatagcttgttatagaaacattttttggtacacatagatgaattggagtattgatcaatgcatgatgtgaagttacacattctgttataagactatgtttagttattgcttatattcacatacttctgaagtttgcttcatataaggaatgatgctcgtttccaccaagtcagaagttttgctagagtctttaccgatgctttacttaacagtagcttttaattttctgaaaccagagatagcaaggtccaaaggaagggttgcactcaca

SEQ ID NO: 112059 - DNA, 601 bp, Setaria italica
  Intron number 2 from transcript Si023635m (locus Si023436m .g) derived from phytozome v7.0 (chr-ID scaffold_3; pos 16 81145 to 1681745)
gggcatcgtcatatctcgtatggaaacaatctttcctgtggaccattacatgcttctaagtggtttatgatgcgcattgctctttgtaatgcttgttaccttggcatcaaggctgggttgtcctagtggatctttactatgtgatatctcatacaatggacctgagcaattaggtactacctccaagtaattctggctggagataggactatgttccatagtgtatacactacattaagagacaaaaactgaagtttattttgatttttagtttcattttgcactgaggttcacctggttagttttttcttcttaatttaacaggggaggcatggtcttcttttttatattaccctttattgaagtacatagtaatggtgcgtgtacagtaaggaaacggagaatacctgtttgggcttgaatagttgaatgcatttacatatggcaaacaagccctctgcaccataggtttttctttttcagttggaacctagggaaaaaatatctttccaggattgtttcgttcttttgaactaagtctgctgtgtacacacagaagttgctggcctaaattttggctttcaattattctgaaggacgt

SEQ ID NO: 112060 - DNA, 913 bp, Setaria italica
  Intron number 2 from transcript Si011364m (locus Si011364m .g) derived from phytozome v7.0 (chr-ID scaffold_7; pos 23 174943 to 23175855 reverse strand)
cgccgcgctgcctcggcgtccgctgcttccccaccgtacgtctctctttagccgtctgtctgttcatagcagtaattttcgtcttccgatgcataagtgctgcagctaaattgccatgtgctactaggaattaggatctcacctcaactctggaaactgaaaagcttgcgctcggtcgatggacactggtgcagggtcaggttgcacgcaagtacgtaaccagaaatccatgcggttgtgcacgaagcaactcgcaggcacaaatcagctggctagctagaacaactttctagtagctttcgcaaaggagaaacagctaaactttagttgatttgatgtgatactgagcaatgagcatattcttacacgtttctgtcaaaaaaaaaatcatatcctctagccctcaggagagtaagaacttggctttaccatcctgattaagcctggaactactaatcatacagtgcgcaaaatggtgtagcattgtgcctgttccgagtttcggctgcagtgcgtagacctacttacatgcgtctctctttcagaagtggcaccccctcgctcagatttcgcagttgttctgaaaattcgttactctgtggacttgagcgcttgcagtcaccagtattttgtctgttaaagagcctactgcttatagttagttgcagggatcctccttcagtttggtttggttgtgaataacttagattagttttcactcaaatttacagctcctgatctggataaaacagcttagcttgattgccggttttgttttcggtttcgttacactatgagtacattgaagattgctgttcttgcatgtgcatccgaaagatgatgtgtctctgtgtgcgtgtggtttggcatgcttgcagaacatccactgcggcgagagcgtgacgatcgaggg

SEQ ID NO: 112061 - DNA, 555 bp, Setaria italica
  Intron number 1 from transcript Si023304m (locus Si023304m .g) derived from phytozome v7.0 (chr-ID scaffold_3; pos 46 580213 to 46580767 reverse strand)
tagccaaactgttgggacacctaagagaacgatcggtactatcttgttccttctcttaattctgttcattgctgtgccaacatttgccatgatgaaatcgcaaaaaaaaaatgactacttagagggccattttacactgttacatcaactacttttcatttgattttaatccttaatctatgaatattgcaaaattcaccattgagttaaagaagacctttagaccccatgtcgctttgaactcatattgtagtatgcagttgtccaaaagaagttgggtatttgaattgttaactggaatctttcttatatttctgctctttgtcagtgatcagcagtgctttgtaacttttgtcctgtcttataagacttgtacatgtatgtatctttcctttgatgtgctatctgtggatttactaaaatttatgaaaccttctttctcataaattcagccctgagaaataaggatatctgactgggatgcttggatgttttctcttttgtctttgcttctctagtgatgtagaattttgtttttatattttttaggccaat

SEQ ID NO: 112062 - DNA, 590 bp, Setaria italica
  Intron number 1 from transcript Si010917m (locus Si010917m .g) derived from phytozome v7.0 (chr-ID scaffold_7; pos 23 822711 to 23823300 reverse strand)
gaggagcaggccaccctcgacgagctgctagccaagtgagtccgccgaattgctgggttttgtgggtttgggaacgccgcagttcgggttagatggttgctttcggttctgaattccgactctcggatagaatcggctggtattcttgagcaattaggcagggtttgtactacaaacttagcaaattcagtgagattgtatttgcatagtcgtagattgaaacagtcgacggcctccttttaaattcagttggagcatacttattcctagtcatttttctcattcgaatgcttctccttgcaatgtagtcagtacaagttgacttagttgaagcaagtggataacgttttgccctttgttcactcttaacacatgttttattctgtcatactgtggagcatgtgaacgcttggtagttatataacacggttcttatgaaggacatctttcaaaaggattgtatattaggtttgcattttgagcttgtaagtagattgtttagacaacatcgtgaaggtctgttaactgcgaggcctgttattttttaatctcgcattttcattaatgttcttcggcattttctctcaggt

SEQ ID NO: 112063 - DNA, 759 bp, Setaria italica
  Intron number 1 from transcript Si008648m (locus Si008648m .g) derived from phytozome v7.0 (chr-ID scaffold_4; pos 36 136179 to 36136937 reverse strand)
tctgttcattgttcactggactgtccaggaaacctgtgaggccggaagggagactcattaccagctgcgctcaccttgcacggggaagtctgatgaatgtttgatcagttgcgacttgcaaatttgccggaagaagtctgtctctacatctggagggaactcaaacgcaagtggaccgtcaggtaaaacgatgctgcttgtttaattacttgatccatgagaagtctggatggggatgaaattagcaggcttttcttctgatttgtgctctcccaattcttgagctgcatttttccccccggaaacgctaaactgtaaaattagaatttcttttttgcgaaacaaactgtaaaactagatggcatactactaatcgtgtttattacctggtcacatgtcctgtacttaatacattaactgcagaatcaaatgacatttctcatcaaactagatggcatactactaatcgtgtttattgctttggtaacatgtcctgtacccaacaggcaatggtttccgacggatattcggatagagacagaatagggagagctccaatggaatactagactcttgacgagcctgaaggcccagtgaggcagtgacagtatgatacgactgccactcgatcagcccattcatcccagtcaggcagacgaatctggcgcggtgcgctctaccaattgtggcaaatttgtcagacaaccagagggtctctctgcagggtttcagtggttgcttgcccgaggaggaatctgc

SEQ ID NO: 112064 - DNA, 448 bp, Setaria italica
  Intron number 1 from transcript Si009769m (locus Si009769m .g) derived from phytozome v7.0 (chr-ID scaffold_7; pos 19 578489 to 19578936)
attcggtatggtttccagatgtcttgttctgttttatatacgagctttcatttctcctataaggcaataacatttatagcagtcttatatattacatcagcatttattgtgaaatgtgaagatagtcctagtgatgtttaatatccgtatatttaaataatacgctctttggtggctcatctgttacttttaggtgtttgattattagatgaatctgtatatcatgtgttttcctccaaggtgtcaataacaaaagcattcttctcagtagagctattcatcctgataatataagtggacactaatctttttagtcaagaaaaaccttgtggtttttttacttatgtagtaacagattttgtcatgtagatgagcagataatttttatatggttatgttttttgactacttctcatctaattcatttgtgcctcaggaaagggacctc

SEQ ID NO: 112065 - DNA, 432 bp, Setaria italica
  Intron number 1 from transcript Si024870m (locus Si024870m .g) derived from phytozome v7.0 (chr-ID scaffold_3; pos 38 804830 to 38805261 reverse strand)
taaggtttgcttgtgaggagtggggtttctttcaggtatgttactgaagaatcaaaatcattgtcaatggggcaccgttgttttcattagatagctggtggcaaaatgatcatctatccagcatatagatccagaaaacagaaataaattctacttgctctgatattgtttgtattttttaattctcctaattaataaactagttattgtgctaccttcttactggttccttagctattttttttcaagatcatgaatacatggttttgttttatattgtatttatcatcgtcatgatatagttgtcaaaaactgagaaaacagcaatcaattgctatgaaattacttatcctgtcttcctgacggatcggagctttactttacttaatcaagaatgttcaactatttgtcgcaatttacaggttctaaatc

SEQ ID NO: 112066 - DNA, 734 bp, Setaria italica
  Intron number 2 from transcript Si021440m (locus Si021208m .g) derived from phytozome v7.0 (chr-ID scaffold_3; pos 28 833674 to 28834407 reverse strand)
tgcaatctttgcttggaggggcggaaggtgaaatacttctcaaactaacttgcatattgttgggtgttaggaattgcagatatattttgaattggaaaatattgattccttacacagttttgttgctttgtgtaatgagctggactaattttgtttatattaatgctgtactttgtgtattcattcgaggatatctttttctgacatctcaaccaactggagacagtcaaaatgaagaacctattttctatcagatttcttatgtcatcaaacctttttattctttacaattaacatggttgacattgtgctatccattgcttatgtgagtcttgggtcaagaaactatagaatgctgtattgctcaatctttaatctttcattatcttgtttatctaccccccttatgcagatgcaattatactgttaaacatctctgttgccttgtcatgtgtgcatgttcttgcacctgcatacattttctgttgctttttattcactgtcatatgagtgttcactaaagatatttgttaggcattattgtcctgtggtctaaatcttataactttggattggatttatgattgtaatctaaatttgaccgtgtgatctctgcaataaattttcaaatataaaatgataattttcatagaaattattgttattgaaatatttcgtgtgtgtttcactgttttgtaggtgttcatttgtgagcagaagctttatttaaggtc

SEQ ID NO: 112067 - DNA, 659 bp, Setaria italica
  Intron number 2 from transcript Si025620m (locus Si025620m .g) derived from phytozome v7.0 (chr-ID scaffold_3; pos 24 277066 to 24277724)
ttatcgggtggcttttcattggaggcagtggtgaggtcgttgaactcctcagtccccttcccctttcctcgatctttcattgttctgcatacacgtgtgtggttcagtggacaattcgattggtcagaaagtcagaaccatatctacatagtcgatttgagttgctccctgagattctgcatcatgggtcggtgccggagcttgtattgtgaatttgtgatccagattattggattcttgtttctgtaacctgtaaatgtcaattgagctggacagaatatttggtttgagtttctatttttctaagtctgaactaattgatgaaaaccagatgttctacgatgctgctagtgttataatacaacctatatgttttcttagacatgtatacactctcgctagtccaattgcaatcctccaatgaaatcttccagtaatgtaggaattataattgttctatattagtgtagaagaaacagacaactcttgccttgccttgtttgtttgttttgttgttttttatcttgcaagtgaatcttcggttcatggatgttgttgccattcgttgatctcgcgaatgacttattaaattcccaaactcatttctcttctgtatgcctgcagattgaagccttaggggctaggtaagaggccgagag

SEQ ID NO: 112068 - DNA, 1026 bp, Setaria italica
  Intron number 1 from transcript Si009356m (locus Si009358m .g) derived from phytozome v7.0 (chr-ID scaffold_7; pos 30 179276 to 30180301)
cccgcaactgctgagctcagagagcgcattgcgaggtaactcctttataatgtcttttctgttcttcatatgtttgcagctagcgtgttgtgcaactatatatcatcatttgccctggttcagaataatatatgtaatagagcgactccatggagctcctaagaacattatcatgggcataatcattctgctatgttaactgtgtcatgctagatcttattgatgcattggatgttgattaactcaagccagcatttatgtgaactttagaaacatgatttgtttaacttcttgcgttcatatgtacaagacattcaaagttgtggcagatgtccctttccactctccagcacatttgatgtggatatgaagtgcattttggtttcaatcagtcttgtgtcgatataatacctgcacaacctttttatactgatacctgcacaaattgaaggtttgtcaaggttcccaggttagaacaatttgataaggactgacgtactgagggttgaactttgaagttctaataaaggaacctttacagcaaaaaaacaatgttaatcttttaataaagcataaaattcatacaaattcaaggaaaattctagagtttaggactttaggcacagaaacctttctgattcatagtggtctatatgataatgaaccatgggccattcattgcaatccatatatgacatatattgtttctatttatagcattggatatgctacctgcattctgatcaaccgctgctccgcagcactattgatgattgctaacaaaaatgttactaatataataatgtgagtttccatgtcaacagagtacatataaatatatcataatttgtatgtcttatttctcatcttcatttcagcacaatggagcctgcgaataatgccaacatcctaatgttttctcttgctgtcaaatcttgctactaagcaatggagcatgcaaataatttctaaatcaggttatttcctgcagggtaaaggaagaaagattgaaggacaaaaaaggag

SEQ ID NO: 112069 - DNA, 726 bp, Setaria italica
  Intron number 1 from transcript Si010066m (locus Si010068m .g) derived from phytozome v7.0 (chr-ID scaffold_7; pos 23 293970 to 23294695 reverse strand)
aggctattttagaaagtaatctacagttaacaaaggttagtatggtttaatcctcttgcaaatatttctaactgatgtgactccttcatgtcttgcagttgaatagttttatttattataccttactagcgaatgttgtttgtatcatatcaaattcttggtaatccattgttatcactgcaccattttatgtgattgttactgctgtggaaagattcttcattatagctcaaaatgaattgcattatggttctgcttgctcgaaatacattttcagtacttgcagctgtggacatccagtttgaattttagtgatatgatcttcagggttatttgttcggaacaaggctactgccttgtatattctcagtttctccagtatgttttgtctatgggatgaactggaagcttgcaaattttactcatctgtccatgtatttgccagaccatgatcacagattcaaactaatttgaggaaactacatgcatgctctgtgacagtagtggtatactggtatcagttagcttgagagtattgcatgtttttgctgaagagtacaaagaaggtttaattaattttgaattaaggacttaagaatttttcattttaatgttggggccagtaagaaaagctgtgccaccagtttacgggtaattcacaattctctatttgctgagcttcgtcttttttttttggtacagttgggcatttttggcgcattccgg

SEQ ID NO: 112070 - DNA, 1039 bp, Setaria italica
  Intron number 1 from transcript Si014244m (locus Si014244m .g) derived from phytozome v7.0 (chr-ID scaffold_6; pos 28 596266 to 28597304)
tcttcatccgcgagtccgaggccgtccaatccaaggtacaattcaatcgacaattcactcgcgttcttgcttcattttggaagtagaattcagttttcctttttcctaacaatgaagagaagaagaagaagaagaattcagttggcgagctcgtttctttttcgtgcggattaattgttcgtcggcatgtcagtagctgcatatggccggcgatccattaaattattgtttggattatctggactttgtttaagatgcgctgacttaggcgtatgaaaatcctggtcaaaggttaccgtttccggggaaggtgttgactgatgataattaattcgttcccttccaataactttttgaacaatcttgatctggggaataaagaggtgctttgtaaaaaagtggccaaaaaaatcttcgtttacagattaatacaatatataaaatatgaaagtttcttaaaacctctagtcacaaatataagccgattttatgtttgttgttttgactgaagtcagtaagtgaagctccaacctaatgtctgttgttgccttttttttctttggttattagtatctaaaactttacgtagctttatcatgagaaatactttcataacatctaactcattctatttaaattttaaaatagtacttgaaacatcaatacctaaaattaatatagattcacaatataaggttgatgtttctaaatttatattataaaaaattccctaacatataatatattttcatagctattgtttgtataaaagtatatttgtgatgagaggtagtattgttttttccttttttgcactagaatttgaatttagaattctgatcaccatgttgtaaaccacgcattaagttctaacggcaagttttctttgcactgctactgccgttggcatcaagcaacaaaaattgcgtaaattgtgaccaaaacttgaagtgagtgttaattatgctccactaatccagagttgaagctgaactttttcataggccggaaggtaccaaagtctacaagagattccatt

SEQ ID NO: 112071 - DNA, 689 bp, Setaria italica
  Intron number 3 from transcript Si021247m (locus Si021247m .g) derived from phytozome v7.0 (chr-ID scaffold_3; pos 91 6336 to 917024)
gctggttgcctgctgctctttgtgtcctgcaggaggtaatgtatacacagacatttctcataaaaataacatgccattatcaagttaatgctggtataatgtggttaagacttttctctattggtggatatgctcagtgattaagtagttaccatgctttattttcgaaatccaccaaaacaataaatattctgtagatcactgtctgtgagtattctttattgtagatctatcttgtgcttcttggtaatgtacaattcacatttcaggtttaagatttatgccactcgatttcagaactaaagtttaatatggaatggaacaaatttctctaatttaatgctcctaagctctggaatagtcacgaaagggcatagccaattcaacatctttaggatcatggtgtggtgtatttagatactaacttctgtccataaaatgctgaaaatatcactatgaaaaatcttccatgccgaatatagggaatgtacctcttttgtatatttagcatgtactttgagctttgaggactaaacacaatatgttagggtaccaattatcgaagttcaatatgcatttttggcttaccatcatgcacttgcagtgctggatatttgtttatcgtcaatgtaagatgtggcagtatcattgcaggttggagaagaaaaattagttttggaaatcggtca

SEQ ID NO: 112072 - DNA, 1037 bp, Setaria italica
  Intron number 1 from transcript Si014405m (locus Si014405m .g) derived from phytozome v7.0 (chr-ID scaffold_6; pos 35 551733 to 35552769 reverse strand)
ccccaccagaggcggcgtccgcggcggccgagaccgtaagctcccttccccacctctctcttctcctatccgcttctcgattcggtcttgctcgttccacggcatgaaatccgccgcgcgatttgccgctagggtttcgatgcgtgcggccggccgctgggaatttgccttctccgtggatgctttagccgatccatgcgactctaggttagcaatcgtttacaaaatcgtgcttctactcgcgttcccgtggccccagggcgctgcttgcaccttgcaccgccctagtgcgttgcggacatgggatttggttagactctgaaaaattggtgttcagacgagcctgttgctcgtgcagattctgtggcaggtggccgatctctaggttttaattcagttgtcagttcattagttctgagggtcttgctctgatgttatgatgttagtataatcaaatggatgaggcatcccccaaaataaacaggataagctgatatgctgaaattgttcatgttcatacaaaatgtctgcctgttcatctatttatacgacgtctcaggaaactgtaatccaagaaaaataaccaggataattaaattaaaggcaccttattagtcttcaggagatcattacaacccacgtgatgatggtgcattattgtaccatatctcgtgctgattactctctggtcaaatggagttcttttagataccatgtctctcgtttgctataaagtatgcattgtaaacttactatcttgcaaggtcctagatgctgcttggtttgcttcactatgcactttgtttgaatttaggtgtttgtttttgttagttacatttccttgagccagaaatgcccacctgctattgtgcaaaagcataccttttgatctttgctagaagcttttctgcatgttgttatcatgtgttacagtctccattttcttgctttatttgcaatctagcttcattatcatatgccttgggacataaaaagggacagtggttctaagtgcatatttttcatgcagaatttaa

SEQ ID NO: 112073 - DNA, 1011 bp, Setaria italica
  Intron number 2 from transcript Si023230m (locus Si023201m .g) derived from phytozome v7.0 (chr-ID scaffold_3; pos 38 64564 to 3865574)
aagctcatcgacctcagcaacaagcccgagtcagtctcatttccctttcccgtttatttccaaaataaattgtcctacagtgtctgacgattgatggatacagtgctatgggactcaggcagtgtcttgtttcctgctccagttgttttggagcagaaatttctctagtgtcttgactcttgactacgttttcagaggttcagtgggtagactggtactggattaagaacagtgcgcgacagggacagcctgtttgctgtagaaatgctctttgatttagtggattgttagttggatatgttagattcttcttggccttactgaactgttgcctggattggaagtgaaatcctcactgctttgtcttggatcgatttaatcaattggattggccaaggacacgaggaatatttttctcctcctatgttgggattacttgcgcttcttatctgggaaagcttctctagctttcaggaactaactgtagcctactagagttgtcttgaaatacttgtgcatatttcttttggaacttaaaagctttcaaagacataaacctgatgcctctgtttgacagtgcacgttcttgtactttgtctagttttttttggcatccatgtactttgtctagttgagtagcctttcccagttaattgagttctacaatacttggatcacatgcagtttatggggcattagagaaggcatgagatttggtttttcactgtaaagccatcaattatcaaaatattgaaattaccaaaacgagcttctcaatttgtgccgacacttttggaattatcaactttttcatgtgaatttataatgactttctaaatttgaagattgaagaggatttaatattttgcagcttctaaatttttcagtggcccaagggtataatttagcccctcgtactctgggatcttgtctgtctgttgtcttcatatctaacctactgtaatggctcttccaggtttctgaagatcagcccagagggtaaggtgcctg

SEQ ID NO: 112074 - DNA, 919 bp, Setaria italica
  Intron number 1 from transcript Si013749m (locus Si013749m .g) derived from phytozome v7.0 (chr-ID scaffold_6; pos 33 051165 to 33052083 reverse strand)
aaggatccaggtaaaagatgtggccgatagtggatgtttcttagtatatgcttggttgtattttctcacattcagttgactgtaacatgatgcatgtatctacggttcttttcttttcatttttgttattatgcatgtatatagtctggtgctggtgaaattagctaaatttgtcttggaaacctcgtagttatcagtgtccagctgttgttgctattctagctgtataaattatggttaatgtcgagccttgttagcacgttaaagcgcagtccctactatactactgtaaagatgcttaatgaacacaggtgttctatggtacttgcatgcctcatttggtaggtccacgattgcctgcttgtactctctttgaaactgtttttattaaaatgaaaccgtagcaccaggcagctgacatagggcaagacaaacacattcacccactgttgtcgtattctgtgtagcgttacctggttacctgagtctgagtcggaaacaaattttactctattggttctagtggtatttggcatgtccaatttttcttgtgagttggacacccatacctgaacctgggaagaagtcggactcgtacatacgcacctgtgttcaggtaacactattttgtcacatggaacaatttaggactttcaccttttcctgatgaaatccatgccactttacttgtctcaccgaatcagtcaatatttcctgttccatgtcttcggcacatgttattgattgtcttcaggattccatctcaccttaagcagtgttgcttctcttcataaatttgacaactccattttactgctgttttctagtgtgccattgatttttgatatatttaaataagtccttccgcatactttcaccattctaacggttggaaaaaacctttctagagtcactgaac

SEQ ID NO: 112075 - DNA, 788 bp, Setaria italica
  Intron number 1 from transcript Si021480m (locus Si021480m .g) derived from phytozome v7.0 (chr-ID scaffold_3; pos 24 03287 to 2404074)
cttcactcggcagcacggcacaagcagatttgttggttagtcacattcatgctggagactggaaacatactagatatttcttcacaccaccatggttatgccgcctcgctaatcgtcaacctcttattgccccaccactacaagtctgtttggtagagttctatctgattttgattctcatgggagctaattatctaagagaataagttattctgtagctgaaagtgattctctttgattacttagcataaactcttaaaattaggatgaagaatcacttcacataatcaggagaagctactgttttccagctcccctcctcttagttcattttagagaatcaccttacagaatcagcagataatcacctttctttttcttttgatagacttctgctggaattagtagaaaattagctatggaatctctgccaaacgcatcaccgacccaaaacctagattcttgatgtacccgtggatttgatcgtatgcatatcagcatgtgcgattattcatcgtagctaatgtagcagtgtgacgctatctgctctaaaaagacgtgatgcattttttggaggaaaaaagaaaatgagacgcactcacaaatgaggttgaggggctccatgggctgaggcccacttgttcgtgcaaccggcctctcccacccacaacagagagcacggcccatcgcagcccgtgggcttccgccgccatcaagcgccgtctcgacctctcccgaacaacaaactcccagtgccccacactgcattcgcccaacaaaaccctact

SEQ ID NO: 112076 - DNA, 1017 bp, Setaria italica
  Intron number 1 from transcript Si022434m (locus Si022434m .g) derived from phytozome v7.0 (chr-ID scaffold_3; pos 48 802402 to 48803418)
tcttctcctttcgcctcttcgtcttcttccctgaggtgacttcgctgggctcaccgtgcgtgctccattttctagctccaccgcccccccccccccccccccgccccccccgccgtttttttttccggtgggcatcttgctctgcaaaacttggatctttaggaggagggggcgataatcaagcttggtttagttcagatttgacgccaatcgatgggggcagcggcacagagcacgccttgtggttttgttagttttttcccttttgcgttgctcgttaggcatgctcctgaatgcttgggtccgtcgatcttgtttctggttcaggagaaaagtgagggattggattactggggagaaatgaatgcctgtgtaatctttaatcagggtatatcccatactgcagattagtggagactagaggggaatgccctgtttgtatttgatttgggcaaaaggtggcagcctcttgcttgtgcagccaaatggaaaccgcatgttctgtggtggcagcttgatcttccagcaatgtactgcatcatatcttgctagtccaaaattgtttgattccgtgtggttattagatgcagatgtactgttggaagcagtacaattatttgcatgatgtttcttgccagagattttctggttcctcagtaagaacagtgtgctgatatatgctgctggctcttgtgtgtgatgttcctttagatcatttattgttggaatggtccgatccatggctccatactatttagctttcttcggatgtttgaagaacattgccagtagcatcacaattttagaagaggatgcgtgtagctgtaagcctgtaacttgtctcgtcattttccttcctgttctatcaatgttaccaatatgttagttttatctgattttgtgtttttttttgcatgcttcatgttttgtattgttacctgattcctttggcttattttcttccttgtcttgtgaaatgcagattacattcagcttcggacatctgccacatccccc

SEQ ID NO: 112077 - DNA, 751 bp, Setaria italica
  Intron number 3 from transcript Si021900m (locus Si021752m .g) derived from phytozome v7.0 (chr-ID scaffold_3; pos 10 635568 to 10636318 reverse strand)
tgaaagaggtatgtcttgttttacgttgaaatattactttgctgtttttattttagccttgttgtatgatgcactactgtgtagtattataatcatgaactgtgaacatttagcatttggcttcagaatttgctataaataggttatgttgcctgttccagataggctaatgtgtgggcactaatttaccttagtgctggtttaggttgaacagtacaaaatgcatgtaatgaatggatggcgtgttttccaactaaatcatgtattcttaaatattgtgggatgatttttagttgaagcattaggaatttgcatagtgcaaacaggatcagtttctgtactcattgatttgctggggtatcgcagtcatgcacaagcttgttgagtcttaacactgctcctctacagtggtgtatcgaaatccttttgatttgaatacttatgcttaatggcaacacattgccagcttagtcctacatatattagctaaattaatatattacatattgtatctgtatgaatgttggttgttggaccgttaattgttctgtatattgtgagtaagtagatatggcttctgtagattttcagattgtggcagactgctgaaataaactgcacagctgacatctattgcacttcttttttacccttttcttcagattgtaatgatgtttttaagagtgtcactcataactagcctacttcatggacaggttcagcaatccgtgcaggttcttcaggaaaagca

SEQ ID NO: 112078 - DNA, 831 bp, Setaria italica
  Intron number 1 from transcript Si022221m (locus Si022221m .g) derived from phytozome v7.0 (chr-ID scaffold_3; pos 42 04262 to 4205092)
cgacagcccttcgcgcagcgccttctccccatcaggtcagctccctctcgactaccttctctaatcctcttcttcttcttcttcggatcacttatttttcttcttcaatcaatcatggcttcgtgtcgatcttttgctctttcttttgtcctccactgttctgttcaattggaaactagctagctactgtccctgctagctgatgccgatccccttccactaattttttttattgtcttaaggcaggaagcaggctacatcgttgtgtaggatcgatcgatcgtgatcgcgtagtttggcacctagcgctgccccccgcgtgctcaaaagaaaaccgccagtttattttcagcttggatcttcctcctggatccttccacctacaaaggccaaacctttcgttttccattttaggagatgattttgtatccagtgtaaatgctattgctagtacaaccaactttatatgacttgtcaaatggtgagcgccaacttcaattttgatgcaactttttagctaaatcccagcgccttttcaatgttcttgactgccgcgctgaaagttcagttgttcctacgccaaacttaaaggaagtaaagaggaaagctccctttttgtgcgacctttgaactgcaatttcgcccatgaacttttctttgcaccctaaaacgtggaaagaaaaccaaatactcctaaatacttagtaataagatgcttggaacttaattacacacagaagtctgaaactcttcttcttttttttgaaagaggctgaaactctattctttcttgatgatgagcaggggcaacttccaagtttgctagtagga

SEQ ID NO: 112079 - DNA, 914 bp, Setaria italica
  Intron number 2 from transcript Si012574m (locus Si012574m .g) derived from phytozome v7.0 (chr-ID scaffold_7; pos 32 565065 to 32565978)
caacttcacataaaagaaatcgaggctatatctaagtatgccacttcaacctatgcttctaataaaacaaagttacaattttggaaaatggctaaacatgatcaaccgtaaaatcatgatttcccttgttttttaggccaagagcaactcctctttatttagtgattaggactactacaatcctcctccaaagcatacatgaagaaggaacaaaagggggcttcactagccctatagttttcagtcctaagtgctaactgttgcggcctccttagtgcaaagatgagatgccatgttagtcgaacgctttacatgaactaaacagaaatagtataaatataaagttagccttttgatatctgctagaatcaacatgatttctaacaaaattgcaaatcatgtttttgctgatctgggcttctggagtacctaatcatgtttttgcttcacaaaactacaaaataatgacatatagttattattagacacatgcccactagaataacatttaaccttaggagagcagtgcatttgaaggattaatttaacattcattcgaagttgtaaggttattgcagttttatagccacagccatagtaacatgagcacacaaagtgacagttagataatgttctaccttattcttttgtataacttataattagattgaggtaattacattcccagcactttccatctcctgcttgacgaagattaggtgtaacatgtgtgacgacaataaatgattaagcaccctttatttattagtgtattccagcgaaaccatagttttagagtgttctgtgggaacacatgcaaaccttgtacattaattgttgtttacaaggcaccagctagtgctatcatttttgtatatatagaaccataacagaagaaaaacattgattttcag

SEQ ID NO: 112080 - DNA, 824 bp, Setaria italica
  Intron number 1 from transcript Si020683m (locus Si020683m .g) derived from phytozome v7.0 (chr-ID scaffold_11; pos 6 4324 to 65147)
gactacaaggtgaccgacacttcatccgctaccttgttctctgccttgcgctcccattcctttttttagataaaatgttgcgctcccattcctggatgttgtgccccggttagtaccaacgctagttcgcctggatcttcggttagcctttgagaggctgcctacatcctgtcaaaaattacctcctctgcacgcgcttaatttcatgcatgatgtctctctagttcacctgcgaatggtatgcgcctacttgttctacatttgtttcaccactcttgcttacttctcacctgttaatgacttgtggcctaccgtccttacatgcccttgcctggctgtactggtaacttgtcagctctcaccaggtgttctcaactgtcacctgcctagagtgttgctaccatttctggattcctgaaactacagacaaaaattaaacctgtaacttactttcaaagcaaaccatttactacttcctttcaaggagcgacatcagtaaattgcagatgaaaccatgttttcaaagcaaataaaggctccaaccagtgaaaaaaaacagagattttcaaacatcaaaatgaatagttacaaatgcgtatctgtgctatggataagcgtctctccatgaatcatgatactgatgattcttccacctaaaacagctgctacaacctttgcaatgcttgcagcctttgtttgttgacttctgattctaccattttatgacagccggtcctttaaggagtatctgatttacatatgctgataccctgtttcttccccccttgctccaccaattggctatgcagggtaagagtgagcaa

SEQ ID NO: 112081 - DNA, 524 bp, Setaria italica
  Intron number 4 from transcript Si014697m (locus Si014697m .g) derived from phytozome v7.0 (chr-ID scaffold_6; pos 16 60299 to 1660822 reverse strand)
tcatttggtcaagatacagcttggtgatcacaccggtaagcccatcagtatctggtagtggtacttgtccatggtactagaattaggtactgaaacgcacaaggtgatgtagagtaacttttaaacttgacctttcttgcatcaaatatatacattcttctattaatattgtgatgtattttttttatgttcctcttgaaatgcaatgatgatcagtttgcttgtcacatgttgagttctgcagtactcatcatcctagcaaagagcaatctctgttcttaggagtttgaacttttaactgataaccaaaacttttcaccttactgattctttatatatcttgttctggttttgttcttgttgaaatgagctgatatttcagaagcgaaattctcacacattttttaaagaaaaaaactgggttgtaatgttgtcctttcatgttaattgctgcttatctgattgccatgggttgttatattgtttcagaaaaactggaatcttttcagtgttaacgttgcaat

SEQ ID NO: 112082 - DNA, 749 bp, Setaria italica
  Intron number 1 from transcript Si015064m (locus Si015064m .g) derived from phytozome v7.0 (chr-ID scaffold_6; pos 60 97524 to 6098272 reverse strand)
aagtgaaggttacacacacgatctgtgaaagcgaggtaaatagatccatctccttcatgtttaccttttcttcttagtgcttcaatttgtgcagtaccaacagatcaggtgacctatattctgtacatgctggccattttggcaggttttaattataagtgtacatggttagggttttgatgttgtgaaattatgggtgtgattatattgcaaatcttaatatggttaaggtagacagtaatccccactctcgactggctttattcatgatttatttcgtacaagttgataactttctttacatgactttgtttggggttctgttgtctcataagggcgccattatgcactgaactcactgtacttcttttcatatgaagcaactctatccttctccgtgttaaagcaagccctttttctttgcatccctgtgatgaaattgtagcttattctcccctctgaaatcctttgtacccatccgatgtggcaatgccctagtcctcattaagcacttttgtttgtcttttatttgcgctgtagtcattatctgcaaatgagtaagccacatgcccacatttcaattcatatttttcttacatgttctcaaattttcctattacgcgatttagttagacaacatgtgcacatatcaattagatgcagattactggtttacacaagtatttattttctgtttctaaaagagtatttctatactgatgatcatgatttaccattttgtttgtaag

SEQ ID NO: 112083 - DNA, 567 bp, Setaria italica
  Intron number 2 from transcript Si013380m (locus Si013366m .g) derived from phytozome v7.0 (chr-ID scaffold_6; pos 16 290467 to 16291033)
atcgtcgagaaggtgaaatgtggaacccaattacaatgttgtgccgacattttcttcggtgtcaactgctctgaatgctcaatctatttgtgttgggtccgagtcgtccataatctagattttaggtgaagcgaactcaatgtcaacttgttaatgtgaaattaccaattaaattttgtgttgtgccaatctgcagagatctgaatgttccagacatctgtgcataggagatcagtagtaagtaatacagagtagactaatagtgatcaaaataaaccctctgaaaatattgatatgctaatttgatatacaatttttctttagaagatttctctacttggtataagaatgtaaggcttcatgtaatgctatgcatgcatcagaaaatggttattggtttgacatatttaatactagcacttgcacttgcactgcacccatattctctatatattaagctttatacttttgtttttccatttcgactctggttttgtgcagtagcaaagtttatgttgaccctgagtcttctaatgttgttttctattgttttgcttttcttttagt

SEQ ID NO: 112084 - DNA, 1042 bp, Setaria italica
  Intron number 1 from transcript Si023249m (locus Si023249m .g) derived from phytozome v7.0 (chr-ID scaffold_3; pos 17 819630 to 17820671 reverse strand)
aagtggaccagccgcctcaagtgcaacctctactagtacgatccgcctcatcccctaacccctcaccatttagatgcatagtgtttacttttccgtgcctcgcgcatccacgatttgtccgggactcgcgtactgggttgaatttgaaggtttagtcaggaatttatgtttgtgggccaggttttgcctgcttgcgctaggatttgcgggcttctagagtgaatttttgctggatcaggcgttttccttttttctggaatgtgtagattagggtgtgcgtgcacgctcgagcttgtgctcctttgatagctccagcctgcaggacatgttgtttgtactgctaatgcagataaatcgggtgcagatccccttgatttaactagcgaattccactgtccaatctcagcccttgttttatgcccatggctcacatactggcagaagatgtcaaggctaagaaaatgtatgctgctcataggagtgcattatattttttatagttctggcaagttaggtcccaattaaggagttacataagaggaaactgtgtctggccgtgcgttagcccttttaaaactttgatgaattgatagtatggtgatacagatcatcagagcagccctctgtattgatctctgcaggctcagcttgtttaccggcttacatatgctggattaggatctgttcaatgatggggataagctcagttcttccagattttcatttacctatatgaagtggcttactctgtggtggagaaatgtgtgtatgtgcatatgatcgtgtacaccagtgttagaagcttagagctttaattttgtgtaggaacccatgaatttataagaaaagcacgatagacatgactttctttgttttcttttattaactttagatatgtccagctcagagaggtgtaaagtgcaatagccaacttgttggacaggcatacagacatatggtttatattgttttgtgtttcttcttggattaacttcttaatttttcgatttgcagctacaggacaaactatttcatcttgatc

SEQ ID NO: 112085 - DNA, 840 bp, Setaria italica
  Intron number 1 from transcript Si022198m (locus Si022196m .g) derived from phytozome v7.0 (chr-ID scaffold_3; pos 48 687097 to 48687936)
agcccgcccagttcagaagcggataaaatagtcaggttcttgtttcttctgtactttctctgtctatctctagttttcttttcttttatttttcccttgtcttttgagttccctgtacgttgttccatctgcacgagtcaaaatggatatgccattctatccgcaccggggcacgagtcaggccttgtttagttggcgaatttgggaggtgccaaattactgttacagcactgtagcacactgtagcgtttcgtttgtatttgtgaattattgtccaaatattgactaattaggctcaaaagattcgtctcgcaaagtacaacaaaactgtgcaattactttttaatttcatctacatttagtactccatgcatgtaccgcaagtttgatgtgatggggaatcttctttttgcatagtgtcaaagttggaagttgggagtaactaaacatggcctcaaaatggatgagcccacacatttttactgttcgttggttctgcttgctcctctctgttagtctcgtgctcatctctcctggtgcctcgctctccaggttcagagcttcaggtgctgcagagcaatacgcttgtagattattgtatataccagttctgcttctgcactcatgccctttgctttttcaaattcagttcctttgatccttgaaattcaattgctactatttgatcaattgaaaggggatggaagatcaccctgtctgcatgttcgatcactctgcgatgcgtatcaagtccgaaccctggttcctgcagctggaaatatgacggagttctcttgcccttctccttgcagcggtcgagcgcgcttcgtgttccgtggg

SEQ ID NO: 112086 - DNA, 697 bp, Setaria italica
  Intron number 1 from transcript Si013986m (locus Si013986m .g) derived from phytozome v7.0 (chr-ID scaffold_6; pos 34 070495 to 34071191)
ggccgtgctggggcacgacgagcttcagcaagcaggtacgtgtgcgtgcacgcatgtaacacgctagcttgttcgtaggttatccagtgctctcctatggccccgctgtctaatctctctgtcgtcgtctcttgcgcgtcgtgtaccacgatcctcttcttgtctagatcattcgcctccattccccgctatatgtcttgtcagaaggaaaaggtgcaaaaaccaaaagagacagaatttatttacagccttttgtaaggaaattggtcattaactagatatactacttaagttgcaaaaattattggcagatgagcaagaacaacgatacatgctactgcctctgttctgctatgtttgttcatgatcttgaagaagaaaaaatattgcacaatattttatccattttgagggtatcaaaagcatagttactgtaatatttcaacttagtacctagattaaatgccttagaaaaaagggattacaccatattatttaatacaagtattggtggccattttacaaagtgagctaaacctgtatggatctcttggaggcttgagcacacagattacagatgtctccttcaagaacagttccattcatgcggcttttatttttgtgataatacttaatatatatctcgaaacctttgacccctgcatgtacttaatcttgtggcccacaaaacagtctg

SEQ ID NO: 112087 - DNA, 148 bp, Setaria italica
  Intron number 4 from transcript Si009468m (locus Si009322m .g) derived from phytozome v7.0 (chr-ID scaffold_7; pos 29 959615 to 29959762 reverse strand)
gttaaacttgagcaactgtgcgtattttgattaattttgggcaccctgtagtccttaccttttcttctaccaaaccatgttaacattcttattcgtttatttctgtcttgcagatatattgacagctctggcttaagtggtccactac

SEQ ID NO: 112088 - DNA, 699 bp, Setaria italica
  Intron number 1 from transcript Si010535m (locus Si010535m .g) derived from phytozome v7.0 (chr-ID scaffold_7; pos 23 490356 to 23491054)
agcccacggaatactttcccgagaagaggaatctcgtgagtaggcttctggcttcatgatgacctgtctgggatgcgtccttcgatttgttagttatagattttggtatcctcgagtagcaagcgtggattcgtcctgatctgattagctcgcgaactgctccagttcagattgttgctcttgcggggtcagatttgcagttctttgattagttaaaaaactggggatgaatgttcctttctgccggcattgatgctcaaatgtggcatctcatagttatgtaggactagacttggttcggcaattgtattatcctcatctcactaggaaatcggaatgctctacgttggtgttacataattcgttatggattaaaattttcaaatctgtacgccttgtgctggagtctacattttattaggtcagcattttcttctgtccattgctagtgattgttacacataggtttgagaatcatgccagattagcaccaaagtttaaggtacattaaagatgatgactttagaaacattttcttgcatgtcggctcaaacaggatcatttttgcaaattaccgctatgatttagattgtgcttgcctgtcctgtatgccttgctattttacttcagggtgttttgactaatgatttgctgttctgttcaggaggatctgtggttatctgcttttcctgttggcac

SEQ ID NO: 112089 - DNA, 969 bp, Setaria italica
  Intron number 1 from transcript Si012782m (locus Si012782m .g) derived from phytozome v7.0 (chr-ID scaffold_7; pos 25 083584 to 25084552)
accaggacgctgccgtcgagctcggcgaggagctggtgcgtcttcttctttctcctcgtcatctcgttagacgacagttgcatcatctttcagctagctttcagctttcatcatgtgcctctgttaagctgaaatgcctttgcttttcctcctcctgatcaacggtaacatggatcctagtccgcgcgaagacatttaccgtgttttcgttctagctttgtggtagcaactctacgctgcgcttcaggccttcagtgcttgtttaaaagaagataaagtattaaattatacaagtatatgcattaaccgcttatgtaggtcgagctgtagagctgaattccagcagaaaaaccctatttccattttccagtaatgcatatatacatccgatcgagatacctcgctcggtactgcaaatatatgcactgaaactactgctcgccctttttatttgtatcagagacgatgagtttgaatttaaattttgcaggtttacacatgatacttttcgtgtattacaataagtaaatttcttttgatatatttgaaacactataccatgtgcttttcacaaatagggacccattctcctgcaccatattctcctcactcatataatattgatgctccactagctacttctttcccatgcatttgctgaatttatttcagttcctttgaaaatgatctcagtggttaccatcagcaagctcctccatgcatgcatgcattcactgaattttgagcaaattttggcgcttcacacattctcagtttcagtcattctccacctcatgacattgtacacagttgttgcaaacaaaataaacatgtacatagatcactgcattctacagtacgtagctacaagtatatagagtagaaatgcccatcaagttaactagttccattagaattgtttatcactagaattgccattgtaggtctcaaggaacattgatctggtct

SEQ ID NO: 112090 - DNA, 669 bp, Setaria italica
  Intron number 3 from transcript Si010192m (locus Si010192m .g) derived from phytozome v7.0 (chr-ID scaffold_7; pos 26 910862 to 26911530)
gtcaggtaaacattcatgcaaatccttaatttagatggtgtataagctgtcaataagtaaggtaaagaggtatatgatctcttttgtgcctcatggttgccatccttcttcagcattgatgcttcattgaatctgcactggcgtgtgcaaatgttgatagaaataattttgtgcttcatcattgccacccatcttcagcaccgatgtttatttgactctgcactggcatgcagaagcctgcagtatcagtagcttagtactcaattcaaatatgtggatcatatcattttggcctggcttttctttattggttagttcctagtagattgtagacgaactatcatttgtaaaaaaagtttataacaatgatcatttgtactgttgattgggcgcaacacttacgctgggttccatcatttaagagtattgtacggtcctgttcttctgtaccttttttccttctctaactgtattgcactatcaaattgctgttttttttacctttcactcagttattttgcttacgtatttattatatcgaagtaaatacctttgctatttaccataatgggagaggggacagagactgatgctactactagcatattactttctgataattgaatgaaattctcattgtcttgaaggctgaagtttctgcacctgcga

SEQ ID NO: 112091 - DNA, 705 bp, Setaria italica
  Intron number 3 from transcript Si009446m (locus Si009446m .g) derived from phytozome v7.0 (chr-ID scaffold_7; pos 33 577728 to 33578432)
tcgattgggtatgcctttttactttttttattcaagctgtttttccttttagaaattaccattatgtttatagttcttagttatgttgcttaaaaaaattcaaatgatccctgtgaattagatgtattacatcaattcttatgcctatacattttaaggctagtacattcgttctagtatccataaattttaacataaatcgattcttactatttggaccattatgatttgcatttcaagtacgttttattaagaaacagttaaattgatacattcaagttggtttccgtcattttctgtcacttcttctgccttttttcttttttgtgaactgtagtgtttaaattggaacattcttgtgccgtttgtaaacattgggcggttatattggagaaaagctgacacagagtctaatgtcaaaggatgacctaaattctgttatatttggcatatttgctaggtcctttgttgctttttttggaaaaaaaaacaacattagctggaaagaagagtggttatatgttttagaattattaattcgctatgtcgacatatgcctagaagtttgggaatggtggcagtggatgtagatatatgtgcttgagaagtttgaaactataacacttaatttctgtttgtaaagcggaatggtagtactgttcagtgttttatgttgttttaagccattcattattgtgcaggtta

SEQ ID NO: 112092 - DNA, 723 bp, Setaria italica
  Intron number 1 from transcript Si024889m (locus Si024889m .g) derived from phytozome v7.0 (chr-ID scaffold_3; pos 74 02653 to 7403375 reverse strand)
gacagcgaggatattgatcaccgccgccgcatcatgtgagctcctttctcaatctcacctagctccctctgatctctctccgagcggactatctctctcgtcgtacgcctcagctagctttcccttgctatcgggcattgttgtggtcgatttggggttgatctagctcctactgcgtagctagaccacttttcaatttattaaccccacttttcctggaatctgcgtgttcaaaattgaaataagatagctagaaaatgttcatatatgcacgcatcaaaaccgaattaaaggtagtgagaggttcgtaggcagcactgcatctagctagcagtcaattttggacaccatttcagattatcagattgttcagcagatgctaaattaaaggctttgaactgttcagttttctttttgtgtggaattaccgttcaattaggttgaatttcatagtagagaaggaagatatcagaggatgatggcgccgtaccctttaccccttctcgatctgatccgtgtctcttatattaaagttgaagaattctaatatacaatcaacaatttttgcttgcacctacctaataattaaatcttcttatttgatctttccttcccctttcttgatctttctggtgtcaagtttcttcggactgtgtttagcttctaacaccaaattaaacgagtaactgacatattatccatgcttcaacacatgaagccaac

SEQ ID NO: 112093 - DNA, 809 bp, Setaria italica
  Intron number 1 from transcript Si021709m (locus Si021709m .g) derived from phytozome v7.0 (chr-ID scaffold_3; pos 18 105196 to 18106004 reverse strand)
acgggtggtccagctccttcgtcggcatcgtccaggtaagcgcagctgaatcccccagcacttgcttgatgcttcgttccccctcctttttcctctgtgcattgacgaaaagtagaagcaaagcgaaggaccccttttctcagaaattaagcaacaaattcgctgctctgtaatgaagaacaaaatgtcccgaacgatcagttcatagaacaaaaaaggtcaactctgcatcgacacgtcagtgccagacgcgatgagaaaacgactgaagcattacattttagaagaagcacgtggaactgcaacgatgggagacggtcggtcttccagcctcttatggactacagtcttgccgtgtgccggcccagagcagctccaagttaccaacatgtcaccagaacacgaccaatttgagaatggaagtttatgtgtttgctttctcaattgaccacgagccatgacaatgattatagttagcctgtatttgactgcagagcacaaatcggtaaagtgaaggttagtttccttggacagtcaatcacatagatatgctatcaaaagtctcctgatatcgacaggattcgaattggataattggactagttcagatgtccttgctattggtgtcttgttttacctggtgatagggaccaggaggattacactgggggaaaaaatcagtaactagaaacacccaactcaaaactccatgtggtgtatgccctgatgctcgataagcttgttatcttgctactaggctggttgaatctgatgttagtatcatcaccatttctgcagtcatcattttt

SEQ ID NO: 112094 - DNA, 490 bp, Setaria italica
  Intron number 3 from transcript Si010734m (locus Si010557m .g) derived from phytozome v7.0 (chr-ID scaffold_7; pos 32 853414 to 32853903)
catatcgctgctaccctgcatctttcattgacaaggtttgtaaatcttcttcagatgaggtgccatattttctatttgaatatagtaatatatgttttccacttgatcatctacccagtttcaagggacatatgactaatgagatagttgcttgttatgagatactgtaatcaattcttttattccattctgtgtttcttttgtcctcctttgcatatgaatcatattccatatgttgggttctaatgcctattttcattcaattgttgaatgaggaacttatctttccttaatcaacatgacttttgaattgaatcaagtaaaatatatttaaactatcattaactgggccagtaaattctatcagcatctattgctagaataattacaacctttcaatataacatttttggtttgcttttttgcaatttattgtaatagatctctgttactgtttttgcagccacaacttgaggctggtgacaaaagt

SEQ ID NO: 112095 - DNA, 618 bp, Setaria italica
  Intron number 2 from transcript Si023132m (locus Si023132m .g) derived from phytozome v7.0 (chr-ID scaffold_3; pos 24 795848 to 24796465 reverse strand)
tggtggaggctgtgtgttaactctaataccaacccgtatccttttcatatcccctgattgcatcttttccttcattgtttgatatgatataaacaccatactacttatatatgatttctgtttatctttaacatctcaattcaaagcttccagaaatctgggtcttgatattcactaataaagaatctgacaggagagaaacttcagaactacaatggcctgtcttttgaaaagcaaaatgctcagtacttaataacatataaccatgtaaaatgattctggtttgcatcccatctaatctagatgaattttaatggactaaatctatcaacatggaaggacaaggactgtagcagcttaaatttctaattatctttttgttttcagatctgagtttctaatttgtacctgcttagctatgcataggctatggcattgacttttactggtttagtcatggcacttctttgcgctttcatttttctgcatacgcagtcaataatgtttgaacttcatggatctttgaattttgtgtttgttgtcccttcaatgatgcacaaagcttccttgacatgattatcagtatcagccagcatagttttggagaaagttgccaca

SEQ ID NO: 112096 - DNA, 837 bp, Setaria italica
  Intron number 3 from transcript Si021810m (locus Si021811m .g) derived from phytozome v7.0 (chr-ID scaffold_3; pos 10 077540 to 10078376 reverse strand)
caagtcagggcagtcaagcacttacaaggagaacggtttgtctcttatagccattctcccagcacgctaattatttttctttctaaatttactgtgagtgttttgcatttgtcatatgttttttttccaaccggtgcctcatgttacacaccattatgtcatgttaaaatctttcttggtaagaaggaagaaacacctttgttgttgaagagatgttaagatgtatgtggatggaaaactatagatatctaatggtggggatcataagttgaattcttagactggagatccgagctaggagattaggtccaagccatcatatctagaccaacggatagttggaaattgaatgtcaaattttctctgttgactaagagcacaaattttctttttggttttgatgctaagatgtattgctgataatttaaagttcaaactctgttcacttccaacctgaagaggtctactacctgcggcaacgtcaaaacaaaatcggtggtagctgatgtagatgttctgcaaattggtgtatgtgtagcgacgtgtagccaggattcaggaatgacaccgatgtttcccagtagctgtctttgctgagcttgattgtctcttaaagttggtatatatatagcttcagcgcgtgtgactctactccagtactcacgttttttttaagtatggaaaaatccatttcttcttcgaatgtttatggcctaggaaaaggcaccaagaatccagctctgtatattgggcctttatgtatcttttctgtttgcttcctgacaattgacctgttatcttgttttatctcaccaggaaaacctgctgccattcact

SEQ ID NO: 112097 - DNA, 765 bp, Setaria italica
  Intron number 3 from transcript Si024412m (locus Si024412m .g) derived from phytozome v7.0 (chr-ID scaffold_3; pos 66 82972 to 6683736 reverse strand)
ccagcgatcgggaggctcagatctctgacatatctgtaagtctcggtctagaactattttctctgttgttagacctgtctggaacatatgaattttagggtattctgaggagcatgcagttctattctagcgaattccctgtttgcaagtttaacacaatcgttatcatttcgtcgcaagcacttcgaattgctgctgtgatttgtgggcagaaggatagatgtttctgcgatggattgatatgaggagtttgctttcaaattgtggcaggtctttgcgccaaaatgctatttctggcccgatccctgagaccataggaaggatgaagctgctgcaagtacttgacctgtcaagcaatcagttcagtggaagcatcccgagtacactgagtaatctggagaatctccagcacctgtaagactactctttcctggttaccaacattcaaacatctacatcgcagttatgcactgtttttttttaatctgaacattgacagtcacatgatgttttatctggattgcctctttcatccaggaaattaaacaataacagcttatctggacccgtgcctgattcactagccactgctcgcatgatcttcaccctgtacttgctcttgccaatcatccttctgccattgctgcagtgttctttaaatatgttcagttggcattgcgagttttacgtattccacatttctaagaaaaagaagttacctattgtacagggatatttccttcaacaacctgagtggtccacgac

SEQ ID NO: 112098 - DNA, 798 bp, Setaria italica
  Intron number 3 from transcript Si023476m (locus Si023476m .g) derived from phytozome v7.0 (chr-ID scaffold_3; pos 11 843583 to 11844380)
aagatactttggaagtggcagaggtctgtataatcagcctgttcgtttcagtttatcagctggcttatcagccaccgaacagtgtttttctctcacaacaaatcagccgtttcagcttttcagccggtttataagtccagccgaacaggccggttaatctttggttgaaatcgtcagacaaaaatataagagttggttttgcccctttttgaccttttaaatgggtagagttggaattgtacatgctttaagaagcatgataccagagttgcaattgtgtcaatatttgatagctactcgcgctcaggttcaaacccgggtgcatgtaggtcatggagtaccttccaaaaggtttcagtaccccactctctgacactacatttaataagcgtgataccagagctaacgggtttggcaattttgttggatcccttttaattagagttgactgtgaatcaaactaactaatgcggatatcaacatagtagctagatgctagaaatacccttcgacgatttttgcagtaatagaggtcataacaattttgtgacctgtgcttcttctgccttatatggagcagttacgtaagagtacataaaaactgatatgtggtcatagtgttttagtatcaacgtgctgttgaatttttcctcgcaaagaaaaaaaaccaaaacatgctgttgaatttttctcctagaaagaaacctttaccaaaaacgaatcatgtatgtaatcatagttcacccctcttcaccctatgcagagacacggcaggagggttctgacggacattcagga

SEQ ID NO: 112099 - DNA, 1024 bp, Setaria italica
  Intron number 1 from transcript Si009795m (locus Si009795m .g) derived from phytozome v7.0 (chr-ID scaffold_7; pos 33 652638 to 33653661 reverse strand)
aagcttgtcgcccatttcgggcggcttccgcacaggtgatccattagctcggcctgctttcagctgccacatcttaggtttgctgtggtttagagctcgtggttgtggaaatccgtgcccattgtttcgatcaaggaaggtagcgtggtcgtttgggcttgggcttttatgtgggcatcgcgaagcttagcggtgagcttcgtcgttaatttgtagcatgtttgaccaattgacctttgagttagctcctactggtgctcgataagctaagggagtgttgtttgactcggccatggaattggagttgactcggtactgtttgcttggggactggatggaattgcactacttttatgtcggatggtgcctagcagctgtgtcttgttcaattttgatctagtgtgttctgggattaagctaaggttggaaatgaatggagtgaacaggtttattaatttcactagcagggtgggctcattctgttccaaaaaggaaagctttgatcctttgcctgaattagtgtttcacttgctgcttgctgattttgattgaatgattgttcttctgggaatctgggtgtcttttttttaagaaaaagaaaattttggattgagttgaggcataattggctgagttttgtgctagttgaaagcatctattttagatctatggaagcaaaacgttctggaattagcaaatattcttaaaatggctagattccagagagcagcatggcactacaattgcaaactagcctttagtcttgttgtttacctttgtattgagcacagtattcagaaactggtcccttagtcttgtagtttaccttgtattcttcgcttgtggggtacttcacttttatgatagtcatatctgcaaaggaagctggtagctgcagtcactatttttggattagcattgctaggccaatcaattaattctttcattgtcttatttgtataatcctaaactaacattgtctcttcttttgttttctcatgctgcagctatcagctggatatca

SEQ ID NO: 112100 - DNA, 970 bp, Setaria italica
  Intron number 2 from transcript Si024801m (locus Si024801m .g) derived from phytozome v7.0 (chr-ID scaffold_3; pos 43 218748 to 43219717)
cggtgacggccagcgtctcccagatcggtgtcacggtgagttcatctccgacgcatccttgcaagaatttctagtgtttcctgttcgatttgcaaatctggtaataattgacctgtgcccaacttgggtgtgcctgattccctccttaaactggcaaactgaacccctgtttcacaaacccatagcacgtcccaaaatctgtatcacaaaactatccaccaaagactgtctttattgtcccccttttttgcaacttgtagcagtgttttcctctgcacatatgttattctctttctaacattttgtgtgccctgatttgatttgtcctgcaattttgcagctcgatcgcaccttgcgcaagtatgttgaggtgttttctaggtaaggacttttcctgcccgctctaagcttatctccctttcttacaatgctacagtctgttttttttttattcagctgcaaaagaaaaggcttctatctcgtagattagtactatggccactggccagcgcaaatattgcgtttaggaaatttttttttgtgagagcgcatctctttctgtgtaggtcctaatagcagccctgctcaagagacacttcttggatcaatttggtaggtgagacatgagtgccagtaaaaaatttgtgattaactaggattaagttcatttagttgtatttgtgtttcatacgttgtatacttcctatgtttcatttgtgcactttttcccttatgaaatatctctaatcgttctctcctacaaaaaggtttcaatttgtttttgccaggaacgacttcctgcaattctcattaataccgatccagttttccatcaaagtaaatttggttgctaattgctatatatttttttgaacataatctgagttttgtcttctccttgttttctttgaatcagcaagctggacagcttccagaggcaggttgacggcaaactgaaagctttccaagg

SEQ ID NO: 112101 - DNA, 928 bp, Setaria italica
  Intron number 2 from transcript Si021593m (locus Si021593m .g) derived from phytozome v7.0 (chr-ID scaffold_3; pos 15 498277 to 15499204)
actggtgattctcaacttacttgcttgctctcttccctatctaatgtttctagcttttttttaaaaaaaaacaaggtgtgcgtgtgtatgtatatgtgtgtttatgatctctgcattgtgttgactgaagaggggattaatgcagtacaagggctgtattcacccctggattgacttgaaattggcctgccttgaggatggtttgtacggatcactgctttgaatgagttgaagcctcttcatattaactagtgagggggagtagattggcctgctttcgtgttgaaaggattgctgtttgaatgattgaggaagcttgatccttggagagcaccgtttcaccatcatgtcggtttttaggtgttgattgactgattttttgcgattgatgtgatctttctagctaaagatgactttggtggcagtggtggttgttgggaggaaatgtgtcgctgtgcaaagcaaagttgaaacactagatatgcaagtgagctgattgtcctgtgtggactcttcccttggaaggccaaccttgagattgttaattggcattcaacacatgttcacacagtaacttgcatggaagaagtgcagtgggaaagagtgaaatatatttaggagtatcttattgttggtgaggtccgtctgaggcatttgataaaggtcaatttgagatattagcatgagaatgctgtaaaaggagggccagttgttgctggtccaatataccatttcatgatatttgatcttttgacggtgcataatgaccatcgatttgtttgggttttcttttatgcaaagagcttgtaattggttgtctattttatccattttatacgtatcatcatattttttctactctaacttaatgtactttgtgctgtactccttaggcttctaactccgcctgggaccccacgtgttcctg

SEQ ID NO: 112102 - DNA, 847 bp, Setaria italica
  Intron number 2 from transcript Si008287m (locus Si008287m .g) derived from phytozome v7.0 (chr-ID scaffold_4; pos 51 16979 to 5117825)
gctgagaagctcaggcgatatttacaagacaaaaggtactccggctgtttttgttatatttctccccctagtagtgagctgtcatacgttttctgttgcgttaaagaatcaactgattggtgtattcttctgaaaagttgaacacaaataaatgaataatggcgtaccttttgagggtaaacttactctaattttctgtaatgaaaacattgttgagcaatgacctatgcattgattcctatgctcttacatatatatacttgtacctggtttgatttggaaagtcaactgcggcggtgccaccttgttcctctgttgcctgttgctgatatcactttttaattgcagactggctgatatcacgttcagctagctgttagctaaagtgtaaaaagatgtgatgtaaaatcatgtattatctggcaaaaaatgattatagtttttaattttcaattagggtgtgtaagatcattagtttctcccccttatcattctttaaatcaagtctcagctacatataatagtttggaatattggattcagatgtgaaccatgaaaatcagatatagatgtgatggacaaatgatgtgtaagttcaatatgctccctttaattgcttatgagttggaaggtccgctatctagaacaaggtagataagtagtagccagatattccatggttcacatctgaatccaatattccaaactattgtatgtagcatgcaactcaataataaattttttttgttaggcaaaaaaaattaatttcaactttgttgaatattcctagcttgtcaagttctgttaacctcctattctttgtcttacaggtacattattgccctta

SEQ ID NO: 112103 - DNA, 972 bp, Setaria italica
  Intron number 3 from transcript Si010976m (locus Si010973m .g) derived from phytozome v7.0 (chr-ID scaffold_7; pos 26 092240 to 26093211)
gagtcattgctgaccagaattcctccaaagtcaatgtatgttctgttggtactacttctgtaattatgtgatactgaagatgggtggagtgctagcaatgatgccatgtttctttttctcaagtctgatacttagcaatgacacatatatctattgaatattagaaaacttgtttatacctttgatcagttctgtcaattccatgcttgacatctttttagaatcaaagttttaacaatggtgctataaatgaagggtgatgatgttaacagtagcttactactccccccgtcccaaattgtaggtcattttggcttttctagattcatagatattattatgcatgtagacataagctatatctaagtgcataacaaaatctatgaatctaaaaaagccaaaacgacctataatttgggacagaggaagtagcttataatctttatattatccattcacaacttgtgctttaaatatgtggtgggagaccagatatgcaatttgtacatgaatgatcgatcactaaactatgccacaaataagtgaaccgataaatataactgttgaagtgttacattttgggcatgaagcttgctatgcaagacactactaaaattgaattatttggcatatgcactatgtacaattgcacattgctatagtatagatcaattatcacggaagagagtaccatattggttatgtacatgagtttcctgtttatgaggaaaacatgatctttttactctgcttattcctatgacagtgtggacaatatttttataaatacaagttttgtctgtacatcgtgagggagaattcattataggatatccatgtcactaaaggatattatttccttaacaaagaatttcataaatcaatgtctagacaggcctgatcagaattatgcgtactatcaaaagttcccactttaaatttgtttttgacttttgcagcactgacaaggaa

SEQ ID NO: 112104 - DNA, 621 bp, Setaria italica
  Intron number 2 from transcript Si010814m (locus Si010814m .g) derived from phytozome v7.0 (chr-ID scaffold_7; pos 24 935374 to 24935994 reverse strand)
agcagctcggcaacaggtactgcttctgctcactcaccaattctgtctgcctccttttttcccccttcctcatcatattctttccatttctcgcattgctctgttttttctagtttttgctaaattggaggagcaatgattgttgcttccagcaaaaagaggaggaaaaaaaaagattattcttcgtcttcctcttgctgccgtggggcatgatgacaatacaatacattatcgtcaggggccactcctcgaggccgacgagaaagaaaatccaagtgtgctagccacttggtcactagttaatttcgcgtcactgatgatgcgcgagatctgccggagccatctcctttggccgttctcgtcggcgaccaacagtgtagccgcctgcagcatagatttcagcgcagtaaaaaaaacatgcactttggttttaaacaacggcgtgcgattcccgtagtggggaatcaaatcacgcacgcagcagattgatagatagcgtagagcatgtcatctcgtggattaatcaaatcattttcgtcaaagcaaagcggcgcgctgatgagctctggattgtttttggtcacaggtggtccgcgatcgccgccaggctgccggggagga

SEQ ID NO: 112105 - DNA, 725 bp, Setaria italica
  Intron number 3 from transcript Si023067m (locus Si023067m .g) derived from phytozome v7.0 (chr-ID scaffold_3; pos 49 22138 to 4922862 reverse strand)
caccaagagagaaaaaggtaggcaacttctgaagagattgctgaatcttaaaacttctgagattactgaatgctaagtttctcttgttactttcactatcatacgataatttgcttgctgaaacaaaatcttgggcaactatgacaagccaaatacacaagtatctgctgcgtaggaagtaaaaaagaaaaaagccccttttcaggacggtcaaagctttgccatagtattactagaaaaagaggattggccagtttttaagggaaaattgggccccaaaaccatacaacttttggagattgaacccccaacaactacagggacaaacttgctaatgaaaaaaagagcacctacttagtagaaccactaaatttaatgaaactggtgttactacttcgcatcttttcagaaaagtagtgttacttattcttgtgtcctttgactccgtttaagcaaaagggcaggatcacttgcctaatatattaaacaagttccttattcttgtccaacacatgtaagacagaacataatatctgcactatgatttttttaaatgaaatgaaatgcaattagctaatgcatcagtacgtttgacccaggcagcagacatatgaatgattatttgaagtcttaatacatgcgatcatgtgggcttaaaaagtttgagttatatatgcacaagctgatcaatgattctctttaccttgcagaagtttgtagtgcta

SEQ ID NO: 112106 - DNA, 807 bp, Setaria italica
  Intron number 1 from transcript Si006076m (locus Si006076m .g) derived from phytozome v7.0 (chr-ID scaffold_4; pos 22 3296 to 224102 reverse strand)
cgatcctccaagtcgctgctgcctgcacagtcgaggtacctatttctttcttcctttttcctttcccctccatcgaaaactagccacaaacggaatcccttccaagaaggtaccgtacgtatcccccgctagactcatcggctgttcattcagaatagtatgagatcatcgacccacatacgtgagacctttaccccctcctccttgaaaaaagatgatattttttttccttttagcctgcgtcggttcttgcaatgttggcgaccggatgagcgagttcaggagagagaaacctttgatttctctgggtgggttttccactcatccagtgcccaaactgtgaggattttgtacctgctctgcaatgccagctctttcctttcctttctctcagcagggctgcttactttgcctgcaaaaccgcagactttcttactcttgccctgcccacttcatacctgtaattattacggtgcgcactcaaggactacaccgggggccggggggtttgcttttgctttgcatctttgcatctgctctgcaatttagtatttacaaaagaaagactgtaagaggatgacaatgaggtcggcactgcctttctctactctctgctgccggcattctcctttaagaatagggtacgcactggccttctttcttatgtactgtgaggtttgccggatcacccctttcacagccgagctagtaaagttagttgccagttttgccttcttctagttagggcttagctttcctcttcactcagttgactaatttaccacctcttcatttctcgcagctcaa

SEQ ID NO: 112107 - DNA, 1022 bp, Setaria italica
  Intron number 2 from transcript Si010392m (locus Si010392m .g) derived from phytozome v7.0 (chr-ID scaffold_7; pos 21 022227 to 21023248 reverse strand)
gggaaattcgatctttcccacaggtatgccctcttctttggttggaccaatcccaatttcctaatccccaatcagcaattggtgcgtgattagctccccaagaagtgattcgttgggaatcctctgtccatgcgagttgcgcaagagggggtttcatgtgggcgtcaaagcggcaatactaggtagcggcgtagcgctgctttctccctaacaattaggaagatgacagccatgaccggcacaagaacgtagttctcccgttaatgttgtgattttcttcgattttattatttggatgccgtccgctgttcatagggagagtaggttctccaatccaatcatgaatcgcgtttttgcaagttgagggtggggttgctttcctgtacgcagaatcgatatatgggtcccgaatgtgtgtcatcatgttgaattgtttcggaatagagttattttgtgacaaatcgagtccaccttattcttatttcttttgagaaaaagaaaaggaacgcagggggatcttccagggaactgcacttacaggtactcatctacactgcctggaacctatgggaggaacgctaccgtcgggtcttcgacaataaaacactgaactcaggacaactacttgacatcatcaagcaggacatcatcgcctatcgggttgctaactctaatgtggctgcaaacgacacaggcaattgaggccgtcaatgtaaagtgcacatgatcctctatggattcatgatgctattagagttgttgatttcctttcagtagttttgcttttcttctagttcaccctggtcaactgctaggactgtacataacaccatgcttctctactataatgataaggcagagcacctgccgtaattgtccaaaaaaaataaaaagaaaaggtacattgaatctggaagtgtgacgtgtgtatcagcaattttgaaagattaatttggtcctaagaatttcctttttctttgtttctagggtggttctcgcaccactgacaaggcagcggtcct

SEQ ID NO: 112108 - DNA, 450 bp, Setaria italica
  Intron number 4 from transcript Si022349m (locus Si022349m .g) derived from phytozome v7.0 (chr-ID scaffold_3; pos 90 91540 to 9091989)
cacaaaaaacatcgtgcttgtgctggatttgggtaagctgacttatcattctgcaaaccttcaagttagaaagatttcctgtctcataatttttccttttggtgggagattgtccaatgatttttggttaatttgcattcaatcttttctttttcgttttcttttaaacatttttgagctagagaagtagagattaggatatagctttatgtttaatatctgaccgcattctctttgacaaaataacgcccatttcagcagcttattatctgtcccctcactagcaaaaattttgtgtcctaaaaaaaggttctccagaatccggctctgatctcagcatttttagtttgccagctaatcattttttgtttttggctacagctgtgtgatagtctaaactatttcttctttgcagaaacccttgttcattcaaagctacaaccctgtgat

SEQ ID NO: 112109 - DNA, 578 bp, Setaria italica
  Intron number 2 from transcript Si010195m (locus Si010195m .g) derived from phytozome v7.0 (chr-ID scaffold_7; pos 32 882856 to 32883433)
ggcagacaaaagtcctgtcaccgtggccgattgtacatgctgatcctgcaaatgtatatctgcaagtgcctgaattttctgtttagtaatgaattgttaatgctattgcattaatgcataagactccaaaacttaagctgatgacacaataaaagggaaattcacttatacttcaacactaaccctcacaggcaggctcccttagatctacatggaataaggtttggcggtaatttttatatggattgtggtagctaggactccaaagtaacaaggaaaggcacttagcacctctggcacgcactaaccaattcactctaaaagctcaagtaatgaggaaagggcttgtaattcaatatttggcagtactaaaatcaaatttggagttagttttgtagctttttaatgtttgcacagatgttttttagtgagaaatggttagagagagagaatgcttggaataatatgttggtcatcttaatatgtgaaactcgttctttcttcaaacttgctgttaactcgttacattttttttcactcatgtagggtctcaaatattggtcagtcttgccttgacg

SEQ ID NO: 112110 - DNA, 856 bp, Setaria italica
  Intron number 1 from transcript Si021597m (locus Si021318m .g) derived from phytozome v7.0 (chr-ID scaffold_3; pos 33 05747 to 3306602 reverse strand)
tgccgcgtcgtgaccgcaccactgaaggtgagcattccataatttgcttgctcacagctgcatttggtcatatatgaagaagttgggaagcttaaattggtttccaaaataagatatgtatttaggctggtataattactttgatcataaatctttacatggtggtccaaattattaagtgtactgcctgtagcactaattactaattccgtagaatacatcaaaactatgtaatccaaattcaatgcctatctgcatattgtccatgtgatttcttgctaggtgatttacacatgcaatcctcagatgtatgatcacttgatgtttaattatagataatagtaactagaaattaacagaagatagactaatagagcttgttggtcgtggattttctgattcttacatcttttcttggaactggggcgttttagccatttcaatatgcttgatctctactgctgcatttaaacatcatgactgtgctactgaggcggttgaaactgcgctttgaagaacatctacatttctttaggatccacaactttgctgcagggattcctactattttttctttggaaacttgcactctagaaacaaaatcagggttctgaaagtattatgggttggtctatggttttgtacaataatttcatagtcactggtgactggtgtaacaatgtctacaagagtaacggtagttttatttgcaggcacatttctgtacatgaaaggatgcttaactccattcttgccctttgttcggcctgtattaactttcgaacaattgaagaaacagtgagcttgtgttctgttttcagggcaaaagccagctaagaagaacaaagttgctgga

SEQ ID NO: 112111 - DNA, 1006 bp, Setaria italica
  Intron number 4 from transcript Si022917m (locus Si022917m .g) derived from phytozome v7.0 (chr-ID scaffold_3; pos 45 27667 to 4528672)
aggaatttgcgcttgcaatcaaggaatttgaaaaggtttgtcgttcgtcccttgtacgcctcatgtcaattctcaacaagttcctttgtgtattcattcgtttccttgctgctggccttattatggttaaaaatagtgtccaaatttattaaattgtcaggctgggtcttcttttcgataagtcatccaaatccaaacctgacatgttcatgtatttttgtccgtggcaggggcccatgcccccgcatgtaactttccgtaaaaaacaaaatttaactacattttgaaaatttagacactgttggctccccctagcaatgaaaatttcgcgtttcgggctccacccctggtttttgtgaatctttccatgattacatcttgcccctgagacaccaactgcatgcaataacttccatttatgataaataaaactcccaattactaccataacatattaaaaatggttctgatgattaactaccataatggttctagacttgtacaaatatgtgtttttttcatgcatctaagttataccataactatacctcttcattaactcacatttgtcaacagctatatgttgtgttttgcccatctcttttgttattggtaacgatcatcgcatgaaattgaggactctttataaccttgtaactgcaccttgttggtcactctgccttctgaactttgagaagtggtacagtgatgcaaatgtgtgaaaagtaatagtaatatcatcctgggtgcctctccccatgaacttccactgatttaggagctgtaccaacctttcacactactaaggctatcatgctaaggctatgtcttcatacttcacctgcatgtcactgcacactatagctatgtatattcatatcctgctgtggtaccttgttttgattcaggatgttgatgtcttgtcctgccatagtattgctaatctctcgtccatcttattttggagacaggctctgaatctcttgaagtctgcgaattcaacgga

SEQ ID NO: 112112 - DNA, 855 bp, Setaria italica
  Intron number 2 from transcript Si022699m (locus Si022021m .g) derived from phytozome v7.0 (chr-ID scaffold_3; pos 38 25152 to 3826006 reverse strand)
cacttgcagcaacagggcgaactgatcaagtgtaaggcactctgctttgcagtatttatttgctcaaacagtttgaatgctgcaacagttgacattgaaccatggtatcacttgttccatgccatttatggcctttgaccgcacttagcataatgattcgaagtattttaccaaatcagatacaaagtagttaaacatattaaccaaggcgtaacagacattccatgagttatgcttgttctttgtgctttgttttgtaaagtttcatccaatttgctaactgctataggatgaatatacatggagatgcatgatttctttgaggaaaaaaaagattaaagcatcaaacagttagctataagttgtgaaagatatgtgagtattggcctcacaaatttgaaggcttacagtaatgcaacttgctggtagtctcatgttgatacatccaagttggagtctttagactctaggatgcatggttgccgggtaggattgacaattgtattattctgaagatgtttgcagaagacacttattccatcagtgcctaggttatctctttagcatgtagcagtttttttttcccagagacgcaggagggatgcgtatcattttgcattaatgagaagaagattttagaatacaacccccccccccccacccccaccccacacacacacgtgcttcttagatgtacatacacaccagtgaaaaatagaaagcatgtgacagttttgcttaagagattacattgcgattattaagagttttttttattaaagtttatcctccttccgatttacccatttacttgcttgcatgagaaaccaataacaataatttgttttgatagtt

SEQ ID NO: 112113 - DNA, 829 bp, Setaria italica
  Intron number 1 from transcript Si010994m (locus Si010993m .g) derived from phytozome v7.0 (chr-ID scaffold_7; pos 24 572899 to 24573727 reverse strand)
gactccctctcctccgctcttcgtcaggtactctctctaccagccagtactgttgtctagtccatccttgcataatctaccgggcaccgttgattcagcggaacaccttgactccaccgaagtactacttactaatcggtcggtttaaccagaaaggaagtccgttgcttgattaatttgaacaatgttgcctaactctttcagcagaacaatgtttctggcccaattctagagcaaaaactcatgatattgtagtaacataacttgaggagaatggattcagaggtttgtttgtttcctttttttggataaagagaggtgtgggattggtagagatgcaccattgtaatcttgtagatgaatattgccaaatccttgagtagaacattagcaatagtttaatgatgtttcgggaagaccattataacttcagcggtgggaacttgagataggattcagagcctatcaaaactttgtaaatggtgtgaatttggagtgctctatactcttttttttcagttaccactcacactgcgttatgttgtaatgttcgctgtattttgtagtctgtccttaattgtagcgccctcacactgatctagatccagacacttgcatttttatcaacaaccttcaaaagctagtcccttcagtagctgttcaacatgcagtgaccatgtgatgccccttcatactgtcaatttttgacttatagattgagatgcggtgaagtcatcatttcctgtttcagtactgatagcataaaagtaaacatgaatattttttgttcctaggggtggctcgatctggcaagtgctcgccattctat

SEQ ID NO: 112114 - DNA, 602 bp, Setaria italica
  Intron number 1 from transcript Si009231m (locus Si009231m .g) derived from phytozome v7.0 (chr-ID scaffold_7; pos 35 742152 to 35742753)
cgtctctggactacagggactcggcgctgagatcggtatgtctggcctccagggacggagaaacttgattgaccttttttgctcctgctcatcataataaattaagtagatacagtgctaaactgtgagatagtccttgctcgatctgatcttgcaaatcaaaatattccttgtgttaccatccaaaagttgatcctttccttgggatttaatttagttcatctccatcaggacatgccttgattgctcatctcactgatttagttccatgattgtttaaacacttcaacatcacctgaacttgtacaacagtaagctctaaaaagaggagcaattgtcttctaataagactctatactacgggcactccaatttatgtttcgatcttcaaaccatcaatttttaacttattttccctaatttttcatcctgaagctgccagttcttatattgtgtatagcgttcggtacatcttgtttagcttgtgaattttatactgtttgtgagaattcagattattcagttttataaggcctttgccttatctcctgttcttaactcctgcagcaaagaaccttgtccttgcgggtgtcaagtctgta

SEQ ID NO: 112115 - DNA, 524 bp, Setaria italica
  Intron number 2 from transcript Si009371m (locus Si009371m .g) derived from phytozome v7.0 (chr-ID scaffold_7; pos 27 423736 to 27424259)
ctcggtcaagttcatattattggggaagggtatggatatctggttatatatgcctgacattttatcttgatatttcaattggaccggcgatacgggcacgttaatgttatattcagtcttgataagacccttttccaccctgatggctgcactggtaattcacagtaggatttatttagctccgtaaaggttcaatcaccaatcgccatgcttcctgtgtgtctgtttctcttatctcaagaaaaccttcagtttaacactgtcctaaaatcctatgagtttgttcattgctgagaatacatttttcctgaaaaaaaaggtagaacatggtttctccattttgtttagctagcttgatactttgatttgactaatatcttttcatttataaaccatgtttgtgttattgcttttgactctgtttcttttgcaagtgcttcttggctttccattaatatacagtgtaaaacatatgttctctggtttcagcatcataggagaagctctaataagcggtgagtgtc

SEQ ID NO: 112116 - DNA, 948 bp, Setaria italica
  Intron number 1 from transcript Si009849m (locus Si009849m .g) derived from phytozome v7.0 (chr-ID scaffold_7; pos 32 533573 to 32534520)
cgtggagcccttcttcgacgagcagcatccaacgggtatgcctttcccttcccttccctttccttcctgctgtgcgaaaccgatcaccccaaaccaggccagatccaggcgtccttcggccatgaaaaatcctcttttccttttgttctctttcgttgctggcgaccgcccgcgcgtcatgagtagttgcaatcttctagatccgggctcctctgccaattttctccgtgtactcttctagatccgggctgcctctgccaattttctccgtgtactcttctagatccgggctgcctctgccatttctccgtgtactcttctagatccgggctgcctctggcaattttctcgtaggctcggatgcgatgcttccacttgatgttccggcctatttgcaatgtgctaccgtgaatgctatctcaggctattgttggttcgggtgactctagtcccttttttgctctttttttctctctacctgatcttgaacgatgtgatgtctattctatactggtatcggtatgcctattgcgtacagtggtaataaataagcctgtgattatgttttaataatgcatttgagccgaatagcctgcaaagaatggttggctgagcacctctgttgtttgtttgtttgtccatgttgttaggcgtcaaaacttaaaatccttatggtcctctatatattttactctgtatatcatgtgagacctttgatccacaccctgtttgttgttgatgttttttgcgaaacatattatagtataagtggcatatttgactgagattgcatcacaggatcaaaataaatagttttaaacggctgcaattgccccttcttatttttttctcatcacattttatattcttttgtggttacttttctgattgggtaattgttttcctgtggcaggtgcataatttgtgggcttgtttttttacaattcc

SEQ ID NO: 112117 - DNA, 474 bp, Setaria italica
  Intron number 4 from transcript Si009849m (locus Si009849m .g) derived from phytozome v7.0 (chr-ID scaffold_7; pos 32 535269 to 32535742)
aagatttggacactttgaggctgctctccaagctcgtatcctaatttcaactatattaatcttctgtttttttttggttttaccttatttatatgatcctatttaatctatgactttaaattgaaccttgttttttttgggtgggtgtgtgtgtgtgggaggggggttcataatgatacatacaaggtaaccatactggatattcttgtggagagaatggaagctataagtttacgttgcatccaagctaattggggttttacgtgttactgagggaaaaacctgaaaagcagcaagcactagttacttgggtatctatgcagaacttttaccaatatgaatctcgttttgagagctgtgcatatatctactctttttatgctgctattatgtggtgtgtgctttcacagcaatagtcaaatactgtggtctccttaacttatggaaaggtgcctgaatactccccttccctca

SEQ ID NO: 112118 - DNA, 387 bp, Setaria italica
  Intron number 1 from transcript Si009458m (locus Si009458m .g) derived from phytozome v7.0 (chr-ID scaffold_7; pos 24 636245 to 24636631 reverse strand)
tcgtctccgtctccgcctaccccgcctcccgcccggtagctatcgcttctctttcctgtttgggctattgcttcattgcttgtgctgatgctagcggaagacaaggacttccccaatttgggagttaagtttttgctaaacttagcaaattggtcctcatttctctctcagtagactggctgtttggtatttcttgcttgttccaggaaaaaagaatgcgatggtctaattttctgtttgagttttgatatgaaacttactatgagatcactgttgcactaattttagtaacttgttgagactcacttttcttagtaaaaaggggctcattaaaacacaacgtgttattcaatgtcaggctactgagcattggccagcaaaggagag

SEQ ID NO: 112119 - DNA, 871 bp, Setaria italica
  Intron number 1 from transcript Si014203m (locus Si014074m .g) derived from phytozome v7.0 (chr-ID scaffold_6; pos 34 823769 to 34824639)
gccgccgctcaagcgcgcgcgccccgacttcggaggttcgttgcccctcctctcttttactcgacgaccacctagatctgcccttttagttatctgatggctgtttgcccctttgatcttcgtgttgcccatgaactgtggaacttagggggaggttttttcggttgcttttagttattattatgtgcgtaaatttttagttccagcgtttagatctggatatgtcttacggttaggtgattctgtatgcatggggcagtttgtcctagttttgggttgttccaaaatacgacaagctagattctttgcagtaatttgagatttgtttgccgaaaagataaatctttttaagctgaatcctgttgggagggcagtttgccctagttttgggataatacgagaagctaggtttctttgcagtatattgagatttgaataattgtttggctaaaagttaaatcttttaagctaaaactagttgggatagtttgttgaggagatttttatgtgctgatgctgcctaggcagatttaactcatggtggaaaagatggtggcccaatcgctctctttttattgcacaaacaagaaacatcattattgtagatctagcactttgtatgtatatctggattgatctgattgtatggttctatataactatattggtagatacctgtcacaaaaagagtgaaccaaaggtggggaattgatagttttattgtatttattattttttgttgtaattctatttctgtcctgttaggactgtctgaatcctgaactttccagaaagttaattttattgattacaagagatggtttgaagtgaggtttgtgtgcggtctttgatttcttcttcacttttgcag

SEQ ID NO: 112120 - DNA, 980 bp, Setaria italica
  Intron number 4 from transcript Si009517m (locus Si009517m .g) derived from phytozome v7.0 (chr-ID scaffold_7; pos 13 414919 to 13415898)
agaatacaatttctttgctcgtgaagacaaaaaatgtacatatctgtttccttctgctgcagttttggatagacaaagatactctatgccttgttccttgcatcttttgtttggatgactaaactagatttctactccctccatcccaaaataagtgttcttttagcaaatttcagacacattagtagttgccagaaatgactatgttgcccccaattattcatactagttgtgattgaaagctgtgttgtctatttggttttctggatcctgaataaatgcatgtgcgctgggaccagaaaaatagcatcgattgatcatttgattggctccacgtgcttctccgtacacttttttttgatggtgtgatgagtgttgctttaattagatgaggctcattaggagctaatagaaaactctttgtgggacaaattttgaaagctaaaagaacccttattttgggacagagggagtattttgttctatttctgtacttcctggtttggtttatgagtagaagattgccacacttcaagttttccatctccaataattttgactcctcagatggaatgcagctttatcaaatggactactagaaaaaaaataatggttcctgtttctatgtcattggggctagcaatctcgtgtagaagcattccattacttttaaggacaaacatgtcagaaccatggcttctttcttgaaggaataagttcctattaacattatcagtttttgcgtcatgagagtgtcttggcaagggttccggatcagattcttgccctgttagctagggatgtgtcacccacagttgaaatatataagcttattttctgaaggtaggtagtttgattgtctcacctggctattctgttgcatcatgcatttttttgcccttcaaaattctggactagtgctttagaggtttgttatcgcaaatctcttgtttactagcttcctctgtgttgaatgcagg

SEQ ID NO: 112121 - DNA, 731 bp, Setaria italica
  Intron number 1 from transcript Si009240m (locus Si009240m .g) derived from phytozome v7.0 (chr-ID scaffold_7; pos 30 019420 to 30020150 reverse strand)
tcagcaagcgaggacaaggaccgatccggttgaaggtgagcgtgcatgtctccagttctttctttcagattagcgagggggtttcaaatcagcttgcatcaaatccatcgatcgtctccctgccttcatctgctttcggaatgataaactaccacttcattattcatctctgtttttgctcctctgtgatggcttctcctgctctggagccaccatgcaattaaccggctttccgatcgagctgtccgattgacccatccgtcacctccttcatctgctcatctcttttgctctgtgtgccctctcatgctctgactctcaagaaagcttctgaattttttctttcatggaatgtccatttttctttgaagtttgcaaacatgatctgttcttctggctactcctgcctgattccagagatcacctaccccctctgacctctgttccaaatttccaataaacaagctcgttccaaacgtctcggttggaaggtcaaccgcgccaagcttatcgatatcgtgtttcgccttttgcttgcccaccataaaattcagacttggcttcgtcggctccgccatgtcagcgtgggtcctgatccctggccgtccgatcgccgcgggaccgggccatcggacggtcgatgagcgggtagttgtttttgccgttggtttgggtctatgggatgtgtgtgaagtgtgaacccgttttcggtttggcagcggcggcggtga

SEQ ID NO: 112122 - DNA, 655 bp, Setaria italica
  Intron number 1 from transcript Si024874m (locus Si024874m .g) derived from phytozome v7.0 (chr-ID scaffold_3; pos 90 7041 to 907695 reverse strand)
ccgcaccgaagaaggtgcccccgccgccccgcaaggtaacgcgcccgctcccgcctccaccgtcgcctcggcatttgaacatacatgtcacgggcagtgatcttgctgagctcccccgctgcttttttcaacaaaagctgcttagcatgaggagcaatggttttagaatctgtggactgtagtcggcgtgctgcttatttgtttcttgctaactttagcgagcttattactgtgcttgatgctgctgattggttgcatctttcatgccgccttaacgtgttgcatctaaagaaagttgtcttttgttaagccttttgcaacagttgtttacaatctgtctttacatgatgtgctatcaaggctagctctgattttgcatgtcctgcaacaatgaatggcacactcttcaatatgatattctgaatatgttgcgaacaacgtgtgatttttccagcaatactaatgaactaaaacaagcttatgaattaattgctgtgactgtggaggatcttgtgaggtctcaatcctagatttgaatttgatttccggtctgactcttctatggcctttttttgtgttttgtttcattaatttgttttgtgtttcttatcatttggcagggaaggcttttaactggggccttgatagggttggc

SEQ ID NO: 112123 - DNA, 799 bp, Setaria italica
  Intron number 1 from transcript Si021297m (locus Si021297m .g) derived from phytozome v7.0 (chr-ID scaffold_3; pos 42 829029 to 42829827 reverse strand)
gaaggatcatatactggttagatttctggttcttcagtgtttcttgatttgcttgcctgcaacctataagcttgacaacgtttgaggaaatccaatggtcatgctggtcagatattttgattctagcgcctgaaacgaagtgagtaagtgacattgcaacctaaatgaaatgtgttcgggcactagcaatctctgtgtatcatttttatctagcatagcatgtgatactggttagaaatagtggttacagtgggatagtgtgggtgacactctgttacactgttggtgcacatagaaccctaactctgtaaggatattagggttacttatcatctgtgctaaggcacggtaattgaatactagatgggattcatagactctagctggttctggtgatgagtactgtgaagttctgccttcattaaacatcttgttactgttcgttgcttgagggtcagcattaagtcacaaaatgcactctgttggtagaatggtagttgatttttttgacttgcgttgcttatttaaatttaaatattgacagaatatgcagtttgctccatggcagtctatttatcatttgtaaaatttgaaatgctgcttctttgtctttaatcagacaaacaacttagtttgataagtgtgcgtgcttctaaactgcactacaaagcacaactggttctgcacaagttttcttaatttaatcccattttgttcttgttagtgcttcccttttcaccaaattctgtcatttactgctacaggaatcggtctgcggaaaatctgtttggctatcctg

SEQ ID NO: 112124 - DNA, 1035 bp, Setaria italica
  Intron number 1 from transcript Si010421m (locus Si010421m .g) derived from phytozome v7.0 (chr-ID scaffold_7; pos 22 174384 to 22175418)
accaggtcaccatcaccctcggccgcagcggtcaggtgagccgtccctgtcatcatcccccgccagggatttgccgtcgttcagggtattgattagaaacggagcagaagaagaaacggggcagatgatctggtggaggtctgtgtagagctattggctaaacttaggtcgaatctagtgtgcgcgatgttgcgtatcagtttaagggacgatatgcgatttggggtgtcaaattgtcgatgtattttgctggattcgattgttgtctgccgagggtacaaaaaacgtaccgtgtcacctcaactcaagggatgctagcaggtgtgattttgtgaagatggcttgatttgtgggcgactgacaacttcatagctttaagtttgactattaggtgtgtgagctggcacaagctatgcctgtatggttgttctaatgttgtggagtctagcagaggaatctctggatctactgctgttttattgtttgcatgtctcttcaatatgcttggagagaactaagaggggattggtaatggttgtgaatcgcggtgggtgcattgctggaatgaaatgtcaatgggtgggatttgttttgcagattatgttcattcttgtgttgctatgtgcatgaggtaagtatcacttgaatgactgcataatattttgacttggcgaaaaactacagaagctcatgtaatggatcttctcttgcaagcgttgtttagggcatgccctttccagtggcgtttattatccatatccgttggttatgttgaagattaccaatctgctgtgtcttgtgtgcacattctgcattcagatcttttatgctattagtgacaaggtctaaattgcgcacgcacgcataccatatgattccttattagtatcatttgatcattttcagtaaagccactctccttgatgaattttggtattagcttccctaatcttgatgaatttttgtattagcttcttcacctttactttcttcaccacaggttgtcaaaaggagggctatatctgatactattaa

SEQ ID NO: 112125 - DNA, 887 bp, Setaria italica
  Intron number 1 from transcript Si024057m (locus Si024057m .g) derived from phytozome v7.0 (chr-ID scaffold_3; pos 36 462219 to 36463105 reverse strand)
tggcaacgcccgatccggagaggacctacttgcatgtgagtgtgctggcttttagtcttttcttcttgctggtccatctaaaagctaaatggtgtcgcatagctaaatttccaaatttatgttttaggtgacccccccaaaaggtctgaaagtgcaggacacatttgaatgaaccttgatagtaaaatccagaaaacggtacttggtgccattattcagaaattcagaaatcaaaaacgtccagcatgaattgcattatgattattcattacctagttgattcctggtatatatatacctagctttcagaaattcaggaatcaaagcgtacagaaattcaggaatcaaagcgtacagcatgaatttcattacatagttcattcctgattatgttatcagaatttcagaaatcttagatatgattggttcagtaacatgcgatgtagccctactgatgcagctgttgtcccctatctcatcctagtgtagtttgaaataataaagattgtgctccaaacattctgtagtagagatatgtgtattttagaagttgtaatactgcctttctgatatgtgtttttttccaggatcccttgttgccagagacaattgtgccaaccgaggagctgcgttttgacagtagagatgaagccaaggaattttacaaattctatgcaggcaaggcagggtttgatgtgcgcataaccaagacaagtaggaagacggtacttggagttgtcgtgcaacaaacaaggacactgggattactacaagcctggtgaggagagggtacgtgagaaaatgtcaatgaggtgtggctgcaaagcttttgtgaagattaaatggaactagaagaaggactattggttctttgagaggataaggtt

SEQ ID NO: 112126 - DNA, 739 bp, Setaria italica
  Intron number 2 from transcript Si011805m (locus Si011805m .g) derived from phytozome v7.0 (chr-ID scaffold_7; pos 32 609696 to 32610434)
gaaaggacatagtgtggccaccaatggttattgttatgaacacattattggaacaagaggaagatgataaggtgactgattttttgtctttcgctatgtcaatacatcgttttctttctgtggattgctattaattttaaatacagattttacagttgggctccctctacccctcataagcatatctttatacttatgcatcttgttagacatttttttttgactgtatagagttgcaatatgcttcctaaatggatcagttactatgaagtatgaacaatgtgctatctttcttgttgtattgtgcactgacaattgaccacattgatcctctttattattttatactcccttcgtccccaaatgaatgtcattctagttttgtccgaagccaaactatctcaagtgtaaccaagtttgtagagaagagtatcaacatttgtgacaccaaacatattttgagcttagtgttttaaaatatttacagttattaaattaggctggaggctaaactgcaatatttattcacttttatgactgtttttccacttttttttgcactcgatgcttgttactgctactttgaatttactacatatagttggagttgtggatcataaatgcgcatttcttagcttttatatgaaaagacctttgatatagctcttcaagggctgtacagttgattgtattgtattctgattctgtttatttttttgatctgctgtagttgaagggc

SEQ ID NO: 112127 - DNA, 629 bp, Setaria italica
  Intron number 2 from transcript Si009827m (locus Si009827m .g) derived from phytozome v7.0 (chr-ID scaffold_7; pos 20 476179 to 20476807)
gccgagatctgctcctccttcccggtacgcaccgcacgcacaccccccgccttgcttactactcctgctgcgctttctccggtcaccgtttcttgattcgcgatttggccgttggtctttaatcgtttgattggtgctggttgccttgtatggccagatttccgtgttgatagagatttggccagtcgtgtttcagtttaaaatagtgccgtagaaatcttgttttctcggggattctcaaagcgttcaacgccgtgtcgtcacttgcatgtttttttatttaactgttaccatatgttaagcaaggttacctattcaattctgtagctgtcttttgtgagtctgtcactactctgcatactgaaccatttttaatttttttaaacacctgtgcttactgaagtcagaagaagacagataaacatcatatgccaaattatacagccttgaaatctgaaattttgctattctgacttttttagtggcacgacgtaacttcaatgcattgttcgtatacacctgtgctttgttcttccggcgaaagctgcatgcaagattactgagtgctgacacggttttcctgtttgggaacagaccactggctctctgtatttttgggctgctcattt

SEQ ID NO: 112128 - DNA, 677 bp, Setaria italica
  Intron number 2 from transcript Si008850m (locus Si009122m .g) derived from phytozome v7.0 (chr-ID scaffold_4; pos 25 36946 to 2537622 reverse strand)
cgttcttatcgggtggcttttcattggaggcagtggtgaggtcgttgaactcctcggtccccttcccctttcctcgatgtcacagctcgatctttcattgttctgcatacacgtgtgtggttcagtggacaatttgattggtcagaaagtccgaaccatatctacatagtcgatttgagttgctccctgagattctgcatcatgggtcggtgccggagcttgtattgtgaatttgtgatccagattattggattcttgtttctgtaacctgtaaatgtcaattgagctggacagaatatttggtttgagtttctatttttctaagtctgaactaattgatgaaaaccagatgttctacgatgctgctagtgttataatacaacctatatgttttcttagacatgtatacactctcgctagtccaattgcaatcctccaatgaaatctcccagtaatgtaggaattataattgttctatattagtgtagaagacacagacaactcttgccttgccttgtttgtttgttttgttgttttttatcttgcaagtgaatcttcagttcatggatgctgttgccattcgtcgatctcgcgaatgacttattaaattctcaaactcatttctcttctgtatgcctgcagattgaagccttaggggctaggtaagaggccgagag

SEQ ID NO: 112129 - DNA, 803 bp, Setaria italica
  Intron number 5 from transcript Si022116m (locus Si022110m .g) derived from phytozome v7.0 (chr-ID scaffold_3; pos 46 691069 to 46691871)
atcgtcaagtgaaagctccgagattatctaattatgtatgtgtgataattaatatgttgttaattattttgctttttttcttcttttgcttcctttagttttaaaaactaacaagtctttaagtaagatatgacctcctacaattgactcttaaatgccttgaactaccaagacttgaaaatctcaatttagctagccattcacttgcaatagctttggtttaatcagcttcaatcttatgggtgtactgttcttttaaaactgaagcgtccattgtcaacctgctacctctggttggtcatatgtattcgtttgataatggagtaagcttcttcttgtctctaaatgcctgctacattgtcttcatcgtacaaaaaagatcatgaaggcttaagattctatagttttaaaaaaaaaggcttaagattctgtatcataggttgcaggtcaactcttgttttgaaggctacaagcacaactattttactagagctctcctgtttgatagcttatatatgtccagtttttatagcctgacttctcacttctttatgatataattataaaaacggaacatcaaatactccagcatcaaccaggtttcttttcttttttcgagaacagcatcaatcagttgaattacagttttcttgttatttgaatatatatggtttttcactttttctagtcatacttagttaaaataaagggaatacatttcattttgcagtaaggagaaaaggatgatgtgtttgttgatatatgtgacaatattttctgcttgtttatctcttaggtggctg

SEQ ID NO: 112130 - DNA, 751 bp, Setaria italica
  Intron number 1 from transcript Si021316m (locus Si021316m .g) derived from phytozome v7.0 (chr-ID scaffold_3; pos 13 034910 to 13035660)
gccctcgtcgccgacgcctgggtcttcaccctacgatatccttttctacatgatctcatagttgatttatgctcacgctgttctgagatctctctcgcacgagcctgcctggctgcctggcgctttgatctggtctggtaccctcagttcgaatccctggtgtagagaattccgcgttgatgttttgatttcgggagcatatttaaacttctggtcatctcgtggtgttgattcggaaattcgattgcattgaaatttcggtcgtcgtggaatttatttcagcattgatgcccggtttggcttcttaaagtatagacttacagtcgacttcactattctaattatcgccatttagtaagggtattggtaactgttactgtaactattgatctgtttcatgccatttgattgcaccggaaaagccttgaatgatgaatgaacttcgaaatgaaccatcatatataaacgactattgatctgttttcttagcatactagcatgttagtgttgtgtgttatttatcattctaattttatgctcaattgtagtgctttgtactggtcaccacattgtgactgttgggtgttgtcgccctaaaatctagttatttcaaaaataacataatctggcttcaacttttagaacacttagcagaatcctgtgagaatttgataatattgtgtattgtatctcctaaggatttcaccttttcttcttctcttgtttgattcttaacgaatgtccactgccc

SEQ ID NO: 112131 - DNA, 611 bp, Setaria italica
  Intron number 3 from transcript Si022293m (locus Si021511m .g) derived from phytozome v7.0 (chr-ID scaffold_3; pos 16 425809 to 16426419)
aaatctctgtaagcacattctatacttgcttcaggagtattttgcttttgctgatgcgtattttacacattgatttggaaacttttaatcagtatgatttcttaattctaaattttgatggcctcaggatcttaagcctttcagatgtaaattcaggaatgtcatctagtgttttagttttgtttctgagtatctagttagataaagcagggttgtttcttatttgatgcgcttactgtaataaacctttgagtttagttggaacttaaacaaatgaataccttagaatgggtttggaaaaaaaaagaaagataagctgttgtcatgcaaatatccacttacaaatcctatcttggatgacctttttcttaaaataaaaaatccttggttattgtagcctgtggtttacaaatttgaatttaaagaacttcttcctatcatcagttggaagttcatctgatgaatagtgcatgcctactcaaccaaaaagatcttatttcaatgtttgtatctgcagttttgtatttgcctttttggaaggtttaccaactgcttggtatcctgatttagttttgttttcccatacagcattcttcacaacaactcgttct

SEQ ID NO: 112132 - DNA, 589 bp, Setaria italica
  Intron number 1 from transcript Si012018m (locus Si012018m .g) derived from phytozome v7.0 (chr-ID scaffold_7; pos 32 463653 to 32464241 reverse strand)
ctcctggtaaggtcttccacgaaatccatggcctgccgaccttttggttgaacccaatttgggaactgaattttggagttaatatgattatgaactgatttagaagcttaattatttcatgagattggatctatatctaaccctgaggagtcaagagaccattttttttgtagattgagtagttctcgccaattacaaatttgaaatcttgagtctttaaatcagacttcttctcgctcagaaccttaaattctcttgacctatccctttggaacttgagctggatcacaagaagtttgttttctttttccctcctcctttatcctcgactccttgtattttacgtcaacggtccatgtacacgattttgaaatttcaaagataagtttggagtacgtactgattttgaacattttcccattgtgttgttatgtttttatgctagctcaaaacaggaatgttgaagacaaaagattttccatttgccacgattatgctgagattacaacactcctatgcaacacatcctgaaaatgtcttcatctgctacacaggaggtgcacgagagccaacgcgccgacgcggcgaa

SEQ ID NO: 112133 - DNA, 813 bp, Setaria italica
  Intron number 1 from transcript Si013882m (locus Si013547m .g) derived from phytozome v7.0 (chr-ID scaffold_6; pos 28 219172 to 28219984)
ttcaaaaagccgccagccgaggagaccgcgcggaggtgagacagcaacccactgccatccccccccccccccttccttctccctgaggttggatcccggccgcgcccatctcgcgtcgctgcaggtcggatctattcctgatttggtctgtttgttcattctctcgtcctggggctggcgtgtgcagatctaggtgtttctgctgtgcctgcatgcagcggggagttgtcgtcccgatatgttcgactcggccagatggctgccgccgcgatggcatgttctgaggagaacctgctcgatttcgcccatctgtgtccaattccggatagagatggtgtgcccgatagcttgcttgttggttagctgaatatgatttgaagggctgtttaatctagatttctagctccaaatttgagtgataggaatataatttagtcttattttcaatggcgacaagtcatgggaaggattttgttcgctctggaatctgtccatagacgtgattttgttttattgggcaattcacgttgacatctcatgaacattttctgtatgtggatggaatgctagttgaggtccacgtagagtgagtgtgtcctcggttgtgctagtgatggttgggagattgaatttcaatgtgccatcccgtagccaaatgataccgggttcaatttcttgtgaccgcttttgttctgttctagacctattgctgtagctggaacatctgattcttctagttactgctctgtctattatctgctatatcatctgcgtaaatataaatctaacagaactttgtttctgcagtcaggc

SEQ ID NO: 112134 - DNA, 824 bp, Setaria italica
  Intron number 2 from transcript Si022482m (locus Si021987m .g) derived from phytozome v7.0 (chr-ID scaffold_3; pos 21 154948 to 21155771)
tatccttatcacctgatcagcgatatcttgtaagtttcttctggcttttaactcctctagctcaccacccttattcaacatgactttgtgcctttttggtttgtataactccattgtgcaacttcatcagccagcgttgcagttaatctctttcattgttcttcttattgagaagaagcatttcatatgcaactctgttcaacagatgaaaaaataaaccaaaatatgtggtataactgtactaaatgtgggttcatctttgcaaaagatttttgtatggttacatgtttacaacaggttttctgttttccctttttccttatttctttttgaggggagggggtagggggatgggcagcatccagtctcatctagtggaaacgtgatgaagttgggaagtggacttaccaaaaagattagtattcacaaatgaaatgtttttttttcttttgtgcagctcacatggatcttacctgtgtcaagctaccaacattaaatgtattgaggtttttttaaccattaagtaaactataatgactgaaagtacatgtaagacaatgaagtttacgtgtacaatttagacctcattaaatccttttggtccttcaatgaaatgacatgtgttggtacgagcattcttggaggtttgcaaatgcatgctagttcttcatgtctgcatattatttatttatagacatacttcatcagtccctgtggaatactctctccttttcccatttttgcttgtatattcggttcaataattattttttatctttaattctgcaggtctactctagtctagcacctattatccatattgt

SEQ ID NO: 112135 - DNA, 395 bp, Setaria italica
  Intron number 1 from transcript Si022429m (locus Si022429m .g) derived from phytozome v7.0 (chr-ID scaffold_3; pos 23 01462 to 2301856 reverse strand)
ctgaagctggttccatcccaagtttttacaagaaggtgacaattcagtttcgtcaatggacaaagatcattctagttttttctttttatactcataagatcaaatttgcagtgtaacttagaatatggcattagcagctctagctgcttgtcaattgacagagatcgttataaaaccccctcccccccttgttgtactcttcaagataaaattgtggtgtaacttaaagtacggcattaacagctctagctgcatgcatggaggatggtagtattttttggattgtctgagcaattccctcagtcttgattctgtaatccaggcctatggatactgaactatttttctatttttatccagaaacctgaagaaggatccattagctctagagttca

SEQ ID NO: 112136 - DNA, 796 bp, Setaria italica
  Intron number 2 from transcript Si025405m (locus Si025405m .g) derived from phytozome v7.0 (chr-ID scaffold_3; pos 37 207697 to 37208492)
tcgcatccatttgctacatagatttggtgagatctactctcggagatgccatgcagtttttctacataccattatatttgtttttcttatgttcagtataatgatggtgaaaaagaagctatgaagcaattattcccagttaaaaatgggctagaatggtgcagataaacctgtagtttgaagtgtgcactttcattaaacaaatttgagattggacctggtcattctgagttgcacttgaaaatttgagccaaaccttttttctactatttaacttgttaatatatccaacccttacatattcttcaagcatcttatttactataacacctactgcgtgttcagctctggagtttgtgctacttataccaagcatctttgtgttaattcctgttgtgtgttcagcagtgggaaagaactagttttcagataattaggagttttcctatttgttcaaatctgttaatctaatctatccggacatatttctaataagtgttgtttgttcaaggatgcagttagtttcaatgtgaacaagtaggtcagcacttcgtttcttatattaacttgtgtgctgtcttcaattgaaagtctattctagttcaaaagttatctctatttaaacatgtacaaatgtgaggcccttttttgcaccaaaaatataacagcacttctttactttgttctgaatcaaactgaactccgttttgacaatttgaacattagctgctctctaattcatttaattgtcacttggtcaggtacaaaaatatattgggttggagctagcagactg

SEQ ID NO: 112137 - DNA, 803 bp, Setaria italica
  Intron number 3 from transcript Si009194m (locus Si009194m .g) derived from phytozome v7.0 (chr-ID scaffold_7; pos 27 192633 to 27193435 reverse strand)
atcagtttgatacgttacaccaacaagttcaacaggtaaatgccctgattgctgaagaagtacatggactgtgcacttgaataagccatcaatgtgggtagtatcgcttttatttgatatcaaatgatcacccaggaaagtcatgttagtgttacttaatatgcaccgatcacaattaatctttgtaaagttgtctttgcaccatatgtgtatttttttaaagaaatgttttgtgaagctgcgaccagctaacctgaacctgctgaatattttgtttgtgacaagttgcctttgttatagcatgaggttaatgtttgcttcatagattatccctgcttcgctcctattgtgctgatgcatacctgaggctgatcaagaataactatcaagaaccttctggaacagaataatttgtatctaccagcaagtagaacctctgttaacaaatatctttgtctaattatcaattatttgtttgttattggtttttgtcatggtttccttctgtccttatatgcagtgctgcaatcgattggttgcatggtcagtacatcattgtctattaaatgtgaattgttgaccattgtacactagcaagcctttttctctaccatcctattttgccgattcaaatacattcataaggagtttttcctgagtcaaatgactcgattattttttacacgccaaatgtttaggggccccttgttgatctctactctagatctatattcaatataaaacttcagtccatggttacttgtaacttttaacattttgcaggctgtgccatttcttgttgg

SEQ ID NO: 112138 - DNA, 1056 bp, Setaria italica
  Intron number 2 from transcript Si021841m (locus Si021841m .g) derived from phytozome v7.0 (chr-ID scaffold_3; pos 11 579135 to 11580190)
gcgccgccgacctcgacaaggaggagcgccctgaggtgctgcatgatctcctctctctcccttcctctgtttctccgtgtcacttcatcgtttccgctgctgctgaatgatcagtttgctggtactgaatgattagtttgctggtgctgttgatactggaatcttaccatatcttggatacagaaaaacgattggtccgtgctgtaatgacatggccttttaccccccctgcaaaaaagttgacagcgactgtttgagagggacgtaattgaacggtaatttctttcaggacagtcatgtcggaagaatattgatcaatgaaaacgtgaaaaaattgaagaaatcactagaactgacacggagagtctgatgctgacgcttgcttttcgagcgtgtgccatttggcttctgctccggccacttatggtaggatatcggcacatcactgcttcaaatctaaacttcccaagagttggcagctagccaatcgcagcagagagctgccggggacttctcgcgtcaaaccaaacgaactgctaaaaaagtttgctgagtttagcactaggaacttttgtgatggtgccttggaggtcaacttgcttgctaatatatagtaatatgagctcaacggaaatgggtaggaaactagataatataactatggaacagtaatttctttggaggcttatgaggccatagtattataattggaactagtgaaagcaaggggcctactacttgtgttgtaaaatatctagctggcccaccttccccacctccggtcctctcgcgctcttaactacccacttattttgttacctattattattccccaatggtcacttagagtttgctttttctgtgaccacatattatcataattaaaagtaatcaaattgtttctgaccatctttttcaaacaccgtggtttatctaagacacagcctttgctcttccattttttaaaaaactacacagttgtgttttcttcagatagctaattttcactactgatcagcagatcctgtctttacttccatcttacaaagggaaatc

SEQ ID NO: 112139 - DNA, 746 bp, Setaria italica
  Intron number 1 from transcript Si013360m (locus Si013324m .g) derived from phytozome v7.0 (chr-ID scaffold_6; pos 32 030585 to 32031330)
ccaacgccgtcctcggccagtcctccaagacgcgggtgagcatccatagccttaagctctgccggcgtagtctggagctcgggggcttagtcgacgccgcggtgatggtttaagtcttggatcagccaaccgtgccgctcgggttggttaatttcttatgggcggagccattgttccgaaagcaaaatcaatcctgctattctatgttgttggtagttcgatcgtatcatgtcgcttgtgttttttgtgcggtaattgtgtgagccccaattggctagtatatcaccacgccagtctactagatgtgcctgattctgagtagaattagtgatctctgcgttccgctgccacttggctccgatggagttgtgaatttgtttatctggaactgaaattgccagtacacctcggtgaagatcatgtatcaaatatgaggtagttcttttctgttgccaaagaggagcgggatgaaacagctcattttgcttcagctgataggatactcaatttcccaatttaggtactcagtaagaaatactaagttagaatttctgattcacctacttattgtaccatgtttctctgatataaattagagtggatctataatattctgctgtggttaacatccaaatgcattgattaataggttacagttaacatcaacacaactctctccataaaaacacccttttccctttatttgtgcagtcaataaaggaacttcctggctcagtcagtgttcc

SEQ ID NO: 112140 - DNA, 886 bp, Setaria italica
  Intron number 2 from transcript Si022278m (locus Si022278m .g) derived from phytozome v7.0 (chr-ID scaffold_3; pos 15 706999 to 15707884 reverse strand)
ggaattttctgcttgccttcaggcttctgatcgtaatgccttgaatctattggaaattcagtagtgtaatccattaggtcactgctttctgaattttcatgtgctatcagatattcagattgccatgttagtgatgtatttaccctgatattctagtcgcagatatgatcgtgttaatcttttgtgtgaaatgcctaaccttacctttgtagctaaaactagtcatgttgtcttaaatcaagaaaacaggagaggtcataagatagtttacacatctggaaataacttagtttaagctgtagaaatttcaaaggttttccaatttaatatgctccaaccaatcatttgatgaagttaaagtgcctttctcaagtttcacaccatactttggtttactgtctaagtgcatcatcctactagagatcttatttttcatatactggtcttatttttctagaagaccagggcacaggtcatattaggctgacaagaaaatgtaagggaaaatgacactagggatgcacctttttttgctatgcccttatcaacatatcaggcaacagtaaattgttaacaactgtattcaaatttatgtatagatctgggagtttttgttccctgaaaccagtaactcttaaaagtttaaacagatgctgaaaagatgctgaaagcaaccattggtatgtaagctgggattttctgagggatgataaagaggtcgtttgatacaaaattgacttttgtttctgttgccttgagagatatatcaacagacagggaaatcatagtatctattatgtaacatacgcatgagctacactgtcatgaatgatgggccttttgtttattcttgcagcttcagttgggtcattgattattgtccaca

SEQ ID NO: 112141 - DNA, 677 bp, Setaria italica
  Intron number 2 from transcript Si013064m (locus Si012897m .g) derived from phytozome v7.0 (chr-ID scaffold_7; pos 28 214593 to 28215269 reverse strand)
cgttcttatcgggtggcttttcattggaggcagtggtgaggtcattgaactcctcagtccccttcccctttcctcgatgtcacagctcgatctttcattgttctgcatacacgtgtgtggttcagtggacaattcgattggtcagaaagtcagaaccatatctacatagtcgatttgagttgctccctgagattctgcatcatgggtcggtgccggagcttgtattgtgaatttgtgatccagattattggattcttgtttctgtaacctgtaaatgtcaattgagcttgatagaatatttggtttgagtttctatttttctaagtctgaactaattgatgaaaaccagatgttctacgatgctgctagtgttataatacaacctatatgttttcttagacatgaatacactctcgctagtccaattgcaatcctccaatgaaatctcccagtaatgtaggaattataattgttctatattagtgtagaagaaacagacaactcttgccttgccttgtttgtttgttttgttgttttttatcttgcaagtgaatcttcggttcatggatgctgttgccattcgttgatctcgcgaatgacttattaaattctcaaactcatttctcttctgtatgcctgcagattgaagccttagggtcgaggtaagaggccaagag

SEQ ID NO: 112142 - DNA, 878 bp, Setaria italica
  Intron number 1 from transcript Si021390m (locus Si021390m .g) derived from phytozome v7.0 (chr-ID scaffold_3; pos 41 219480 to 41220357)
tccggctcggccgcgacgggagcaggatcttcctggtacgcgctgcttgcgtgtttctctctcagctagctactagttcctcattttctgctagattcgtgacgcttcgctgcctctgcgagcaaagatgaactgacggcttgaatcttggtagtagtgttatctgatttctggataagaattgcgcccttgtgcctgacttactctgtattgaacgtgtagatctagatgttcgaatcaaaatcctggttttgaggtgcctgccctttgtgttagtcttggttagcagcttccgtcgtgttacattagatggcctgtagtttgctcttctgctgtagataatatattttttttaaaaaaaaagtgttcaggttctagctttaccttccctttaggatcaaagttgtttgtgctcgtagactttgtattgatggtcctgaaatgttatattttggttttgacttgaagattattgagttgcgtggtgtaatatatggattagtttcttaactctatgctgcaccattgcttttagattattgtaatgcatatcaaaggtgcagtaagaagataatcaagtgtagtttattttcatcttcttattgaatcacaaatttcttgaatcatttaacctacaacttcaaacatttatttacagcacctattgatgttcttgttattttgttgccaatactattttcttgttgaccttgcaataacccctgacaattttatagttcatgttctcatgagcatgcttttcaaaacactacctttttttttccactctccaaaagtccaacctgttccttaattaaattaactttctattttccttcggtgtatgctttttgcaggtccttgagagggacaatata

SEQ ID NO: 112143 - DNA, 713 bp, Setaria italica
  Intron number 1 from transcript Si012335m (locus Si012335m .g) derived from phytozome v7.0 (chr-ID scaffold_7; pos 11 62200 to 1162912 reverse strand)
agattgaaccaaacattgctagtcctgaggtactcttcactatggtaactacatcataccatttactaatttattcacacattcttgattaaaatttaatcatacataattcttgtaagtttacagacattcattgacccttctcattggtaaatacatgatataattactactctttgtgaggtaccatgatttttgaatgatgtggtcgatttactaccaaatacattggatttgtggttgatttactactaaattcgtgaaatggcggaatttggtcaatgttatagtaaattcataggtttatgttaattccttattaggaagtgtgtttctcgtgaatcattgtcagtaatttacgttcaattttgttgtgttactatacatgtagttcattggtgctcgtgaccttatttccttctattatacttgtcagttttcaattactatagcaacaacactaaaaaattctccattctggtcaccacattatgtgcttcatgcgctgagttgtatgctgccaaaaatcaggcaactgtgcactgtcataaatatgggtttttgctgtcttcttcagataccagcagacagtttaagatcttgatggacaaactcccacattggcatacatttttatctcaaattgtttgttaatacattgtcccaatttaattcagtattttgctttgtgtttattcgcatcaggtacctcc

SEQ ID NO: 112144 - DNA, 852 bp, Setaria italica
  Intron number 2 from transcript Si022034m (locus Si022034m .g) derived from phytozome v7.0 (chr-ID scaffold_3; pos 23 511925 to 23512776 reverse strand)
atctgctgctgcaataaggtatgttcctagaaatccctgtatcaatcaattttataatatgatgacatcttgaatatgcttgtcattcttgatagttcagcaatgtatagtactggctgttccttttagtaaattggatgcttcatgtatcaagaaaaatgtgagcatgcgcgttgtttaatgaatttgacaggttgtttcagtctcaggcataatgattgcgaaagccatctgtttcctatacatttatgcatggtagtagtttagtcttgtatgatctgccttgtaaggttcagtaatctatttttcttctcacctattttaaggaatgtgccgatcttagtggacactgatgtaatatagaaatgcaagcacaagctgtcagccaagtgttatgttctgctgtccatttttttcaaataattttggtatataagttcctcgttaaaccgtttggtactgaagtaattgaaatatttgtaatgcatacagaatgtaacacaaagtgttgcatcatttaactgtcttagtatctgtattgttaattaatgtactgtgtgtaatttagtaataggataggatgtgttcacatacacctttcgaggtctgtattttgtcgttgctttatgtgttacatcctacaatagctaatttggatgtctgtaatatatggtctacctatttatatttgtttgttaatgctgagatgccactttaaacaattttgttcccttaagaagtacagtatgttaatttgattgatgcaatgttctcatgtatatacagtttgccttctgttcatgctacctcttccactaagctgatgatgtaccgttgctattctgtttatag

SEQ ID NO: 112145 - DNA, 638 bp, Setaria italica
  Intron number 2 from transcript Si022542m (locus Si022542m .g) derived from phytozome v7.0 (chr-ID scaffold_3; pos 72 98901 to 7299538)
agactgggaccaccatcgtcggcctcgtcttccaggtgcggccgcattcactttgctggtattctggatttagtagtgtgccttctgctggtttgagctacctgtgtttgagaatttgataggcatgaacctattactgtcggttctaatgttagttggcttggagaattatttttggggcactgaacagctcaattgaactttggaaaatctctgacattttgtgttagcctccttatgctgttatgcacatacccacattgtggtatgatacgagttgggaaaatattcggtgcaaaccacctgcctagtggaactgtgcaaacccccatctcttttgtaatgtttgtttcgtagtcttctagttgtattagctcagggggaaaggtatacatacacaaaaaaatactactgcagaaatactctgcaaatgatgctctggcaatatctaattgaatattgatttgtgttaacttgtgtttggataaatttaatggatgatagttttaccttgacacttttgtagcccagtgctaatggatgaaagacatcacattcatgtaacctgtttgaacaggcattgtttcatattgctgtattgaggttaacatggactaaaccatattttgatatctagg

SEQ ID NO: 112146 - DNA, 847 bp, Setaria italica
  Intron number 5 from transcript Si009644m (locus Si009644m .g) derived from phytozome v7.0 (chr-ID scaffold_7; pos 52 69793 to 5270639)
actttgtaccacgccgcattgttgcttgtgagaaggtacctcttgttcttttttatgtttggactaatccttttgtggttccttattgttatttgtgctggaggtccagtttgttggatcttagaatagtttccaatgcttactgctatttagttattctatatttaaatttagtaagagtgaaaactcaaagtgatcacaattgccatatgatggatatgtttagcttgcatgagagtagatattgctgagtctagtggaaaattggtttaattaggttccaaaaattggcagccgaagctagtccatcagtttattactctgcccttaggctatgcttagacatgagttcaacgataccacctagtgtattgtatctggcatgttaagcattggcagatatgtaattacaaatttttagtggcgtgtaaggaattgcctatttataatatataatcctgctttgcgtaacctaaggccagtatctagaatcttataatctgtagtatgagatccgagcagggcctaaatgggtcgcaatggagtcactagttcgatgacctggttcaatcaacagatatgttgcccaggatacatatcaggcctgaaatgttatttccagttgaacatcgtgaacttctacatagttaattcccagatatgtatttgaggttttaataacaaatgagctttaattgaaggcaatcttgtctttcttgctgccatgaagatgaatggaaataaaacatgtttagtttataattaaactgttattggaatatggcttatattgttttacttggcacctgcagatcctggaggaagagaaagttcatcagaaactgac

SEQ ID NO: 112147 - DNA, 893 bp, Setaria italica
  Intron number 2 from transcript Si022468m (locus Si022468m .g) derived from phytozome v7.0 (chr-ID scaffold_3; pos 34 71533 to 3472425 reverse strand)
tcccgtcaggaagcaggtacatatttttgcactatttctccaagcacttgactagtaaattggttcatccatagataaaattagagaaaaatgattcttatcttttttgtttgcatataaaccatatcgttatatttttcaagaaagataatgtgccaatatcattatcatacaaacaaatcatatcataaggtaagagggtaggcccttggttaacctgaaaattggccttaactaagcccagaattattattatgatatatatgcatttggttagcttattcaatgactggtccaccaaaacgacctattttcctagctatgcatgaattgcattggtcaaggaaatgccaaacaaattaaaggctgctggtgtgtacttgatttgagttaaacggggtgaccctactaactagagtagcaggtattatgcaacatgtatatatacttagctaaacaagaaaatgatttgaaccttattagctactagtcacccgtctcttcctctttgtctaacctgtgacctgtccccaattgaattaaccaatggaaacagagataacatatagtagcacacgccgtgatcaatgggatggctggacacgtacgtctgcaccttttcgatcttccacggtcaaacggcacagatcgtgacatctcacctgcaggaagctccccgcctcccactaaaaaaatggctccaagcaacttgcaacgtgtttggcttttatgcacgcgactgtgcagctagtagagatgagatgatgagatgccatgcctctactctacgtgcatgcaagaagaaaggagcacgtcgtcagtaactaaccgaacacacgtgtgcgtgaaaatacgcaggtgcagcggtgcgcggaggacaaggcggtgctcat

SEQ ID NO: 112148 - DNA, 511 bp, Setaria italica
  Intron number 1 from transcript Si022403m (locus Si022403m .g) derived from phytozome v7.0 (chr-ID scaffold_3; pos 50 043782 to 50044292 reverse strand)
ccgccgagcatcggcttgcttgtggaggtggaggggtgaggggccataaaaatccagtctttctactgctcagttcgtgaattccaatttccccttgtttttatcccaaaaaaggagtgccttttctgcttgtagagcaaggtagttgctgaagctagagcggttactgggattagaaatgttcaaatttagaataactgtgcagatgtagacagtggcaggaattagtgagagtaacgtgtcctcagataattcgctgagacaagtgccacaattaagtaattttgtatctgattatttctgtgagaatccattctccattttgtatcgatctagctgaaccatgctttgttgttgaacaaatactactgagttttcttttgagctattagcctattacggagtagtgaatagtgatgccttttcttgctttcctttgcattgctgatatcagaagaattactgtttctgattgagcatttcatgtttctgttccgcagagttcttgcag

SEQ ID NO: 112149 - DNA, 1017 bp, Setaria italica
  Intron number 2 from transcript Si023474m (locus Si023474m .g) derived from phytozome v7.0 (chr-ID scaffold_3; pos 10 980980 to 10981996 reverse strand)
ggtacgaggtgcgcgagaagaagtgccccaagaaggtatccatccatccattaatctcaggcttgcctcttttttttttttaatcttagccgtcgaaaatgttttcacagccggttaattcgattcgatttactttactcggtgttgctgttagttttgaacatggctgcgtgattaaattagagctggaaaaggggagaaagggcagggagggacaagcagaaaagagagggggaaggaaatgggtgtgctcccttttcgcctgtccccttcttatgtcacgtgggacccacctcccgtgagggcgagggagtgccgcgcctgttgctcgttcattgatgaccgcgcttaatccacatctcgtgctcgctttttattatttgccgacgacgcgcagcgtggccgcctgcacagcacagcacggctgcgcgcctggtctccaactccaaggctggatcttcgtgccacacctgggccttgggcctttcccgcggggcccatctgtcagcgtcgtgcaattgtgtttgtctgacttggctagggggggacgctgacatgtggggtcctgttggccacgctggctcggatgcgctacgagtcgggtgggaccatgcacgggtggtgggtccctgtgatatgacactgaggatagaaatggaatagccatccggggggtacgacaggctcctgcctttttgcttgacttgggaagctctcgttattctcctgcaggaagcagggtgcatagggcgagacccgtcattagttgacctcactaatgatactctgtcgtcagctcctgtctgtgatctgtggccgtgcgcaggcaggtcgagtcgaggcatctctttctctgccccacgggccaatcagatttcagcatcaaggcttgtgctttgttgcgcactggcctgactggaaatccatttctttttttttttgaaaaacttacctgactggaaatctcacttttgatctctgtttgtgcagcaacagaagcaccggggcctgaaaggg

SEQ ID NO: 112150 - DNA, 556 bp, Setaria italica
  Intron number 1 from transcript Si009620m (locus Si009620m .g) derived from phytozome v7.0 (chr-ID scaffold_7; pos 10 815963 to 10816518)
ctggttccaaaaggcaaacctcatacaaaggggttgttaccttgtaaaagtgattcttagaacctaactcctctctagagcacagtccataattgtagccagattttatgaatccaaagcttaaacaaacatgccccatccaactgaagaaagcttgcttgtttgatacgtaaaaagtggcacataatttactacatcaaataagctgtgcaaataaacaaagaagcctaaactccagtaatgcttctttcagcagttacctgttttccagttgaattgtacagaaggtaatactctatcagaaatacagggtcctgaagctgctgtgacatctgctcaggtgaatgtatgccgaaattgtattacatatttgaaattgatgaagtttaattttctttggaagttgtaaatgttttgaaattccaggatccggagcaagatggcggggaccatgtatcaaatgatgaagagaatgatgactttaaagggtgccaaaaagatagaactgaagcagaagttgatggtgatgaagactactttttcccaagtgtagaag

SEQ ID NO: 112151 - DNA, 924 bp, Setaria italica
  Intron number 2 from transcript Si010062m (locus Si010062m .g) derived from phytozome v7.0 (chr-ID scaffold_7; pos 21 479721 to 21480644)
actacctccacagctgcttcgggcccagcggcgaggtttgcgtctctcccgatccggacttctccgtactagatctcatgaatacgggtagattcgtactatttcggcgcgttgattcgtgtgtttttgcctcagatttatatagaagcttaaatttgcgcttaattgttgcttggtgcgaataaaggtgtgatatttttagaattagacgtgcaaaaatgtttaaggcgccaacttgaggtcattcaattcatacggatggaatgctcctgtttgtttggtcatctatattggttgtttggtttagagccgtgttgccacttaaaaatgttatttttttcactatagaaggagtctcgtattcctttagaattggtgtgtgcgaggtgacaaacgtgccgacctctggtaggatttatgcctataattaactcagaggaaatggtctcgatgcttgatagttgataaacattttaaatgagccaagctagttgcttcactttggtggatactgtattagtataaaaacttttggaggagcacaaggaagcaataattaccgccttgcccaattatcttttttggaatatgctccctgatgttgacaggaagagaaaagatgcctgatcataggatggatactgatacaatgcctctttaggaacagagataaatggacaaagcagcttgtatccattcttgtttttgtactagctagtaatcgctacctggaacctttctttaaacatatctaaaatggtaactttgatatgtttatcaaatatgaataagtatatgcactgttcttatttctgtttgtgagtgtttgtgcttacagaactctctggctagtaatcttattggcttttgctacttcacatttttgtaggtagtgacaataaaagttatccggaataggcaaac

SEQ ID NO: 112152 - DNA, 517 bp, Setaria italica
  Intron number 4 from transcript Si009993m (locus Si009993m .g) derived from phytozome v7.0 (chr-ID scaffold_7; pos 34 723510 to 34724026 reverse strand)
gtgttgctggaacacaggttgcgttactctttacaacttcaaaacctagacatgtttacttcttgacttcatgtctttcacatagttttttttacttttctaaattatcgtttctacaggaatattaatttgtactattgcacctgttcttctatagtttaattttaattttgcagaaaatgtcaccggaacatgctatggtgttgcatgtttgtatttgtgttcttattaagtttttttttatttgaaaagtgtgccattgctgattctaagctcaaaagagaaaaaacgtgccagaaacttgtgggcatttataccctgattcttactacaaattgtaattgattgcgaatgagcgaatttggatcattagaagttttatgaatgaattggtcttcctctggacatttcagcttaaaggatgtcaaaagattggtggaaatgcaaataatcattaaacattagttttgtctctctgagtttggagctaaactgttcttcaggctgagaaggctcc

SEQ ID NO: 112153 - DNA, 530 bp, Setaria italica
  Intron number 2 from transcript Si015308m (locus Si015308m .g) derived from phytozome v7.0 (chr-ID scaffold_6; pos 21 722641 to 21723170 reverse strand)
gagttgaatgctgttggaagttgtattattcagaaataagtttcatgctgcagttttaattggtgcttaaataaatgttgtgttcattacctactgtttaaatttgattgagagatgagaatttgtatcagctttaagcctgcagctctgaaacatgtcctgtccatgttaacttgcatgttttcagttcatttatcatttcccgaacccatttttcttctttaataaatagaaggaacaatggtactaccatggtgattaaactgtttgtgctcatgagttttgaatcatctaagtaatgtggcatagctagtctagtttcaagtatcaaactagctaaagaactgtagagtgtctactaatgctggtttctaatgttttttgttggttctgtatacaaattatgactagttgtttatatgtatgttttctatgtcctactatctaaatttctctatttccactatgagcaatgtttactgttgtactgacatgtgccttataggagaagtgtttgaaggccaaagtga

SEQ ID NO: 112154 - DNA, 578 bp, Setaria italica
  Intron number 1 from transcript Si009572m (locus Si009572m .g) derived from phytozome v7.0 (chr-ID scaffold_7; pos 34 640140 to 34640717)
cgtgagcacttcgctaaagactccattttttgctttacctacatgctctgtgatattttttcccctgttctttggatcaaattcgagctcctggttgtgggggcaagttgtttgatggaatgccaaaagaggagaattggttagtctttgtccgcgcgcgcgtgtgttttctttaaacaaggaaatgccccgctttaattgaaagcgaatctctttgctgttgtctgatataaatgaaatgataaataatttcgatgtccttctttgcctactaataatgatttaaccgtatgctttatcacagccttttcaattttggatttccagtgtacagaagcatataaagtgctctagcttatataaacatttttgtggacgtttatctgttctttactatatgtaccactgctatgcgtttgccttttgattgttctaatgctgcttcaattctctctaaaatggagatgccatttggtagtaacttctgtttcagtctaactcaactgacctgtaatgataccctcttctctatttgtccaatagacacactcgttgcattaattcttacaagtgggggc

SEQ ID NO: 112155 - DNA, 1017 bp, Setaria italica
  Intron number 1 from transcript Si009679m (locus Si009679m .g) derived from phytozome v7.0 (chr-ID scaffold_7; pos 24 653371 to 24654387 reverse strand)
gacggcggggttttgctcgctcgctttgtctctcggtgaggttcctggcttgccttgcccctgcatgcattcgtttctcctccttctcgtcgtcctcgtcctccctcggcgcggagaggttgcggatttattttgcggggtttccatttcattcgtttctcctctcgtcaagattgtggaagggattcacggggattaagcgatgttgttgttgggttcagtgtgagggttccctctgcagatcctgccgttcgaggtcggtttcagacgaagattgcacacaaatcatacagagacaggctacctagtaacatttttataacacttcgacaatccaagccaaatcgacatagcaaattcacgtgtgtgtatgtgtgtacaagggtgtagtacatggagcatgaatgcatgagggggccatggccccccttactagctccgtcactggagatttgatctgattttgaatttttttcccctttcgcaatggttgggtaagatcacgcgtgtttcaagtcagcattggttttggggcattactagttctatgcaatgctcaatgctgagtgtgcaattccaaaagatatgattatggcttgaggacataagctagaacatattctttgttcttcatgcaaaggcattgggataagattccacgccttttgatttggataagcctgatgggaactttcgcaatgctttcacgacatttacactagagggctgatagcttttgacgagatattcccttctttccttctcccgcatcaatttttttggatatgttctgactgatgttgatgctcggaaatttgtattttctgacataaaaaattcttttttttttgaaggaacaacgacataaaaaattctgatgcttgccgtactgagcaacttttgtaatatgctcttccagcagaatttcctagagcctgtatcttcgtgctaactccagtgaatttctgttttaacgatgcagtgaagtgcgtgaccactgaccaagtacatctgaac

SEQ ID NO: 112156 - DNA, 834 bp, Setaria italica
  Intron number 1 from transcript Si023167m (locus Si022945m .g) derived from phytozome v7.0 (chr-ID scaffold_3; pos 13 813380 to 13814213)
acctcccctcctccgcaaccggccgccaggcgcaggtaacggtaccaaagtgccattctcgtcccttcctcccgccctcacgcttctccgcttgtccggcgcaactgtttgggcgctttagggtttcgtctgattcggcgttcctgaggatcaggaggagcgcccgttcttggcgcccccggtgaattccgttgtgggtttcgcttactggttggtgattctgttaatcctttgggtagtggaatgcatgagaaagatgtttggtttcttcttcgggctatttcgttcgatctcggtcgtcgttcattaagttatagttcttcatagcttccggtccatgtcgaatgcgccggaggtctgatattgattgctaatgttttttgttggatgtaatagtaggtctgctgttattgttttgggttatttgcaatggttcctttgtaaaaacccatgtaccatttacaaacaatatatatctgcggcatgtattggtggatgataagaggatgcatatccggtgaaaatcagctgattattgcaagtttgtgaaattaggtgaaagggtgcatacctggaatagaacattttcatcggatattgtgcctgaaacatgtttttttaggggaatgcctgaaacatgttcccttctttgttttgttgtactcttacaaatgcccgatttcacttgttacactcaatgatcatgctggctatgcaacactagatattgtcgaatgcttattattcaaatttgttctatcatctttatattaccagcttaactaacatacctctccttgacttcttcattaggttttgagttgatagatttca

SEQ ID NO: 112157 - DNA, 934 bp, Setaria italica
  Intron number 2 from transcript Si023167m (locus Si022945m .g) derived from phytozome v7.0 (chr-ID scaffold_3; pos 13 814334 to 13815267)
tgcaagttggtactgtaatttacttgaactttgtttgtcaaaatttatgatcagtcctcatgtgcattaacatagtaagataagagcatgatatacacagaacctcatatatctctgctctgtttgttttcattggaactttttttcaagtgttattaagccttttctttttcttggagaagttgtgcaaatcttatttttcctgtctaatcctgattcactacaaagagaaccattgatgaggctttattaactttttactgtttatgtgaaagttagtgttggcagaaaatgactgagctaagctcttgacagtattaggacttctgtttgatcttagctattttctttcagttagtctcaatcaatgcttatctgaacttaaatgagaagcactttaaaagtaccatgtgatgtttgaactaactcctatcccatttgcaatgattctttgaaaagagcacacactacagcatgatgatggctttgtagaatacggatgatatctttgcattaattaggtattcaagtagaatgatgcttaaatacgatgtaaggctattgaggacaacattgcaaaactccaaaaagaagtgaaattataagagcttgtgggaagggtaaaccaagtgatcgacgatacacagacaaacaatagcatatataagcttagagataattcatctgcaccacacctgctgcagtgttcccaaatctaccatatttacagaatcactgaggagttggaatgactccttagagccaagatactatgctaatactgagcatgatccaacattgcatatgctgattttacattcttcgttggaacattccgatgatccatattctaaaatataccaaaatcctgtcactgtaataatttattgactattttttgtttctacgagttcagtcctacgacatcacacac

SEQ ID NO: 112158 - DNA, 855 bp, Setaria italica
  Intron number 1 from transcript Si009666m (locus Si009666m .g) derived from phytozome v7.0 (chr-ID scaffold_7; pos 83 19442 to 8320296 reverse strand)
gtgttggcgcatccaggccgttgccccgcagggaggtgtgtgccccctcttttatgtgctgacttagttcgttctgcccctgtgtgttttaattttgttcggttgggaatatatgtcttcctgaatttgagtggtaccatgctgcgcttggatgaaatgagacgcagcctacatagaatgcgatccgcttgtcgctgcatcctagatgctcgagcataaatttgggcctcgtattgtaatagcttagttctgtttttatctgttgaaactgagctcagaccaaagaagttgcagtgctgtctgcttgcttgaaaggacagtgttgaggaagatgaaacacggatgatatgtcattgttctgtttttatccatggatggaagttgtctcgtatttacacttcttgtttggaatttcagattcagaagtgatttatatgataatgtcctcttgtgattcagttggtgctagttagttcaatctgtgcactataagtttgccaccactgcatcactctgtgcactatcaagtttgcaaccacttttccagttggcaccacccagagtagaaatttagtttctttgaacagcaacaaaaaagccttatatttggggttagctacagatgaaacccaacaagagccaaaataaaaaggataaaaaggtagtagtgattgactaattgtaaaaggtacacttgtcatggtttgggcactttgattgctaaaaacactgtttccttttaaatcatcgaaaatgttcagtgcatagtgattagtgaatgtttcatatgatgatgccttttgatacacaatgattcatctaacttattttaatcatcagtgaaagctcccatcg

SEQ ID NO: 112159 - DNA, 902 bp, Setaria italica
  Intron number 1 from transcript Si022833m (locus Si022833m .g) derived from phytozome v7.0 (chr-ID scaffold_3; pos 13 729688 to 13730589 reverse strand)
cttgtaagtggttcttaatggatctgcctgaataatcctctgtttggtcttctctctcttcttcccacaacatctagtttacagtttacactttgccctgatttttttaacagtttacactagtacgctgctcactccattgtttgtatatatggagtatcttttgttcttttgggaacataaatttttttctaggttgatatgttaaggttgcttcccataaaaaaacagtttatccaaagaggtagtagtcaacctgattttcgtggctttttaattcattatatatccccactactggttgctaattttctctggtacttcttgttaatctttgataggattatgctatatgataattcgacacactattgcatccaaggaggaagcaagttagctgggttcttttgtaggagttctacatactaaaagttcttttttccctaatattacctaaagcttcaatttaattcataccctttcaaaatactccttcaaattagttaagttttgctttccaaaaaaacaaagctaagttgttcaaattaactaatgcatgtacctagagcaagcaaaagcataaagatagctacagttccctatccacaagttcatgtttcagtgtcatatctttctgtgttcctgtcatgtgtaccgaataaggctgctcgtttactcaaaaaaaaaaagaaagaataaggctgctcatttaccagtgggcaacagtggccagatcgatcgatccacatgctgcacgccagcgagcactgagatcattgcgtccgtccggccctcgatctcatttcatgcatgcctgcccaattaattgcactgcagcctgctcctgaattctgcagatcgtttgttaattaggtgtgatcatgagcggtggctagcctaag

SEQ ID NO: 112160 - DNA, 720 bp, Setaria italica
  Intron number 2 from transcript Si021693m (locus Si021693m .g) derived from phytozome v7.0 (chr-ID scaffold_3; pos 38 72909 to 3873628)
gcgtcaattccatcgtgggaggagcaaccatagaggtctgggctcttcccccatgattctgatgcctagcttctggtgaattcagtgcaagttgtgctccctcgctccttgatcgccggtgaattgcgaagcttttagagtgagctgtcgagtagttattaacagggagttggaaatttttctgcacacattagtgaagatgtagttgtctgctacaggcgtacagcaaagttctgcaatctttactggtttcatactgtgaaagtgtgaatgtatagttagtattgcatctaaaatatgtgaaactagttcactgttgtttgctgctgttactccttccggtagctggcaattttctctggaattgttctagctgttgagcttctatcagaatgaactaaataatggttattgattgaagttcataagcagttgagataaacacaaactattaagcatcactggctcactgctaaatatttttagcaagtagtcttggattgtagtcaaagctgtctttcttatccatatgcactagggctatgattaagtgcacatatgctgtcatgctgacatacttgcatttgtattgatcttttgttttcttaccaagcgtatgcttggtttgcaaagttcattggatttcacttttatgcgctaggatgttgtaacttgtaactgaagcaacaatttatctgtccttgtaggcaaacacaatat

SEQ ID NO: 112161 - DNA, 660 bp, Setaria italica
  Intron number 1 from transcript Si009612m (locus Si009612m .g) derived from phytozome v7.0 (chr-ID scaffold_7; pos 34 156180 to 34156839 reverse strand)
agcgttccccactttcctgctagtcgacaggggaggtgagcaaaattacaagatttcttcttctccttgtgactggtactagcacttggtctgttgggtcattcctgttgcgattttactgagcaaggtctttttctgcccccgtccgttggattggatagtgtagttggtctctgttaggtcgtccatgcgtgacttttttagattgttacctggtacgctttacaagactcagctagtttgattggattgattgaagttgaaagattgatcacgagtgggcaattcttttttagtcgtgtggtcttagtttggtgagtagaagattagatcttgtcatgtgatgacgtgattaaatttaatattcgttgacccagttcaatagaacgactaaatctgtgacttgatgtgcatagcaagggaacttaaatctcagagttcgcagtccattactactgcattttttagtagttatgtcactgtctgccttttttgaacttcctgtgatgttactttcattttttttcccaaccaatttgatgtttatttaacactcctttttgtctgttctaagatgttgcatacctgcttacttaaatgcttgattgattgcataatatgggttttgttgtgctcagattgctacttcacaaagaaggc

SEQ ID NO: 112162 - DNA, 863 bp, Setaria italica
  Intron number 2 from transcript Si024953m (locus Si024953m .g) derived from phytozome v7.0 (chr-ID scaffold_3; pos 48 069946 to 48070808)
tggggtcactcctctccatattgctgcagaaagaggttctttcccttgcattcatgtgctgtggattttttttttgtttagctgttcttggagctctgttttagatttatctggccaaatctgtgttgtcttactttttttggttctagacagtttgcagtatttgatcagcagtgcagtgggattctttttgggtgttttccacaacataggattctttttgggtggctaaatgtggtagtgtaaacactttaaccactgtgatccacttttggtgctaatatccagcagcgcagtccatcaaaacttattgaaacaattgtgcatactcacaatgtactaattcatcatacaacatgttggatagtactaacagctgcataaacttgtggtatttacttttgaacaagatatgtatgcttgatctatacttactggataaaaaagggtatagaagtatacaacctgtcttggttacttaaacctggcattaccgttgcatggatactagcaactcattgtaggagcagatgcagtaaatgaggtctggatgttaatacttaattgcattccttgtgtgtgaaaatgctattttctcaggctggatagaatatcaccatttgaattaattttgttgcctaggcttaagcattggttaacaggacaccgcaatgttgtaatcttcctgattcatactgcattgcaaaaccccttgtagttgtagttttatagaaatgatgttatgtagatttttaaaatattaatcatttgtgatgattagatttaagttacaaaatacattttaaaaatatcagaggtgttactgtgtcatgatcagtttcctgcatttcatccaggttcct

SEQ ID NO: 112163 - DNA, 798 bp, Setaria italica
  Intron number 1 from transcript Si013405m (locus Si013405m .g) derived from phytozome v7.0 (chr-ID scaffold_6; pos 35 448655 to 35449452 reverse strand)
atctccccggcgtcgcgcccaacgacttccagaaggtccatttctactccccacacccgtaacggctctctccgttcatcccgcggcggatctcgacggccagatccagcgtgccgcgtttgttcgttgggctgcctgtatctgtcgagttagtggcagtggggttcgggatctaggcatcctgctggctgttttgcttctgtgtggagtagtgtaatcttacgaattacatttggctaggtcccttgtttcaaatctctctatgttgaagaaaaacataaatatcctctaatctaagcggcgataaatgctctatagtgcgcctacgtttgcaaaacgttgtctaatcgaatatgtgctgtgagtacgctacagtataccctcttgtattcaaaatgttccgttatttatatttttgtccacttggttccaggatgtgaagtcacttttttattgtacatgttgcttatcgtttgcatatagcagcttcaggtggcctttgtatgccaaaaacttttttgtttctttttctcttgtttcttgttacctgataaacgatttgacaacccagtatttttggatccttaagtatcgagcatgtatgtgctactagtagttatgtttatggaacgaattatcaaatggtgcattaaaatattttgagctatgggacaaaaaataatctctctcacctcttaatttgtagctctttactgaaagatatgttacatgcgctctaacctatgtccataattgtctgcagaaagatccacttttggtgaaggtgaataagctgac

SEQ ID NO: 112164 - DNA, 994 bp, Setaria italica
  Intron number 1 from transcript Si011694m (locus Si011694m .g) derived from phytozome v7.0 (chr-ID scaffold_7; pos 19 957883 to 19958876)
gccttcctctgcccgctcgccttcttcatcgagcggtatgtacgtgcagagatcagagatcagtcggcagaaagaaatcgtgataacaggccagagcgtgctcagctgctcgttagtcatcaacatgggaactatttaaaccgggagagaaaacgatattgctcaactctgtaattatgtctgtcctactattggacccaactagatcaacgaattttgaaacaaattattttttaaaataagtaaagctattataaaaaagaaaacactcgagctatgcatatcaaaactataacttgtacataaaaatcatagacataattcatcttgtttcatgttcatcactatttttatgttaatgtcattatatgcttttgcactgatcaatgaatatttttctataccttattacaggaagaaacggccaccactaaccatgaaggtggtgctaggtttattcctgtgcggactttgtgggtgagttatggcattaattaccattttttcgccctcttttttccgagaagaccgtggaagtgtttattagatccttatttactgaaattcattgaataatgttatgttgaaaatgtcgatatgtttcagaaattcatgctgtaggttcgggatttttcgcaaggttttcatgaactgttgaactaggtttcgaaatttttgcctgatttttttggaaatgttgaatgtgtgtgaacgtcaaccagatgcctttccattggtgcatggatttttaagagtaatattttgctagggcgtgatatattcaaatattttcataatattttggctataggctgtgctgattattgagagaaaaacaattaagccaacgtcggtacttgatcttgcaatgctttcgagcgtttcaccaagaaatttcttggagggggtaccattatttggatgtgtaagtactactttttttgcttacacacatgcagcattactataaaccagaacttgctagtgctcgcca

SEQ ID NO: 112165 - DNA, 552 bp, Setaria italica
  Intron number 1 from transcript Si024499m (locus Si024499m .g) derived from phytozome v7.0 (chr-ID scaffold_3; pos 27 316546 to 27317097 reverse strand)
gaggtgcaacatacttctatgtaagtttgattcatctgttgacttatattttgttttcatagtagtttgagttgtccaagagttatgcttaagcaaaaagatagtgggaatagaaactaatattgagatataggttggaaatgcccaactaatagctagtcagtagacaatgcgtgaattgcccggtggtatatctcctagttctcacaaaagaaaaggtgcctcactgagataaaacgctttcagcagcttgggtatagtagtctggccctcggtcccattttcttgaccttttgaagaatgccatggtaggttgtcttccaacttccttttactacctggttgcctttgtagcagatcaacaaatttaggaatgtatttggtgggatgactaaccgagaagaagttttggtgtgtatttcaatatattattgatgtggtgtgcattccattatattattggtgcaagcaactatttgtttttatttactgattttgctcccatttttttcattcaaattgcaacacacacgatgaactcacagaattact

SEQ ID NO: 112166 - DNA, 797 bp, Setaria italica
  Intron number 2 from transcript Si021962m (locus Si021907m .g) derived from phytozome v7.0 (chr-ID scaffold_3; pos 57 63762 to 5764558 reverse strand)
caatatcatctttgtttcccttcttatactacgtaggttcatctcacttcaatttaaacatgtttttaattaagagcagctttaatttattcataattataagaattaggttaatcgagcacatgcctcactaccctcttatacttgtctgcacattatttaatcaatatattagtgcacgtgaaagttcagacaattgagtgaacacttactgtaacaattatctcgatttgaatatatcacgatcacagccatatgcatatagcaatcagggtgtacatgcagcttattttcgagaataatacgcccgaataagatcaaataaactaaattaagagagttcatcttacacaaacaaactgaaacaaccatccccagaaaacacaatggagtctgttgacctaaatagacaaacaatcaagatgcaagctatcacatggtactcttccagaaccggttatttttttaatagagcttacgctatgaacaattctcgtcatcactacacatggatttgtaaactgtttctcaagtattctacacacctgaaatatatggaaccagacaatataacccacataatatcgcatgcgcgcgcgcgcgcgcgcgtgtgtgtgtgtccgcatgaggtgttgtcaagtgcacatgttcatctcccgaaagaacagaataggagcaagcaaaaataaacaaaagaattgctagtcatgcttcttgcatcttttgcatattggagcagatattcgcatatacaattcaagtttgccttctctcctgttgatagatcgaagatctgc

SEQ ID NO: 112167 - DNA, 798 bp, Setaria italica
  Intron number 1 from transcript Si023243m (locus Si023069m .g) derived from phytozome v7.0 (chr-ID scaffold_3; pos 51 79361 to 5180158)
aagaaggtggcagcgaccccgcagccggccgccaagtaggtggattgtggaactggatcttggaggttttgctgcctcaaacaaaaaatggaattcttggggctttgcgaaggcgttcttcggcgttattccttggttcttggactgccgcagcgagcggtctatggattgacttttttttcccaacccttgtttgggagaaagatttttgtgtgttatttgggaaatcttgctgggttttgcagtttacgacatttgtaggttctgtaatccaaaattttctttggaaattctgcgcttttcaaggaaccagaagggtaaattgaggaaaaactgccgaattgtatgtcatggggatctcccttgtcttcatggtttcgatttttttggcctcttcgtttggttggaatttcggtttgtcttggggcctagaggagggaaactaaagttgcagctttgtgatgttcttttaaatttccacttttccccaaaattttctactttacaaaatgctcctttttcgatttttcttgagcttttcttgtattttcacctttctcgtttgctcaagctcttccatccattcgctgcactctccccgctttgtttttgccattcatttcttcacaacattttgatctgccattaccatgctcattttttaaaagaattgatcccaaaattcgttttttttattttcccaacagtacatctcgtgatctatctcttgcttgtgtggttgtaaaaattattgagcaacaaagctcctggcgtgctgtgcagagctcaggtggtggg

SEQ ID NO: 112168 - DNA, 461 bp, Setaria italica
  Intron number 2 from transcript Si021950m (locus Si021950m .g) derived from phytozome v7.0 (chr-ID scaffold_3; pos 28 32511 to 2832971)
tgttcagtcctgaatccaaggagaagaaggaggaggtaatacttctccctcaggatcctctcgctttttgtaggtttcattttggatttctcttgcggtttgtcctcggatctgagcaaattcgggggtttccctcacggaattgcgaataattcagtagcttgaggtcaaagttttcatgctaagaatggcatcttgtatcgggctttcgtgttcttggaaaaaaaaaagattgaatttttggtttggcattcaggaattccagtagcattcttgtcaagatggcactttcccccctttacaactggcttgtagatctgtgatcaaagcatcgccttttttttttttccttcttgcatttgttttctcactttagttcgaactgaattctgatcacaaaccaaactttgtccttgacatgaacagagacagaggaggaaatccgcagctagtaacccaac

SEQ ID NO: 112169 - DNA, 958 bp, Setaria italica
  Intron number 3 from transcript Si021950m (locus Si021950m .g) derived from phytozome v7.0 (chr-ID scaffold_3; pos 28 33181 to 2834138)
caatcaagattcagaccgccttccgaggttacctggtaatgtgaaatcagttctgaattctcccgtctggtgccatttggagaaatgcatgcctggttttccccaccctctgagaacatttgtgacagttagaaattggtttatattgatggctgcattaaggaagtgtttgtttctagtagctggctgattaggtatttgcgattttgaggttaggacttaggagcacagctatttgtttcttttttatgattttgtttccacatcgacatgactgaacatgcaagcaaatgtctgttggtggctgctaccctgcagattttatcttatcattttctaacttttaggtgtcggcagcttgccaaccttgcaagtggtagttggccagttgctgttactgtaatttggaggagacctctagctgaatattttagctatttacatgtcaattttcgcctaacaactttgtgtggtaaatgagatttttatgggtaaagaagtagattttattgcttcagttgatcaccgaaaaactgttattttctagtttaattcatttcctttcgactagttgttaatttgttatactttttaggtttgttctattgtcagtgaatgtacatttgtcgaaagggcctacacatcattcttgctcttgttagaaaaataattcttgaacaactggcagttggtggcaaccacctttcatcactcattttgatgttcttttcaattattttttttgatactgatggcctgtctgtcttgccatcgatccatccttgagatagcaattagtgaccgtaacctttgttccatgggaaatatgacttcatggacatttgacttctttgagagtataacagaatcttacttttgcgatcaatattgtactaagagcatcttatcctgtgatattgtaggcaaggagggcattgagagcgttgcggggacttgt

SEQ ID NO: 112170 - DNA, 782 bp, Setaria italica
  Intron number 1 from transcript Si013899m (locus Si013899m .g) derived from phytozome v7.0 (chr-ID scaffold_6; pos 45 52512 to 4553293 reverse strand)
cggcccgtcgggcgcggcgccatcggcatcatctggtgcgttcatcttcatcatctccatctatctctagctcctcttcctctccggccatgccgatcgatccacagccgggttgccttgtctttaagctttattttgatcatcaactagctctctgaacgacgaagaaagctttgcatggaaaccttcttgccttcttggtcaaggctttgcactgggccccgcgtggcagtgcatcgccctatgcaagaagcaaagggctccatctccatccgaccatccccaactaagaataactttcgcatctaggtgttgcgtggcctacgtatagtatcagatattcagatactatatcaaactaaaaataacacacacacacacacacatattacatatgaatttaagggttaccaattacagtaatattatgctaaacatcaaatttaatttccctctatcatgaagttggcctaattgaaacatgggtcctgctcgtttgagtcacaggagggccggcggcttaggtgtcactgtcttagacgctactgataaaaaaaatatcatccagtgtgacatgagaaaacatcaacccttttttaatttctgtgacattaatatccaatggtaacaagtgtgtagagtgcagacaagaaatgcattttgcaatcataagtttggatgatggtttcttcatcctcggttctaacaatatatatcctcaagcatgcgttcaccttctaacgcttgcattgcatgccttcctttgcacagtgctgctgtca

SEQ ID NO: 112171 - DNA, 1031 bp, Setaria italica
  Intron number 2 from transcript Si021040m (locus Si021040m .g) derived from phytozome v7.0 (chr-ID scaffold_3; pos 13 147190 to 13148220 reverse strand)
cgagagaaaaggtaagtgggaacattgcatcgatttgctttgcatttcttggattacgtttcgccggacacgatagaatgtttggatgtggcgaatgcttgtcattctcgggtaagtacaggtctgccaggacttgttcgttcgaagtgtgggtgtggatcttattgttcaactgacgatccgcagcttgagagttcacggtgatgtgaagtgaccactgaccactagaagagtcattgcgcaaacagtataaagtggatccgacattaatcccttgatgggaacctcttgctgaggtttgattgagtattcaaacttatgggtttgaagtggattttctgttaaaactgttcctcctttttaacctactcttatgttcatccattcctgcttttggttaatttctggccaaccaaaatgtaggtgtgtgctttgtcttctttaggtagtttgtatatcaaatggcataacaaatattgcaagagtgtaatttggatgtataccaatcagttgtaactgtttccgtgttttacttgtcttgttttccctttagtcttcatctgtggtgtcggctggcctcatgtgtcttagcaccctccatttcatgatttttttttgtttcaaccatatcatgattttcatgtggtttgagttagactgttaactgttttattcaaagctatttccttttttttattcctatgcgttattcatgcttgctgaatgctatagatacacttgttcatgcataagattttgcaaattgctggcatagtttggttgactgattgggaatgcgtactgtcagcaaatcttgtaatattcctaagtaatgcaactatatactgtatacaatggtgaaagtaatagaagtttcccattttcttgataggtctaaatgataccctgaagtacaatacagaccagaagatgtctattaaacttttgtttataaacttcaagagaggtgataccagtgttttttctcattttcaggagaaaaagagtggggtaaaagctaccccaattag

SEQ ID NO: 112172 - DNA, 796 bp, Setaria italica
  Intron number 1 from transcript Si011058m (locus Si011058m .g) derived from phytozome v7.0 (chr-ID scaffold_7; pos 26 376918 to 26377713)
gttcggcctcggcatcttccactccgggatcgaaggtgcttagtacgtttggacttccttttttgccttgggttgccggaattcgagtttgttagtgtgtgctgtgtgccttttatgctgtgtagattctcgtgcggtaatcgtttcgagttattgcaaggaaattcaaaaggttaggtagaagagaagggaatggaatttcgtgctaggtttgtttgtgaattttctgtatgttactagctggtacttttcagtgggttaagagataccgtcttcttaaccacgagagaaaaaatcgctatctcggggtcaatttggtctctaattgatagacgattacgtagcttttgaagtctctagggcaatgatatgctcaacagatccaggtaaactatgtgaaggccgacataattaaaaaaatttggagaaaagcggcctaattttgttgcctgataggtgtatgaggtatgcgctggcaattgttggaacagaattgctcgtcagttttggttgtagtgcggtcccccagtagaagaactaaaaccttgatttagggagtatttgctgttgtcaagctaaagaaactgtaatgtcacttatctgcagtacactagtacgagtactttacttgtcttgagcactgccctatttgctggtagggttgtacttgtacgattcagttttcacttgctctttaagtcttacctgcatttggtagcttgcattgttctatccaactgatttatacaggcttaaactcaaagattgttgtactgtctgctcaaataaacagttc

SEQ ID NO: 112173 - DNA, 791 bp, Setaria italica
  Intron number 2 from transcript Si022188m (locus Si022103m .g) derived from phytozome v7.0 (chr-ID scaffold_3; pos 20 204821 to 20205611)
cgccggcagccgacgctgaccccttgattcccaaggtgaattaagcccagaatggcagaatccccccatagattagggtttccgtatgctcaatttgcatttgcagggttcttgctcgcttcgttgcttccaaattccaaaaagttttgttattttggaaattgaggtcctgcaagaagagctgtttatttggcgcggttaattaccaatcattaatttgatctgcttttcgttcggtgcttttactttggtcgcatgatttctatgaatatgcgagatgcctattccttttcttttcagatctataccagctagggttcgcttttgtttccttctttcttttcggcacacatttgcgcaccaccgggcatgtacaaaagctacactctagaattaccctcctagctagataccatgcaccccagattctgcaagatctttgcacccctcaagctgaagtcaatgacttccctttgctaatactcagatctgaacttaattgcaacactcaattatccttgctatctcaacccatctcaaagttgtgtttcttgacgagtagttgatgatcttaaaattcgtgtgtactctctcagcttactctcctctacatatgtttgtttgttccttttcttgtctatgaactggtgtcctctgacgcttgctactgatttgtcagtttgctgtggagtacgctctattcctctttctttccacgaaatggatattgaccattttgtgacggtgatgatacagtcggagatctcgctctgccgtgtctacaagcgctc

SEQ ID NO: 112174 - DNA, 963 bp, Setaria italica
  Intron number 2 from transcript Si022673m (locus Si022673m .g) derived from phytozome v7.0 (chr-ID scaffold_3; pos 27 075313 to 27076275)
cccggcgctgcagcacagccacacgcaacaagcaggtccctgttccttccctcttttcctctctgttcctgcacctgcaagaagaggacagtacaagctagttaaaacacaagcgtggtagtacttgtgcgttctaaaccttgtgaaatttatggagaaagtttgatagcttcaaaaattctgagacttggtgtgtagctttgacgtactgctctttaacttggaaaatatgaagcagcctgttaagagtccttttcatgccttgaactggattgtgcttatgtttatttgatttcatactaaaataactgtccaactgaaaaggatgaaatctttttgtcagtccacatgcttgatgtgcttcttggggaaaatatgtgcaatcatggtagctgtcacgatttctagaagttgattagaaattgaagaatgacttgatgttcaaacctcaactcttttatcatggtgaagtccctagataagcacacctccaaatgaccgggacttgttttgctagccgtgtactatcacactctagataataaaaatatatgaaatcaggatatagatgtgaatctgtcaagaacaagtccactttttaaacttatttttacctgtataagtattactcctaattcctaaaatgctagtatatgttcttttacttgttgccttacaactgtatcgtgatggaaatgacttttgcttgtgaaaacgtgcttgtgtgaaacaatcacttgctcaatcgacttgttcgtggggttaataaagaaaatactttggacaaataatttcagttaactcaccatcacgtcacgatgctgctttgtgcagttcgaatgtttttgtactcggtaaacgattgccatgttatatattgaaatgttgcactcatttgtcattgcattgcatctccacattcatgtaggaactgcagaggagcaggtgcaggaggagtcctag

SEQ ID NO: 112175 - DNA, 593 bp, Setaria italica
  Intron number 1 from transcript Si009990m (locus Si009965m .g) derived from phytozome v7.0 (chr-ID scaffold_7; pos 33 032235 to 33032827)
tcagagaggtatgatgtagggttgagaatctgaaaacttgtttgatgctaggatagggctcaagctcagtgacatggatgcatgatcaaatttgctctcccctctttagtttcgtcagatgaagcagttgaacacaagaacttgacacgtatgcgggccacgtaactgctgacgtagcacggcaactacgcaaatcggtctcgtctgttcgccttgtttatttcccaccaaacaaaactgtcccctgcctcgcggcctccggcggaccaggaccgcgcggcgaccgcgcctccacgtcacgcgcgccggagaggacccgcccctcacgtaccatccggagcgcccgatggcggcggccccggccacgcacgcctaccgctcttcggcttcggtaatcacttccgcctccacggagctcctttttccctcttcccttcttcttcctcctctcctcaaaacactggtctttgcttcactttaatcgaaggattgggaatggtagtgtgcggattgactgcacacggtagatcagccggcgcgctaatttaccaaatgaagaattaaaaattggcgtcgcactgcgtgtccttcca

SEQ ID NO: 112176 - DNA, 974 bp, Setaria italica
  Intron number 1 from transcript Si010288m (locus Si010288m .g) derived from phytozome v7.0 (chr-ID scaffold_7; pos 33 150954 to 33151927)
gctgagaaaagcggaaataaacagggtagatatcaactccagtagtagtcacgcagatgatgcacaagtgtcgacatgcacacatttatatctagccttccaacaaaacctgctccctaagttcatttttataaactacttcctccgttttaatttgtaggacgttttgatttttttagatacataatttttactagatttatgtctaatacgtacatagtaaaatttatgtttgaaatagagagagtatattttgtgcgttcaagctaatgctttgaccaacagttactccaagaatatatatgagatatgttccacgaaatagctagcatagtttttttttcaaaaaaacaaaacagataggggtagcttccaattgtatttaaagaaagaagaagtaaggccagactaacagcatgtgagttatgtcataaaattaaaagcgtactatttttaaaagaagtgagtccaaaccggacagaattgatagcatagttgatttcctacttaaagcactcccaatggattatgatttgtaaatattagtaaaatattatgaaagaatatatgatcgaagatcaatttttaacgtaaaatagaacgccttatatataaactaaatggtggaagtcgttcatatgctttattataccatgtttttctaaggaactccttaattaccttgacatttccaaaacaaaaaaaaaagactgctgccgcattggcgtttggggtcggacaacccacttggcccaagcacgtgcgaataaggcccaaataggcccatctatcgggtgcccgctatccctgtttggaggatttttttttatcatttttatatcgtggccggtcattaattaatccattttgccatccacccctgcgatttctgcttattgattgatacatgccccccggcctccctccccacgccacaagacatctccgacgaagcttcgcgcgtcctccgcctc

SEQ ID NO: 112177 - DNA, 756 bp, Setaria italica
  Intron number 2 from transcript Si013537m (locus Si013537m .g) derived from phytozome v7.0 (chr-ID scaffold_6; pos 30 096978 to 30097733)
ttccactacgactcaatcaagaaagtgttctacgagtatgtgaacgctgccttttctcttgtagatctggccaattcgctagggtgacttggtattctgttccctttctttggggttctctgttgagcaatgtttaaatatggcttaatttgcctaaattggatggtaaaatagtgatttggaattgatggtttgatagcttctgccagaaaaaccactatctaagtatctaagtcgcttaaatctgatataaactttttttagcgtttcccaatttgcagaataggtgtatcagagtagtttgagtgctgcctatgtttattttgggaaaaataaaactcttaggtctacaagtttaacacaaattgtgttagatgaaccacttcttttaacgcaaaggtaacagctcgtttcgatcaataaagcttttgtacgtggggaccccccccccccccccttcccccctccccgatatttttcgaaaaaaacttcttttaattcgggaaatcgctgctgagtaattcgtcattaattagcctggtcatgtggatttaatgggttttagaaaatgaactcatttcctaactaagaaatttcatgtagagcatataacttgctgaaagagcttgttttctgtatcatttggccatattcttggaagtgggaggtagtgatgacaaagccctcatgtttctattgttgaatctatgctgggatcttctatgcataacaggcacaccggtagattacctatcc

SEQ ID NO: 112178 - DNA, 436 bp, Setaria italica
  Intron number 2 from transcript Si010886m (locus Si010876m .g) derived from phytozome v7.0 (chr-ID scaffold_7; pos 34 035856 to 34036291 reverse strand)
tcagtggggtaagatgattttgtatctatattttgatatctagagatggcttgtaactacctacctgcatgttgcagttagccattttgatttattgttgcattcctagtgcttcatttcagaaatggagacaaaagttaaatatgagtatgcttcatgtttcttatagtatgattaattaggagaaaatcgtatatcgtagacattagtgtgataacaccatcatgcttttgacgtattttaggtgcagtttttgtcggaaaatctagaagtgatggcttcatattgaaaaaactgttacaagctagactatttgtgttttagttagatggttgttttctaatatattgttttcttggcaccttatttacgtaaggcataagtgaaggttcaactcatttcatttttttgtcagaatttcattggcgggcctgtc

SEQ ID NO: 112179 - DNA, 771 bp, Setaria italica
  Intron number 2 from transcript Si010169m (locus Si010169m .g) derived from phytozome v7.0 (chr-ID scaffold_7; pos 27 632155 to 27632925 reverse strand)
aaggtgccacaaacgtaagtgtgaagcgcccgcctccccgcaagcttgacttgcaattgcaaggctctctgttctatttgcttgcaatgcgtcctttgttcagcggactagcaattatctttgtttcacaaaacaaagttcagcatataccattggcacaaaagcaaatggctgctaatgatgctcagaccctatagggccttagtattaaccaatctcgccttcataagactagcaggggacgtcggaaactacataacagaatatagaataaaagttttttgctgtaacactttccaaaattggatctgcacagtgcacctgagcaagtacaacaaatgtctttgaaaagaaactctaaatgatgacaagtataacaatttgccttttctattatcacaggtgatgtttgaccttgtggctaagaaacttattggccttgatacaactaaatcaagagaactgagaaagaactaaagcgcgttccttcaagggttggtatctttcccaatatattttcccgggacaacattttaccgatgcatgcaagtaacagaaatggtttcagtttgagaaccatttaggaagtagaaacttcaaaaagaacaaaaaaaaattacaaaaggtgatctatttctaataagtttttttcgaggactcgtaattacaaataacacctcaattgcttgtacaagctttcttctggctacgttttttgtggttatgttcactgttgcttacttgcatttatgtgtatagggacggaagaat

SEQ ID NO: 112180 - DNA, 786 bp, Setaria italica
  Intron number 3 from transcript Si012947m (locus Si013108m .g) derived from phytozome v7.0 (chr-ID scaffold_7; pos 37 05730 to 3706515)
tacagcaaggtttttctactggtctattcttagaggtaatcttcgtgccctttatccttgtctcctttccgaaaataacaagctgctggttttatattcctgaagaacgttgcagttacgtgtcatactttataaaataaagtatttgtaccgagatatgttttggactttaatagtttacctgaagacaatgaacaacctcataataagatccacttggtaatgttgatctgatgtctcatttgatgtccctgagttagtacttagtagtcattctagttccagaagttgttgcagcttaagttcattttctgaaaatcacaactttcacacacatcaaggattgccggtagcttcatgaagctgcctatgaattcgtgttgctagccataaaactctgtttaggtcttgtactcatttgtccttgtatatcaaccatggattgtacaaatttccctgcttaagctttatgttatagtactgtgtcacttctgtcagatggtttgacacgtgctcttaactgtttaaggtacagaatattgttaggggtttgttgaaccattaaagcaacctactatcttctttgctttttttgaaaactatatagcgggggtctccccgctgtatcttctttgtttttgatggaacataaaatcctctagagttcaagctcttgtgctgaccagtgttgtattatatcaaattgcatctgagaaaaaatattctagagtagctcccaaatttcaattttcttatcagtttgtattgatccttctgtgcagccaa

SEQ ID NO: 112181 - DNA, 631 bp, Setaria italica
  Intron number 2 from transcript Si009562m (locus Si009562m .g) derived from phytozome v7.0 (chr-ID scaffold_7; pos 34 650899 to 34651529)
agatccctgaaacattattcggactattctttgaggtcagatattccttcttgaactttgtgccagttcatcttcatgcattctctatcgatccatccgcttctacgtttaatttgttgtagcaaaagattttatgcttctgtacataccgtctcgtggggttcttctccttaccacagttcgatctataggctttagaaattggagtcccagtgaacatgtgagttaacccaggagacataattagattttccatatttttttgatttcgcgattacgaggaagaatgagtttgtcatctgaggatgtaggcttctagcatttgttcactctgcagtgcactcattaactataatgatatttcagttcatgtccatgtcttcacacatcttatttcaaattttctttcattcatgaatgccatgaaaatttatctgcccctacttattagaccaagaagcagtcaaattcacgttgtgcactgcagtttcttggttgatactggtttcaattttcactgcatcttaatgaaaggaaaaaaatctgaatattccatgtaaaccatgctggtttcaattatcctatatctatctgtggtaatttgataagtgaatactataggagatcaacc

SEQ ID NO: 112182 - DNA, 660 bp, Setaria italica
  Intron number 1 from transcript Si023869m (locus Si023854m .g) derived from phytozome v7.0 (chr-ID scaffold_3; pos 28 508306 to 28508965)
gggacttctccttgcaacaaggggccctcaacgtattggtactacgctgattccctactctatgcaacagaagatgactctagttatgtatttcgtttttctaactatgcaaacacatttttattgtttagaaggcttcaatggttcttcttacttatgagatatttgtggtttatgtgaaagagattaataaaagatgggacgagatatttggctgaaatgaaaaaaaaatagtaaagcctagaacgctgatgtcactgtgataactatcttaattataatcctgatgataatacatggtagtgtctttagctactactccctccgtcccaaattactatttgttttggcttttctagatacaaaacttttgctatgtatctagacatagtatttatctaggcatatatcaaaagctatgtatctagaaaagccaaaatgaatagtaatttgggacagagggaatgctaaaagagaaatgtttcatactactattgaaatagaagtgctggataatgattcatgtttcttgaaccaaagaagcaacgtcatctgtaatttcaactaggattgtacagcctttgtaatggtttagtagttaatcgattttttcataattccttaagagaaagatttgatgttggcaggacattggatttc

SEQ ID NO: 112183 - DNA, 876 bp, Setaria italica
  Intron number 2 from transcript Si022040m (locus Si022040m .g) derived from phytozome v7.0 (chr-ID scaffold_3; pos 23 408148 to 23409023 reverse strand)
atctgctgctgcaacaaggtataattccagaaatccctaactcattctggttcatgatctgaaatgcccttaagaaatacacttgtcagtagtccatctttattcgtttgcacttggtcgtattcctctcattccataacatcgctactaatgttttatgtacgctcggcactgaatttggcagtgcattaagtgccttcctgaatgatctgtttcctacatatttatgtttgatagtagctgttcagcttcattgaattgcattttctgatatatgtgtgggaatatttttctctgttcagtttctcgttcaactgttggagtaatgttcggaagttattggaatacatataatgcatgcagattgcaaacactagtgtttgtcttatttaactttcttcctatgattggtattgttcacagtgctttgtgaaaatttagtaataagatgcatagcaataccataaacaactttattccctaaagaagtgtgtaccatttaatatttgattgaagtactgttctcttgtatgtacagtttgtctgctgttcatgggatgtcttcagttaagcaaataacaatgttcttttgatattccctacagatggatatgcatgtgccatctgaagataaactaataatgatgttgtttggctattgtttatagcctgcactagctaataatgatgatgatctagctatctatatttgcttgttcctgttgtgatgccacttttgacaagtttgttccctaaagaagtgcagtgtagtagttaattttgattcagatcttgcctatatggtgtatgcttcctgttcatgcatctattccattatgagctaataatgatcttatgttgcttttctgttcgtag

SEQ ID NO: 112184 - DNA, 723 bp, Setaria italica
  Intron number 1 from transcript Si007147m (locus Si006943m .g) derived from phytozome v7.0 (chr-ID scaffold_4; pos 19 102628 to 19103350)
taaaggtgacttactgtacctcaatggaattttcatttgttcatatctttcagtttatttgaacacattactgctgatgattatgtattttgtgatctatcaaacgtggtcctgacatgctgggcctcaaaatgatccattggtccctttgaaaagaagtaaaggaagaaagaaaaacaagactcaatgacttctttttttcttatgaaaaagaaatggaaaacaatttctagttatagcatttcagttttctcttttctccaatcacaaatataagtccatttaggcttctcctaagtcaaacttcttcgactttgatcttcaatatctacaattttatacagattagcaacataagagtgatattattatattccatcaaaaaataagtatattagtctctctctctctctctctctctctctctctctctctctccctcttccaactccatgttggaaaagaaaacctctaaaatgcaagctaattgattgttttatttgtttatctgagattatcttgtgctttcctatttgtttcttctgaataccaggcagttcattccttttgtctttacaaggtttgctaacctaaaataccaaatatattgtgtaaatgttgaaggtttacttttctatatgctatagggatctgcagttatctgttgtgctctgatgatggtggattacttttcactttttcagagattcttgccatcagagt

SEQ ID NO: 112185 - DNA, 475 bp, Setaria italica
  Intron number 2 from transcript Si010478m (locus Si010478m .g) derived from phytozome v7.0 (chr-ID scaffold_7; pos 29 101819 to 29102293 reverse strand)
atgtaagtttgatcttgtaagtatctcggggtgatgcaattttttctgctccatttggctgtcttgtgttcttacatcatcggtaattgaattagactactcattaccagaagtgtccgatgttattattttgttaaaagagtatgatcattcttcatttatgctgccaacaaaaaggttagactcaaaagtgtgaaacacattggcctgtagtttttatgctgtgtagcattggtgttgagtttatgatccttcataatgttcttggacctaatcaagtcctgaagtttcacattgtaataaaaatataaaatgcagtttgatttcacttctggtgcatgtagataacaattagcaaaggtttgtgtagtgtgaccaagctttattaactttataacttctgcaccatttcttttagctgaagactacctcaactttatgatgaaaaagtgtatttgatatctacagacaagga

SEQ ID NO: 112186 - DNA, 444 bp, Setaria italica
  Intron number 3 from transcript Si023099m (locus Si023099m .g) derived from phytozome v7.0 (chr-ID scaffold_3; pos 45 930072 to 45930515)
caagtacaggactgtatagagaagaggccaccaaggtaagcccacatgcaagttcattgttgcattcttgtatttatcttttaagggatattctattgtcatttagttatgtttttgagatggttagatcacagaagaaaataatggattgttttaattgattgtaatcctgatttcctgccacatttcctggttcatattgaatgatgaagtacttgataacttcctattcatttgaaacagaggtggctttgtatatcgcaatgctccaagccttttgatacattttctatctcctgcatgtacatatcgatgcagccacctgatacaagtttcatgttgcatggcaatattgcttgtacccattacttgtagtcttgttgctaggcctctcgtttttctactagtcttgatgcaagtgacatttgatctataggatatcta

SEQ ID NO: 112187 - DNA, 439 bp, Setaria italica
  Intron number 1 from transcript Si010347m (locus Si010314m .g) derived from phytozome v7.0 (chr-ID scaffold_7; pos 23 553766 to 23554204)
gtccaggaactcgtacgcttacacgccggatcctggtacgttttgtgtgtcccgttcagtacagttttggatgcaacaacttttttttttgttggtcactatttttgttgttcttttgctctctgatcgcttagcttgtattaggattatcctcaactcctcatgacttgtgagtcagcatagagaaaactcagcgttgatttttcttttttgtttttctctgtgtgtgttctttgctgtgctctgaactgtgatgactactgacacggcaagttgtgaagatcccctccctgtacacgcttgtattgtattctatcaaacacattgcgattcagcatctcgattgcctctcggtgatagtgttcttaccggctttttacctttgatcatcgtctcggaaaaagggcaaggcggcggcggccccgaggcggaggaggtg

SEQ ID NO: 112188 - DNA, 932 bp, Setaria italica
  Intron number 2 from transcript Si025674m (locus Si025512m .g) derived from phytozome v7.0 (chr-ID scaffold_3; pos 15 404071 to 15405002 reverse strand)
aagaattgaccaccgagcacctttcaaagttccaggtctgctagttctatactgtgttaaaatttgttacttcttgttgtgttgtcttcattcctatccagtgataggtagcacaatcattgttgagaaactattttatttgagatcccattttgaagtgtatgacattatagacgtattcaggttaattcctggtgttgatagtaacaggctaatccatcctggcctttgatatgatctttagtgtttctgctcatattctctatttgatttcagtatctgatcctatgattatgagtaattttttcttttgtatccaagtgtcatcgtgctcatagtaccaaatgatttccttttgtggggcctaggtgaatttatttgcttgaaatgaaaattactgaaacctggagttaaattgaatcagtgcaaatctgtattttatctctttgccaattgcaagtctgtgtagggtttgcttataccatagatgtgcttccatgctatcagatgcatccatgacctaacttttccaacctactttgtgaaagaagttggttggttattctactgcagaaccccttaaccaaccttgtatattagtatctcgctgtgtgagcctgatagtatcttgatagctttccacagtcaataaatttggaaatctttaagtgacaccacaattgcaacctccgattagtaacatcatatgacttaagcctatatgttcagattaaattgataaagtttccctccaatacaatttatttaatgatagtgacatgtttggtagcatcactgaatgtattgctgcagtgttcaagtcttgtatcataaatcgtcaacgtaactctgtgaagtcatcatacagttatcatacttacactttctgattttcaggtggctgttttcactgacattagtctggacaaggc

SEQ ID NO: 112189 - DNA, 921 bp, Setaria italica
  Intron number 2 from transcript Si010751m (locus Si010751m .g) derived from phytozome v7.0 (chr-ID scaffold_7; pos 15 672051 to 15672971 reverse strand)
gaattctgtcacggcgagtagagaaccaggtatagacatgcaaccaatcttttgaaaaatagttgcctgaatctagataccacacggttgtctctacattttccagttttatgcaataagtctattgttgatacaattgctgcttttgttttgcaatatatgtccagtccgcatattaggaggcaaaatgccataatatatgaaattgtatcaaacttgcacccattagattgaccagaatctcatcttctaagaaaagcaagaatgatgcttcttaggtactccctccatccccaaaaaagtcattctgggatttaaaatttgtcccaaaaacaagtcattacccccatttagtatgtgtatgtgcatgcggcagtcaattagcaccaaatatggctaataaatagtggcaagcaaggtcattttacctccttgttaatctgtcctagaatttctagaatgattttttttttggaacggggggagtatttgtgtaggatatatattcgaaatgggagtagtattaaggatagtacttattgtaaattcattttgagtcatgacagttcaattgcaaaaaaaaaggatgcttcatgcagtagtagtactgtaggttctgtgaagcttaattgttctgtaggcattatttgtatttgacatacttattcacttttcttttactgtttaatagagaaacacttgctaaaataatagatatctcaaagttggttgtcaaaatgtatacacatactgagtggagatagatttgcaaataaattaagagttgaaattgcataagtttttgctactactttgctttacttttgatatcaatacagtatgacattcattttaatatatgttgcctcttctttttctttgataggaatctgctagaaccaagacaaaggaggagctttt

SEQ ID NO: 112190 - DNA, 930 bp, Setaria italica
  Intron number 1 from transcript Si023543m (locus Si023543m .g) derived from phytozome v7.0 (chr-ID scaffold_3; pos 45 587270 to 45588199)
gtcctcatcggcctcaccgcgtaccaggcaagcccgacgaaaatcctttgcatctcaccttttagcggcgaagcttgtccaaatcttgcgcggtaacggcgaattcctacctggtttcgggatacggctgccgggaatttgtaggggagttaacggaattcgatgccgggttcggtcaacggtgccgttcttgtagtgtcattcataccttccaggatggggacaagatgaactgccagatagattttgtttagagagaattcgttttttagtccttgaggaattctgacttctatgttctgatattaattcgcaaaacaaattcatgtatgtactaaagggtccagtatatttgtttagaatattccaattttcttggtgtagatataaccacttgtacgcttatgtgctttgatttgtaattttttgacagtaaggctttgacttcttgttcaaaaagtgctgctagtgcactacttgaagcttcttgttcttgctgctctgtttggaatgttagcaccagtgctaggaacctaggactagtggatgtaatcatagatgacattctcgaattcctttagttgatgtgaaaccagcctggtcttcggtggcacttgcattatcattgctgtagtgtctaaagctcgaattcaacatgattgattcagtgttactaatgtggctggttggtctcaaagtgtttgtgccaactgtcatgagttttaagctttttatgtcaacacatccaacacttttctaatttctgcattctatggtcgtattcatacgcaaattacagtctgtatgtaaatttagtgatttatgtaccaatcggcctcccttcttattagcttgaccaatcttgttgattatcctgctgattttgctttctgcttttataccagcttatctgtttgtctgatttggagt

SEQ ID NO: 112191 - DNA, 540 bp, Setaria italica
  Intron number 3 from transcript Si010441m (locus Si010441m .g) derived from phytozome v7.0 (chr-ID scaffold_7; pos 18 463865 to 18464404 reverse strand)
attggttggtaagtgttgttttattacgttgtgtactatttctacacaatacctactactttttcctcgaacgacgcaggagagctgcatgccatttcattaaggtaggaaaaaaaaaccgtacaatagctacataacagaagcagttcccagtacatccacaattttggaacacattcataagtcctaatgcataggtataatgacatcaagtgcctggatgcttatggatttatatggagctgatttttctttgcacaatacataaattgttggcttagtagacatttaaatatacacaaacttcaattcgtaatccagatatatctgaaattgccatagaaccagtatactgaaatgtggtttttctgttgcaatggaactaggtatgattgatagttatttctttctgaaggctgcaaggcatttccaatatcattttccaaatcttgctacaatttgtttcaacgatctttgatttatctttttctcctttatgtgttttttacttgttgacagtgatattcttctccaggtttg

SEQ ID NO: 112192 - DNA, 889 bp, Setaria italica
  Intron number 2 from transcript Si010441m (locus Si010441m .g) derived from phytozome v7.0 (chr-ID scaffold_7; pos 18 464435 to 18465323 reverse strand)
tgtacagcccaagcacattttttggtaatgttttagatccatatctgtcaaagaagcttgtttcttgtaggtttcactagtgacatttgtgcatagtaaagcacggttgttgtccctttagccaccaatagcagaagttatttcttgctgcaagttaggaacatttgcattttagcaattaccaagtgcgtagccatggtatcattactcatcgatggtaccaaggatggcagccttcatcatgcattttagtcaacccctaatctctgcctcttgtcatcaagtagaccatggctatggtgcatacaagatggctgttttctgcaccttagtggttactcaatgtcgatgttagtttgctagaactctacaccaagatgacacatttattattggaaaatttgccagtcccatgcaagtttttgcactctttggatagcagaagttcagctttatggtactattgttacaccagttagtgctacctgcattgtaatgagtgatttcatcatactgcctccatttaaaaaaatataaggcatataattctttttgactttctcactgtcttcactccagaatcttttgggttaggttagattgaattcatcaatcttttcttgtaaagcccttcttttagaattcaaagattttaaagttactggaaaattgctgttaaaggaggcaatgagccctcatgtaataatattgttgaaatacaaaatgaacattaaagatgctgccgaactttgaaatttgaataaaacacacacttttacacagtttagaataagcacgaattgtgccagaacattttctttgtgttcatggtgttgaatgccattaaattgcaggcaacttgctgcaacatatagttcggttgacgaat

SEQ ID NO: 112193 - DNA, 1055 bp, Setaria italica
  Intron number 1 from transcript Si024199m (locus Si024199m .g) derived from phytozome v7.0 (chr-ID scaffold_3; pos 36 30161 to 3631215 reverse strand)
cgaggcctcccggcgccgacggtgccggccgcgtggtcccgcgagatcctagagacgcgcagcccaccaaaagcggcttaggcgctccctcgccttgccgatgccgccgccaccgttcagggacgtggtgcagacggtggcggacctacgattttaccgtaggtatgtaaaaaagaaattttattcaattcgataaaatcatttatagtttggtaaaattatattctaattcggtaaaccacgtgcactggacaacatggtgtaagttttaaatttaaaaattatgctagaaacaacaacaaatcacaatataaatagtcaaatgaaatacaaatagtttgaaatatagcataaaagaaacttacaatattacttgtttgctttgtttacatgctattttttgaatgatatgaaagtcttgattatattatcttcattcacttggaagaaaatatcctgctcaataaatgtgactagacaatcgtccaacatactatcacctagcttattccttaactttgttttcactataaccaatacagaaaataccctttcaaacactcgttgttgctactggtaaaagcaatatcaatttgagaagcaagtaaaccatatatacattgtgcctccatgttagaacaagcttaactgagagatcaacgatgttgtctagattcttgaggttatcatctcgtcgcatgtcatcaatataattatcaagttgcaattcaagttttagcaaatcattgttggagaagtccttaggataaaaatttagccaatctatgtaccttctgggcgtcaaacgaagcaaatgaattggaaagactgaaggctgccatacaagaaagtagctccatattgatctcatcgaacaagctcttgtctaatttgatcaatgataccaatatatacgagcttgtctaatttgatcaatgataccaatatatacttctcttctaaaatgatcatcatttgtttagtttcgggcacaggcgttattttccatatggcacataatcaccatcatagcaggaatttcaacatcgtgttta

SEQ ID NO: 112194 - DNA, 465 bp, Setaria italica
  Intron number 1 from transcript Si011294m (locus Si011200m .g) derived from phytozome v7.0 (chr-ID scaffold_7; pos 32 877531 to 32877995 reverse strand)
ctcaggtgaggggaaccagctgcaacctagcgttcttcttccatctgaataaagcgcagtgtggcttttcaaaaaaaaaaaattctaactttggtccctgtagcatagcatatgaataatgtaatatactccttttgttccaaattataggtcattttgacttttttagattcgcaaactttgttatgcacttagatataccttatgtctagatctatgcatctaaaaaacaaaacgacttgtaatttgggacggagggagtagaatctaatagaatgatcatgtcatagacagacacatgcttggtgtcagtgtttgagagagatggttttggcaatttgcgtgtatagattgttgcagcactgcagcacaccctgcaacttaaatgcaaaagattttaaacggaaaccacttggtttgctcggtgcagagccaccttggagaggtggtgttcgtggagctgcc

SEQ ID NO: 112195 - DNA, 761 bp, Setaria italica
  Intron number 1 from transcript Si010356m (locus Si010356m .g) derived from phytozome v7.0 (chr-ID scaffold_7; pos 29 72093 to 2972853 reverse strand)
agtatcgaccaggtacgcccttccattccatcccctttcctccccctgtcgaaatcgaactccccaaagccaagtcaattttattcagatctgacccaattataagtatatacatgtatttattaactaacttcgattatctgcaagaaaaattattgggatccgcccttgtatgcaagcattcatattagaacaatgaattgctagtgttttgagacttcaaatgtatgcaagtctgcatgggtgtgcatcagatgggcataaggttatgcttatgtagttatgttagtgcttaattcaactcaaatgatagtagtgacccctatttgggtgtgaaaatgacttctgtgcctcatctaggactggccatcagttggtgctgcagaatgcttgtgttctgcactgcagataattactaggtaaaatactaggtcatttgcttttgattcaacctggaagttgcatgtgctctttattatagtaataaatacggatgaagattcttcattgaagaatgaaaaaacagagaccggcttttccacagttaaagctggttaagataatgtcttctattattttgcctgcttgtagtgtttaccaaataccaattaccactgtattagcatagaaaaacaataatcattatgtggttatatattctagcattattgctgaatgcagatagcaattactacatatgtgtagtccatgttattaatttgttcactacctttcagtgaatcgtgaatagtttgttgaag

SEQ ID NO: 112196 - DNA, 831 bp, Setaria italica
  Intron number 2 from transcript Si013306m (locus Si013306m .g) derived from phytozome v7.0 (chr-ID scaffold_6; pos 25 899010 to 25899840 reverse strand)
gtcaggagttggtggtatgcattgttgcctatttcttttttcaaaaagcgctgtctagcagttaagttcctttggaagagctatggcatacataaactatatgacactgcatgataattgaaaactgtttgcatgttgtttagttacatcttcaatattaagatagcggcagttgttcaaattaggccctgtttggaacaacttaaatcctgcttatggtcaaaataagctgaaactagaagccaaacggcgcgcttttttccagcttctcctagccgtgcttctctccacagctcccatttgtactaaaacgcagaagctggactaggcctgcttatcagagaagcacttttcccatattagtgcagcttatctgagaagcgcttctccccaccgctgttccaaacagggccttagtctttcatgatgtcatgatcatgttctggtttctttgagatcacagtgcaaagttgaggagccaaagttagggctggaaatggattggatatgatttggatagtgcctttaccgcatttgtttccataatttaaattgaacacaatacaatcttggatgtggatacacatcaaatgttatacagacgtgaatacaaattgaacgtctttgcttcactactatacttaacttaaagctctagaatctatacacagcgtaacgtattttaatttatcaaataatgttttggtcgcagtttcatatctgttcatcatcctgttaatccaatgtatattttagtaagttcttaaactagtattaattctatttaatatgtccattcatctttctttttgtaccagattaatattaacg

SEQ ID NO: 112197 - DNA, 479 bp, Setaria italica
  Intron number 3 from transcript Si012632m (locus Si012632m .g) derived from phytozome v7.0 (chr-ID scaffold_7; pos 21 012643 to 21013121 reverse strand)
aaattgacttgtttcaaaagggcttaaggtaaagttgctgcattacatgtatacagtaagatacataatgcactctgcatgaacaagtggcaaacttattttgttaggtttgtaaaaaataatgtgtaaaacatgcaaatcagaaaaagcaaactgaagtcttcgtaatagcacaaagatggtacaagagtaacacatggtgcatggcatttttcatataatgtattcaggagagcagctgtaactttatagctagctagaaagttgtttcttccattaccttcctgctttttttcttttgtaaaactcaaacaaaaacaataccgctatataggtcgaacaacttactagtatgaactgatgggccatgttgaactaccaggaatccacaaatcacaggaaaatgccagatttacagtgcttggtaagcaagtatcgagtacgggactgattagaaaggtgcacatcaatgcaggtac

SEQ ID NO: 112198 - DNA, 803 bp, Setaria italica
  Intron number 2 from transcript Si010440m (locus Si010440m .g) derived from phytozome v7.0 (chr-ID scaffold_7; pos 32 667951 to 32668753 reverse strand)
tcgcagtcggaggcggacaccaagcgagccaaacagtgagtttaattgattttatcattgcagtcaatttgaagaattatgttcagtttgtagaatttttgttcatgaaacatcaatagtggcgtgcttctctctacttactgcaaacaccatagtgagcctgcattttaatttgcaatgttctttgagcccgaaaggtaggcacatagttatactgtatgttacatattagtttgatttctcttatgaggagttgctgttttaactggtgtaaatgctatcgaataggacaaatgtgtttgtgtgggaatcttgtttatatatttagatatacattttatttgtgtctttgctgtggcagttccacatgactacaaacttgaggtgggctaaacagagaaaaattttcctaaagcggtagcaactatataatctcaaacaaaatgattgttttttacattagagggatcttatcaaaacagaatccatggaaagctctctctagcaccctaagatattgaagacctaatcagatcgaactacgcatgtggatggcatacgtctgtcagtgtttgccttccttaaatttaggaaatccttgaatgcaatataggggtgcacgttatactgtacatcagacttccctttgttgtcaaaatatgcaaacttgaatttgtacttccatcaaaagggttaataagatgcaggccccatgtggagtgttcatgttgatagatgctgatagaccttgaatgagctgtacctatttaacttcttcattttttatgtcaattgcagacaat

SEQ ID NO: 112199 - DNA, 697 bp, Setaria italica
  Intron number 1 from transcript Si009598m (locus Si009598m .g) derived from phytozome v7.0 (chr-ID scaffold_7; pos 31 952236 to 31952932 reverse strand)
aactggagctcgttgaagtcgttgctgaccaggtaattatcaattctatatttgttgtgcactcatgtatacatcatttgtatctggtatggttgtccagtaaacccttgcattttttttaccagtatctactaccactacaagtcttgaatcgttttagttttgagcgaaaataatttttcttgagagttattttatttcttaataagatgccttttaagaaagtgatgctcttttatagcctttcagcactttcagtttgtggtcattgtttagaaggacttcagttgctaacttgctttaaatgacattttccattgctattaaagaaatatttctggaatattcagccaagtgctgtaacagaaactgtgttattctagagttgattaactccttttgatgatgcaatattgtctcctataaggtttagtagttgccttgctaaatcttccagaaatgaatttgtcatcctgtttgtttttttgtgttgtttgcagcgatgagttctcagttttttttttcacttcacttattttaagcgattcttgctgatgcagagcctatgtgttatcacttagcatatagatgagcttttgtatgaagtattttgcactgtttgccatgtcttctgtcattataaatatcataactgaataagatcatttgctcatttaggtggcagttgcattgtccc

SEQ ID NO: 112200 - DNA, 536 bp, Setaria italica
  Intron number 2 from transcript Si024056m (locus Si024056m .g) derived from phytozome v7.0 (chr-ID scaffold_3; pos 12 219118 to 12219653 reverse strand)
aagcaacaacatctaatacctctactgaagcacaggtgatgcaatcttactactataagctttggccattttttaatctgcgttatctagttcatagtgttactcttttcttcttttagtcgctccaacttttgattatatttaccataggtacaccaatgctagatcaaaattcactaatccataatgattgtttcaccacaagctagcagtagaaaaaagtagaggtgctaattaagcatacgaccaatgttctaccagtttctttagcatgtgtttgttcctttggtgcatgattttttaccttgctgcatggatctgatttgaagacattgtcttagggggcacgtaagaggttcccaatttatatctctttattattattgataatattttcctcatttcagacagtacctgcataaaataaaggaaaataccatctaaaaaaaggaaaatatgacagtagtcaataccttggctttttatgcttaatggataaagtttgattttgcagaaatcaacatcttcaaggaccg

SEQ ID NO: 112201 - DNA, 789 bp, Setaria italica
  Intron number 2 from transcript Si022942m (locus Si022942m .g) derived from phytozome v7.0 (chr-ID scaffold_3; pos 12 008700 to 12009488 reverse strand)
gattccgagccacaaaggcaagtctgtaccatctctaggaaacttttgcatttaagtatattaagatattgagtatagccatctaaagattattatatgtttaatgttgttttccccctacttgtgcagttgtgttactgtcatataatatattgttggaacaacaagggtacctaattctctttgatactaattccctgtgagtgtactttatgaggatgtgagtgaagtgataaataggagtataaatatagttgtttgaatatcaaagatccaaagttgtatggcttcatatttggtctgctaagattattcttttgagtgggattgaggtgctgttgctttatttttattcttctctttgaagatataacattctagatgcttcaacagccttggcccaactgtttttctatctccctttctctttctttttttttggaaaactttttctcgtgcaaatttgttccacctgtgatgtacagtatatcttcttatatcaatgtgatacagatcaaaagtgcgatatggtgttgctattcttactgtaaagaaaggatatattctcaatttaaggcaacaataataacatgcaatgtatggcaacaataataacatgaagctttttgatccaagcaggttgcggtaggttagatatgaaatcccatgggaatcacaaaatagagcagaaaggattgtgaaagaataaaaagttaatatgtttcttcttgagcactgtacattaccatcacgattaatagtctggcacttttcaataaaacttgcagg

SEQ ID NO: 112202 - DNA, 827 bp, Setaria italica
  Intron number 1 from transcript Si022367m (locus Si022367m .g) derived from phytozome v7.0 (chr-ID scaffold_3; pos 52 37598 to 5238424)
gtttacggaattggggagacaagtggacaagccaggtacaagacgtccaataatccaggtacaagacgtccaataatcctgtttactactactagcaccggtgcgtctaatcggctaatcagatgccatctggatggacggttttccgagttggcatacgagttcgaaacgtgccagtttgaaatactactccggtggtagatgacatgtactagcgctgtacgtggaattagaatttttttttttaggaatgtgtgctcgttttctttttcttcgtgatatatatatatatatagctatctattcctttttcttttactgaaccataaataattgatcttgaataaaatagtactcattaaaggatgatatagcaaaagaagcaatggataatacaaaataaacataggataggatagagcaagaaaggtaaatcgatgaaaaaatttaaataaatagttgcagtatgcaaccgcattcacgcgtcaaatacgaaattcctgaaaagaaggttttgcaaatttgagccaatcaaattaaagcaaagcaaaacttgccgtccaaatcaatttagtcacctcaccacacaagataagaaactgagccgcgcccacaccacactctgatgaacactgcacaccagcaatctcactggtagtccaggctcacagccacattttccttggctgagatggcgacccccagggccacaaaccaagctggaccagtttgcccacgcctcaattcctcttcctctataagaacaggaacagccggggcgaggcgccacagagctccagagcccccgccgtgcgtgccccaccgcc

SEQ ID NO: 112203 - DNA, 771 bp, Setaria italica
  Intron number 3 from transcript Si023551m (locus Si023551m .g) derived from phytozome v7.0 (chr-ID scaffold_3; pos 15 519317 to 15520087)
atttcccgccagattaccccttcaaacctccgaaggttagaactcaggaggtttatcttatttacaaattccccttttattcactagttattgtgtattgtgcgctcttgcaagatgtgtagtattgggtagcctgaatgtggttccctttaataagtataggcgtcttctgagtaaaagtttgtaaacaagaaaggctttttgttgttcctttttctcctgctaatgtcatcatcctggggggagggagatcattgtacattatcccttctgctatgtgatagcttcacctttctgttagtactttgtccttggtcaactaataatatggttatagttgttttatctgctggcataaaatcatcttttagtgttagctggtaatgcattaactttttttcctggatgaagtatccctgttaatatatcctttcagagttgtagtttagaactgtgttagtgatttcgtacacctgaggaaataataaatttcttacagcttctctcaaattaaatatttcatgctaataatttcaagaaaaacggtatgttaagaatgtcatggattattgtatgtttgatacctgtctacatttcctattaacaatctgctttggcatcttcctttgatggctgaacttcacgagccattaaatcttgaggtttcttttacttagattttgttgttttaactttgtccatgtttattgaatctttgttgccctgttcattttaggtgtctttcaagacaaaggtcttccatcctaatat

SEQ ID NO: 112204 - DNA, 592 bp, Setaria italica
  Intron number 1 from transcript Si011119m (locus Si011119m .g) derived from phytozome v7.0 (chr-ID scaffold_7; pos 19 424619 to 19425210)
caggttttgactgaaatccaaagagagtgattgaaataacaagcactagggtttgaacttaataagcagagggggaaactcttcttgtaaattggagcaattttgaaaccgcaaaagtcaaaatctgaagtggactgaaacaagtgctaaaatagctcgagcaaaggtctcgactaaacatatattgaacgcaacgtaagaggaatgtgaatggggataaaaaaaagttatacatagagaaattaccaaccaaaaaattttcacaacccattaaagatcacagagttagagtacatagaaaataaacaaatgagagagaaataaacaacggacacggaccagccccatcttttctcctcccatccaacgggccggctcggcctgcccgcccacaggatagaaccgttggcagagagagatccaggcccacaggaggagggtgtgggcgttgggcccggtgtgtgccacgcggacgcggtcactccgccacggttaaagcacccctccgcgctgtagcagcgtttttatccgtatcccaaattcccaatccccgtgaggccgtgaccgttccatttcttccgcacccatccct

SEQ ID NO: 112205 - DNA, 807 bp, Setaria italica
  Intron number 2 from transcript Si014146m (locus Si014146m .g) derived from phytozome v7.0 (chr-ID scaffold_6; pos 11 059721 to 11060527)
gcggacttacctgcaaggtgggctcctcagcatgtgattcacaacttctgcgtttcattggttgataaattcccatgtccatcagttgcatcttcaccatagttgctacatttttgcacaccaaaagtactatgacatctttcaataatactaaggtgcaaacaacatggaatgtttactcaaacgaattggttggtcaggctcaggccttgcaacttctgcaaaaggtctacgacatccttatattgaatggcatcagataaaaattagaacataacgttgtttctggtttgatttggtccctatcttgtgcattgtttattttcatcatgtccaacatttgtgcaagagatccttttgcttttctctggaagatgatgtaatatgagcataatttctgtggcatcttaatatcttgttgtagtgattgttcttagttcctactttattaaggtgtgaatagaaattgggaagattaaatgtttgtaattgtagacaaaaaatgagtaccaatgaaaacaactttgaaaatggaagtatacatttctgggcgagacttatgaaaatcaacataatcagcgatctcagagagctaccgtttggcaccaaagttaacttcttagatgagaggctaaatattagttacatactgttgtcgtgcttgtctattgatgttctttctccttgtcctctcatgtgatggtccttgtactttgtgcattttcaagcattgaagtataatcatttgtaatagttctgttgcaacctactcataaggtgcttgaaaaggaagcctttcagaagcaa

SEQ ID NO: 112206 - DNA, 923 bp, Setaria italica
  Intron number 2 from transcript Si021194m (locus Si021194m .g) derived from phytozome v7.0 (chr-ID scaffold_3; pos 50 502006 to 50502928 reverse strand)
acactgttggaatttgtggtttaatttattaaccagtatgcccctctcttcttgcccatccctccccctgtttcttgctatttcttcttctgctactatctgaacatagacgtaacaaaaaaaaaaaacccgctgccattggagtcaccatttgtcaccttatatgagttgacaccatttctacttgcttcatatccttaacaaaaattttattgttctcctttttgtttaaatcaaagacaaatggttgtaaaaaaggagtacaagaagtagcattatagcccttgtatgcaccattcccttttcttgtgcttaggcaatactttgtttaccaattatatgttgttacgctttctaagattcaataaatagacattggtatcaatattatgactactcataggctgtttgattgtcatccacttgcatttctaaatgtcactaggttcttaatcttcaaaatgcatgaattaccatggccgttttatattctgtgctttcatccttgtccagacgcagaaaataaacttgcaaattccatggtttaaaataatgttaacattgctggcatacaaatctcgaacctaataacttcatttgttagtcacaatgttagatagattggatatatcagcatggaggcacacatgctactccatattttcattcatcttgcacaatctgatactagtaaaagaaatccttgctcagcggcttgcagtatgcccttggatctgcttttttgacctgcttctgagtccttgtgctttagattatgccaaaatacttatcatagatcaaaagagtgctatttgactcattttatatgattgtctgatcaattttttaattcagaagtgcaaccttggagtacctgtttagctttaagagttcttacatattgtgaactaaatttgcagttc

SEQ ID NO: 112207 - DNA, 670 bp, Setaria italica
  Intron number 3 from transcript Si023028m (locus Si023028m .g) derived from phytozome v7.0 (chr-ID scaffold_3; pos 10 34421 to 1035090)
aggaagcactaagaatagctcccagatttcctcaggtatttgattttttttggaaccaccaaatttcctaggtatcactttgcttgtatattcatattcatgccttgctgttcacgttatgatgtctacctccacgggaataagcttgaaaagtaccaattataatgtctatttatgttttcattgtctcaattatgaattggctggttgcttggttccagtcactaatgtttgctgcaaacttgtgtgaatgcctacacagtagctgggtgataggtgaagtgaggaaggtttggtacttgttacaatcaacacaaccaagtggtaccctcatccagtcgaactgtacttttagtaaaatgtttgtttttcttaatgcagagggtgttagtggcctttgggtgatatgtgctcacagttagtatatacacattatctgaaactaatccatcattcataatctgaatggcttccacttctgtatccttacatttctgaaatgcattttccatggtatgactttgacgaacagcagtcttcactgtatccttaggcatgccaggcatgccttttctccaaactgccgctgtttttattgttattattaagcatgtcatggtctttgctgcccttattgatgatgttttgcaggctcacttattgcgaggtg

SEQ ID NO: 112208 - DNA, 656 bp, Setaria italica
  Intron number 1 from transcript Si021974m (locus Si021974m .g) derived from phytozome v7.0 (chr-ID scaffold_3; pos 14 634854 to 14635509 reverse strand)
caagtgagttctttgctcaactctcgttgtgatctactagtactatgtttctcatggttgagttattactactttcgttaatctcgtagttgtcatatttgtggaagtagggctaacagatttaattgaagatttaaatgctgctcagctggatcagcagacacagcagccccggaatgttcctgatgaaattttctggataatcatgatctgtacctatggtccttcatatttattgcatgtttgattgatgattatatgctggtactatattctttgcctgctgttgagcatttgaagttgaagagctagttaggctccttgctgaatggtgcatcttgcagttaagtgagtgcccatgtgctatgtttgctctgcagttggctcccttctgaacatgtaatacagtttagcagggtttatctgaactattactgaacatcgcatgatctggtttcgacccaccaccacatgtgatgttttcctggatttattttacagaactgaaattgacaacctgaacattttaacttaagcagtatgtatgttacatgcatttaagtttcccccgtgtgctgttagattttgcttgcggttgttgatcatggattcttattgcagctggagtgcctttggagaatattctatatcttgga

SEQ ID NO: 112209 - DNA, 968 bp, Setaria italica
  Intron number 1 from transcript Si023064m (locus Si023064m .g) derived from phytozome v7.0 (chr-ID scaffold_3; pos 22 84971 to 2285938)
actacgtccaggagctcatcgacaaggcgcctcaggttggattgaattggattggcctctctactacccctcggttgctcacgagtcgcaacaacaaaatctttcctttggtcacctcgctatgcgaattgccgattggaacgctgaatccgagtcagcagcttgttgattaagcatggcgctgagtcctcgtaactgcatcattaggagatcaacagccgtaggagatagtcttggtaaaacagcgaattgcttattggaacctggaatttgatacagcagcttgctaattccactcgtcgaaaatttaactttgtgcatttttggtggttctgcactagtcacgtgggtatcaaagagtttttatctttacagttgtagcttgtgcagaagaataggtaatttggcatggctataatttgagttgctaaggtatcatttcggaatgcatttgaactatgcaatggaacatatatctttaggcatatccaaatatctatttctttttccttgtttgatcctggaaagtatttacaagctttgttggtattcaaatacatctttgctaatatggtggcaatactcacaatttgctgtgaaaatcaatcaccatttaagatgagatgatatatcagcaccagagggtataaaattcaggtatcttattggacatcatttggtcaatcacttccatatttttacatttttttattctacaacaatataggaccaaagatttagtcataattatccattagccactgagaagttgacaattgtttgttatctttggcggatttttgtaagtttcaatggttccagcgtctacagcttcaagttttcatggctcaggaattctcactccgcatgcttcctagtccttgcagtgaatggcacatgtaactgtctaaacaagtgctcttcttgttacagcttcctgaggatatcgagtggcacttcattgggaa

SEQ ID NO: 112210 - DNA, 574 bp, Setaria italica
  Intron number 2 from transcript Si011866m (locus Si011866m .g) derived from phytozome v7.0 (chr-ID scaffold_7; pos 17 288163 to 17288736 reverse strand)
ccaagcaacccaacattgagggagtacctgcactggtgagaacaacctcagaccatattgttcgcttgttttgcccacaagcattgcattatcatagtgctatatatgcagatgtgcttcccataatttcataaaagcatgtattagggtttcagtttctttcgtttatttctggatgaaaacaccaaattgacagagatattttaatctagatttctacaatattgtcgagtattttgagtgaccatggctatatccatgaaactagtaggaagacatgagataccctaaaatgaaaatatcagtctacaatagaatggctgcagcaaagcacaaaggcaaacctaacagtggatttgagtttgtattatttccttccctgctgaaaacagcagagttcatgaaatgtggcccaattttgaaacttatgtattacatgcacgtttcaagacaagacatgcaatataagttggtgatcggtggaaaattgtttgtttttttatcagattgttttattcattgtatgatcaaattataattaataactttcaacgaattcatgtttctgtgcagg

SEQ ID NO: 112211 - DNA, 991 bp, Setaria italica
  Intron number 1 from transcript Si009829m (locus Si009829m .g) derived from phytozome v7.0 (chr-ID scaffold_7; pos 31 479746 to 31480736 reverse strand)
cagctcgagttcaagcagcactacccggaggcagggtgagtgtgggcgggtttcctgttctctcggcaaatctcgggaaggggatcggttgagtagcgtgtttgctttaaggattgtggtgtgacctgtgcggattctggaccgttgattgacttggagggaattagggagttgctagttttaagatgtttagctttgcggttctaatgttttggtttatttgcttgaaggttcatcattaaattttaagatatttcttcttaatacaaagatgcgcagctctcttgttctcaaaaaaaataattaacttttaagacatgtgagagtgagactcacatgttacatgtcatatgtactttaataacttaattggcaaattagtggactatccaatgtacaactagggtcatgtagttctcttctgaacttatgagtagaaacttagatgattattgtcatgtttactctaagaaaacatattaccacaagttccaaaaggattcacgtgaggttgaacttttttctgctagatcaattcggcgacttatcaattggctccttttagtttcccttaattacccatgttattggaaaaacgtctaactaattgtctcactccaaaaatagtactatatttactatcatgctgaactttcaagactgctaattttctactctaagcttgaacatgttgttcatacctgtaattttggtagatttaaaggaatatcacatattttctttatttcactattgtttccatttctctgtggatttgtgaaagggagtaatatactatacctttcatcattcctttttatgctatttggtttgagccactgtagtctgtaatctggtgtcatcttttttttaaagcgatgtcaactatcataatgaatttcactttcttttgctgttgattaattttttatttagtcatgatctctgatattgttctatttattattgtgaactacaaggtgggttgagc

SEQ ID NO: 112212 - DNA, 1029 bp, Setaria italica
  Intron number 2 from transcript Si013721m (locus Si013719m .g) derived from phytozome v7.0 (chr-ID scaffold_6; pos 29 693385 to 29694413)
cgggcggctgcggcggaggcctgattcggcggccggtgagtccaccctctcgcgcaaccgttcctttgcgctcaggaaatttcctgcgtcgtttatttttcgcccgccttttccagggattagatcgaagggaaagggacgtgtagtttccaatattcatggggttggatatggtagcgcaattctcgctttcttacttcccttcccccgttggatttggtttgggtgcgatcccgtttagcggcagattatgagttcgttttctacacaggctgcaagcattcaagcgccggctgctgtgttctaaattaggttttgttttcatttgattgccgcatttactcctaggattttgaggtggcattggcaaaggcaagtttgtttgatttgcattgcccaaggttaagatggaagggagtgcttactaagttaatgattttctgtggtgatgctgcatttattacttgtctagattttgtgctcctagcgattttggagcatttatagtagcgtgctaaattggatgatttgatctgcaatcacaacctcaaaatgtgtgttatcttctttcattggaccaaattgttaacctattgttccaggatgttacatggtatgcgcttttggtcgaacttttaggatattggtaaagcatcaaagcttctgcatcttaaattgaaagtgaactagattgctggtaaagcactttgtgacttgtgagcgagcatatggtgggaagggtcactgcttgacaaaaggtcacagaaaatggcctgtccccataaagtttgtgttgcaacatgatttcactagttagttggcatgtgccaaggcaggcttgatcctgtttattgttggcagccgaaaattcagtaaattgtcaaaaggaaatgcattgaattgtatatctttcttacgtagctggcagctaaacatttcttttggaaatgttgcattatgtgctagaatatgcatctaacattaccttttctgaaacaggttcactgacaacattttcttactttttat

SEQ ID NO: 112213 - DNA, 642 bp, Setaria italica
  Intron number 1 from transcript Si011723m (locus Si011723m .g) derived from phytozome v7.0 (chr-ID scaffold_7; pos 34 324017 to 34324658 reverse strand)
gccaaggcgcgccccttctggcactccgcccacaggtaggtgattcgttgcttccgtcgctagctgaaaattgattgcgttactacggattcttaataacatccccattgcaaattcacgatcttgctctaaatcctaattcccgaaaagaaacgcatatataccatttcttgttaggtagacaaaaacatatctactgtgttcctttcttttagatcaagcaatgcaatccaaatccactcaaacaccatacgttatatcttgcaaagcgatctcggaaatctgaatcacatgtttcttttgttttcaagttcaaagattgcatagccctctggcaaaatgcaacgcatgcaagttcaaactaaagcttccaaacaaacaaaatgcttttgtttcctctgttatggcttttgccccccaagttgttttcttcatgctttgtaataatacatgttacaggcttgcacctgtaatttgctaccacataggacaacagctgcaacataaaataaatatactacagcatcagtagtatctcccctggttattttttctaggcccaccagttttgaccaagcaaaagaactttgctgctaccaatgacactaacgatgttccctctgtctgtggcagattctcagc

SEQ ID NO: 112214 - DNA, 848 bp, Setaria italica
  Intron number 2 from transcript Si010106m (locus Si010106m .g) derived from phytozome v7.0 (chr-ID scaffold_7; pos 16 787607 to 16788454)
ccgacgccgccggattgcggccagtcgtctggaaggtccggaaatcccccttatgctcttctctgttcactgtataactgcctgttctatcactctcgcagccgtatgctagagaaatggcattgcatatgttgcggatcctgttgatggccctgtactagtaggttgtcgatgttgattctagaatggtcttgcatgctttgactcagctcagtccgtactggatagtctggcaatttttctctgttactcttttgaaggttcatgttgtacatgaatgccaattacagacacggggcaccccaccctattttctatgcttagcattactgaagaaatgatctgcaccctggtttggagcaagttacatgcatttttttcctctgaggtacagtcaacacctgatgaaggatagagtagaaactaaaactataacaggatacttttagcacctaagtgatactgagaatataacatattccttctgtgtctatgatgtctatttgaacccaatgttctcaggattatcgacattattctgaaatagatgagaatccagagttgcttgttagtttggcattatattccattgcatgtattagttcggattggtgccattatggctttgacttctgtgatgcatatcttctgtatgtgattggattcaaacttaaaagaaattgcaaacagcatttagctaaactagatatcaatgtacaatttttctggcctggtagggtggtggctagttatggcctttacaaattttcttattgctctgtacactacaaatttatttgacttttttgatagttagcagcttctcttgggatacttgcccactgatc

SEQ ID NO: 112215 - DNA, 1012 bp, Setaria italica
  Intron number 2 from transcript Si023689m (locus Si023689m .g) derived from phytozome v7.0 (chr-ID scaffold_3; pos 30 97545 to 3098556)
cgtcgcgccgacgccgacggggaagccttctgcaggttagctttgtctggcaccctggctcgcacttgtgctggaattaggaagcgtcagcatgatatgctttacttgtagtcaccgtttgcagcgtactgcccagtgcccctgatgaatttttggtggttattacttttctttttgcctcaattctacgcttttcgagctaatcaaatgattggaatagcctgcagttttgtgtccaatggcaggatcattcagctacttgaatctacattgcatactcctatccatcatataatgtcccaaaaatttctgtgatcttggagaaatcttgcactgacctctaggaccaacctcggtgaaatgttctcttccacgttgcaacaatgaaaaatgtatccatggacccttcctaaattctaaacatcttaccaagacggtgtttgttgaatgtgttgtgttgttcaaatgatagggtacccgacaaatcgtgcagtatcagcaaagtgattgtttatttttctcatataaataattggtttacagcagttgcattgtttaatactcctaattagtgtccaaacatccgatgtgacaggtgctaaaatttagcacctgctatccaaacaggtgctgcaggaactcatatgccaaacattgctaaaaataccaattcactgcctaccaatgccctcctaagagcaacgttctgcaggaactcatatgccattcggcaattcaggcgcactacattttttcgcggtgtattcaggtgcaatgtttggagttgaagtagagagaaaagtcatctgcagtgagaatacatgctatttagttcagttattcatgtagagatcctgagaacttcaggttcaaaagtttctgaacctttgtctactgctatatttgtgtatccttatcatgttgttgacgacttggcagttggcatcatcctaaaccagcttccgatcacatttcaggtgcctacaaacggagtcgaagtagagagtaaagg

SEQ ID NO: 112216 - DNA, 811 bp, Setaria italica
  Intron number 1 from transcript Si011006m (locus Si011006m .g) derived from phytozome v7.0 (chr-ID scaffold_7; pos 38 95953 to 3896763)
cttgacgacgacgtttatatccaagtattgcatctcttcacttattaatcatatcatttcacctgatcttacttttgttttgaatttcatcgcttatagctacattttcttttgaaaaccatataacaattctttgttatgtattgaaccacaaatctttaattatttcacgatatccaatcaattatgtgacatgatcatgcttagttgaaaagcaaggtgaagttgaagtatgctgacataccaaaaaccgggtatcttcaagcttctaatgccattcctgatttactagtatgtattgctcatgcatttttttttagtccaatatgttgtgcggcctccggtcaatttctgccattcaacttaggatatgctttggatccatgttacaagtttatggatatatcttatatattgaatatgtagtgttattgtaaccgaaacaaattggatcgtatgggttgtgggcatccaaagaggtcactgttgcattctccaaatttgcttagtttgttattgattgccaaaaattccatcatcatattggtgatatgaatgaatgataaattactataaaatagttataagttgttggcaatacctccagtgtatagatcggcacgaattttatattgttttatgtaatatgaggatgtttcctagaataacgaacacttgatatcctgggcgtgctgagatctttaattcttcactagtctcctaactataaaattattttctctgcgggacctgtttgggcttcattgtgttcatctgatcggtacacatttggatttccctccttccagtt

SEQ ID NO: 112217 - DNA, 952 bp, Setaria italica
  Intron number 2 from transcript Si010697m (locus Si010697m .g) derived from phytozome v7.0 (chr-ID scaffold_7; pos 34 067854 to 34068805 reverse strand)
ttataataacactcttgccaccctcaaattcgcaggttatcttcacgcgtatcttcttcaactactttttcaatctaatttgcttggtggttatgttagtttgcgaagcacagctcgataactcaaagtaatttaagttccagagacatatagatatattttggtttcaagaacataaagaatgattctgtgactatggacctgtatcggatagagaaatggggtagcttggaagtagtaacacataatctttaataggttaattttagacctggttaaattttggttgattcaatgaagtagatctgggaaataattaagaactttggttgatttggcaagatagaaggtagcatatctttttaaaagttggtgcatatatttacgaactttcgaatttgtggagtacaaaatgaacacatggtacatcaagcatattgtttttgataggtcctgatttttttcaaaccaaaggctcagcctgattaggggctgctaattgcaatcctcttcttgcttccctggtttgccaaatattctctttttaatccttttttccataaactcataagttgcagctgcttccactgcatccttcttgtactgcaaaatatcatgaattcttctccttttttttcatattttaagcgcttcaccttctgacattttagagttgcttgtcgagacagctcctgtttttctgtggcatactgacatattgcatgaattcaacctttagactggccaaatcttgaatctgtctaggtatgtgatgcttattattgtaggactgtccagttgtagagtaggttggatatgttaatgtccatgggccctggaaaagttgaagtgtagttgtgctattaacacattgactgataactaatgtggcctattggtcttgtctttgtgaacagattcaaagaccttgaaggaggaacaaagggaggag

SEQ ID NO: 112218 - DNA, 998 bp, Setaria italica
  Intron number 1 from transcript Si010369m (locus Si010303m .g) derived from phytozome v7.0 (chr-ID scaffold_7; pos 31 453372 to 31454369 reverse strand)
tgctcatctgggtcatctccgcggaggtcacgcaggtacggatttttttcccccaaagcgtgctctgttgtttgcgtatctatctatttatttatttgtttggagattctcagatcttggtttcatggtttgggatgcatgcttgcttatcagattggttggtttggtttggtttggggttaattgctctctgcttatcagattaattttattgggccgacctggggtattgctctgtatcttctcaatttttaagcgttacgcgcaggcttggctacaatagaaaattgcttagcggaatgttcatcaggcgtcagtttttttaaaaaagaaaagtccattcttttgctctctaaatttgaaggcagttctccgaaaattgcatatacgctcatatggatatccgtaaaagttgccaagaatgctttggttgttttcttcatactattagttatgtcaaatcctaatatagttgtggttgtgacagttcgtgacaccaatttatggctgattggtggtggttgtgatatgcttgatcacctacagtgcatgattgaattagaggaggggcctaatatagttgtgcatgattggtggtggtggtggctgtgatatgcttgatcacctacagctctgattgaattaagttattagtttttttttgtttcgtgttgatgttgttttaaagttacattgtcagagtaacaattggttacttgcatttaggtcaagaacatctcgtagaacctatttgctttcaccatattagctgctgttactactacttctaaaaaaggagataccaatggcagaattaggaggtaccagtagaatttccgttacctccatcatcaccaaaaaaaaatcaacttctagttcttggattctttttttttttgtctttctagagttcatctcgcaaaatatactaatttttgttttgtaactaaatttcttctgcaggggatattcacaaagtacaaacatccgtttgcaat

SEQ ID NO: 112219 - DNA, 769 bp, Setaria italica
  Intron number 3 from transcript Si010951m (locus Si010909m .g) derived from phytozome v7.0 (chr-ID scaffold_7; pos 31 249239 to 31250007 reverse strand)
ctttggaaactgcagtattgctcagtgtaagttttgtctttttttgacaacaacgttctccacataaattaaatggaccattttattggcatgtatgattcctatcttgctgtgtctgtttcctatgaccgcttcgtgttgtctcagttgatttactgagaaattgactttcctataacacaagaaagttcttaaatctttctttagtgtgtacaccattcagacgaaattttctttcagattaagtttctccaaaattttgtttatactgaagatccctaaagcttgatgtactcaaacaatgtcaccttgctgtcctattcacctttatccaactatctcaattctcaaatggacaccaactgcaaaagaaatgtcatgcctgggttcatagggttgggggaggtccttaaaactgtaaaatgttaccagttaaataaatgtgcagtgtcagtcttctaagcatttcaagattgtgtaaatctttgggtaccaattaaataaatgtgcagtgtcagtcttctaagcatttcaagattgtgtaaatctttgggtagtaagccccattatttcagtttgatataatccagtttctgcttcacttttgagtgacctggcaactggccatatggccatatgcttctttgcggaccacttttatcaatgctttgtcgacatgtctcttggtagcaagtaatttattttttgttgtgcccttgtcaatacttcactatcttcgacagggggctactattgtggatcagccggt

SEQ ID NO: 112220 - DNA, 617 bp, Setaria italica
  Intron number 1 from transcript Si011085m (locus Si011085m .g) derived from phytozome v7.0 (chr-ID scaffold_7; pos 13 425351 to 13425967)
gcaggttcatgtgaacatatggctccatagcagctgtgtttggaaaacaaaagtgtggctgcggattactgtgccatgtgtggtatggtagcagtagtgcctacatagctgtcggttggcctccctggcttggtcgtagcagagacaagaaggatggcatggtggctgctacagcctcaaaacagttgctgtcgtatgatagtgcaatgatattggtggccacaggtggtagcatatgcaatgtttgagttcatgcacttagggcgcgtttagttccgggctccccttgcctcgctggcgcaagcagcgaggaacttgcccgggcaggcaagctgatttggctctctcatgggttctggtccttgcatgcttgcagaagaaacattaatgatgcttttgaagttacacgtataatgcttcatggaaaccttaaacttaatatcctgtttcaatggttcagttcttgttaaattgatagagtaattttagatgtagctatgaattacgtatgttgctgagttcttgtgtatttttttcagggttttgtgctacagcatcaagttatactcttctgcatcggagaaactttcacagaccagcctcctatttaccctcca

SEQ ID NO: 112221 - DNA, 856 bp, Setaria italica
  Intron number 3 from transcript Si022083m (locus Si022083m .g) derived from phytozome v7.0 (chr-ID scaffold_3; pos 25 8570 to 259425 reverse strand)
actaacgtaccgtctctacttgtgccttagctctggtaagtgtcaagcttttgtcttcgcattagaaaatcaaagtcaatagttttttgtttgtttcttgagactcctgtttgtaccttcaattttttattttgtgcttgaaggtgaaccatgggtcattttcagtatgttggaaaaaaaatttcctctattttttgtctgacctgaaccgtaaaatcaggacgtgattagaaccttttgtgaactagtacggcactactttttattacaacttcatgtaagggggaaaagaatgtgtggtgcaaaatttcaaattcaagtacagaccgaagcatctaaattagtggttcgacagttttccaaaaataaatcaatagtagtttaatagaattagacttctgtcactttctacattagtcatgttgggactattgctcttgtgccttccacacctccgcttagggattcaaaatgatgtggttcatgtgatgtgaacatagtttggtttcggatgaccaacttgtcatgcttcaccgcttaaatggtgctgtttcatcttggccaaactccctggattaactattcatgcatatcttttccgttccaccatataatagtaatacactgtgcctgtgattggtccttgttttctttcagctaaaagttatgctgctccagtcaattacatgaaaactgatttataggttttacttgaggttgcctgtacctgccttcattctcaatgacagtgtaaaaaacatatttggcggaaagattctaagttacattaaaatcctatattaagaacaaaatagaatggcttgatcatttctgcttgatcttgtagctgtgcttg

SEQ ID NO: 112222 - DNA, 992 bp, Setaria italica
  Intron number 1 from transcript Si022083m (locus Si022083m .g) derived from phytozome v7.0 (chr-ID scaffold_3; pos 26 0102 to 261093 reverse strand)
tgctgccattggccgttcgattttgcgtgtcggtggtaagaaaactctctcatatcacgcccttcgctaagtcttcaatgtttattacttctaaattatcaagtgcccgcaggaaaggctggacgaattccagttcttaggccctacggtgctgatttgctggattgacgctttgtttcgtaatgttgcgtttctttgcttcatttggccaaagctgtctcctttgcagtctgaggagtactatgtaggcagacatttttattcttattattcaccgttcctcagactgcaacaaagccctcccttgtctgccttaaatatatactacatactaacacgaggcctatataacatagtactggttaatccgcagcttgcaaattaaggcttggaaccaaataaaaaaggttaattttgctgactgcgtggttgttttctataactagatctaataaaagtgttctgttggcctttccccatcggagaggttgtgccctcaaatcccaatggtgatctttgtatgaagtacacgacaagaacaattaattatatgatagtccaacggccctaggcaaacctctagattattcaagttggtatggaatactctagagtgaggcatcacatgattgttggtgacgcactccaatttcactgaattatcattgaatctaagggcaggatatgtaatacatgccaatatttatgaaggtggtggctttgactttttgattgcctctgctcgtccccaccatatatccttttttgccattttctgatacattaagaaatttcaccccgaataggaacaggacgtaagagaacttataacctatctcttgtgctgtataatgttcacagcactacttgtgtgcttattttaggagattgtgatactcatgctacttgtgagtttcagcttgcgcgtttctatttgtgggcattgagtgggtgttgcctcttgttatttcagacgtgcacctaacctggag

SEQ ID NO: 112223 - DNA, 463 bp, Setaria italica
  Intron number 2 from transcript Si010268m (locus Si009743m .g) derived from phytozome v7.0 (chr-ID scaffold_7; pos 94 53114 to 9453576 reverse strand)
cgagcgcggctccaacctcgtagtcatcaacccaggtgcgcccctgcccaaaccctagtgctcgcacgtgttaattaattattatcactacttttctcggcctatttttctttttcttaaacggtttgcttcttcgtagttttattttgattcacgccttctgggatccaatgtgctcagaaattgtgaacctcaggttattgataaatgataattcaaaatgggaattttgccatgccttctcctttatttggttgaatcgaatgctgaagtgcagcttttaagagaagtgcattacttgacttgtaacttaccctgatgagtgctgacagtgagatgctgcagttattcatgactggaagaaatttctagcaaaacagtatgtttttcctacatgatgtaattcatggttgctagtcatttaagcaagtgcacatcatttgtaggatctgcaaacgtgcgc

SEQ ID NO: 112224 - DNA, 863 bp, Setaria italica
  Intron number 1 from transcript Si009616m (locus Si009616m .g) derived from phytozome v7.0 (chr-ID scaffold_7; pos 23 886430 to 23887292 reverse strand)
ccacaaggcgctccgcttcttcaacgcccagaaatgtgagtgctactgctctgctactttcgtcgatcttcctctgctttacttttgtgctacgatgggttcttgaaagaaaaacaaaaaaactgaattttgggtactctgcaactgatgcatcttcgtcgaagttacttgctgatctgctggaaccagtgtggatctgccatttttgctagtttgctacaacctgagactctgcgtatcaaatttgcttgaacgtatgagtagaaaaattgctgcctttaattagccgtgtttgatcggtcattatcttaagctcctgcgctgttagatgttgatgatccaaagccggagagcgattgcaacccctagctagcacgctcaacagctgagtacagctgcaaccccactagtggaatgttctgtcctgtttccccgtcactacaccttttgcagaaagtgacggtctgaatccgatgtgggggagaaaacgcccaaatcccaattgctcccggctggaatctctgcacgttcactcacatgtagggcaccaagttgatccattctttaacatggcgcagaaaatttcgtctttatgatctggatcaaatgtgcgtacagatcttggtgaataattagccaggatatctttccgaataatttgtactctgtacctgtagatcttttatgctagtattctccaaactgttcaaattgcagtacagtctttcctactgctgtgaattctttaacatacagatcaagaaatgtggagaaatggatgctgttgaatacatctaacaacattttgatccctcttcttcctgacagccggccggcttccgaagaacaacggcgtcccgtgg

SEQ ID NO: 112225 - DNA, 960 bp, Setaria italica
  Intron number 2 from transcript Si022900m (locus Si022900m .g) derived from phytozome v7.0 (chr-ID scaffold_3; pos 44 425576 to 44426535)
gtccaggaacaccggctacaacccggcagtcatcagtgagtcatctaaaccatcgctgaattgccgttccctttcggggcgtaccttggaggcttggagggggatttgcaagcggcttgttgttggcaccacggcgtctcatggctgatatgctggtgaggatcgttgccttagggtttgtggaggaattaaattgtcttagctggcgtcctgcgtttgtgacgcagaaatctagcttctttcgcttggagcactcacgctcaccaagcgtctgatggagttcacgacgaaattgcattactaccctgaggtttggatggagctgtgaatgattcttggtgtctagccgaccgcacaatctccgcctttggaagtagtatcatgatacgggatctagtttcatgtactcgaccatcccaattgaatctaaatccatgctctgagtctttaaattgcaaaaagaatcagggtctccgagaatgtatctttaaagatgttgtatgtctggtacgataacagcgcacctggagtctttgttctcaggccctgttgtttttcgtttttgttcacaatagaaatgaaaagtttgagtttgccaatgtgcctggttatagtttttttgcatcgatctgttccccagacccaccattgtcccttggtaccttggcatgctaattcttctattgagaattgatttccattcggtgcttacttgttgtgcagagtctaatagtgcagagcatgtagcctgcttaagcatgctggacttcctctatttggatgcttaacagaggagtggtggttatgggtagatatgacatgtaataaattgatatacttatttgcaaaagtttttgtcaaattattttgaatgtctgctggtattttgtaatttaattccagacatattgatgagatcattgctctgatatgcagagaagcagaaagagttctacaaaa

SEQ ID NO: 112226 - DNA, 973 bp, Setaria italica
  Intron number 3 from transcript Si014038m (locus Si013901m .g) derived from phytozome v7.0 (chr-ID scaffold_6; pos 30 183744 to 30184716 reverse strand)
cacttgcagtgtttggggtaagtgcagaatctgcagctgttagaagattttgctaaatcgaggtagcagatccatatgtctgcaatctagtactcaattctgtgttatttggcttctctcttcttcctaacaaacgctcagagttacctagccaatctacattacaattgttcctgttacattcatagcttcagattaatttacattttctgaggtaggcttcaacaattacaaactaatatacagtcatagcattcaccgaaagtcacaaacatgaattatctgttatctgactttgtttcatgccttgacagttggctctacatttgaaatcaccgaaagtaaagaaacatgaactatctgttatagtacgaatttgtttcatgtgtggacaattggctctacatttgaaatgttgcctgtaaaattctgtccatggtgggtgttaaatagtttagaaaacttagcttgtattgaattccattctgagttctttctactcagatcagtagaagaaaacagtgccacacaagtagaaaaacacggatttgtgtcgtctgtttatggcacattttgattacataaattcagatgttgtaacagatctgtgatgattgtacttgtattaaatgcaaatggttgatatgtcctctgcccttgttttgtaaacatccttttctggtggaatatgtatatcagcatgttttgcaagtaactgaaagtagaatgctgtgtgaacgtgcccctttttgatatttgaagaagtttatattcagaggaatcaaccataagatggcaccccttaattttgagattatttagcttatttatgatgttgtctcgtgccaatagtgtttgttgaaatttcagtttatcactaattttttcagtttttctactttgctcagaatcagcaatgttacagcttatttgcttttcttgtttgatttcaatgtttctgcaggcaggagca
